United States Patent Application Publication US 2005/0228172 A9 - sequence listing, part 84

SEQ ID NO: 377209 - DNA, 572 bp, Homo sapiens
aattattactttgatggttgccagatgattattttcttattgtcttctttgttctacatggagaaataaaaccaataaataagggagaaggaaagctcttgattctgatgcttcaattccccaagattaggccagtagtagacattccaagctgactttatgtctctttgatttgtctccrttactctgtcagcacttttttaatttctggcagaagatgttctaagctcatcttgtattttctctgccccagatctggaatgagtaattttttttagaagcagaggtggagccaatgaggaagcataggtgagccctccccagtgtgtactcactggtccccaacagaagaaccgctgccacatccactgaggtaccaggaaactagcaaatggccttctggctgtctggagagagtcctcatgtggtccctggctgagcctcagaggttctggattagtcttcctgtagcctctgtgttgtgtctttagatcggggctatatgggaagggccctgggagacccaacagcacagtgtgtctcatctgccaaacgtccctcccttcctcaca

SEQ ID NO: 377210 - DNA, 572 bp, Homo sapiens
aattattactttgatggttgccagatgattattttcttattgtcttctttgttctacatggagaaataaaaccaataaataagggagaaggaaagctcttgattctgatgcttcaattccccaagattaggccagtagtagacattccaagctgactttatgtctctttgatttgtctccattactctgtcagcacttttttaatttctggcagaagatgttctaagctcatcttgtattttctctgccccagmtctggaatgagtaattttttttagaagcagaggtggagccaatgaggaagcataggtgagccctccccagtgtgtactcactggtccccaacagaagaaccgctgccacatccactgaggtaccaggaaactagcaaatggccttctggctgtctggagagagtcctcatgtggtccctggctgagcctcagaggttctggattagtcttcctgtagcctctgtgttgtgtctttagatcggggctatatgggaagggccctgggagacccaacagcacagtgtgtctcatctgccaaacgtccctcccttcctcaca

SEQ ID NO: 377211 - DNA, 572 bp, Homo sapiens
aattattactttgatggttgccagatgattattttcttattgtcttctttgttctacatggagaaataaaaccaataaataagggagaaggaaagctcttgattctgatgcttcaattccccaagattaggccagtagtagacattccaagctgactttatgtctctttgatttgtctccattactctgtcagcacttttttaatttctggcagaagatgttctaagctcatcttgtattttctctgccccagatctggaatgagtaattttttttagaagcagaggtggagccaatgaggaagcayaggtgagccctccccagtgtgtactcactggtccccaacagaagaaccgctgccacatccactgaggtaccaggaaactagcaaatggccttctggctgtctggagagagtcctcatgtggtccctggctgagcctcagaggttctggattagtcttcctgtagcctctgtgttgtgtctttagatcggggctatatgggaagggccctgggagacccaacagcacagtgtgtctcatctgccaaacgtccctcccttcctcaca

SEQ ID NO: 377212 - DNA, 572 bp, Homo sapiens
aattattactttgatggttgccagatgattattttcttattgtcttctttgttctacatggagaaataaaaccaataaataagggagaaggaaagctcttgattctgatgcttcaattccccaagattaggccagtagtagacattccaagctgactttatgtctctttgatttgtctccattactctgtcagcacttttttaatttctggcagaagatgttctaagctcatcttgtattttctctgccccagatctggaatgagtaattttttttagaagcagaggtggagccaatgaggaagcataggtgagccctccccagtgtgtactcactggtccccaacagaagaaccgctgccacatccactgaggtaccaggaaactagcaaakggccttctggctgtctggagagagtcctcatgtggtccctggctgagcctcagaggttctggattagtcttcctgtagcctctgtgttgtgtctttagatcggggctatatgggaagggccctgggagacccaacagcacagtgtgtctcatctgccaaacgtccctcccttcctcaca

SEQ ID NO: 377213 - DNA, 675 bp, Homo sapiens
agaatggtattatttttaatatcacagagggtgcacaccccccttgtgatactgctcctaacatccaaggggtagaggatgaaattactcccaatatcacagtgggtatacaccccccgtggtattgttcctaatatccagggggtataggatgatagtactataaatatcgcaaggggtgtacaccccttctgatattgttactaatatccgtggggggagtcgatgatattacttccaatatcacagggcatgtacaccccccttgtgatattgttcctaatatcctgggaggagactacgatattactggcaatatcgcagggtgtgtgcattcccgtgatattgttcctaatgtccagcaakggagaaaatattactcccaatatggtgggggtgtacacttcccatgcgatatcgttcctaatatccatgggggaaaaggatgatattactctaaatgtcgcaggaggtgtaaaccgcccctgtgatattgttctcaatatccatggggggagagaatgatattactcccaatatcacaggtggtgtaaacccctcctgttatattattcctaatatccaggttgggagagaataatattacaggtaaaatagcagggggtgtacactccgcctgtgatattgttcctaatatctcggggaagagtggac

SEQ ID NO: 377214 - DNA, 350 bp, Homo sapiens
gacattgtaatgagactttgagccccgttgctcatgggcctggtcagtggaccatggtcagagatgacctggtcatcaggacctagtcatttgggacctgatcagcaggggcctggttagtggcggcctcctcagtaaagtcctcatcagtggggacctggtgacctaatcattggaagcctggtcagtggggggacctastcagtggtggccttattagtggggcctgatcagttggaacataaacaatgaaaaactggttggtgaggcatatacagtataccagaggcctggtcagtgtggggccttagtggcttggagcctggtcaatgagggtctggtcagagggg

SEQ ID NO: 377215 - DNA, 675 bp, Homo sapiens
agaatggtattatttttaatatcacagagggtgcacaccccccttgtgatactgctcctaacatccaaggggtagaggatgaaattactcccaatatcacagtgggtatacaccccccgtggtattgttcctaatatccagggggtataggatgatagtactataaatatcgcaaggggtgtacaccccttctgatattgttactaatatccgtggggggagtcgatgatattacttccaatatcacagggcatgtacaccccccttgtgatattgttcctaatatcctgggaggagactacgatattactggcaatatcgcagggtgtgtgcattcccgtgatattgttcctaatgtccagcaagggagaaaatattactcccaatatggtgggggtgtacacttcccatgcgatatcrttcctaatatccatgggggaaaaggatgatattactctaaatgtcgcaggaggtgtaaaccgcccctgtgatattgttctcaatatccatggggggagagaatgatattactcccaatatcacaggtggtgtaaacccctcctgttatattattcctaatatccaggttgggagagaataatattacaggtaaaatagcagggggtgtacactccgcctgtgatattgttcctaatatctcggggaagagtggac

SEQ ID NO: 377216 - DNA, 546 bp, Homo sapiens
gtgtacaccccctttgtgatattgttcctaatatccatagggggagagggtgataccactcccaatartgcagaaaagtacagccccgctgtgatatcattcctaatatccagaggggacaggatgatattactcccaatatcacagagggcatacaccccctccccatgatattgttcataatacccagggggtagaggatgatattactcccaatatcgcagtgggtgtacaaccaccctgtgatattgttcctaatatccatgtggaaagggtataaagttactcccaatatcacagggggttgtacaacccccttgtgatattgttccttatattcgggggagagacaatgatatagctgtccatattgcaggtggtgtacaaccccctgggaatttgttcctaatattcagtggggaagatgatattaattaaaatatcacagggggtatacaacccctttgtgatattattcctaatatccagggaaagaaagaatattattcccaatatcgcaggggatgtacacccctctctgatact

SEQ ID NO: 377217 - DNA, 546 bp, Homo sapiens
gtgtacaccccctttgtgatattgttcctaatatccatagggggagagggtgataccactcccaatagtgcagaaaagtacagccccgctgtgatatcattcctaatatccagaggggacaggatgatattactcccaatatcacagagggcatacacyccctccccatgatattgttcataatacccagggggtagaggatgatattactcccaatatcgcagtgggtgtacaaccaccctgtgatattgttcctaatatccatgtggaaagggtataaagttactcccaatatcacagggggttgtacaacccccttgtgatattgttccttatattcgggggagagacaatgatatagctgtccatattgcaggtggtgtacaaccccctgggaatttgttcctaatattcagtggggaagatgatattaattaaaatatcacagggggtatacaacccctttgtgatattattcctaatatccagggaaagaaagaatattattcccaatatcgcaggggatgtacacccctctctgatact

SEQ ID NO: 377218 - DNA, 546 bp, Homo sapiens
gtgtacaccccctttgtgatattgttcctaatatccatagggggagagggtgataccactcccaatagtgcagaaaagtacagccccgctgtgatatcattcctaatatccagaggggacaggatgatattactcccaatatcacagagggcatacaccccctccccatgatattgttcataatacccaggggrtagaggatgatattactcccaatatcgcagtgggtgtacaaccaccctgtgatattgttcctaatatccatgtggaaagggtataaagttactcccaatatcacagggggttgtacaacccccttgtgatattgttccttatattcgggggagagacaatgatatagctgtccatattgcaggtggtgtacaaccccctgggaatttgttcctaatattcagtggggaagatgatattaattaaaatatcacagggggtatacaacccctttgtgatattattcctaatatccagggaaagaaagaatattattcccaatatcgcaggggatgtacacccctctctgatact

SEQ ID NO: 377219 - DNA, 452 bp, Homo sapiens
gtgggggctcaaagcctatattttccttctgtgctgccatagtggaagtttcataagaggttctgcctctgcaggaggcttctgcctggaagcaktggacagtggtgtggttggagaatccttcaccattggttagtcttcttgatgctgatctcctgatagtgagttctcatgtgatctggttgtctaacaggatgtcacacctctttcccctctctgtcttgctcctactcctgccatatgaaacatctcattgcctcttggtcttctgatatggttaggaggggcctgatcagtgtgggcctgctcagtggacctagtcagttgcgacttgtcagtgaggcctatttagtggggggtggtcagcaggggtctgcttagagcgggtctcattagagggatctagtagtgcatgtcttggtgagtgggttgatagtggtagacaaatgttt

SEQ ID NO: 377220 - DNA, 452 bp, Homo sapiens
gtgggggctcaaagcctatattttccttctgtgctgccatagtggaagtttcataagaggttctgcctctgcaggaggcttctgcctggaagcagtggrcagtggtgtggttggagaatccttcaccattggttagtcttcttgatgctgatctcctgatagtgagttctcatgtgatctggttgtctaacaggatgtcacacctctttcccctctctgtcttgctcctactcctgccatatgaaacatctcattgcctcttggtcttctgatatggttaggaggggcctgatcagtgtgggcctgctcagtggacctagtcagttgcgacttgtcagtgaggcctatttagtggggggtggtcagcaggggtctgcttagagcgggtctcattagagggatctagtagtgcatgtcttggtgagtgggttgatagtggtagacaaatgttt

SEQ ID NO: 377221 - DNA, 452 bp, Homo sapiens
gtgggggctcaaagcctatattttccttctgtgctgccatagtggaagtttcataagaggttctgcctctgcaggaggcttctgcctggaagcagtggacagtggtgtggttggagaatccttcaccattggttagtcttcttgatgctgatctcctgatagtgagttctcatgtgatctggttgtctaacaggatgtcacacctctttcccctctctgtcttgctcctactcctgccatatgaaacatctcattgcctcttggtcttctgatatggttaggaggggcctgatcagtgtgggcctgctcagtggacctagtcagttgsgacttgtcagtgaggcctatttagtggggggtggtcagcaggggtctgcttagagcgggtctcattagagggatctagtagtgcatgtcttggtgagtgggttgatagtggtagacaaatgttt

SEQ ID NO: 377222 - DNA, 452 bp, Homo sapiens
gtgggggctcaaagcctatattttccttctgtgctgccatagtggaagtttcataagaggttctgcctctgcaggaggcttctgcctggaagcagtggacagtggtgtggttggagaatccttcaccattggttagtcttcttgatgctgatctcctgatagtgagttctcatgtgatctggttgtctaacaggatgtcacacctctttcccctctctgtcttgctcctactcctgccatatgaaacatctcattgcctcttggtcttctgatatggttaggaggggcctgatcagtgtgggcctgctcagtggacctagtcagttgcgacttgtcagtgaggcctatttagtggggggtggtcagcaggggtctgcttagagygggtctcattagagggatctagtagtgcatgtcttggtgagtgggttgatagtggtagacaaatgttt

SEQ ID NO: 377223 - DNA, 546 bp, Homo sapiens
gtgtacaccccctttgtgatattgttcctaatatccatagggggagagggtgataccactcccaatagtgcagaaaagtacagccccgctgtgatatcattcctaatatccagaggggacaggatgatattactcccaatatcacagagggcatacaccccctccccatgatattgttcataatacccagggggtagaggatgatattactcccaatatcgcagtgggtgtacaaccaccctgtgatattgttcctaatatccatgtggaaagggtataaagttactcccaatatcacagggggttgtacaacccccttgtgatattgttccttatattcgggggagagacaatgatatagctgtccatattgcaggtggtgtacaaccccctgggaatttgttcctaatattcagtggggaagatgatattaattaaaatrtcacagggggtatacaacccctttgtgatattattcctaatatccagggaaagaaagaatattattcccaatatcgcaggggatgtacacccctctctgatact

SEQ ID NO: 377224 - DNA, 530 bp, Homo sapiens
  misc_feature (1)...(530): n = A,T,C or G
nnnnnnnnnnnntatgactttcttggtcagatcaattaagaataaatacataggtttttatgtaaaacaattctttctttaatgctctttttaaaaaaatgttgatccaggtttcagttacatatcttttgtttccctaaagaatttcatttaamatttcttgcaagacaggtctcctggcaacaagtttcttgaatttttatttttctgaggaaggccttaattctccttcacttttgaagggtgatttcagtgggtacagaaacttaggttggtgggtttttttctgtcaacattttgaatttttcatttcactgtcttcttgctttcacagtttctgcaatgttgaatgcagttcttatctttgtgtctctgtaggtaaggtgttttctgccccacctctggtttctttcagagttttcctttatcttttatttcatagagtttgaaaattatatgtccaagtgtaggttgttggcatttattctgcctggtgttctcggagcttcctggatctttggtttggtgtc

SEQ ID NO: 377225 - DNA, 530 bp, Homo sapiens
  misc_feature (1)...(530): n = A,T,C or G
nnnnnnnnnnnntatgactttcttggtcagatcaattaagaataaatacataggtttttatgtaaaacaattctttctttaatgctctttttaaaaaaatgttgatccaggtttcagttacatatcttttgtttccctaaagaatttcatttaacatttcttgcaagacaggtctcctggcaacaagtttcttgaatttttatttttctgaggaaggccttaattctccttcacttttgaagggtgwtttcagtgggtacagaaacttaggttggtgggtttttttctgtcaacattttgaatttttcatttcactgtcttcttgctttcacagtttctgcaatgttgaatgcagttcttatctttgtgtctctgtaggtaaggtgttttctgccccacctctggtttctttcagagttttcctttatcttttatttcatagagtttgaaaattatatgtccaagtgtaggttgttggcatttattctgcctggtgttctcggagcttcctggatctttggtttggtgtc

SEQ ID NO: 377226 - DNA, 263 bp, Homo sapiens
ttgaatgcagttcttatctttgtgtctctgtaggtaaggtgttttctgccccacctctggtttctttcagagttttcctttatcttttatttcatakagtttgaaaattatatgtccaagtgtaggttgttggcatttattctgcctggtgttctcggagcttcctggatctttggtttggtgtctgacattaatactggaagttctcagacatggttgttacagaactttcttctatttcttctcctcctggtattctcatt

SEQ ID NO: 377227 - DNA, 263 bp, Homo sapiens
ttgaatgcagttcttatctttgtgtctctgtaggtaaggtgttttctgccccacctctggtttctttcagagttttcctttatcttttatttcatagagtttgaaaattatatgtccaagtgtaggttgttggcatttattctgcmtggtgttctcggagcttcctggatctttggtttggtgtctgacattaatactggaagttctcagacatggttgttacagaactttcttctatttcttctcctcctggtattctcatt

SEQ ID NO: 377228 - DNA, 263 bp, Homo sapiens
ttgaatgcagttcttatctttgtgtctctgtaggtaaggtgttttctgccccacctctggtttctttcagagttttcctttatcttttatttcatagagtttgaaaattatatgtccaagtgtaggttgttggcatttattctgcctggtgttctcggagcttcctggatctttggtttggtgtctgacattaatactggaagttctcagacatggtwgttacagaactttcttctatttcttctcctcctggtattctcatt

SEQ ID NO: 377229 - DNA, 263 bp, Homo sapiens
ttgaatgcagttcttatctttgtgtctctgtaggtaaggtgttttctgccccacctctggtttctttcagagttttcctttatcttttatttcatagagtttgaaaattatatgtccaagtgtaggttgttggcatttattctgcctggtgttctcggagcttcctggatctttggtttggtgtctgacattaatactggaagttctcagacatggttgttrcagaactttcttctatttcttctcctcctggtattctcatt

SEQ ID NO: 377230 - DNA, 494 bp, Homo sapiens
gagtaattcataaacaacagagattattgttcacagatctggaggctggaaagtccaagactaaagggccaggatatttggtgtttgktgaaggtcaaacattcagacactcacaacgactatagcgacagcagcagtgttcaggaatcctatgtgagggacaaacactcagaagccagctggagtgttctagaatcctatgtgagggccaaacattcagaccccagcagtagtgttgtggaatcctatgtgagggacaaactttcaaacccttgtagcagtgttctggaatgctatgtgagggacaaacattcagaccacgggagcagtgttctggaattctatgtgaaggacaaacattaagactctcatagcagtgtcctggaatcatatgtgagggacaaccattcagacaccagcagaagtgttctggaatcctaggtgtgggaaaaacattcagaacctagtagcagtgttctggaatcctatgtgag

SEQ ID NO: 377231 - DNA, 494 bp, Homo sapiens
gagtaattcataaacaacagagattattgttcacagatctggaggctggaaagtccaagactaaagggccaggatatttggtgtttgttgaaggtcaaacattcagacactcwcaacgactatagcgacagcagcagtgttcaggaatcctatgtgagggacaaacactcagaagccagctggagtgttctagaatcctatgtgagggccaaacattcagaccccagcagtagtgttgtggaatcctatgtgagggacaaactttcaaacccttgtagcagtgttctggaatgctatgtgagggacaaacattcagaccacgggagcagtgttctggaattctatgtgaaggacaaacattaagactctcatagcagtgtcctggaatcatatgtgagggacaaccattcagacaccagcagaagtgttctggaatcctaggtgtgggaaaaacattcagaacctagtagcagtgttctggaatcctatgtgag

SEQ ID NO: 377232 - DNA, 494 bp, Homo sapiens
gagtaattcataaacaacagagattattgttcacagatctggaggctggaaagtccaagactaaagggccaggatatttggtgtttgttgaaggtcaaacattcagacactcacaacgactatagcgacagcagcagtsttcaggaatcctatgtgagggacaaacactcagaagccagctggagtgttctagaatcctatgtgagggccaaacattcagaccccagcagtagtgttgtggaatcctatgtgagggacaaactttcaaacccttgtagcagtgttctggaatgctatgtgagggacaaacattcagaccacgggagcagtgttctggaattctatgtgaaggacaaacattaagactctcatagcagtgtcctggaatcatatgtgagggacaaccattcagacaccagcagaagtgttctggaatcctaggtgtgggaaaaacattcagaacctagtagcagtgttctggaatcctatgtgag

SEQ ID NO: 377233 - DNA, 494 bp, Homo sapiens
gagtaattcataaacaacagagattattgttcacagatctggaggctggaaagtccaagactaaagggccaggatatttggtgtttgttgaaggtcaaacattcagacactcacaacgactatagcgacagcagcagtgttcaggaatcctatgtgagggacaaacactcagaagccagctggagtgttctagaatcctatgtgagggccaaacattcagaccccagcagtagtgttgtggaatcctatgtgagggacaaactttcaaacccttgtagcagtgttctggaatgctatgtgagggacaaacattcagaccacgggagcagtgttctggaattctatgtgaaggacaaacattaagactctcatagcagtgtcctggaatcatatgtgagggacaaccattcagacaccagcagaagtgttctggaatcctargtgtgggaaaaacattcagaacctagtagcagtgttctggaatcctatgtgag

SEQ ID NO: 377234 - DNA, 559 bp, Homo sapiens
ccaacatttgcataccgaagaagatatttattaaaactgggaaaaactaagatatcaagcaaactgaggaagaaatctcacagaatccatagaagggatggcttgaccttcttttaaaaccctgtggctggataaatgtctgcacaaggagaatgcaaaggccttacttcacatattttatcccaatccagcctaaccctctagatgtcatgaaataagttaatgccactgagacacatgctgaagtagaccagtctcttcttcgtcctgcctctatccccagtcacaaggctgactgctgaaaagtccctgacctattctaatgacttagaactgaaccaaaacttctagtgctatgcaaatcagaacagatgtaggggcttctccaggtccagatgaatgttaatttytaaagtgaagcctcaactgactttttttttttttttgagggaaagtggatgtttctgttagaattctgttctaaagcaagaaaatctaaaataatgattttttaaaactagacactgttttttctttcacttaaaagaaggcttgagct

SEQ ID NO: 377235 - DNA, 419 bp, Homo sapiens
caggccaattctgttggctctgtcttcaaaacacagttacacttttcaccacctctacaactgcagccctggtcggtagtcatcatcatctctaaattggaataatctggattcagwctcgaattggtcttcctactgccacagtttctcctctgccacaccatcgtcatattttctgcatggaagatatttataatatcagtcagatcatattacttctctgctcaaaactttaagttgcttctcaactcattgcaaataaaaattaaattcttgccatgtcctgtgaagtccctacatgatctgtgccctcaatcccactctcaactgcctgacatcatctcatatttctccaccctcaattactatgttccagcctcacggggcttccttgctgttccaggaatatgctaagtatt

SEQ ID NO: 377236 - DNA, 437 bp, Homo sapiens
tgagtttattgagcaatagaacagcttggaggagacctgcaatggcagctccttttcatagccagggtgtcctgactagtgttcagctctcagcagagagggcaggtcctctctgcagctggtcatcccttcatctcttcagctctcagcagagagggtagctcttcttttctaggcaggtcatcccgataagcatccagctctcatcagagagggtagttcctctctgcagctggccatcscatcgtctcccctttgtctctccatcctctccgccctttgctcaaggctggctgagtccggggttttcatgggcctcagaggggaggaagtgtgtgctaattggtccatgggtggccatggacaggactagggaaaaacaccacaaattcactctctggttcatggaactggaggcccggcccccaggcttctgg

SEQ ID NO: 377237 - DNA, 590 bp, Homo sapiens
tttctaaatagtcagaattttgtttgatttattgctcttcacaagtcctttatkactattttgtacaagcaaacaactttttaaagcctcaaaagtataaaagttacttttagtattgttttcttgcactgtagtcatataaggcaacatatgaaatctcagtcatttattgagggcttcattttggctttacatgaacagtttatgtgaataatccatggatatttaaatactagaggtatgtcacctttaaagcataaaatttagcattttacaggaaaagaaaacagagataaggcataaatagacaataaaagaaagagagaataaggcagagagagggagagaacagagagattgatgagggagctgagacagagacaaggagtaaacccgtgtacagacataaaggtgatggggttgagagaggagagtaatgaggtgtcaagtagcccagaatcaaatttcaaattctgactctgatacttattagctacgttagccagttaactgtgttatgttttagtttgtaaatctgaaaaacggggatattaactgttgcatctcacagaattactataaaataatcc

SEQ ID NO: 377238 - DNA, 571 bp, Homo sapiens
gggttgagagaggagagtaatgaggtgtcaagtagcccagaatcaaatttcaaattctgactctgatacttattagctacgttagccagttaactgtgttatgttttagtttgtaaatctgaaaaacggggatattaactgttgcatctcacagaattactataaaataatccatgcaaaatgcctggaagagaatctagcactgagcacaaaccaaataaatgttttctaacagtatattttagtagaagattttatggtcattttaatatatatttatccacgaratactaaatgtagtgttttgaattttgcactaaattttatttttaataattctattaatttttagggctgccataacaatctactacaaactgagtggcttaaacccacagaaatttattctcttaccagtctaaaggacagaagtctgaaattaaggtgttggcagagcctcctatgaggtctgtaggagtggattctcctttgcctctcccagttccgacagccccaggtattccttggtttgtggcagcgtaactctcatctcctactccatcttcacaag

SEQ ID NO: 377239 - DNA, 501 bp, Homo sapiens
atgttttttaaaagtgaaaaccaagaaaaattgggtatatcaggtgtctgttcagctttttcagttataaattaaggtcacgacaggaagaagaacatgaatatctctttttcttttaagtaaaacacatgcaaaatttacactcaccctatactacaacagctatgagggacagcactttctctcaacctttacaactaatgaattcatcaaggttctttaygcgcatttgaaattccttttttaattctaaggcaacatgccttttcctcttgagtgtctatgatcattcgttgatacaaattatattttagggcatttcaaggagagcttacgtgattttctagaggctaagggcttgatatgaacctcagtataaaaggattgcatagtctaatttggaaaggatgaatgctttagtcatttggaacatttgttcaataatttgccaggacacatttcaacttgctttcaaacagtgatcaacacatagctaattga

SEQ ID NO: 377240 - DNA, 503 bp, Homo sapiens
actaatgaattcatcaaggttctttacgcgcatttgaaattccttttttaattctaaggcaacatgccttttcctcttgagtgtctatgatcattcgttgatacaaattatattttagggcatttcaaggagagcttaygtgattttctagaggctaagggcttgatatgaacctcagtataaaaggattgcatagtctaatttggaaaggatgaatgctttagtcatttggaacatttgttcaataatttgccaggacacatttcaacttgctttcaaacagtgatcaacacatagctaattgactagtgtgtgaagctgaaaattccagtgagcattccactggctttttttgaggttgtaacttttaatcaaccttgttagatgaaaaggagcattgagattactgtgaaataaactaagacactacctgtgttgcccagaggattttttcatcattgtgttttctaaactgatattattgattcaatcacaggaatatt

SEQ ID NO: 377241 - DNA, 639 bp, Homo sapiens
atatatatttcttatttttttgagacagggtcttgatctcttacctatgctggagtgcagtggcttgatcatggctcactgtagcctcaaccttgcaggtttaagccatcctcccatattagcctctaagtagctgggaatacaggtgtaacccaycatatccagctatttttgaattttgtaaagacagggtttagccaggttgctcaggctggtctcgaacttctgggttcaagtgatccaccccttggcctctcaaagtgctggcattataggtatgagctaccacatctggccttgcagtgtatatttaacaaatattttgtcccttgcattatgtgttccccatattgggaataaagcagtaactacattgtcaaaaatatctgcttattccaatagagggtgggacagataaaataaataaataaaatatatgctgtgatatattttagttgcctcaatggataagagagaacaccagatacaataataattataatccctaatggagttttcaaaataaataaggtgatatcagaaaaactctaattgctaatgtgaaaaccatggaaacctgtagaagctatacaagttctggtacaaagaaactgggtgagagcaacaatcatgagtact

SEQ ID NO: 377242 - DNA, 553 bp, Homo sapiens
aagctgaatttccctcctgatcaaataagcctgttatttagttgttgaaatgatccaagtatgtttatagtctgtgtaatacaaaaaaataaatacttatacaatgcacatttcaacaataaaacttatcaactttttagttgaaacttctatttaattgattccatttaacacttagctgaacaccaagtaaacacagaggctgacacacagtatgaaagtaagatagcaactgatggaaattagttgtaaaccttattttccagaaggaacaaaaacataatttctgagactgcaacccattccaattaacaattacattaytgaaatcattaaaaataaacagactacctaaataaatgtaaaaccctactctgattgcagtgaagtttaaaaactttattgtagttgttagggaaattaaaaaatatgtacagaacaaaatgcttgatatatacccaatgattatatattactcacaatatgcaattgtagtgaaagtataatatgaaactgattatttaaaaataaaggcaatgatgtgcattacttt

SEQ ID NO: 377243 - DNA, 391 bp, Homo sapiens
atactctcttaaatttcaagtcaggggcatagaaaaaaatatttttttaatcacattagaaaattgctttactacatattatgcacgaatagtgtgtgtgtgtgtgtatgtatatacatatgttatatatatagtataaaattattttgcaaccatataaattggagtctgaaacatggctttctgtgtcttaaattttatccatccttttcgatatgccctgtcacttatgctcttagtgcaagattaatcactgctttcttgataacactctagcctcatakagactctttgattgcagtctctcttaaaaatatactactagctggtcctgagtgaccttttaaaaggactatccttttttaaaggacatgcattttattacattatt

SEQ ID NO: 377244 - DNA, 617 bp, Homo sapiens
taactaatgtgcaacattaattttctaattcagaagagagcattgcagatggttgtataaatccatttgattctgtaaaactctgataattaaaataaatatgtgatacttttttagcattacagcaagttgaaaacarcaattatttatgtatttttaatacacaatattttctaacctaataaaaaatatgaaaacataaaatatttagaaatgtttatagagtattattcataggcattccaaaagccaagtttatatttacgcacaattaattataatcgattaaggaaaattaggggaaattatctctacagggggagatttattttaaaataaagtatatgagagtaaaacaacaagacctaaaaaaatacgttaaaataaggagtcacattttggcagggaaggaaaaacatgggagatgaaaacaagaaactcagatgggtccatagatagcattgtccatctaacaactaatatgacatgtgaggtatgggaaaaagttctcatgtatgtgaaactggagtctcagaaagaaaacaagagaaacaatgagacaaaataaatatttataaaaatactaggtaaggaatttcaaatgctaatgaaataca

SEQ ID NO: 377245 - DNA, 617 bp, Homo sapiens
taactaatgtgcaacattaattttctaattcagaagagagcattgcagatggttgtataaatccatttgattctgtaaaactctgataattaaaataaatatgtgatacttttttagcattacagcaagttgaaaacagcaattatttatgtatttttaatacacaatattttctaacctaataaaaaatatgaaaacataaaatatttagaaatgtttatagagtattattcataggcattccaaaagccaagtttatatttacgcacaattaattataatcgattaaggaaaattaggggaaattatctctacagggggagatttattttaaaataaagtatatgagagtaaaacaacaagacctaaaaaaatacgttaaaataargagtcacattttggcagggaaggaaaaacatgggagatgaaaacaagaaactcagatgggtccatagatagcattgtccatctaacaactaatatgacatgtgaggtatgggaaaaagttctcatgtatgtgaaactggagtctcagaaagaaaacaagagaaacaatgagacaaaataaatatttataaaaatactaggtaaggaatttcaaatgctaatgaaataca

SEQ ID NO: 377246 - DNA, 592 bp, Homo sapiens
ctggatacaagtcctttgtgagtgtatgaattaaaagtgtatcccccccaaaaaaatattttttcttcaatttcaatggtagagaaacatgaatacattggacaaaaaagtcctaatactcaagtagattgtttaacctatcttaaatataaaaactggcctaacaatcatctacaaacaataaatatgccattatgctctaagattcctaccttatggactaattttcaamcctggaattaggtatctttaaatattatatcataaagagatttgggaaaataacaaaattaagttttgtgtttttttaaccaatcaaacccaaagtacttttgtttagacagatgatacagtttggctctgtgtccccaaccacatttcatgtgaatttttgtccttaatgtttgaggagggaccttgtgcaaggtgattgggtcgtaagggtggatttctcccttgctattctcatgatagtgagttctcacaggatctagttgtttgaaagggtgtaaaactgtccctttctctctctctctctctctctctctcgctccactacgtgaagattctgcctgcttcccttttgtcttcc

SEQ ID NO: 377247 - DNA, 592 bp, Homo sapiens
ctggatacaagtcctttgtgagtgtatgaattaaaagtgtatcccccccaaaaaaatattttttcttcaatttcaatggtagagaaacatgaatacattggacaaaaaagtcctaatactcaagtagattgtttaacctatcttaaatataaaaactggcctaacaatcatctacaaacaataaatatgccattatgctctaagattcctaccttatggactaattttcaaacctrgaattaggtatctttaaatattatatcataaagagatttgggaaaataacaaaattaagttttgtgtttttttaaccaatcaaacccaaagtacttttgtttagacagatgatacagtttggctctgtgtccccaaccacatttcatgtgaatttttgtccttaatgtttgaggagggaccttgtgcaaggtgattgggtcgtaagggtggatttctcccttgctattctcatgatagtgagttctcacaggatctagttgtttgaaagggtgtaaaactgtccctttctctctctctctctctctctctctcgctccactacgtgaagattctgcctgcttcccttttgtcttcc

SEQ ID NO: 377248 - DNA, 592 bp, Homo sapiens
ctggatacaagtcctttgtgagtgtatgaattaaaagtgtatcccccccaaaaaaatattttttcttcaatttcaatggtagagaaacatgaatacattggacaaaaaagtcctaatactcaagtagattgtttaacctatcttaaatataaaaactggcctaacaatcatctacaaacaataaatatgccattatgctctaagattcctaccttatggactaattttcaaacctggaattaggtatctttaaatattatatcataaagagatttgggaaaataacaaaattaagttttgtgtttttttaaccaatcaaacccaaagtacttttgtttagacagatgatacagtttggctctgtgtccccaaccacatttcatgtgaakttttgtccttaatgtttgaggagggaccttgtgcaaggtgattgggtcgtaagggtggatttctcccttgctattctcatgatagtgagttctcacaggatctagttgtttgaaagggtgtaaaactgtccctttctctctctctctctctctctctctcgctccactacgtgaagattctgcctgcttcccttttgtcttcc

SEQ ID NO: 377249 - DNA, 592 bp, Homo sapiens
ctggatacaagtcctttgtgagtgtatgaattaaaagtgtatcccccccaaaaaaatattttttcttcaatttcaatggtagagaaacatgaatacattggacaaaaaagtcctaatactcaagtagattgtttaacctatcttaaatataaaaactggcctaacaatcatctacaaacaataaatatgccattatgctctaagattcctaccttatggactaattttcaaacctggaattaggtatctttaaatattatatcataaagagatttgggaaaataacaaaattaagttttgtgtttttttaaccaatcaaacccaaagtacttttgtttagacagatgatacagtttggctctgtgtccccaaccacatttcatgtgaatttttgtccttaatgtttgaggagggaccttgtgcaaggtgattgggtcgtaagggtggatttctcccttgctattctcatgatagtgagttctcacaggatctagttgtttgaaagggtgtaamactgtccctttctctctctctctctctctctctctcgctccactacgtgaagattctgcctgcttcccttttgtcttcc

SEQ ID NO: 377250 - DNA, 544 bp, Homo sapiens
atgtacagggcttgcatattttttgtgcaatttatcactaagtatttcttattttaagggttattgcaatgaaaaattgcataaaaggaattawttatgaattttaatttctaattgttcattacaaatatataaatcaatgttttattcagtaaatttcttaaacttgctgattacatttttgtcatagtaattagattttctacataatggatcatgttttccttgaataaaaacatgtttacttctttctttccaaactgaatgactttttttcttatcttactgcattagaaagagccttcagtataatgtagattcaacttcctctcttaaccttgattttagaaagaaagtaatctagctttcacaattcagtgtgatattagctacagctttttatatatgggaaaattctattatattattaattttctgagagttttcaccaggaattattgttgaattctataaaatgtttattctgcatctattgagatgactgtgtatattttatccttttaaagcttattaatatggtaaa

SEQ ID NO: 377251 - DNA, 582 bp, Homo sapiens
taaaacaacatctgtttgaactttttaaattttcattttaaattgattcttctgacttcgtgaaaacaacaaaccacatctgtccaatcttcagtctccaggagtcaaatcttcaaattatacttttttccagctgccagtaagtatcagtgagcaagaagccaagtagtagaggtcaagtgttagaggtgcttttttattgactattgttttctggtaagatctacactggctctactatttatgaaaataaatactaagagataaataaaaagtggccaaatacaactttttcactgttttaagaaactaaatacagttgctttagtgcaaagtctctacaggataggaacttattatcarcattagtaatactaaaattaatctctataaaggtggaattgcaacttgaaaaatgagctaaaactataggaactaatgaaattacctcagtaggattccactttaatgcctttgaggatcacagcagataacaaatgtaattccatttaagttacagttaaataaggcaaatattagcaaactatataatctacaaatattgtgaaaacatgttctgat

SEQ ID NO: 377252 - DNA, 572 bp, Homo sapiens
ggactaaaacaccaaaagcaacggcaacaaaagccaaaattgacaaatgggatcaaattaaactaaagagcttctgcacagcaaaagcaactatcatcagagtgaacaggcatccagtaagggagaaagatgtaggatgggaacctaggcctatctctccttttcacttttttctgccttctttatatttgctggaagatgattagattgtgcccaccggattaagggtggatctgccttccccagcccactgactaaaatgttaatctcttttgacaacacccacacagacacacacaggatcaatactttgtattcctccacccaatcaagttgacactcagtattaaccatcacagagcccaagctaagtaagacattatcttagcaaatgtgctaacmtaatctgcatctttatggccagcagcaacttttacacaacaaatttccagataattacatctgaggcttcttaaatttctgtagccagacttttgaatattcacagtcatattcaatattcaattttttaaatagtatattcaagcttactttgtgacccatagaccaat

SEQ ID NO: 377253 - DNA, 557 bp, Homo sapiens
ctgcctgatggtggccctgctcattacccccaccccatgaaagttatgtagcaatcaaatctatacctagcgtgcttgggtatctctttgaaattgtcttatctgttctaatctatatttatggtgtcagggttttcttaggaatgtccctttcgccctttttataagcatgtagctagagatattctgacattttaacagtagaatgaaygattactggggcatcttacgaggggttctgggggatttctttcttcctatgtacctcctttccttcttacccacatttgactaagtgctcactcactccagcaaacctttcataagcaaattttgggtggtccctcgggaatgagccttcccagacttttcctttctcaggggctctccttgcctactcgtgtcttgctattttagcaatttcttcactttgattgaaagagaaatgaaatacctaccttctccaggtctctctgacctcctcccacccccatggtctctcctatattgttgaagttcatttacctgcctaatatccaaaccgaccaaggagaaca

SEQ ID NO: 377254 - DNA, 557 bp, Homo sapiens
ctgcctgatggtggccctgctcattacccccaccccatgaaagttatgtagcaatcaaatctatacctagcgtgcttgggtatctctttgaaattgtcttatctgttctaatctatatttatggtgtcagggttttcttaggaatgtccctttcgccctttttataagcatgtagctagagatattctgacattttaacagtagaatgaatgattactggggcatcttacgaggggttctgggggatttctttcttcctatgtacctcctttccttcttacccacatttgactaagtgctcactcactccagcaaacctttcataagcaaattttgggtggtccctcgggaatgagccttcccagacttttcctttctcaggggctcyccttgcctactcgtgtcttgctattttagcaatttcttcactttgattgaaagagaaatgaaatacctaccttctccaggtctctctgacctcctcccacccccatggtctctcctatattgttgaagttcatttacctgcctaatatccaaaccgaccaaggagaaca

SEQ ID NO: 377255 - DNA, 557 bp, Homo sapiens
ctgcctgatggtggccctgctcattacccccaccccatgaaagttatgtagcaatcaaatctatacctagcgtgcttgggtatctctttgaaattgtcttatctgttctaatctatatttatggtgtcagggttttcttaggaatgtccctttcgccctttttataagcatgtagctagagatattctgacattttaacagtagaatgaatgattactggggcatcttacgaggggttctgggggatttctttcttcctatgtacctcctttccttcttacccacatttgactaagtgctcactcactccagcaaacctttcataagcaaattttgggtggtccctcgggaatgagccttcccagacttttcctttctcaggggctctccttgcctactcgtgtcttgctattttagcaatttcttcactttgattgaaagagaaatgaaatacctaccttctccaggtctctctgacctcctcccacccccatggtctctccwatattgttgaagttcatttacctgcctaatatccaaaccgaccaaggagaaca

SEQ ID NO: 377256 - DNA, 557 bp, Homo sapiens
ctgcctgatggtggccctgctcattacccccaccccatgaaagttatgtagcaatcaaatctatacctagcgtgcttgggtatctctttgaaattgtcttatctgttctaatctatatttatggtgtcagggttttcttaggaatgtccctttcgccctttttataagcatgtagctagagatattctgacattttaacagtagaatgaatgattactggggcatcttacgaggggttctgggggatttctttcttcctatgtacctcctttccttcttacccacatttgactaagtgctcactcactccagcaaacctttcataagcaaattttgggtggtccctcgggaatgagccttcccagacttttcctttctcaggggctctccttgcctactcgtgtcttgctattttagcaatttcttcactttgattgaaagagaaatgaaatacctaccttctccaggtctctctgacctcctcccacccccatggtctctcctatattgttgaagttcatttacctgccyaatatccaaaccgaccaaggagaaca

SEQ ID NO: 377257 - DNA, 362 bp, Homo sapiens
caaaatggcagagttgaactgatatacaaccttcctctaggaagcactcaactggtaagggaaaaacacctcaattgagcatgtatacaacttcagtaaatgctgcatgtgcagcccctcccaagggctggcaggccactgtgcatcaggacagcccaccccaagggaagaattaggggagatgggacaaaaccccctggaagtgtgccaacatatgaaaccctaagtcaaaggtcaaaccatgcatttgaatctctcaagtcacccacttkgccctcttctaagtgcactttacttcctttcattcctgctctgaaacttcataataaactttccctcctcctctaaaacttgccttggtc

SEQ ID NO: 377258 - DNA, 647 bp, Homo sapiens
ttcatccaagaggcagtgagaattactgaaagactaagcaggatacagacacatgccgggtgttaggaagatcattctggcagcagtgtggagaacgaagtgaagaagagcaggactacagacagagagatgagtagaatatttttgtctcttgagggtttgagctaaacagtacagcttggaataataagattgataacacatactgagaagttactaaagccagtcatcattctaagtctgtttattatttaccttaattataagaataactcactgaagcaggtgatattattgttttcattttaaaccaggaaggtaagaaacttggagagctctaagtaaattgctaaaccagaactctaaccaaagaaasctaataaatccaaagcctaaattagcttaagaataccagaggaaatactaatagaagccacaggtcttaatatctgattttattagaggtaattttaataatttctgttctacaagttgttttcagaagacagtctttcctgtgaatttcacaataaaatgtaccaattcactaactctacagttgacttgcaacttctttaacatctagagagacaagatgtaaaattaggactcatttgtctgctatatatgctataaacatagcaaag

SEQ ID NO: 377259 - DNA, 647 bp, Homo sapiens
ttcatccaagaggcagtgagaattactgaaagactaagcaggatacagacacatgccgggtgttaggaagatcattctggcagcagtgtggagaacgaagtgaagaagagcaggactacagacagagagatgagtagaatatttttgtctcttgagggtttgagctaaacagtacagcttggaataataagattgataacacatactgagaagttactaaagccagtcatcattctaagtctgtttattatttaccttaattataagaataactcactgaagcaggtgatattattgttttcattttaaaccaggaaggtaagaaacttggagagctctaagtaaattgctaaaccagaactctaaccaaagaaagctaataaatccaaagcctaaattagcttaagaataccagaggaaatactaatagaagccacaggtcttaatatctgattttattagaggtaattttaataayttctgttctacaagttgttttcagaagacagtctttcctgtgaatttcacaataaaatgtaccaattcactaactctacagttgacttgcaacttctttaacatctagagagacaagatgtaaaattaggactcatttgtctgctatatatgctataaacatagcaaag

SEQ ID NO: 377260 - DNA, 647 bp, Homo sapiens
ttcatccaagaggcagtgagaattactgaaagactaagcaggatacagacacatgccgggtgttaggaagatcattctggcagcagtgtggagaacgaagtgaagaagagcaggactacagacagagagatgagtagaatatttttgtctcttgagggtttgagctaaacagtacagcttggaataataagattgataacacatactgagaagttactaaagccagtcatcattctaagtctgtttattatttaccttaattataagaataactcactgaagcaggtgatattattgttttcattttaaaccaggaaggtaagaaacttggagagctctaagtaaattgctaaaccagaactctaaccaaagaaagctaataaatccaaagcctaaattagcttaagaataccagaggaaatactaatagaagccacaggtcttaatatctgattttattagaggtaattttaataatttctgttctacaagttgttttcagaagacagtctttcctgtgaatttcacaayaaaatgtaccaattcactaactctacagttgacttgcaacttctttaacatctagagagacaagatgtaaaattaggactcatttgtctgctatatatgctataaacatagcaaag

SEQ ID NO: 377261 - DNA, 610 bp, Homo sapiens
gtttgtgtgtgtatgtgtaggcttctttcactcaacataagtattttgggatccttcccattgtagcatttatcaagagctcattcctttttattgctgagcagtacttcattgtatatggatatatcagtttgtttatccattcgcctattgatgaacatttaggttgtttccagtttggggctattgygaaagaagcagctatgaacactgtgtacatgtctttgtgtaggcttttaggtgtggaatagctacgtcatatagtaggtatgcatttaactttttaaagaaactgccaagccatctccccaagtagttacatgttttcagaatcctgcccagaatataaaagggtcccagttgtttcatatttttgacaacttctggtatggccaatctgtttaatcttatactaataggtatgtaatagaatcacattatggttttcatttgcatttcttaatgtctaatgatgggacttttattggaattgctttgaatctatagatcaattcaggagatataaaattttaataataataatgaatcctctgaatcaagaacacagtatatttctcaacttctttcagaaacatgccctcacttttgt

SEQ ID NO: 377262 - DNA, 541 bp, Homo sapiens
ttgtatatggatatatcagtttgtttatccattcgcctattgatgaacatttaggttgtttccagtttggggctattgcgaaagaagcagctatgaacactgtgtacatgtctttgtgtaggcttttaggtgtggaatagctacgtcatatagtaggtatgcatttaactttttaaagaaactgccaagccatctccccaagtagttacatgttttcagaatcctgcccagaatataaragggtcccagttgtttcatatttttgacaacttctggtatggccaatctgtttaatcttatactaataggtatgtaatagaatcacattatggttttcatttgcatttcttaatgtctaatgatgggacttttattggaattgctttgaatctatagatcaattcaggagatataaaattttaataataataatgaatcctctgaatcaagaacacagtatatttctcaacttctttcagaaacatgccctcacttttgttatacaagtcttttacttctttgtcaaatttttctctatttc

SEQ ID NO: 377263 - DNA, 541 bp, Homo sapiens
ttgtatatggatatatcagtttgtttatccattcgcctattgatgaacatttaggttgtttccagtttggggctattgcgaaagaagcagctatgaacactgtgtacatgtctttgtgtaggcttttaggtgtggaatagctacgtcatatagtaggtatgcatttaactttttaaagaaactgccaagccatctccccaagtagttacatgttttcagaatcctgcccagaatataaaagggtcccagttgtttcatatttttgacaacttctggtatggccaatctgtttaatcttatactaataggtatgtaatagaatcacattatggttttcattkgcatttcttaatgtctaatgatgggacttttattggaattgctttgaatctatagatcaattcaggagatataaaattttaataataataatgaatcctctgaatcaagaacacagtatatttctcaacttctttcagaaacatgccctcacttttgttatacaagtcttttacttctttgtcaaatttttctctatttc

SEQ ID NO: 377264 - DNA, 526 bp, Homo sapiens
tagtctgttgtgttgctataaagtaatacctgaggcttggtaattcatgaagaaaaagggattatttagcttacagttctgcaggctgtataagaagcttggtgcaatctcctcagggattgagtaaactgtttctattgtacaatatgcctattcaatcatttcttctaaagtcagctcccttctccttcaatccttcttcatcctgcttcacatccctcttaagcttgggataacattatgtatccaatgttttcttaggaaggaagagaaaatgttcatgtawcagagagtgatagaaaaacgcctgtaatcccagcactatgggaggccaaggtgggaggattgcttgagctcaggagttcaagaccaacctgggcaaggtagtgagaccccatctctaaaaataagtaaggcagggccttactgacaaggccatctggtgaggccctcaagctgcttccacttatggcagaaagaaaagagcagccagcatgtccagagatcacatggtgagagaaaaagc

SEQ ID NO: 377265 - DNA, 526 bp, Homo sapiens
tagtctgttgtgttgctataaagtaatacctgaggcttggtaattcatgaagaaaaagggattatttagcttacagttctgcaggctgtataagaagcttggtgcaatctcctcagggattgagtaaactgtttctattgtacaatatgcctattcaatcatttcttctaaagtcagctcccttctccttcaatccttcttcatcctgcttcacatccctcttaagcttgggataacattatgtatccaatgttttcttaggaaggaagagaaaatgttcatgtatcagagagtgatagaaaaacgcctgtaatcccagcactatgggaggccaaggtgggaggattgcttgagctcaggagttcaagaccaacctgggcaaggtagtgagaccccatctctaaaaataagtaaggcagggccttactgacaaggccrtctggtgaggccctcaagctgcttccacttatggcagaaagaaaagagcagccagcatgtccagagatcacatggtgagagaaaaagc

SEQ ID NO: 377266 - DNA, 518 bp, Homo sapiens
catgtccagagatcacatggtgagagaaaaagcaagagagaagaatagggcaaatgctaggctttttttgtagcaaccagttcttggaggaactgtcatgagaattagtaaagcaaaaacttgcttagtcctcccctcccagggagagcattaatgaaggattcactattcataaagggtctacctccatctcccaaacacttcccattaagccccacctgcaacattgggaatcaaacatcaacatgagatttggaggggtcaaacaaaccaaagtatagcacataatgtattaaaagtgtctgtttttctaaaaggaaaaagcttcagcaatctcaaggccatccttcctcttggcaatayacatgtatttttaagtggcattatgaagatattattatttgtactgaaaagcccacagcagatattttagggatagctcagaattttaacccaaacagggaaagtgtatgggtgttttttttaaaggcttgtggattagatactaggagaaaaca

SEQ ID NO: 377267 - DNA, 512 bp, Homo sapiens
attgctgcaatagtttagaactaaaggtacacttgaaattaaaaaaaaaaggcagttgctaagaatcaattaagtttactctctctagctatgcaataagccagaaattaatgggtgaggttaagccaaggataaaaaagcagaagtcaagacttcacaaggatgcctttcctgggattgtcagccatcggtaggtagtgctagttgttggccggccccttcctcctacactctgttaattgtttacattaactccaccccactactgcccatttccagctwccagtatacttgttttctatgcctgcttcccctttaataattcaatactgtccccatgtaaggggctctctcttcatatgatatttctgtcatcagctctaaagctcatgctacaattgaaattaaatctctaatcaagttatttatttaaattcccctctaacttttccaaaataataaaggccactactcctgttcaagcagcaggctttaatttcattttaattacc

SEQ ID NO: 377268 - DNA, 512 bp, Homo sapiens
attgctgcaatagtttagaactaaaggtacacttgaaattaaaaaaaaaaggcagttgctaagaatcaattaagtttactctctctagctatgcaataagccagaaattaatgggtgaggttaagccaaggataaaaaagcagaagtcaagacttcacaaggatgcctttcctgggattgtcagccatcggtaggtagtgctagttgttggccggccccttcctcctacactctgttaattgtttacattaactccaccccactactgcccatttccagcttccagtatacttgttttctatgcctgcttcccctttaataattcaatactgtccccatstaaggggctctctcttcatatgatatttctgtcatcagctctaaagctcatgctacaattgaaattaaatctctaatcaagttatttatttaaattcccctctaacttttccaaaataataaaggccactactcctgttcaagcagcaggctttaatttcattttaattacc

SEQ ID NO: 377269 - DNA, 626 bp, Homo sapiens
ttgtaaactgacatggaagattctttaaattacattattcttaaatgcaggtagtataatacaactatgtcatgtaatatattgtgcagctatagcttttctgacacctgtccttctattttcaaaattcatcagaaaggatttggttttaaaaaatcataagttcccataagctttctggcaaaaataatgattaagaacttaataaggaaacatgacatgagacctttaccaggtcaatggtgtatatttgatttgaactttattttctgaagcatgtatcaagaagacttttagagtatttttaattcaaaaattaattaaaaatcatgtactttaaacataatttcttagggcactacaataccttaacaaatgttaaataacaaaaaataaccattctctctatttccattagaaactcactctctcacttcttatgtaatctacatcttataccagttacaccttaaagctaataggagagaattctgttcatagctatcacgttatactstaagttctttcatacttaaagtttccttcactattcatgctcctggaccaactcatgattttttaagtatcgtaatgtgttccatccctcattcagtgtgtgcatgcaa

SEQ ID NO: 377270 - DNA, 557 bp, Homo sapiens
cctattgtttttgtcactctccaaaacaagtgttataagagtcatggaaaaacarggaactttccttaattctttaagaggacttctcattgaacatcatctttttattttctttatctcctcttctctttatcacttcctttgtcttctttttgttgactgtcatttaattcagccaaaagagccattaaaaaattaaaaatttgtaaagcctctaagaatccaaaatagacaacttttagttcatcaggtttcggcttcaagatactgaatgtatataaaaggatttatgaattagagcgacctaagctcagatgttgttttgtcacttaatagcttttgacctcaagcaagttcatccattctctcaatcactcacatattaattgagagcttactatgaatgaggcattgttctgaaaaatatagctgtttacctgacatatcctattctcaatttacatatgttattatcattttactaatctattaaaatgggaccatacagagttcagaatacaggttccctctgaaatgacagtgtttcctggaatcac

SEQ ID NO: 377271 - DNA, 557 bp, Homo sapiens
cctattgtttttgtcactctccaaaacaagtgttataagagtcatggaaaaacaaggaactttccttaattctttaagaggacttctcattgaacatcatctttttattttctttatctcctcttctctttatcacttcctwtgtcttctttttgttgactgtcatttaattcagccaaaagagccattaaaaaattaaaaatttgtaaagcctctaagaatccaaaatagacaacttttagttcatcaggtttcggcttcaagatactgaatgtatataaaaggatttatgaattagagcgacctaagctcagatgttgttttgtcacttaatagcttttgacctcaagcaagttcatccattctctcaatcactcacatattaattgagagcttactatgaatgaggcattgttctgaaaaatatagctgtttacctgacatatcctattctcaatttacatatgttattatcattttactaatctattaaaatgggaccatacagagttcagaatacaggttccctctgaaatgacagtgtttcctggaatcac

SEQ ID NO: 377272 - DNA, 576 bp, Homo sapiens
aaggaagtggctttacccaaaggaaagcattayctcacaatcaaatctatggaaaggaggaatttaagaaaaagaatgatgtgatttccagccttcatgtaccccacatacagcagacattggagactcacaggggtgggagagtggggtggtgggggcgaggaacgggaaattacttaatggatacaatgcacattatttgggtaatgataatactaaaagcctagacttcaccactatacaagaggtatagacctattattttgtaactgacaacactgacaagagatactcaatttgctgaagtcatatgtcaatatactctgattaatctttgagaaatcttaacaaattttttcaagaagtttaaaggaaaatcaatcagacatttttccacctgaccatgataagataattaatttgggttctagaaattatttatcaggtattttcccccagtgaaagaaaataaatgggtgcttataatttattatggagtaccatgaagtcctaaaatatacttaatacaaaagttgaaaaaactctaaagaacaaaagttggttttatgaacaaca

SEQ ID NO: 377273 - DNA, 576 bp, Homo sapiens
aaggaagtggctttacccaaaggaaagcattatctcacaatcaaatctatggaaaggaggaatttaagaaaaagaatgatgtgatttccagccttcatgtaccccacatacagcagacattggagactcacaggggtgggagagtggggtggtgggggcgaggaacgggaaattacttaatggrtacaatgcacattatttgggtaatgataatactaaaagcctagacttcaccactatacaagaggtatagacctattattttgtaactgacaacactgacaagagatactcaatttgctgaagtcatatgtcaatatactctgattaatctttgagaaatcttaacaaattttttcaagaagtttaaaggaaaatcaatcagacatttttccacctgaccatgataagataattaatttgggttctagaaattatttatcaggtattttcccccagtgaaagaaaataaatgggtgcttataatttattatggagtaccatgaagtcctaaaatatacttaatacaaaagttgaaaaaactctaaagaacaaaagttggttttatgaacaaca

SEQ ID NO: 377274 - DNA, 576 bp, Homo sapiens
aaggaagtggctttacccaaaggaaagcattatctcacaatcaaatctatggaaaggaggaatttaagaaaaagaatgatgtgatttccagccttcatgtaccccacatacagcagacattggagactcacaggggtgggagagtggggtggtgggggcgaggaacgggaaattacttaatggatacaatgcacattatttgggtaatgataatactaaaagcctagacttcaccactatacaagaggtatagacctattattttgtaactgacaacactgacaagagatactcaatttgctgaagtcatatgtcaatatactctgattaatctttgagaaatcttaacaaattttttcaagaagtttaaaggaaaatcaatcagayatttttccacctgaccatgataagataattaatttgggttctagaaattatttatcaggtattttcccccagtgaaagaaaataaatgggtgcttataatttattatggagtaccatgaagtcctaaaatatacttaatacaaaagttgaaaaaactctaaagaacaaaagttggttttatgaacaaca

SEQ ID NO: 377275 - DNA, 624 bp, Homo sapiens
tgccaagtttaaattaaataaaacaagcaacagccgccttatatcctcaggttcaacactgacggagaatgatattcaaagagctgatagtatttatagtcagtgtagttaagagtgtaagctacctcaggatcagatggaaaaacaatgaatataaatgttagaactctctacagggataacccagttcccaggctgaggaaaacctctatgttattgtcacactaataataaaaaatggcagtattgttttccaagtggaaagaaatcatttggttttagtcacagacttgactgatccttgaattaaagcaagaaaagaagaaaattattcttttatactatgaaggaaagagttggttgctgaatttctaaggatcccatgaagattttcacgagctaggttcccttgctttcygaaattttccctgtagctcttcactttgaactatgctttgcataaccactctagattttcttatgctcacatgagactgtgccattaatttagactatgctaagtcaggcaatgtgaagaatttctaactgaaatttttaaaacttctctgctcaatctatttcttgaccttatcaaactgctttttctctttgcagaagttagtt

SEQ ID NO: 377276 - DNA, 604 bp, Homo sapiens
tcaaaataatgatattaccacatgaaaattactacatagaattaagctaatggaagagcagatgcaaaaactaacaaatgaaggtcttgttggtttgcaggtggcttacacaccatcttcgttagtaattattttgggttgaccctcctgcctcctgagccaaactacatcttattctctcctcacacttatttccctgaataactatggagaaatcaagaaacagccaggaataataacagaagcctaatgcatattagataataattctcaaagataagyattagaacctcatttgtagataaggaaactatagcacagaaaggtggggtagctttccctgggtcacaaaatgagtaagagccaaagtccctattgcaaactaggtctgaatgaatccaaagcctatagtctaagcaaagctttgattatctcatttgagttccaggaccatctaactgagatcctctgtactgtcttcctcaacattaaagggaaatatatttaaggcaaagtttcaagaatcttttttcatcagaaatattatttgcttgtgttaccggcatcaatctccagctaacacacaatttcccactactaggct

SEQ ID NO: 377277 - DNA, 605 bp, Homo sapiens
taataggcataataaacagctttctggtgctgaaccttagatttggctattaaaacttagctttcagatgacaagttaatcatgataattaatagtaagaacaatcatttttaatggcgggatctattttttcagttttggatgtcatgggtctataatatgtaagggctgactgacggaaataatagttctacctaattctcttgattgccattttgccttgagattaacatgagcctcatagacttgctgaaaagacattgctcaaaagaggttgtgtttcacccttgggaaaacacattcagagttaataccctgaatgacctgaagaaaaaagaacctaccagtgtccttaagtctgggtcaatagaaaccaaaataagckaattcctatcagactcgtcaactccataaatgatacacgttgtatgacttgaggtcaaagatggataatatcctcaatgcagaataacatcctgaccctttccttcctttccaccatctcctcttgctgctctcccctttccttctctacttttagtccctagtggtttaacagttatttattccatgaggctgagccataatgtggttcttttcctttg

SEQ ID NO: 377278 - DNA, 540 bp, Homo sapiens
taatgattttggttagaagagtagcaacattttttaataggacttttttttctttttctctctcctgtacccctcccaattttttaaaaaggagtcaataatttttaagatttttgagtattccctgtgtgttaagtaatgacctagttttacatgcacacttattatttctgttaaaatygttaattagaaggccattagactgaggtggctcaaataccttgggttcctacctaagcaaacagaaacccaactcagtgcaaaaggtcttaaccaatcagaaactgccaatgaacctctaactagggactttctactggaatgatccaaataaagctactcctccactgtaaccaatccagtatcttctttgtcttgcttcccattcatcctataaaaaccttctcctggtaccctcagtggagccatgaaccattccagtttggagtatcccagtttgtgcatcactctgctcaaataaactcttagacatggcaatgtgcctcagtttttctttgaacccttcttactgtagtcact

SEQ ID NO: 377279 - DNA, 540 bp, Homo sapiens
taatgattttggttagaagagtagcaacattttttaataggacttttttttctttttctctctcctgtacccctcccaattttttaaaaaggagtcaataatttttaagatttttgagtattccctgtgtgttaagtaatgacctagttttacatgcacacttattatttctgttaaaatcgttaattagaaggccattagactgaggtggctcaaataccttgggttyctacctaagcaaacagaaacccaactcagtgcaaaaggtcttaaccaatcagaaactgccaatgaacctctaactagggactttctactggaatgatccaaataaagctactcctccactgtaaccaatccagtatcttctttgtcttgcttcccattcatcctataaaaaccttctcctggtaccctcagtggagccatgaaccattccagtttggagtatcccagtttgtgcatcactctgctcaaataaactcttagacatggcaatgtgcctcagtttttctttgaacccttcttactgtagtcact

SEQ ID NO: 377280 - DNA, 540 bp, Homo sapiens
taatgattttggttagaagagtagcaacattttttaataggacttttttttctttttctctctcctgtacccctcccaattttttaaaaaggagtcaataatttttaagatttttgagtattccctgtgtgttaagtaatgacctagttttacatgcacacttattatttctgttaaaatcgttaattagaaggccattagactgaggtggctcaaataccttgggttcctacctaagcaaacagaaacccaactcagtgcaaaaggtcttaaccaatcagaaactgccaatgaacctctaactagggactttctactggaatgatccaaataaagctactcctccactgtaaccaatccagtatcttctttgtcttgcttcccattcatcctataaaaaccttctcctggtaccctcagtggagccatgaaccattccagtttggagtatcccagtttgtgcatcactctgctcaaataaactcttagacatggyaatgtgcctcagtttttctttgaacccttcttactgtagtcact

SEQ ID NO: 377281 - DNA, 556 bp, Homo sapiens
ctggacccatcatgctgtgtactcaccttttctcacttgccaggtgtcaccttaaaatttctgttatccttgctcactcttccctattttttttaagtaagcctttgtgtttgattttgaggcacttgcagatttctgagatcagagagctcttcctactgcagtagtctttgaataaagtctctcttcatctaagtccccagatttttattgaacccagtatagactcttatcttattattttcctaggcatattcttcattagattgmattctccaatgaatgcaatgaaataactaattggccaaattaaactcactatttcccttaataagtacatgtttatctatcttttctcaccatcctaagattctaatagtttcttcttaaatcacaaaattactctagagtttactttaaaaacattgcacagaacaaactaacaccctgaaacaccagattcctttcctttatgtaaccccctgagcttataccacatggtgcagtgggatacatttgtgcttactctctctctctcaggaaaatatgatgttaa

SEQ ID NO: 377282 - DNA, 556 bp, Homo sapiens
ctggacccatcatgctgtgtactcaccttttctcacttgccaggtgtcaccttaaaatttctgttatccttgctcactcttccctattttttttaagtaagcctttgtgtttgattttgaggcacttgcagatttctgagatcagagagctcttcctactgcagtagtctttgaataaagtctctcttcatctaagtccccagatttttattgaacccagtatagactcttatcttattattttcctaggcatattcttcattagattgaattctccaatgaatgcaatgaaataactaattggccaaattaaactcactatttcccttaataagtacatgtttatctatcttttctcaccatcctaagattctaatagtttcttcttaaatcacaaaattactctagagtttactttaaaaacattgcacagaacaaactaacaccctgaaacacyagattcctttcctttatgtaaccccctgagcttataccacatggtgcagtgggatacatttgtgcttactctctctctctcaggaaaatatgatgttaa

SEQ ID NO: 377283 - DNA, 570 bp, Homo sapiens
accttataaacattgcccacaaaaaaatgtagaaccaaacgttgctaactgctaaataaatattacctattattagcatacactttaaaagcttttacccaaaacaacattagggaaatataattaaaaacaaaatcacctcccaatccagaaaacctcttcataagagtagaagacaaaacaaaatattattgaaaaaacatttggctaggcgcggtggctcacgcctgtaatcccagcactttgggaggccaagacaggtggatcacttgaggtcaggagttcaagaccagccgagcctgaggccaggagtttgaaatcagcctgaccaatatgatgaaatcccatctctattaaaatacaaaaattagctgggtgtggtggcatgtgcctgtaatcccagctactcaggaggctgggacagragaatggcatgaacccaggaggcggaggttgcagtgagccaagattgcgccattgcactccagcctgggcaacaagagcaaaactccatctcaaaaaaaaaagaaagaaagaaaaagaaaaaacattcaacaagaatatgatgtg

SEQ ID NO: 377284 - DNA, 529 bp, Homo sapiens
cacacagttatttctttccttgttacagcactttttatcttgcttacctaatctggataaagagataatatttgctaattttttggaattttattttgcccagtggagtgtgcagacagggcacaaaagcagattctccttgattagaaaggaaatttataggcactgtagaagagaatattgaaagtgaagacctggcacttacgtagctaaaaagaaaaacttcagaaagaagataaatggcttactagaggctttttcatgtgccatgtgaatgtcttctccrtctcctcaaggaaactttaaaaaatgacactaattaccaataactttggaaatgttttgtggtgagaagcaagatgaatgccacaaaaagcagatcagactttaagatggacaagaagtaaaagataaagctaccagcagtgctgagatgacaggtattattcttgtctgtttcctttttaaaccctaaactactagagataggagagtttctgcaggaactttggatccctcacatttccta

SEQ ID NO: 377285 - DNA, 593 bp, Homo sapiens
cctcagtcactcccccaactactacaaaaaaattaccgcaaaacagctcattacataacctcaattttagtctagggcttctgaccacatgccctgttcctcttaattaatattatagcttgaaaacactttctctcagcttcttcttacgtgaagaaaggtaacctacctggatctcctcccgagaaagctgcatagaattttgcacaaaatttggrggttcatcccatcctccttcctgggtctccagattgtggtaataataatatccaccttttacccagtgcttcacccacttgctgttattatctcctggcagaaaataaaggaaagatagaagacatccagagccacactccccagctgtacgtccagaactgcaggattattagttagtctcacagtctaaatgaagaccactccaaaagctgctccttggatctgtgagagtaaaggggcatgctaagctcccattaaattatggctttgtaatgactaatttagctcatttatgtctataagaagaaaatacctatgaagtccaattatggaattaaccatgattaactttgttcactccaaagccaaagttt

SEQ ID NO: 377286 - DNA, 608 bp, Homo sapiens
aatcggctgggtgcggtggcttacacctgtaatctttgtactttgggaggcygaggcaggtggatcacgaggtcaggagatcaagaccatcttggctaacacagtgaaaccccatctctactaaaaacacaaaaaaaaaaaaaaaagaaaaaaaaaaaattagcccggcatggtggtaggcgcctgcgcctttagtcccagctactcgggaggctgaggcaggagaatggcatgaacccaggaggtggagcttgcagtgagccaagatcgggccactgcactccagtctgggcgacagagcgagactctgtctcaaaaaaaaagaatgacttaaatctctctctgacctccatgtgtgtatatgcacttatgcacacatgcttatatacatgtagctagtaatcagctggttcacaccagcacagctgtaccagttgttaggacattgaaattcttttattttgtttggtacattgttactgtcccaaccctcccatatctttgccatcactccccaactctaattgaaatcccactatatggcaactaaaccagcagtgaccataaggactctgctccatcctgattggtcagtgcttatgttgtgt

SEQ ID NO: 377287 - DNA, 596 bp, Homo sapiens
tgtggagacaatgttaatacgttgtatttgtacattttggtaaagtttgaatactttaaaactcttgtattgcagtatggtttagtggaatgatgacttggggtttttccaacttytaatatgaattttcttctttggaagcatataagttttctcaataaatttttagtgtaaaataaagggactatctacctttttaacgggggcagccatttctcctgtaaggaattacacttaaagaatcagaaggagacttatcagtttattacggcttgaccaagatgtcctgattcagaatttcctgctttccctctgcatagtgtgagtgttcacatctaaacctgagtagtacaaagtgtcttttagtgtattcccttatcaaatatgtgtctgataaagagcatcatcttcaagcagaaggcaaatatgtgatgagtttatttaagaacttgccagaggacaagttcagggtagagaaaattcagacagaaggagagtgtattgtgctcgcatgcgtgtgtgtgggtgcgcgtgcgtgctgtgtttatgctgtggactacagcacctgatgcaacaaatctttacttctgcagatc

SEQ ID NO: 377288 - DNA, 647 bp, Homo sapiens
ttgaaaatgagttcactttagatgtatggatttgtctctgggttctctattctgtttcattggtctatgtgtctgcttttatsccagtaccatgctgttttggttactatagctctgtagtataatgtgaggtcaggcaatgtggtttctccagttttggtctttttgcttaggatagctttggatattctgagtattttgtggtctcatataaattttagaattttttttctatttctgtgaagaatgccattggtattttgataggaattgcattgaatccattgaatgttttgggtagtgtgaacattttaacaatattgattcttccagtccatgaatatcaatttttttcatattttgttgtcttttttatttctttgatcaatattttaaagttttcattgcagatatcttttacttctttggttaggttaattcttaggtatttaattttatgtgtagctattataagtaagattactttcttgattatttttcaaattgtttattgttggcatatagaaatgctattgattttaaaaagtactttttatttcaacacttttaaggtacaagtactttttggttacatgaataaattgtgttgtggtgaagtctgagattttagtgaagccattacctga

SEQ ID NO: 377289 - DNA, 647 bp, Homo sapiens
ttgaaaatgagttcactttagatgtatggatttgtctctgggttctctattctgtttcattggtctatgtgtctgcttttatgccagtaccatgctgttttggttactatagctctgtagtataatgtgaggtcaggcaatgtggtttctccagttttggtctttttgcttaggatagctttggatattctgagtaytttgtggtctcatataaattttagaattttttttctatttctgtgaagaatgccattggtattttgataggaattgcattgaatccattgaatgttttgggtagtgtgaacattttaacaatattgattcttccagtccatgaatatcaatttttttcatattttgttgtcttttttatttctttgatcaatattttaaagttttcattgcagatatcttttacttctttggttaggttaattcttaggtatttaattttatgtgtagctattataagtaagattactttcttgattatttttcaaattgtttattgttggcatatagaaatgctattgattttaaaaagtactttttatttcaacacttttaaggtacaagtactttttggttacatgaataaattgtgttgtggtgaagtctgagattttagtgaagccattacctga

SEQ ID NO: 377290 - DNA, 446 bp, Homo sapiens
tcttctgcatttctgtaattgtaattgatacaaattaattttagaaatctttttatatagaatggacatattacaaaagaattatttgtttarctggtaccataaaattttttcattagcttcactctggtttgcctgatgcatgatgtgattggtttaaaaacaacttcagaaaatgtctcacctaattatgcatttagtcaatggaccatgaaagctttaaagagactcattctagtttactgagtagttatttattcataatagagttttatcagtctcttgagtaaaaagtttagaatttcctcccaccaaaatgcacttacataattacaataaaactataatcttgaaaatgcagtttaacgtgaaaaccacatagatattagatagtcaatatctgaatactgagaagagacaatgtaaaaataatggaaaattttact

SEQ ID NO: 377291 - DNA, 446 bp, Homo sapiens
tcttctgcatttctgtaattgtaattgatacaaattaattttagaaatctttttatatagaatggacatattacaaaagaattatttgtttaactggtaccataaaattttttcattagcttcactctggtttgcctgatgcatgatgtgattggtttaaaaacaacttcagaaaatgtctcacctaattatgcatttagtcaatggaccatgaaagctttaaagagactcattctagtttaytgagtagttatttattcataatagagttttatcagtctcttgagtaaaaagtttagaatttcctcccaccaaaatgcacttacataattacaataaaactataatcttgaaaatgcagtttaacgtgaaaaccacatagatattagatagtcaatatctgaatactgagaagagacaatgtaaaaataatggaaaattttact

SEQ ID NO: 377292 - DNA, 588 bp, Homo sapiens
actgagaagagacaatgtaaaaataatggaaaattttacttgttctaggaataatcctttaaataatcttgtaagtaaaaaattatttccaatcatcttatccatttcttcttccaccattctctttcatgaagaaaaaaagtgttttcgaagcaacagtatctggagggataatataaatacattaaaaaattattaaaactataaccactctctttctaaacttcatccttaaagcaagtgggaaagaagaaagaggccaaatgtttccctaagctgtttaatcatacaaactggattttagttgactcttaaaggagtgcctttgttggatttacacagtcatgtttaaatagctagcttccaagttctcagagtgagggtcaagtaatatgtttttaatttcaggagcagtttctctcggatttatcccaaatcctctaatgttgtatatttctttaagaaactcagttaagagtattattccacttaaataytgagccatcttttatgtccataaagctccttttgaatgcaatcagacctgtgtgaggacagaggataaatggtacatggagaaaaagtgat

SEQ ID NO: 377293 - DNA, 588 bp, Homo sapiens
actgagaagagacaatgtaaaaataatggaaaattttacttgttctaggaataatcctttaaataatcttgtaagtaaaaaattatttccaatcatcttatccatttcttcttccaccattctctttcatgaagaaaaaaagtgttttcgaagcaacagtatctggagggataatataaatacattaaaaaattattaaaactataaccactctctttctaaacttcatccttaaagcaagtgggaaagaagaaagaggccaaatgtttccctaagctgtttaatcatacaaactggattttagttgactcttaaaggagtgcctttgttggatttacacagtcatgtttaaatagctagcttccaagttctcagagtgagggtcaagtaatatgtttttaatttcaggagcagtttctctcggatttatcccaaatcctctaatgttgtatatttctttaagaaactcagttaagagtattattccacttaaatactgagccatcttttatgtccataaagctcctttygaatgcaatcagacctgtgtgaggacagaggataaatggtacatggagaaaaagtgat

SEQ ID NO: 377294 - DNA, 673 bp, Homo sapiens
tctgcgcttgtaaccaactcccaggcattactgccactacctatctgcccagtacacctggaaagcaaaggttggtgctatttgacagtgtcttgtgctacaggatgaaaggacagaagagattagtacttgaggactgatgggatgtggacctaaggattggggctaaatgagaggaacatgtctgaattaattctgaggtttctgctttggataagaggctggatggtgtgctgagaactaatggggaatattcaggaaggttcagaaacgggaatgaattctacttttagtacattaaacaaggaaaagcctgctgtagggtatgaaccaaactcagtgagcttcagatggtggaatgttccattctgaagcccagtggagagcatgaaacatcacatataggtctgggagtaaaaagcctggagatgctggggttgaaaggtgtgtgggaatgaatgagattttctgaagagaggtataagaaatagaacagcaagccaacaacggagccttagggaaattcaggaatacactgagatttctcccctctttacattcggatgctattttagccctctttacctctatcaaaactgatctktccttcactaatcaacctgaatacactccttgtggtggtggggacaatcaatgcctttattttcttcta

SEQ ID NO: 377295 - DNA, 647 bp, Homo sapiens
ggaacaatctccagacagaatgtattttcagtggaagcaaataaatgccagatggcatgccaaataaaaagtcattgatcatagtgaggatcagctgaggtctatcaattctaaaatgagtttctttttattcagcctgttggctttacaccaccagcataatatacatgttatatattttgtttagtgtttgtggtaaaatagcttttgtctcattatatttagttgggagggttggttcyagttctgagtaagatgaagaaaacaagctccacgctctgcctcctactgagcataactatggagagcgtggacagaatgcacgaagcagctacttcaggactgtggaaagtaaatactagcaggtggattggggaaccagacaaaatttgaaatactgcccaactagccataaatttaccagttgtttccctctgttactcgactttggactaaacgcagcccaaaacatagaaataggcttcaggacatgaacagagagctgcaggagaagccctctagttctgtctaagtaagcaagcataatgtggacagggtttagcatctgtgccatcagaatcccagaagaaaggagaaagaatatggagctaaaaaaatcccaagtttggtgaaagaaataaattaca

SEQ ID NO: 377296 - DNA, 647 bp, Homo sapiens
ggaacaatctccagacagaatgtattttcagtggaagcaaataaatgccagatggcatgccaaataaaaagtcattgatcatagtgaggatcagctgaggtctatcaattctaaaatgagtttctttttattcagcctgttggctttacaccaccagcataatatacatgttatatattttgtttagtgtttgtggtaaaatagcttttgtctcattatatttagttgggagggttggttctagttctgagtaagatgaagaaaacaagctccacgctctgcctcctactgagcataactatggagagcgtggacagaatgcacgaagcagctacttcaggactgtggaaagtaaatactagcaggtggattggggaaccagacaaaatttgaaatactgcccaactagccataaatttaccagttgtttccctctgttactcgactttggactaaacgcagcccaaaacatagaaataggcttcaggacatgaacagagagctgcaggagaagccctctagttctgtctaagtaagcaagcataatgtggacagggtttagcatctgtgccatcagaatcccagaagaaaggagaaagartatggagctaaaaaaatcccaagtttggtgaaagaaataaattaca

SEQ ID NO: 377297 - DNA, 573 bp, Homo sapiens
cacacacaacatttatcaattaagttcaccatcttatacaggtgcagtttgtggtggccgaaagtaattacaatagtaacatcatcaaagatcactgatcacaattaccataacagatgtaatgaaaaagatatagtgaaaaacagatataatgaaaaagtttgacatattgtgaaaattaccaaaatgtgacacagaaacacaaagtgagcatatgctgttggaaaaattgtgccaatagacttgctcaatgaagggctgccacagatcttcaatttataaataacataatatctgtgagactcaataaagaaaatacaataaaatgaggtatgcctgtagtttcttgaaactcacctgacaaaggaaaatgaacaatctgtttatactgactkacacggagggtaaaatgaagttatttgcattttttcttattctttttaaatttttgtttatgaggcgtgtcagtggattacaaataataccgtggaagcttagattgactttactgtaattctaaatcattcaaaagcttgacagtccctggcatttcgtacatgtataaacacctca

SEQ ID NO: 377298 - DNA, 503 bp, Homo sapiens
ttcatacaaaacaaataaatataaatatagaaataaaattgacagtgagacatcacttttcatgtatcaaaccaaccaaatacaaaaccaaatgaactcttaagggaaacggtgtggttatatgtacgaaaattcaaatrcacatgtacttaatttagtcagttctcttccaggaattttttcctgtaaatgcagtgctgcaagggaatacgagagtgggaggaaacatcacccccaaaataaacataagctaagctctttactgtgttttacacgttggtgaaggcccaaccatccaccatgttctaaagaaggctgatcagttccaccttttttctcatcctcgctggccaatctatcaccaagttcacctaatctgtccacctgaacaccacccaaacgcattttaaattatcatctatttctgtcctaatctagacttttatagtcttgattatattcagcctccctgccttcagagatgtttgccagactgaagctgg

SEQ ID NO: 377299 - DNA, 624 bp, Homo sapiens
tgccatggtgaaagcaacatttgagctaggctttcagtgatagatatcaacagacagataaatgaaaagacatggctaggacagggaagcaacgtgaacaaagacacagaggtaggtaaatgataacaagggaagaatatgtagtaggtgggcgagctggagagaatctggtctgcatccagattgtgaaaaaygttaaacgcttggctaggagaaaagcacttactttgatgactatttgagaccagggctatagtatacagccacacaggttatgcacagccaactccaggggtcccattcatatgcattatggggttggtcaaccttttctgttttatctagcctgatagtaaatattttaggctttgcaggccacgtggtctatgttgtaactactcaactctgcctttggagctcagaaaaagttatagacaatgcgtaaacacatgaatttggatgtgtcccaataaaattttatttatagacactgaaatttgaatttcacaaaatgttactcttctcactttttaagccacttaagaatgtaaaaacagaatgttcttagctaacaggtcatacagaaacaggcagcagaccagatctggcccctaggatgtagcg

SEQ ID NO: 377300 - DNA, 590 bp, Homo sapiens
ctttaattgagtaacaagtgcaaggtgtaaaatgtcaggcacagattgtggcgatgaaactcttgagatgggcaagggccaggacatagggacgtcatatgatatggccagaaaacgagcactgttagatggatttttctaggtcagatttattttggaaagttttktctggttggtgaatggatttcaaaaagatcaagcctggaaaatgagataccaattagggagctattatattatacaacttccagtgaaaaacaatgagagtgtcaaggaggagggatggtgagtaacagtgagatatcaggaatatttagtaagttaaattgtaaggactaggatgtgtaggttaagggagaaggctaaggcgactgaggtttcatgtcgggtggctgggcagatgaagatcacctaagcacagacctggattgcagatgaaagagggaggcagagatagagaaagatttgggcaaagaagatggtgagttaattttaggagcgctgggaaaatcaggatggcagattttgaggtcatcagctcgtgctcagctttaaaaaaaaacaaagaaaaatggatgttgtacttagag

SEQ ID NO: 377301 - DNA, 590 bp, Homo sapiens
ctttaattgagtaacaagtgcaaggtgtaaaatgtcaggcacagattgtggcgatgaaactcttgagatgggcaagggccaggacatagggacgtcatatgatatggccagaaaacgagcactgttagatggatttttctaggtcagatttattttggaaagttttttctggttggtgaatggatttcaaaaagatcaagcctggaaaatgagataccaattagggagctattatattatacaacttccagtgaaaaacaatgagagtgtcaaggaggagggatggtgagtaacagtgagatatcaggaatatttagtaagttaaattgtaaggactaggatgtgtaggttaagggagaaggctaaggcgactgaggtttcatgtcgggtggctgggcagatgaagatcacctaagcacagacctggatygcagatgaaagagggaggcagagatagagaaagatttgggcaaagaagatggtgagttaattttaggagcgctgggaaaatcaggatggcagattttgaggtcatcagctcgtgctcagctttaaaaaaaaacaaagaaaaatggatgttgtacttagag

SEQ ID NO: 377302 - DNA, 605 bp, Homo sapiens
ctatacattttaggaagtaagcatctttccggtctttacagaatggctttggcaggaagagctcttcataaattagcctgtctagaaattctaggcagcctgacttagattccatgtgcaggcttgctgctggagtccttgggcagagtaacctgatacctaggtcaacaagtgagtaggcctggaattggctccacatgggatggtctggactttgggtttgctgggggcaggcctgcagcctgagttcacatgggccatctgggtgtcagggcccactaaggtaggcttgtcaactggctattcagggatatgccttgagtctgcccatagaggccagcctaggactggagtttacccaggtgagctggatccctagattttctggggcagcctggaccctgggtccagtgaaacctgggactgcaggcaccagtctggtgctgaggcastcctggagcctgcatccaccagagtggtcctagagccttggtccatgggttccagcctggcactggggcctgctaaggcaggcctggactcttggtctgctggagcactgagtcatgggcgctaacctaatgccaaggcctggtggtgggata

SEQ ID NO: 377303 - DNA, 608 bp, Homo sapiens
tttcttaggctctttcgtatgggcaatttttccctcagaagtttgtttccacactagccctccccaccttttttgacttgattctttccagtcaatgcaattctttctggtccctgaaattctatagaatgaagcagttgtatgaaatgtaagaagttggcgtatttaaggtagactatggctctttgctttataccacttgcaaagccaatgttgagtacctgagtctaaaaatacttttcactgccaatcacatgtacagactaggttatttggtgtataatctgattaccagtatttaatgaaaaatactgattgcatcctaggatcacacatccttccaagaagttctatttaaatcactctgtaatttctcttactatgtaattkgcattgtgacagtttgatagtttataagggccctttgaaagccaacttgaactgtagggcaaaatgtatttagcacatttttaaagcacattaaaaaagacttgtcatttgataaatattaatgcatttattaatagatgaccaatggctgctaaatgatgacaaaagtttgagatttcagtgactacaagcaaatccattgctattgaagttaaaaa

SEQ ID NO: 377304 - DNA, 589 bp, Homo sapiens
aggagtttatccaactgtgctctgttataaaagaaaacagattcttattgaatttatgcaaacaaccacattgctctgaataaagaatattcagtttgtgaattccagagaaattaagcagagagagtgaaatatttctcaaattctgtatactttattcaattgttaaaggatataagtagctcaaagataaaaaaaagttctctggattcctgaaaaacaaaacaaaaagaatcacaaatgttcaaayaaaaagcccataaattattccagtcctccatcacttgttcatgcaattaatacctactttgcttcatattgggttagtaattttcatgagcacatcagcctttttattagagtcatggaggtttttctctagttcagtggtaccatgtccaaagttatcagaaacctacaattaagagtccttttcatgaactccccccaaagagcaagctgtagattgtagctgattataagctactttttggggaaaaaaagcaaaaacaattgtggatgacaagtctaaggacagacacacttgtccaaaaatggttatttttgtggcataccaaaatttaatata

SEQ ID NO: 377305 - DNA, 589 bp, Homo sapiens
aggagtttatccaactgtgctctgttataaaagaaaacagattcttattgaatttatgcaaacaaccacattgctctgaataaagaatattcagtttgtgaattccagagaaattaagcagagagagtgaaatatttctcaaattctgtatactttattcaattgttaaaggatataagtagctcaaagataaaaaaaagttctctggattcctgaaaaacaaaacaaaaagaatcacaaatgttcaaataaaaagcccataaattattccagtcctccatcacttgttcatgcaattaatacctactttgcttcatattgggttagtaattttcatgagcacatcagcctttttattagagtcatggaggtttttctctagttcartggtaccatgtccaaagttatcagaaacctacaattaagagtccttttcatgaactccccccaaagagcaagctgtagattgtagctgattataagctactttttggggaaaaaaagcaaaaacaattgtggatgacaagtctaaggacagacacacttgtccaaaaatggttatttttgtggcataccaaaatttaatata

SEQ ID NO: 377306 - DNA, 589 bp, Homo sapiens
aggagtttatccaactgtgctctgttataaaagaaaacagattcttattgaatttatgcaaacaaccacattgctctgaataaagaatattcagtttgtgaattccagagaaattaagcagagagagtgaaatatttctcaaattctgtatactttattcaattgttaaaggatataagtagctcaaagataaaaaaaagttctctggattcctgaaaaacaaaacaaaaagaatcacaaatgttcaaataaaaagcccataaattattccagtcctccatcacttgttcatgcaattaatacctactttgcttcatattgggttagtaattttcatgagcacatcagcctttttattagagtcatggaggtttttctctagttcagtggtaccatgtccaaagttatcagaaacctacaattaagagtccttttcatgaactccccccaaagagcaagcygtagattgtagctgattataagctactttttggggaaaaaaagcaaaaacaattgtggatgacaagtctaaggacagacacacttgtccaaaaatggttatttttgtggcataccaaaatttaatata

SEQ ID NO: 377307 - DNA, 616 bp, Homo sapiens
actgccagtgtatttctttacaatgtttcttaattttcctttatcaagacttagagttttaactatgagcaatgttaatgagtcaaatttttycaaatttctgtcatgttttaaagaatattttactatccaaactttttcaactttctgttctctctgtatgtgcaggaagagagacatatagagaaaccagaaaaaaacaacatgacttacacaggccattgatgatgtgcttggtctttctgtttgttctaaattttctttgaaaaaaaccagtcattttattttaggacaaaagttcactatataagatgctttctcatataaaattatccttttctttataaccttttttaccaaaaatatatcttcacatccataactttctttacatctcattccccaacttactgcttcctttctcccttgtttcataaataaccttttcaagtccataatttaaattaaactttagataacttgtgaattatacaaaattattctttttctcataaagaacacatcttctttggcacattttatatagagaattacttattaactaatgttcctattcttactaatcttaaattttagtgaaaacctacaaagcaag

SEQ ID NO: 377308 - DNA, 565 bp, Homo sapiens
taaccaacagaattctgtacttatgcacacctaaagacctgtaaaggaatgtttaccacaacaccgctgaagtgtctattctcatccttaaatattcattgcagtcctatttgcaagaatccaaactgaaaatagtgcaaatattcatcaatgcaaatagctatggattttggaatattcacagaatgaagtaccattaagcaatgaaaaacaaatgaatatccscacattcgccaagaatgaatctcacaaacataatattgaggaaaaaagccaaacacaaaagataacatagagtgtgattccacttttgtgctattcaaaaaagtcaacattgaattatggtgtaagaagtaaatatagcagttttcctctggttgggggaaaagttgctggaatgaggcataagaatacctctgggatgccatttccatagatttggtcactttgtgaaagttcacagtttgtgccccttctggacgtgtatcttaagtcaataaatgtttatttaaaacatttttaaacgtgcaaaattcattatggtgttataaattagaatagcagt

SEQ ID NO: 377309 - DNA, 565 bp, Homo sapiens
taaccaacagaattctgtacttatgcacacctaaagacctgtaaaggaatgtttaccacaacaccgctgaagtgtctattctcatccttaaatattcattgcagtcctatttgcaagaatccaaactgaaaatagtgcaaatattcatcaatgcaaatagctatggattttggaatattcacagaatgaagtaccattaagcaatgaaaaacaaatgaatatccccacattygccaagaatgaatctcacaaacataatattgaggaaaaaagccaaacacaaaagataacatagagtgtgattccacttttgtgctattcaaaaaagtcaacattgaattatggtgtaagaagtaaatatagcagttttcctctggttgggggaaaagttgctggaatgaggcataagaatacctctgggatgccatttccatagatttggtcactttgtgaaagttcacagtttgtgccccttctggacgtgtatcttaagtcaataaatgtttatttaaaacatttttaaacgtgcaaaattcattatggtgttataaattagaatagcagt

SEQ ID NO: 377310 - DNA, 565 bp, Homo sapiens
taaccaacagaattctgtacttatgcacacctaaagacctgtaaaggaatgtttaccacaacaccgctgaagtgtctattctcatccttaaatattcattgcagtcctatttgcaagaatccaaactgaaaatagtgcaaatattcatcaatgcaaatagctatggattttggaatattcacagaatgaagtaccattaagcaatgaaaaacaaatgaatatccccacattcgccaagaatsaatctcacaaacataatattgaggaaaaaagccaaacacaaaagataacatagagtgtgattccacttttgtgctattcaaaaaagtcaacattgaattatggtgtaagaagtaaatatagcagttttcctctggttgggggaaaagttgctggaatgaggcataagaatacctctgggatgccatttccatagatttggtcactttgtgaaagttcacagtttgtgccccttctggacgtgtatcttaagtcaataaatgtttatttaaaacatttttaaacgtgcaaaattcattatggtgttataaattagaatagcagt

SEQ ID NO: 377311 - DNA, 568 bp, Homo sapiens
tcctttcctttttactaagactctaaccttcacatacagttgactttttctttgtgtttcataaataatttatgttctttgtgtgtgtgttttccattccttttctctttgtgcttcagtacagatattaaatttttcwattgaattcttaattttagtcactttttcatttctatgatttcctttttttattagtttacagttttctgaaattctacattgtgtcttttaatttagtaataattttgttggatatagaattttggttttatatgaaattattttaaataatatatgataatacttatttaaaaatccatacctggtaactgcaacatcagaatctcttataattctaattctattttttcctggttctttgaaatattttacaggcctagttgttttagattgatgacaaattttgtgcataaaaaagtcaacataatttgagtttctgaatttttatttccctctctagaggatttaaatttgctactgccaggctgttgagctattggttgattactgtaatctacttaatctaattagagattgggcaagttgg

SEQ ID NO: 377312 - DNA, 568 bp, Homo sapiens
tcctttcctttttactaagactctaaccttcacatacagttgactttttctttgtgtttcataaataatttatgttctttgtgtgtgtgttttccattccttttctctttgtgcttcagtacagatattaaatttttctattgaattcttaattttagtcactttttcatttctatgatttcctttttttattagtttacagttttctgaaattctacattgtgtcttttaatttagtaataattttgttggatatagaattttggttttatatgaaattattttaaataatatatgakaatacttatttaaaaatccatacctggtaactgcaacatcagaatctcttataattctaattctattttttcctggttctttgaaatattttacaggcctagttgttttagattgatgacaaattttgtgcataaaaaagtcaacataatttgagtttctgaatttttatttccctctctagaggatttaaatttgctactgccaggctgttgagctattggttgattactgtaatctacttaatctaattagagattgggcaagttgg

SEQ ID NO: 377313 - DNA, 554 bp, Homo sapiens
atcctgggtttaaaaagctgatcacagagaaagtagaaaaatccataatatcatccttttcacagcagtacttataagctttgagtttgtatttttccactcactgcatgaaaataccaatagtgtaataatgcaacttcgaaaaaatcaaagagtagctgtgaaagccctcagcccacaggttgcygtgatttgcacttgagtatgctcaagggttcattttattttcgactttaaaattcacactcaattttgacacatgagacatatgtctcagctccttacagtaccaatcctgtaaaaacagatgactcagccaccagttacaacagcatattattgcagtattcaacaaaacatgccttatgctgactagagagaggtttcaagttgatgaggcaaaaacagcaatgtcccatctcagaacatatgctatactatagtaaggaaaaaagagccaaatataaacactaaacaatgttgcattgctgaaatgtaatccctttaaaacattagatgtctttacatttctcattattctattattaatttta

SEQ ID NO: 377314 - DNA, 596 bp, Homo sapiens
tcagacaaacaaaagctgaagaaatttatcaccactagacctgctttaccccttggtgacctcaaagaaaatacctatggaagttacacaaaagaaaaatagaaataaaaaaaaactattgacacaaaaaagaaatgcaaaagaagacagcaaagggaaaaatgaaggacaaaaggactagaagataaacaaagacaayagttaatccttccttactgataactacttaaaattgaaataaactaaactccttaataaaaaaatacttaatatatctgtatctaacactagggcacccaagtatataaaatgaacctgaaagaagaaatttataataatacaataatagcaggagacttcaatatcccactttcaataatagacagaacttccagacaaagttaataagaaaacagtgggcttgaataacactacagaccaaatgaaccaaacagacatatataaaacattctatccaacagcagcaaaatacattttgttttttttgaccacatacagagcactctccactatagatcacatgttaggtcacaaaacaaatcttaaccaacttaagaagatcaaactcataccaa

SEQ ID NO: 377315 - DNA, 647 bp, Homo sapiens
gcgcagagtggcgaggggtgcatgagcaagtgagcaccaggtccagccactgagcacagccaggcatgtcagctgctgaggggtgggcagctccaggtgccgtcacagacactggttccctgtgaggctgtggctagaccaggcataccacaagcagcttctactgaagacaacaggaacatggtagcagctggaagcttgyagataccaagaactgcagagctccaaagaggatgtcactgcccttgctccaggagctcctaggtctgggctccccgaagggctgcagctcttctctcctctctcttcttttcttctcatcacctgcaatgtggtgagtaggaggcacatttcagccctggttgtgttatagctcttttactcccaccacttggtgggtctcagttcttctcccatgtccaggaagaatgaggtatacggacaactggagggtgagcaaggtgaagagtgctttattgagtgacagtacagctctaaggagacctagagtgggtagctcctgtccacaggcaggtagttccaatgagtgggcagctcttagcagagagtggacccagagtgggtagcttccatccacaggcaggctatcccaacgtctgtgcagccctcagtggagagaagacctg

SEQ ID NO: 377316 - DNA, 647 bp, Homo sapiens
gcgcagagtggcgaggggtgcatgagcaagtgagcaccaggtccagccactgagcacagccaggcatgtcagctgctgaggggtgggcagctccaggtgccgtcacagacactggttccctgtgaggctgtggctagaccaggcataccacaagcagcttctactgaagacaacaggaacatggtagcagctggaagcttgcagataccaagaactgcagagctccaaagaggatgtcacygcccttgctccaggagctcctaggtctgggctccccgaagggctgcagctcttctctcctctctcttcttttcttctcatcacctgcaatgtggtgagtaggaggcacatttcagccctggttgtgttatagctcttttactcccaccacttggtgggtctcagttcttctcccatgtccaggaagaatgaggtatacggacaactggagggtgagcaaggtgaagagtgctttattgagtgacagtacagctctaaggagacctagagtgggtagctcctgtccacaggcaggtagttccaatgagtgggcagctcttagcagagagtggacccagagtgggtagcttccatccacaggcaggctatcccaacgtctgtgcagccctcagtggagagaagacctg

SEQ ID NO: 377317 - DNA, 647 bp, Homo sapiens
gcgcagagtggcgaggggtgcatgagcaagtgagcaccaggtccagccactgagcacagccaggcatgtcagctgctgaggggtgggcagctccaggtgccgtcacagacactggttccctgtgaggctgtggctagaccaggcataccacaagcagcttctactgaagacaacaggaacatggtagcagctggaagcttgcagataccaagaactgcagagctccaaagaggatgtcactgcccttgctccaggagctcctaggtctgggctccccgaagggctgcagctcttctctcctctctcttcttttcttctcatcacctgcaatgtggtgagtaggaggcacatttcagccctggttgtgttatagctcttttactcccaccacttggtgggtctcagttcttctcccatgtccaggaagaatgaggtatacggacaactggagggtgagcaaggtgaagagtgctttattgagtgacagtacagctctaaggagacctagagtgggtagctcctgtccacaggcaggtagttccaatgagtgggcagctcttagcagagagtggacccagagtgggtagcttcyatccacaggcaggctatcccaacgtctgtgcagccctcagtggagagaagacctg

SEQ ID NO: 377318 - DNA, 647 bp, Homo sapiens
gcgcagagtggcgaggggtgcatgagcaagtgagcaccaggtccagccactgagcacagccaggcatgtcagctgctgaggggtgggcagctccaggtgccgtcacagacactggttccctgtgaggctgtggctagaccaggcataccacaagcagcttctactgaagacaacaggaacatggtagcagctggaagcttgcagataccaagaactgcagagctccaaagaggatgtcactgcccttgctccaggagctcctaggtctgggctccccgaagggctgcagctcttctctcctctctcttcttttcttctcatcacctgcaatgtggtgagtaggaggcacatttcagccctggttgtgttatagctcttttactcccaccacttggtgggtctcagttcttctcccatgtccaggaagaatgaggtatacggacaactggagggtgagcaaggtgaagagtgctttattgagtgacagtacagctctaaggagacctagagtgggtagctcctgtccacaggcaggtagttccaatgagtgggcagctcttagcagagagtggacccagagtgggtagcttccatccacaggcaggctrtcccaacgtctgtgcagccctcagtggagagaagacctg

SEQ ID NO: 377319 - DNA, 603 bp, Homo sapiens
ttttataggtgacctagcgtttctctctggctgcccttgacagtttttccttcatttcgatcttggaggatatgatgattatatgtcttggggttgatcttctcatggagtatcttaatggtgttctctgtatttcctgaattttcatgttggcctgtcttgctagattggggaaattctcctggataatatcctgaagtgtgttttccagcttgtttccctactccccatctccttcaggtattccaatcaatagtcgtttgatctttttatgtagtcccatgtttcttggaggctttgttcattcctttttattattttttctctaatcttgtctgcatgccttatttcagcaaggtggtcttccaactctgatattctttcttccacttggttgatttggctattcatacttgggtatgcttgtgtatgtttcatgaagttcttatgctgtgtttttcagctccrtcaggtcatttatgttactctctaaactggtttctctagttagcagctcctctaaccttttatcaaggttcttagcttctttgcatttggttggaacatgttttttagttcagtggagttttttttaattaccca

SEQ ID NO: 377320 - DNA, 365 bp, Homo sapiens
ttcctgagaaagaaactcaggtaaagcaaatgtaagtttctcaagttttaagactagaaaggtcaatttccatgtttattcaaataaactgtaaacatcagttttatggaacaattgaaccagattcagtaggaggattgcttgagtccaggaattcaagtctgcaatacgctatgatcatgtctgtaaatagccactgcactccagcctgggcaacatagagacctcatctcttaaaataaataaagtaacactgctgctgatttgaatcaatcycttagtggaatgataatgttgagcttctcagagatcaaagctaaaggctttttgtgttcattaacctgtgatgttttcacaatcaataa

SEQ ID NO: 377321 - DNA, 613 bp, Homo sapiens
gttgagggctggaaccacgctcactgcttggacctttgagctattatggggctgaggtcagctcacccatgtatccaagaggatgaaatgactgcaataaaataatacaatggagccattgaaaattagttcaaaataatattttttaatattcttaaagacataaaggtagaaactcattgaaaaaaatttgaaagagcaatgaagaaaaataggcagaaatgaaaaaaagtgtaggataaaagggaagagaagaaagaggaggaggaaaaggaagtagaaagactgaaagtaaaaataatgtggcactgaaatctttttaattgcatagaattagatctgtagagagatktaatgaattggaagatggtactgaggatttcatgtagggcatcagaaaggggatgacggagggaatgttctacaactcccattccagtaatcaatttattgcctcttagctccaaattcacccttcaatacatgctctgtgagaacagatggattcctttcagcatttctcttataaagtgagcatgacattgacatttctcagtcaagggcactggaaataaggctgtagaggggaatattacaaacatcgtctttacct

SEQ ID NO: 377322 - DNA, 620 bp, Homo sapiens
aaaacagtgtatttcatatacattccttttttagagatgccaacgtttaaacctgacatttgagttttgaatcaaattttgtagacaaaacatctttagagaacagaatgcaatattcattatttccaggcatgttattgttggatgtatcctgcagcagtgaacctgaaagagtggcaggatraaaaagtaagagttcaagagaaacgaaagccaagacagaaagagaggagagcaaaagatgaagagaaagagaggaagagggaggagaggagggaagagaaaaagatctgtatttgttttactacctagtgacagccatatagaatgacataatcctgtttttgtaggactgttttgttaaagtaagaatattgtgtttgtcttatttaaaacatttcataaccgtgcaccaaaagaaagatatgaagaccctcctgtttcatttcctgcctccatagaatgttgtgttactaaaatatttttattacagcagaacctgaagcaatataaaatgtttgcttgaggattatttttagtccctttaagctgaacttctgtaatgaaatctatttagagacattccataataccctatggttactagcttatgcaaatga

SEQ ID NO: 377323 - DNA, 538 bp, Homo sapiens
tcccctctaaggataactcttccacctctcctaagtcattgtgatttgtgactgaggaaggctcacagaaatgggattcaaagatggagaagaaagagaatgaataacaccaggagccagccggctgtgaacacatgtctgcttttctcatgtggcagtgctgaagggaagcatgttcagagggattcttcaacactgaatctttcacttcacacatgttattaaatttttgtcaagacagcatttcacataaagtctgtctggttagaccacacatctaacacagaacaactcttaacaatctttagcatttgagcgtctgtgaggatttctggagctcatggtattagcactaattgttttgttgttgtttgctcttaattgtgtgaaagattaagtatacaggcttctattattcaaggtgtttatatayaattgttagggaaattgagatgcagaaagatgaagtatttggcaagattgcaaggtgttcctcacaaacatatcaaagagtaaatgccacagttcctgaacctta

SEQ ID NO: 377324 - DNA, 563 bp, Homo sapiens
tgaatttcacacacaaggggctaccttgacaatcctgacacttgtatgattattgcatattatcctgttttttaaaaacgtgtgtgcctaaatatcccagagtaatgattatatgataaaatgtcatactgcttttgaaatgctttcagtcctttcatgacagaaaattaggtagaaagtccaattttccatatctctgtgtaggcttttttatttctaaatttagattaggtagacatcttaaagtagttttatagagaaaagtgcggtcatatttttaggttccttatgtttgacacttgcattttttaagcaagcartactcattgattacctaggaaagtttccttatgctttgttaatttgatagtatgggcaatttattaggtgtttcctgtttttaactgcagtctgattctgaaggaaatgagcagagtctgtggcacagcagatgagtctgtgtctgatgagagccatgtgggccaaactctcatttttcataagtgctgtcattttacagatgtatgacctttttcttctttcttcagaggaggaggggttgg

SEQ ID NO: 377325 - DNA, 521 bp, Homo sapiens
ggaatattctttgggaggtgagtaaaatttccaaattcacttacatatgtgaccctcgattcatgttatttctacaatttcattttttcctctttggccccccaaaactgcgactcttcacccagctsccatgttgaaaatactgtttttattacccatgtctaacaccacaacccacattcactgctgaattcttctaccttcttaaacctgtcatttttcaaaagacctgtatttgtcctttttttattgtaaaaaaaagaacatgaaaaagatttactcatgaattttgagttgaggcagaacaaaaaagagaactttaagtcaaagtaatagtttgatagagagtcttacaaagaggttctttgctttttcttttacagcttgactttccacaattcacaagggaatactgccgattaaataaaaaaaatttaagccatgttttctagtaaataattaaattcaattagaagttaatgaattttcactgttaaatgtaattattttcagaaaaaatt

SEQ ID NO: 377326 - DNA, 521 bp, Homo sapiens
ggaatattctttgggaggtgagtaaaatttccaaattcacttacatatgtgaccctcgattcatgttatttctacaatttcattttttcctctttggccccccaaaactgcgactcttcacccagctcccatgttgaaaatactgtttttattacccatgtctaacaccacaacccacattcactgctgaattcttctaccttcttaaacctgtcatttttcaaaagacctgtatttgtcctttttttattgtwaaaaaaagaacatgaaaaagatttactcatgaattttgagttgaggcagaacaaaaaagagaactttaagtcaaagtaatagtttgatagagagtcttacaaagaggttctttgctttttcttttacagcttgactttccacaattcacaagggaatactgccgattaaataaaaaaaatttaagccatgttttctagtaaataattaaattcaattagaagttaatgaattttcactgttaaatgtaattattttcagaaaaaatt

SEQ ID NO: 377327 - DNA, 404 bp, Homo sapiens
taatctcagatgtaacatctccgtgtagccctcatccagggggaaaacattacacagggtgtgaaaaccaagagccagggatcactggaggccaccagagcatgcctagggtactggtcattttatagatatagagaataaaacctagagatatyaatttttccagtttattcagttaaaagtaaattagagtaattctaattctctgctaatcatcctttcaggattactgataaattaaaatataataattattattcccaaaatgaacatatatttttgctttgctatgtaccagacaaaattaagtactttatatatgtcaccgcatttaatccataaaacaaccctctataataagtatacttattaaatatatttacagataagaaaaatgaggaaca

SEQ ID NO: 377328 - DNA, 510 bp, Homo sapiens
aaacaaaagaacttagctaactaccaccttgaattactcttatttcttcattgtgtctgcggttaatgaaactgtgaatgaataagactgaagatgcaatggtgatggcttgacgwattttttttttgttttcttaaggggtgtggccagatttaaaaaaaaaaaaaaaacttgtgtactaaaaaataattgtctaagagtgagaacctgtcatttaaataggagtggattccctctaaatttcaccctagtggctcttatgaatcatagaaaatgggcaactccctgtggctagcattccttctttccacctttaatgacgccaattagcctgggtggggttaacagagaggttaccttacatatgaggccattttagtaataagtttcccttggaaaagggtctgtaggcttcaggcaaactaaaaataaagttagacagcttaaggatagggaaaagttagacttcaaaattagaaaaatacgtaaacattactaatcagtgtttgt

SEQ ID NO: 377329 - DNA, 644 bp, Homo sapiens
attttatgaccaggtatgtaaatgaagttcaagtccaccatgaacatttcactggccagaacctgatcccacggttgcaacccaccagcaaagcaagctggtaaacataatcctctgttcgccccagaagagaaaatgaaattgataagcatctagtcagtttctgctacaaatgccaaagaaaaagttgtttcctgtcccataaggaacatctccaagaacatagtgaaagtgaagaagtagattatctcattttggaccaggagcggtggctcacgcctgtaatcccagcactttgggaggccgaggcgggcggatcagctgaggtcaggagttcaagaccaggagttcaccaacatggtgaaaccccgtctctactaaaaatacaaaaaattagccaggcatggtggckggtgcctgtaatcccagctacttgggaggctgaggcaggataatcgcttgaacccaggaggcggagcttgcagtgagcctcaatctctccactgctctccatcctggacaacaagagcaaaactcccatctcagaaaaaaaaaaaattatctccgttcttcttggaccacttgacaactaccttgtttcagatgcctctctctttgcagtgagatacatttgccatcaggca

SEQ ID NO: 377330 - DNA, 489 bp, Homo sapiens
attgtttgcttccccttctgccatgattgtaaatttcctgagggctcctcagccctgtgggactgtgagtcaattaaaccttttcctttataaattacccagtctcaggtatgtccttacagcagcatgagaacggactaacatgtggtcccagtgagaccacttttctcctaccacataaaacaccctgcttcaccaatgcaaattgcttaagaaaccaccccctaaaggagaatatcattagatccgaccatttactcttcttacaagaccattaaagctaatgccaacatgcactatgtccctagttaacrtaatcccatcaatgggagtgcaagccaccccatatatttttaggcagttttcattcccagatcttatcctctaagctatgtagaccctctaatctgattgaagccctcagtcctaactgattctcccagtgggtcccatttgtggttgtactggcattttggtgcaggaatcaga

SEQ ID NO: 377331 - DNA, 612 bp, Homo sapiens
cagtctattctgcccgttattaaaatccaaaacctatgaacttaacttcaattgcaagaaacttcccttttagaggctaattattatgtttttgtttttgtttttgctttgagatgtagtctccctctgtcacccaggctggagtgcagtggcatgatctcagctccctgcaacctctgcttcctgaattcaagcaattctcctgcctcagcctccagagtagctgggattacaagcatgcgccaccatgcccggctaatagaggctaattattatgttggtgcaaaagtaattgcggttttagaccatgaattttaaatcattataactaggctcaaatacatctttattaatcacaatmggaaccattaaaattaacacatttttgccaatgagaaataagtttgtttattcctgtagcataaaaatctgtgcttcgggatttgacaaactcttagaaagcattttctgcatcctgctggttgtagaaggttttccctgcaaaacaaacaaacaaaaattgtcgagatacttgaagaagtggtagtcagttggcaagagatcatgtgaatatggtggatgaggcaaaattttgtagcccaagtcgttcaa

SEQ ID NO: 377332 - DNA, 528 bp, Homo sapiens
aatgacaagacagtaagtacataaattcattttgtttcaagtgttacaaagaacaaaagaggccaaatagcccataaggtagtctcctaaatggatattttccggtgatatcccatggccctcactggttgacactgccctataaaacattcctacagcagatgtctgtgtctgtggtaatgacccagatgggctyaggttgagaattgcttgaaagcaggggttttgtcttattattctttgcgtctgtagtgcctagagtgaccagtagatggaaattgttggttcgcatttcagctttgcaaatcaggaatatgttctctaaaagctgtgacattgctccagtgattgagctagaaatggaactaaaacggagggaaagagcttagtaaattttttcttaaactttttttattaaagtcctttatgaagtaaatggcccatgagaatccatcctcagtaactttctctcatccagtcgtacgtggctgacttctgcaaagcctgatgtgccattgcctagcaaga

SEQ ID NO: 377333 - DNA, 528 bp, Homo sapiens
aatgacaagacagtaagtacataaattcattttgtttcaagtgttacaaagaacaaaagaggccaaatagcccataaggtagtctcctaaatggatattttccggtgatatcccatggccctcactggttgacactgccctataaaacattcctacagcagatgtctgtgtctgtggtaatgacccagatgggctcaggttgagaaytgcttgaaagcaggggttttgtcttattattctttgcgtctgtagtgcctagagtgaccagtagatggaaattgttggttcgcatttcagctttgcaaatcaggaatatgttctctaaaagctgtgacattgctccagtgattgagctagaaatggaactaaaacggagggaaagagcttagtaaattttttcttaaactttttttattaaagtcctttatgaagtaaatggcccatgagaatccatcctcagtaactttctctcatccagtcgtacgtggctgacttctgcaaagcctgatgtgccattgcctagcaaga

SEQ ID NO: 377334 - DNA, 561 bp, Homo sapiens
aatgtactctggttctgtttcaaaatactaatttttaaggttttttcccaggcggatgaggtggggtgggatagagtgggagataggaggtaatatggaatggagtaattttttttttttttttgagacgtagtctcgctctgtcacctaggctggagtgcaatggcacgatcttggctcactgcaacctctgcctcccaggttcaagtgattctcctgcctcagcctcctgagtagctgggattacatgtacctgccaccatgcccagctaattttttgtatttttagtagagatggggtttcacatgttggccaggctggtctcgaactcctgacctcctgatccrcctgcctcagcctcccaaagtgctgggattacaggtgtcagccaccatgcccagccagaatggagtaattttgaaatctccatcccctctttcgtgttttaatctgtttctttcagtgttttactttagattaggaaagacaaatctctttttttcaaacttcacttttgaagtgtggtttttggtggattatcttgatggaacatttctctc

SEQ ID NO: 377335 - DNA, 500 bp, Homo sapiens
aatgaagccaggtctaaagaattcctrggattctttcttgttattggattttctgtgatctgccttaaattaaggactcaaagtaatataagccagtttctgaaaaatgtatgtaaatgaaatgtttccctagctaaaggtgaggtatttagaaactatagaatgtgatccatacagcaaaagatggtagaatatagtctagaccgtaaagaaagactgtggagtgtggtgggttttttttgcacttcagtcacctcctttctcattgtcctatgtcccctgatagatgctcccctcaagataatgacttctctcctgctctactctggctcataggaattgcccatttcccagctcctctcaggtgggccaaccctgagagtgagagcatccctcctttgccacatacctggccatctgctgctctgtttcattgtggacctgttctttgtcaagaagctggggatttgataggtggtaatcagaggcatgtctgggtt

SEQ ID NO: 377336 - DNA, 526 bp, Homo sapiens
gactaaaattgttagaacaattctgtgcaatctgctgtacttctgtgaggtaaacatttttttccctcctaatcctcttattcttattgtataaaggaataacaatttttctttttaagttgaatcaatttgttcttagtcatataaagttggaaccaaagttgaagtttggctagaaattgcaagatgtctctaacctgtgaaaagtcaatggtgacgctcttggtacatttgaatgtcatgaaactactacaaagaaagactggtttctggattcatttttggtgcaacatttattaagctctttctctgttatcaccccctgcctggcattttctgaagtctccaaaaagaggccactactaggaagkatgagtcttgaattgcttgtcatacaatataacatcctgctgatatagacaagggctttgaaaatgcagtaaataattattattaaaaatcccaaaggaaaaaaatcagttctgaactgtcatcatacattaagtatacactgacaagcaatgca

SEQ ID NO: 377337 - DNA, 526 bp, Homo sapiens
gactaaaattgttagaacaattctgtgcaatctgctgtacttctgtgaggtaaacatttttttccctcctaatcctcttattcttattgtataaaggaataacaatttttctttttaagttgaatcaatttgttcttagtcatataaagttggaaccaaagttgaagtttggctagaaattgcaagatgtctctaacctgtgaaaagtcaatggtgacgctcttggtacatttgaatgtcatgaaactactacaaagaaagactggtttctggattcatttttggtgcaacatttattaagctctttctctgttatcaccccctgcctggcattttctgaagtctccaaaaagaggccactactaggaagtatgagtcttgaattgcttgtcatamaatataacatcctgctgatatagacaagggctttgaaaatgcagtaaataattattattaaaaatcccaaaggaaaaaaatcagttctgaactgtcatcatacattaagtatacactgacaagcaatgca

SEQ ID NO: 377338 - DNA, 526 bp, Homo sapiens
gactaaaattgttagaacaattctgtgcaatctgctgtacttctgtgaggtaaacatttttttccctcctaatcctcttattcttattgtataaaggaataacaatttttctttttaagttgaatcaatttgttcttagtcatataaagttggaaccaaagttgaagtttggctagaaattgcaagatgtctctaacctgtgaaaagtcaatggtgacgctcttggtacatttgaatgtcatgaaactactacaaagaaagactggtttctggattcatttttggtgcaacatttattaagctctttctctgttatcaccccctgcctggcattttctgaagtctccaaaaagaggccactactaggaagtatgagtcttgaattgcttgtcatacaatatarcatcctgctgatatagacaagggctttgaaaatgcagtaaataattattattaaaaatcccaaaggaaaaaaatcagttctgaactgtcatcatacattaagtatacactgacaagcaatgca

SEQ ID NO: 377339 - DNA, 565 bp, Homo sapiens
acctctttttcttcagtctactaaggcattgtcttatataatgtaacacatcaggggatgactgtcccatcaccttgctcacaggacataacctcatcaagagctattattccatcatattcatggctccagactgcgcttgagtagattataaacagtgtgtttgccaggagacaggattcttgccaccatcttaaaattctgcccaccaaacttctcttgagtttagcttattaaacaaagcaatgccagcccatatagggggaaaaacagtactaaaataatcagaaatcaagtcatagttagtaggggatttaaaaacaaaatattrcattgattatgtaaaagtaatctaaactgtttttaattctaatattttatggctgctaaatgtaattacccaacaggttcttctggccctctgcacagacaaaacgaattcactgagatcagtaaagaaagagtttaattaacttgagcccagccacaggagaactggagtttctactcatatcagtctctctaaaggctggcagggttagggtttttatggacaatttgatgg

SEQ ID NO: 377340 - DNA, 509 bp, Homo sapiens
tctaggttaccttgagatttacctgagtttatacattaaaaaaaagtgtactcccaaataagwagctggacttaagatatcccttctgaactagctaggaagcagaggctttttcgagatagcagaaatgctactgtagatctgatattgcctctgattgaattattagagctttaatttcattttttctttattctctctctccttccttcccttcttccttctctcttctctttctcactcactcactctctctctttttctctctccccaccaatcccatctgtgtctctctctgtttggcatttgtttccatctgaaatttgcccacagtctttgtcatcatacacttaggagaatacaataaaacctagagttacgagatgatattttgaacattatgggttacatgtccaggaggtgaattaaagttgctgccagttatgaagtaatgatagaatatttatttttattttctttatacattcattttaataccactatcttat

SEQ ID NO: 377341 - DNA, 509 bp, Homo sapiens
tctaggttaccttgagatttacctgagtttatacattaaaaaaaagtgtactcccaaataagaagctggacttaagatatcccttctgaactagctaggaagcagaggctttttcgagatagcagaaatgctactgtagatctgatattgcctctgattgaattattagagctttaatttcattttttctttattctctctctccttccttcccttcttccttctctcttctctttctcactcactcactctctctctttttctctctccccaccaatcccatctgtgtctctctctgtttggcatttgtttccatctgaaatttgcccacagtctttgtcatcatacacttaggagaatacaataaaacctagagttacgagatgayattttgaacattatgggttacatgtccaggaggtgaattaaagttgctgccagttatgaagtaatgatagaatatttatttttattttctttatacattcattttaataccactatcttat

SEQ ID NO: 377342 - DNA, 458 bp, Homo sapiens
gcctgacttaagacataaaataataattgctcaacaaatccagtgaggagggccctcacagggggggtctccaagggagaagctttatcatccagaaactgccaayagtgtttgaagctgcactgggcagaataaactgaaatacatagatatagtctatgcttatcttattaggtattagaatatgatccaaggtttctttttcactattaaaaaatgttaaagactgtcaagtttgttttttaaaaatatatcatacatttctacttatataggtaaatacttctggctgttagtaaaattcaaagtgctgtaattttgtttctttgtttttgactgtacctggattacaaatgcaatacagaatttatcatttcagtttattctttttcatatagccattaaatcagttgcttgatgtggtaggcagaatctctcccctaaatatgtccacaccc

SEQ ID NO: 377343 - DNA, 605 bp, Homo sapiens
caacaaccaacctaaattaatgatacttgcccattttacagatatgcaaagaggcttacygaggtgaagtaccttacccaagattgcatgaatgcaagtggcacaaaggacttgaaatctctgaagtgattcaaaacacatattcttgatagctatgccttcgtgactcttcatatagaaaaatttctattcttcttggtcacttcacagcttcagtctattgcaattcatgcctccagactcctctgctcagtttggtgtagattgatcattttatcctgttttttaaaatattgttcttcgctctcaataggtttatcttgctttgttcactagattgcaaatccctcaatggatggataaaaatgctcaataaatgaagatcataagtcttaatggataagaactgtctgatcttctagaattactcagtattatcttttgtgatgtttcctcttaggtgtataaattctgttgttaattaatcaaccccagtgaacgtcatccctccaatcttaaatacatcttcatggtagtgagcatattcgtgtagaggaaatatccaaaaagattattttaaataagaaatgatgtccattctgttt

SEQ ID NO: 377344 - DNA, 618 bp, Homo sapiens
tacattgtaacccagaaattctacttctgggaaattacccaagagaaatggcatgtacccacccaaagatatgtataagagtatttacagcagctttatttgtaayagccaaaattggtgggaggagacccttggtcaatggtagaatggataagtaagtagtggtatatttaaacaagagagcaaatagatagaacaaattgccactgtttgcgataacatgagggaatctttcagacaaaatatttaggaaacaataccccaccaaaagagtgtgtactgcatgattctgtttatatgaagttcacaaacaaatctaagattatataggtcagttattgtttagtttgggggaggtatcaactggcagggacttaaggaaatgtgttatggtggagaaaatgttgtatatcaaactagtggtatttacctggttatattcttatataaaaattcatcatgctgtgcactgaagtaaagcctcaataaaaataccacagattcatttaactttacaactagaaagaagcttagtggtcaccttagccaacttctgtttcacagatgaggaaactaaggcttagaaaaattacaaagcttgttagtgtcacacaggta

SEQ ID NO: 377345 - DNA, 542 bp, Homo sapiens
cttgttagtgtcacacaggtaacatccatttggtcaacaagtgcttgctctttgcttaggatacaggttaatcaagaaagacctatacctgctttcatgaagcctactccttagttatggaaagataaattaaataatataaaaatagagatataattgcctattgcgatacatttttttgaaggactatcacaaagtgttttagtaactatacatggaattggaacccagatcacttgactcagagtggtgagctcttgacttcaacaatactgccttttttggaactctcatacattacygtaaactttaaattttgcaaaactagaaacaaattctagatctacatatatttattttttctgatttcaaaggtgaacctttaattgtaaagcataagcaaagcagtaaacaaatttaaagggatggctctgccaaaacttgccaaaaatatctagtctcaggagggaaggtactgataaaattactggacttgatatttgtctcctgcattttaaatctcagttctttaggtttataag

SEQ ID NO: 377346 - DNA, 584 bp, Homo sapiens
cttcagatgttcagatgtgtccagagttccttccttctggtgggttcatggtctcgctgacttcaggagtgaagccacagacccttgcagtgagtgttacagctcttaaaggtggtgtgtccagagttgtttattcctcccagtgggttcatggtctggcrgacttcaggaatgaagccacagaccctcacagtgagtgttacagctcataaaggtaatgcagacccaaagagtgagcagcagcaagatttatcgtgaagagtgaaagaacaaagcttccacagtggggaaggggacccaagtgggttgccgctgttggctggggtggccagcttttattccttatttggcccagcccacatcctgctgattggttcattttacagagagccaattggtccattttacagagtgctgtttggtgcatttttacacagtgctgattgctgcatttataatcctttagctagacagaaaagttctccaagtccccacccaacccagaagcccagctggcttcccctctcaccttaacattttgtcaggtgcaaagataatttccgatgtcttgctgttaatatata

SEQ ID NO: 377347 - DNA, 571 bp, Homo sapiens
gtgaagcaactccaactgattcgttcaatgatttcttaccctttttctgttcaatgtaatgaatcttttgctccattaggctttgtgctttccattatgcacttgctgaagccccyagttctttgatattctgaattctgcatgtcttaggcacactgttctccccaattgtcacactgatttctacctgcagttctaatccaaccccaagtcggttccagaatagatgatgtgcacataaggcatttcagggcacattttctgcatcagattatctttctttaaagcaaccttgaaagtgtctttttttctttcctttcttttttgagacaagatcttgctccattacctagcctggagtgcagtgacataattacaacccactgtagcctcagcctcatacactcaagcaatcctcctgttcagcttcccaagtagctggaaccacaggtaggtgccaccatgtctagctatctttttttaatttattgtagagatgggggtcttgctatgttgcccaggctgttctcaaatccctgggctcaagtggtcctcccacctcagcctccca

SEQ ID NO: 377348 - DNA, 617 bp, Homo sapiens
tttgttgtttttttgttgttgtttgttttttgaggaacctggtgatttgaagagttacatgtcaaatgggtttgggaaatagaaaaattgaatagctgaaaacagggtctacacttgtatctctttagtctgcttttagctttgacacttccctaccacttaggtgaagcaactccaactgattcgttcaatgatttcttaccctttttctgttcaatgtaatgaatcttttgctccattaggctttgtgctttccattatgcacttgctgaagcccccagttctttgatattctgaattctgcatgtcttaggcacactgttctccccaattgtcacactgatttctacctgcagttctaatccaaccccaagtcggttccagaatagatgatgtgcacataaggcatttcagggcacattttctgcatcagattatctttctttaaagcaaccttgaaagtgtctttttttctttcctttcttttttgagacaagatcttgctccattacctagcctggagtgcagtgacataattacaacccactgyagcctcagcctcatacactcaagcaatcctcctgttcagcttcccaagtagctggaaccacaggtag

SEQ ID NO: 377349 - DNA, 528 bp, Homo sapiens
atccatgctcacattgttcgttctgttatttgaatggataaaatatttgttatcaaatactcacaggcctcataatgacaagtacctctctgagactctctaattactgaagactgttctgcccagatctcccttccttgatctgtctgactgagtggattttttwtatttttttagatgcagtttcgctcttgttgcccaggctggagtgcaatggcatgatctcagcttactgcaacctctgcctcttgggtttaagcaattctcctgtctcagcctcctgaatagctgtcattacaggcacccaccaccacgtggctaatttttttttttttttttgtatttttagtagagacaggatttcaccatgttggccaggctggtctcgaactcctgacctcaggtgatccacctgcctcggcctcccaaagtgctgggattacaagagtgagccaccatgtctggccaattgagtggaattttatctggctgatataaaagagatatcagatataaaacccaacagat

SEQ ID NO: 377350 - DNA, 604 bp, Homo sapiens
aaaactgcagctaatttcatgcttaatggtaaaagactgaatgctttcccctaagattgtaaacaaggcaagaatgtcttcttattactcctatttaatattgtactagaagcactagtctgtacaaaaaggcgtaaaattagaaaagaagaaataaaacttttttcaaagtacctgcctacatttaaaaatcctaaggaatctacaacttatctcttacaactaataaaagagtgaagcaagaacatagaaaacarggtcaacatgcaaaattgaaccatacatagtataaactagcaatgaatgtgcggacatcaaattgtttttaaattacatgtacaatagctccccccaaaagatacatttaggtataatatagcaacatatgcaagatctgtatgctgaaagctacaaaattctgatgaaatgaagaagagctaaataaactaagagacacatctgtttatgaattggggctcaacatagttaagaagttcattctccacacactgatccatagatttcaggaaattccatctaaatttaggcaggattttatgtagatataggcaacctgactctaaaatttatatggaaaggtaaa

SEQ ID NO: 377351 - DNA, 572 bp, Homo sapiens
agtctcacgagatatgatggtttatcagtatcagaggtttccgcttttgcttctctctcattttcccttgccactgccatgtaagacgagccttttgcctctagccatgattctgaggcctccccagccacatggaactgtcagtccaattaaaccttattttgttcccagtttcgggtatgtctttatcagcagcatgaaaacaaactaatacaagcagttaggtccygagattctgaatttccaacaagttccgtggtaatgtccatgctgctggtctatggagtaaacttggttagcaaggtattagaggcatcagcttttaaacagaaggaaattacttgtatctttcccaacctcagagcttatctttttgagttttaaacaaagaaggaacccagatggattcccatagactaccaagataaacagtagccaagatggtagtagaaagaaagaatgcctgaaaatggtctggggctccttgggctatttgattagcaataggaggtagtaagaatccagctcaacaggtcaagaacagagaaaaaaaaaaacaactcttctcacct

SEQ ID NO: 377352 - DNA, 572 bp, Homo sapiens
agtctcacgagatatgatggtttatcagtatcagaggtttccgcttttgcttctctctcattttcccttgccactgccatgtaagacgagccttttgcctctagccatgattctgaggcctccccagccacatggaactgtcagtccaattaaaccttattttgttcccagtttcgggtatgtctttatcagcagcatgaaaacaaactaatacaagcagttaggtcccgagattctgaatttccaacaagttccgtggtaatgtccatgctgctggtctatggagtaaacttggttagcaaggtattagaggcatcagcttttaaacagaaggaaattacttgtatctttcccaacctcagagcttatctttttgagttttaaacaaagaaggaacccagatggattcccatagactaccaagataaacagtagccaagatggtagtagaaasaaagaatgcctgaaaatggtctggggctccttgggctatttgattagcaataggaggtagtaagaatccagctcaacaggtcaagaacagagaaaaaaaaaaacaactcttctcacct

SEQ ID NO: 377353 - DNA, 571 bp, Homo sapiens
ggaactccttgctttgaagggaaggatccagtcctggcaggattcatcacttgctaactgaagagagctcttgaagttccaaattccaggamttggttcttggatggcatttctagacctgccctgggccagatgggagcccactaccctgaaaggtgagtcccaggccagacagcattcactacaagctggctgaagagctcttgggccttaagggaacattgatagtagtgtggcaatactccccatgggcctgtggtagcaatggccacagggtaagtctcctctgcctttggaaaagaacaatgggaaggactttttcttgtggtttgagtaccagctcagccacagtagagtagaacacgaggtagacttctaaggttttctactctagtctctggtttctggacagcacctctggacccactcagggcctggggacttctactctgaagagaagaacacaggcctggctggctttgccacctgctgattatagagcccagtggcctggagtgaacacaggccatagccagggagttgttacagcaggccttgggcgagatccagt

SEQ ID NO: 377354 - DNA, 571 bp, Homo sapiens
ggaactccttgctttgaagggaaggatccagtcctggcaggattcatcacttgctaactgaagagagctcttgaagttccaaattccaggacttggttcttggatggcatttctagacctgccctgggccagatgggagcccactaccctgaaaggtgagtcccaggccagacagcattcactacaagctggctgaagagctcttgggccttaagggaacattgatagtagtgtggcaatactccccatgggcctgtggtagcaatggccacagggtaagtctcctctgcctttggaaaagaacaatgggaaggactttttcttgtggtttgagtaccagctcagccacagtagagtagaacacgaggtagacttctaaggttttctactctagtctctggtttctggacagcaccwctggacccactcagggcctggggacttctactctgaagagaagaacacaggcctggctggctttgccacctgctgattatagagcccagtggcctggagtgaacacaggccatagccagggagttgttacagcaggccttgggcgagatccagt

SEQ ID NO: 377355 - DNA, 565 bp, Homo sapiens
cccactcagggcctggggacttctactctgaagagaagaacacaggcctggctggctttgccacctgctgattatagagcccagtggcctggagtgaacayaggccatagccagggagttgttacagcaggccttgggcgagatccagtgtgtgccggcttcaagactgacctagcacagtcctactaatggtggccacaggagtgcttgtgtcactccacctccagccccaagtggctcagaacagagagactccatttgggagaaggtaagggaagagaacaagagtctctacctggtactccagggaatccttctatatcttgtccaagaccatcaaggtgggatctctatgagtctgcaagaaccacagcattgctgggcttgggatgcctcctaaaagagatacaacttagatcacagcacccaagtccttttgaatacctggaaagccttctcaagaaggccaggtacaaaaaagttcaggctgagaatactgcaataaatacccaactcttcattgctcagatacaaatgaacatctgcaagtatgaagaccatccag

SEQ ID NO: 377356 - DNA, 557 bp, Homo sapiens
ttgtgttgaattttagagctttcattgtgggaagcattaatgagtttattgaattcaaagttttataaagcagagggaggcagtaatatggcttatgtgactgtcagtttaacaaagatgagtggtcattagacagaattccaagaccaacactgtggtttattatataaaatactaaccatgaaagtttttgagaaagtcttcttttaccatttgacctgtctttttttttccctgcctttctttaagtgttgctattccccattccagggctttatctcttcttcctctataccctctccctatataattttaatcaggaccagggcttcagtcatttatatttcaataacttccaaatctttgcttgtactgtggactactatttgtaaatacatgggtgtgttcaaagaatcttaaactaaatatggcctaggttgaactctttacctccacatcagcttctgctctgaatctcaatcttagttagtctcaccacatsatattagttaagttaaccctagcttctgggtaaatccccaagacttagtggctca

SEQ ID NO: 377357 - DNA, 562 bp, Homo sapiens
gctacatgggagctcatgatccagatactgcacactaagagaaaattaaaattaagatagcatatgatgagggatcacacttctctgtagagtcagataaatggtcctgagaaaaagacacttaagttgagatttgaaggatgtgaaggcactagccaggtggaagggagaagaygggtgatttccacaaaggcaataggcaaagcctcttttggtcagaagaagcatggtcacttgaaaaactttgccctttttgttccctctgctcaggtgtccattctgatttcttctccaccatttttaggtctttttttcaaattttgccttctcaatgaagccttatctgaatcttacttaaagtctcagacttccttccaacacactctattcccttcctccactttttctccataccattcatcacggtgaaaaatatatttttatgtatttatgtttttgttgatctctccccaacttgactgtaaactctatgtgggcaggagatttttatgttatgtttactttgtatcaccagcccttagaacagtacttgacccatcat

SEQ ID NO: 377358 - DNA, 529 bp, Homo sapiens
ggatgtgggtggggccaaaaggaataaaagatggccactccagccagcagctgcaacccgcttggctccccttccatgctgtggaagctttgttcttttgttcttcacaataaatcttgctgctgctcactctttgggtccacactacctttatgagctgtaacactcactgtgagggtctgtggcttcattcctgaagtcagcgagaccacaaacccactgggaggaacaaacaactctggacatgccacctttaagagctgtaacactcactgcgaaggtctgagtcttcattcctgaggtcagcgagaccatgaacccaccagaaggaagaaactccggacacatctgaacatctgaaagaacaaactccagacacaccatctttaagaattgtaacactgcaaaggtctgtgtcttcattcttgaagtcagcgagaccaagaacccaccggaaggaataaattccrgacacaaggggattctgaaagtatctggattctatttttttaaaatttttatttattta

SEQ ID NO: 377359 - DNA, 559 bp, Homo sapiens
ttggcttgcagtagcacaatcatgctcactgcagcctcaacctcccaaactccagcagtcctcccacgtcagcctcccaagtagctgagatcacaggcacatgataccatgcctggctaattttgtatttttggtagagacagggtttcaccatrttgcccaggctggtcttgaactcctgaactcaagttatccacccacctcagcctgtcaaagtgctggggttacagaaaaacaagagccactgcgcccagcctctaaaagtatctggtgctattcagatttttgcttattctaacttgtgagttcttcgcgtcttatcaagataggaagctttctcctgaaggttacaatatagtgaggcaatattaccaagtaaacaagtggtaatgctacgttgtttctaggcaaaattttcttggaactccccatgggggatttggaatgctccccacaggaacatctttctagaagatatttatgtttataccacaaaatgtacttgaatgtttttctatatcagtttgaattattttggatgcaagttatggaatccaga

SEQ ID NO: 377360 - DNA, 559 bp, Homo sapiens
ttggcttgcagtagcacaatcatgctcactgcagcctcaacctcccaaactccagcagtcctcccacgtcagcctcccaagtagctgagatcacaggcacatgataccatgcctggctaattttgtatttttggtagagacagggtttcaccatattgcccaggctggtcttgaactcctgaactcaagttatccacccacctcagcctgtcaaagtgctggggttacagaaaaacaagagccactgygcccagcctctaaaagtatctggtgctattcagatttttgcttattctaacttgtgagttcttcgcgtcttatcaagataggaagctttctcctgaaggttacaatatagtgaggcaatattaccaagtaaacaagtggtaatgctacgttgtttctaggcaaaattttcttggaactccccatgggggatttggaatgctccccacaggaacatctttctagaagatatttatgtttataccacaaaatgtacttgaatgtttttctatatcagtttgaattattttggatgcaagttatggaatccaga

SEQ ID NO: 377361 - DNA, 559 bp, Homo sapiens
ttggcttgcagtagcacaatcatgctcactgcagcctcaacctcccaaactccagcagtcctcccacgtcagcctcccaagtagctgagatcacaggcacatgataccatgcctggctaattttgtatttttggtagagacagggtttcaccatattgcccaggctggtcttgaactcctgaactcaagttatccacccacctcagcctgtcaaagtgctggggttacagaaaaacaagagccactgcgcccagcctctaaaagtatctggtgctattcagatttttgcttattctaacttgtgagttcttcgcgtcttatcaagataggaagctttctcctgaaggttacaatatagtgaggcaatattaccaagtaaacaagtggtaatgctaygttgtttctaggcaaaattttcttggaactccccatgggggatttggaatgctccccacaggaacatctttctagaagatatttatgtttataccacaaaatgtacttgaatgtttttctatatcagtttgaattattttggatgcaagttatggaatccaga

SEQ ID NO: 377362 - DNA, 622 bp, Homo sapiens
ttgcttaaaacaaatctctctttctgtcatgttggtcctgtgtttcctctggacaaacttgattgataaagagattaattcaataaaaagaaaaatgactagaagggctttaaaatggtataatttcataaaactaaaagattaagaaaaaaagccttcacagaattaacctgggcagggcagaattaggagcatcaacagggggttttctttacagaatgtaaggcctcattcactcctcctgtggccaagctctaagggtatattttgcaatagaacggagatgtgttgctgcccaaaatgaggaagaaatgaggaagtccaaggtctagaattcagcactgggtagttcttttaaaacstggtatctacaaaaacagatcctacattttaattcttatcaatctagattcagaatttggctggatgctcctaaagagctactgaaatagactcaatggcagctacgatgcccaacagaagcagcgatgcctggtgcacatagcaggttgctagcaggagtcatctggggtgattcacctgtcttgttggtgaggatatggacatcatctggggactctcagaaatccctgaagtgatatagagtcccacatgagcttgc

SEQ ID NO: 377363 - DNA, 621 bp, Homo sapiens
atctgcgttttttccaggcatcacctgaagataaggcccctgtctcctagtctctgygggaaggcgagaacctagcttggataagcgccagtcaaaaaacccacatggtttcccatggaccaactccactttaccacttttgggaatttttcactttcctaactgagcccctactttcccctctccctaattccttcttttatccttaaaatgcccagtcacttctgtacaactcgaagttgaattttgttcacactggactcttttccctattgaaatagttatcactgattaaaatctgtccttaccactttaactagtgtccagctttgcttatctttgtgaagatcaagaactgatataattcaaggtgataccatcaaggggagtgaattcgttcaggatagaatagactgctgtgatgaaaataactctccaaatcttagtgatttaacctgttaaaggtgtatttctcacacatgtaaaatctgaagctgtcctccagactacaccacttttgtgactttgttctttcaacagaacttttttttccctattcgggaagagattggaggattgtgcaggaacttacactgccttatcccagaagtgacagccaca

SEQ ID NO: 377364 - DNA, 582 bp, Homo sapiens
ggaggcgactggatcatgggggcagatttccctcttgctgttcttgtgatagtgagtgagttctcatgagatatggctgattaaaagtgtgcagcacctcccccttatctttcttcctcctgctccagccatgtaagatgtgcctccttcttctccaccttctgccatgattgtaagttttctgaggcctccccagccatgcatcctgtagagcctgtggaaccatgagccaattgaacttcttttctttataagttacccagtctcatgtagttctttatagaaatgtgacaatggactaacacatccctatcacagaaaacaaccatgtcggcagatggcggtcataaaggcagggttataagaatcagggagaattaaaaatgaggacgtaggtattaatatatatttattaacatgaaaaggtgtttactacacattcataagggagaaaattgtgtattggtacatatggcatatgtatagtataatcctgtgtgtgtgtttatgtatatgtatacrtatatacatattctatgtaaatagggaaaagtctgaaagagtattccaacatgtgaactg

SEQ ID NO: 377365 - DNA, 543 bp, Homo sapiens
aaattaatcatgggtgtcctaggagacccccttccctcagtttagtcaacaaaggagaggaacctccacactgcaatacttaggtatggggaggatggatttggtggtgccttggcagcaatgatgatcaagatcagctttgtgctgagccatattggatgcaaaaggcaaatcagtaatactgatcctgaacacagtgagaccccgtccttaaataaaataaaattttgctattttatttatgttaaagaaaaaattatttaatgatcacttgctaaagaatgtaaggcagactttatccaagggggtcatggtgataggtgtaggaaccattgcagtgaggtcttacagtcggggacagagactgggctccrttcaactccaacaaagataagtggggatttataacaaaggagcagggtggggagataaaaaattactaagaggaaacatcaagaatcacagagtttctggctaaactggcttggcagcattattactgaaggtatgctagtgggaaaagccatctaaggtggtcattac

SEQ ID NO: 377366 - DNA, 603 bp, Homo sapiens
gagaaacattttaaaaagcagaaagaacctaagtaattatcactggaaaggttaggcagaaatcaagcctaaataacttccatttctaaagattacctgacatttcttttcaacagctaaagtgccacctagtgccaagcaagagaagcaagtcaggtctcaggtttagagtcacatgaatcatttcttcatttactttgcatccttctgtcaagggttagttaaaatggatcttcttcggtgtctctcatctcagaaacattaacaggaagttgtaagtggctctgttcaagtcatcagcactgacaacattaagaatcatggagaaacttaactcattcttaacaatcagaaaatgaacactgggtatttccttgtaaatttcaatttaaaagtaaataaaaattattaatataaaggtcaataaatkctcttcaatggaaatttaattaaataaattatgacagatcctttcaacaaagtctatgtaagtcaaaaattaatatgcttaatgatacaaaaaacatttatgacatactgctaagtggaaaaaaataagttacaaatagcatatatagaatgtctcattttgggaaaaaatgt

SEQ ID NO: 377367 - DNA, 591 bp, Homo sapiens
tctgtacaaatacatggaaataagctgcatgctcctgaatgatcattgggtcaacaaagaaattcaaacagaaacttaaattgtttggaaataaataaaaatgaaaatatgacataccaaaacctgtgggatacagcaaacgcagtgctaagagggaagtttataccatgaaatgcctaatcagaaaagtagaaagagcacaaattaacaacctaacatcacacttcaaggaaatagaaaagcaagatcaatccaaaccccaggttagcaaaagaaagggamtaacacagatcagaacagaactaaatggaatagagacaaaaaaaagaatcaacaaaatgaaaagttggttcctcaaaaagataaacaaaattgataaaccactagcagactcaccaagaagatagaacatccaaataaaaatgttcagaaatgaaaaaaggaaacatttcaactaatactacataaatgtgagatcatcagagactattatgcacagctatatgctcacaaactagaaaacctgaaatggataaatttctggaaacatacaacctccctagactgaaccagaaagaaatagaacttgtg

SEQ ID NO: 377368 - DNA, 591 bp, Homo sapiens
tctgtacaaatacatggaaataagctgcatgctcctgaatgatcattgggtcaacaaagaaattcaaacagaaacttaaattgtttggaaataaataaaaatgaaaatatgacataccaaaacctgtgggatacagcaaacgcagtgctaagagggaagtttataccatgaaatgcctaatcagaaaagtagaaagagcacaaattaacaacctaacatcacacttcaaggaaatagaaaagcaagatcaatccaaaccccaggttagcaaaagaaagggaataacacagatcagaacagaactaaatggaatagagacaaaaaaaagaatcaacaaaatgaaaagttggttcctcaaaaagataaacaaaattgataaaccactagcagactcaccaagaagatagaacatccaaataaaaatgttcagaaatgaaaaaaggaaacatttcaactaatactacataaatgtgagatcatcagagactattatgcacagctatatgctcacaaactagaaaacctgaaatggataaatttctggaaacatacaayctccctagactgaaccagaaagaaatagaacttgtg

SEQ ID NO: 377369 - DNA, 519 bp, Homo sapiens
acatatatataataaacacaataaatgtttaacaagaggaattggaatagtagtcatggtaaccagtggactacaatcctacctgttcttcagattccattttcacacactccagaccgcattgctgcctgccagcagggaccagaatgtaattgccctgggaacattggctcattggggcccctaatcaactaatccccctgtattagggttctccagagaaaaagaaaaattatatacatatatttatatatatgtatatatatgtaaagaggtttattatgggaattgtctcacaygcttatggaggttgagaagtcctgcaatctattatctgcaagctggaggcccaggagagctggtggtataattcagtccaaccctgaagacctgagaaccaggggagccaatggtgaagtcttggtccaagttccaaggcctgagaaccagaaatgccaatgtccaaaagcaagagtggatgaatgtcccagctcaaatacagaacaccagtgttccctt

SEQ ID NO: 377370 - DNA, 577 bp, Homo sapiens
atctggccaatgcctagttcttaaattgagtggtggctaarcagacaaaccaactaacagattatgttagaagagtttgtggctgaagaacttaatgtttcatgaaaaaataagatgaattgaaaaaatgcagctgttattttcactaaataaggcaaaaatgacagcacaatgacagtgttgtcattgtaagttcttgtatcttaaactagtcagttcttatgtcttctataattaatttctattttaccatagtttgcttgctagaaacttttaagccactatctacaatttcagttagataacatgtaatttaattttatttgaaggtagctaatttgcatcctcaaaggtactgtttcacttttcctcccttcctctaactcttacctccctttcttcttgtcttcatttctggttctcagaccaaaagctcaatacatttgacttggagtttttgaatgtggcagccgaggctccctgagacacagggtgagacacagggtgaaacacgtgacattaatttcctgtcacatagttctaacaaatacttctaaagtctgggtttatttttctt

SEQ ID NO: 377371 - DNA, 628 bp, Homo sapiens
gttctaacaaatacttctaaagtctgggtttatttttcttcagctactttttttcttctgaaatatcactggaaaaaaaaaaagacgtaaaacatctgatcttgttcttcacttccttttctatttcaagccacctgttctctctttctgattaaccccaacacagtaaaaagagccaagattctcattctcatggttataaaaaaaaaagatataataaaagaaaagccacatatactaggatagggaactyatggctggagcaagatttttgtatttctttatcctatttgtaggtgaagcagtgttgactcgtattctcatttatccacttcaaaaattaatcagatgttttcacctgtattttgtagtttagttgtaagaaaaccaaggcttgttcaggtgaactcagaaaggccctgaaatgggatccaaacccagtgtctctaagacaagggctttctcggcacaggctcatgactacagagcctcagagtgttggcaggacttggttcaatacatacccatgtgtgcagggttcaggaagtttataagcttgaggagaatgttgtcatggcaaatggttgaccaacaggaacaaaattatctgggaacatcactggaccca

SEQ ID NO: 377372 - DNA, 628 bp, Homo sapiens
gttctaacaaatacttctaaagtctgggtttatttttcttcagctactttttttcttctgaaatatcactggaaaaaaaaaaagacgtaaaacatctgatcttgttcttcacttccttttctatttcaagccacctgttctctctttctgattaaccccaacacagtaaaaagagccaagattctcattctcatggttataaaaaaaaaagatataataaaagaaaagccacatatactaggatagggaacttatggctggagcaagatttttgtatttctttatcctatttgtaggtgaagcagtgttgactcgtattctcatttatccacttcaaaaattaatcagatgttttcacctgtattttgtagtttagttgtaagaaaaccaaggcttgttcaggtgaactcagaaaggccctgaaatgggatccaaacccagtgtctctaaracaagggctttctcggcacaggctcatgactacagagcctcagagtgttggcaggacttggttcaatacatacccatgtgtgcagggttcaggaagtttataagcttgaggagaatgttgtcatggcaaatggttgaccaacaggaacaaaattatctgggaacatcactggaccca

SEQ ID NO: 377373 - DNA, 546 bp, Homo sapiens
tggcttctgaattttaaaatatgatcttcaaatcaggagcagagactaaagtcttgaacagcaagcttttcataaatgccagggtgaggggtggtgtggctggaggaggagcgggtaggttttttaactcctaacctcaaggggtcaaaacataaagtgtcaaagaggaacagaggtgacgagataaaagccacaaaagtattgccagtttttctaccctgaaggaaggaaatgtttttttgttgttttattttgctggaaaactcattctgtgcttcagggcaagagttcttttttttctttttctttttcttttttttttttttttycattttatgcctttcctcagaggttgtatttaaactcaagggggtgaagcagccaatttggagacactgttctcctcaggaagtcatgccatatgactgtgactttgtctattctttgcttgtggaacttggttcctgatctatcatctagatgtccacatctcaccctggtccctgatccctcaaagctctggagttaagaaggacctaaaaggtg

SEQ ID NO: 377374 - DNA, 579 bp, Homo sapiens
tgaggaccaggaaatgtggattttctcaatcaayatccctaatgcctgacatgttgcctggtctgtagtagatgctgaatagaagttgaaatgactccaggtattatctacctcctctagcagatccaaccctccaggacatgggccaagagagcagtcagagcagcaggatttctagcttgctcagaatccttacctaggggaccagaagagtgagatccacctttcctagctctggcttcctgatttctggagttttctttctaagagaagagtctagtaaataggccaggtgagaaaatgtggccatgcaactgtatcatttgttattttcactgattttgacctaagtccttataatctctttaacagtatacagactcaagttagcccttttacacataaatccttctcttctcagtatccattacagtatcaattgtttttggtctgtggtacatacgcctctcagatctcccaaaaaccttgaagagctccatcttttactactgttcccttcgtttgcatgtggctattagcaaacaaatccagcaatctatgaaaagagtaatagatcac

SEQ ID NO: 377375 - DNA, 640 bp, Homo sapiens
gactttaaactaaggtaataatgctttttaacattcttgagcccttcttatgtatctgaaattatattaaaagttttatatacattatttccttaataatatccatcattaccttcaaaaactgaggtatgggccaggcagggtggctcacacctgtaatcccaggattttgggaggccaaggctggtggatcacttgaggtcaggagtttgagactagcctggccaacatggcaaaaccccgtctctactaaatatacaaaaaaacagcctggcgtggtggtgggcacctgtagtcccagctactcaggaggctgaggcaggagaatcgcttgaaccagggaggcagaggttgcagtgagctgagatggcagcactgcactccatcctgggtaacagagcacgaccttgtctcaaagaaaagaaaagaaaagagaatagaagagaagagaagagaagaagwaaagagaagagaagagaagagaagaaaagaaaaaagaaaagaaaagaaaagaaaagaaaagaaaaaagaaaagcattgcatctgtatcctctaattagaggatgatagcacttgattatggccatttcttagtcaagggcaggtcttctgtttttctgagtgatgacatgtggtttga

SEQ ID NO: 377376 - DNA, 560 bp, Homo sapiens
attgttttggttaggcatattcctaagttttgttttgttttgttttgcagctattgtgaaagggactgagttcttgatttgattctcagcttggtcactgttggtggatagcagagctgctaatttgtgtacattaaatttttatcatgaaactttgctgaattcattcaccagctctacaagctttttggatgggtctttaaggttttctaggtatacgatcatataatcaacaaacagtgacagtctgacttcctctttagcaatttkccctttgtttctttctcctgtctgattgctctggctaggacttccaatactatgttgaatagaagtggtgaaagtgggcatccttgacttgttgcagttctcaggaagaatgctttcaacttttccccattcagtataatgttggctgtgggtttgtcataggtggtttttattactttaagatatatcccttctatgctgattttgctgagggttttaatcataaagtgatgctggattttgtccagtgctttttctgtgtctattgagatgatcatgtgatttttgtt

SEQ ID NO: 377377 - DNA, 559 bp, Homo sapiens
gggcagctaattaagaaaagccaccttcaggatgtctttcgagaatctagcctcgaagaaagtcatgtaagagaacgcctgcatcaaaaagtcgggaggccgggcggagtcgccgttaaacgtccagggaaagccaccaggtgggccggcgaacgctcccgggccagcaggtaggctttctcgcacagcagcccccgcacccggtccrtaagctcgttgttctccctgcgccgggcatggttctaggtcaggaggtcctacatcatgacagccaacgcgtccatcctgcgcctccccgcaggccttgctccccgctcggtccctcccggccgcggcgctgccggaagtgcgtgtcggcgcgggggcggatcccggtggcggcgaggggcggactccgcggacaaggccaggcctagccttgagctccgtcgggcagggccgccgggattggtgtccggcagagcgtgagcccagcgggctggagtcggcgagcgggagtgaaagaagaaaagctagagagcgaaggcaaagcccgaggagagagggccgcggtcggcgg

SEQ ID NO: 377378 - DNA, 586 bp, Homo sapiens
ctgtctctaaccttttgctattacaattatatgattattctttatatgtcttctggtgcacatgttaagaatatttgtagggcatatatttaggagtggaattgctgggttagagggcatgtggtgatgctacagtgttttctaaaatagttgtttctactattgtagttgtttaaaatacaatattttaaaaagtttatacttttaccaacacttggtactttcagaactcttaaatttgccaatgtagtaggagtaaagctatagctaatgagttgttttaatttgtactttcttgattattagtgtggctgagcatcttttcatatgtcttcaggtactgcttgttctgtgccatgcttgttcatgcattttatctgtttcatggaggtgtttttccccctaatcaatttgcaagagttcttggacatatcttggacatgaaacttttgtcagttatgtggattgaatatctccaagattgtggctttcctttataatttgtttttatatcttttratgagtagaaattactttgatttagttgaatttatctatcttctcttgtgtttaacatttttaaaat

SEQ ID NO: 377379 - DNA, 471 bp, Homo sapiens
tccagcactctttctggcttgtgacaacaaaagtctaaggaagatgctctgagcccttgccccagagccctccccttgtattcattccatacctgctctttgctycctgccctgggtttcctggctacctatgccagcttttctcccatgaacatccttttttaagactttcaaacttgcagggaagttgcagtcatgctgcggactcaatgatggagatgacccaggctggtgggaacaatcctgaggaccattgcctagggagatccaagctcttgagggctgcctctccctaagtcctgtgctgtggaagaggcagtgcacatagaattccctttcaagggaatactgcctatagggactgtgaggaccactcagctaggagcagtcaaggtccaccttagaaagctaggccaccttgtctggtcttatcagcaaattgatggcaaagagtggtaagcaagtttgccc

SEQ ID NO: 377380 - DNA, 574 bp, Homo sapiens
accttgtctggtcttatcagcaaattgatggcaaagagtggtaagcaagtttgcccacttgtataaagcactgagggggcctgactttgcagagtaaacagcctctcaaagagcagaaagccctgtaatctcagaactttggraggctgtggtgggcagatcacttgaggccaggagttcgagaccagcctggccaacacggcaaaaccctatccctactaaaaatacaaaaattagcagagcatggtggcgtgcccttacagtcccagctactgggaggctgaggcacgagaatcgcttacagcctggaggtgaagtttgtggtaagctgagactaggctactcctctccagcctgagcaacagagggagattctgtcaaaaaaaaaaatgtagaaagcaattgtctcagatggagtgatcgtgacatttgtagaacagagcagactccaccacgggaacaactctactgaagaggaggaaactggcctcatgtgcaggcctcagattccctgcagagacagaatactaacctttccagggtggtcactgatttgagggactatcctgtgcac

SEQ ID NO: 377381 - DNA, 574 bp, Homo sapiens
accttgtctggtcttatcagcaaattgatggcaaagagtggtaagcaagtttgcccacttgtataaagcactgagggggcctgactttgcagagtaaacagcctctcaaagagcagaaagccctgtaatctcagaactttggaaggctgtggtgggcagatcacttgaggccaggagttcgagaccagcctggccaacayggcaaaaccctatccctactaaaaatacaaaaattagcagagcatggtggcgtgcccttacagtcccagctactgggaggctgaggcacgagaatcgcttacagcctggaggtgaagtttgtggtaagctgagactaggctactcctctccagcctgagcaacagagggagattctgtcaaaaaaaaaaatgtagaaagcaattgtctcagatggagtgatcgtgacatttgtagaacagagcagactccaccacgggaacaactctactgaagaggaggaaactggcctcatgtgcaggcctcagattccctgcagagacagaatactaacctttccagggtggtcactgatttgagggactatcctgtgcac

SEQ ID NO: 377382 - DNA, 621 bp, Homo sapiens
tttacatacatattttctattttccatatatatatatatatgcatacatatgtatacctatatctataattaccttttatagaagtttgacaaacatttaggcaattcaatcccagaaccctctaaacaaagtaagatacttagcacattaaataacattaaatatttattttcagactcatgcactgtataaatactctataaataataaaaaatgctgtttttatttcccatatataaaytgcttctaagttaagtcatatgacaaaaatagaagccttgaacctaacttgataatatacttacctcaataatttccctgtttgaaatctgcagtggtatgcccttctgaaatgtggcactaagaacactgcccctatttcttcatttgacctggatgattgtctgaaggaacatcaaaagctgcttagaacatcactggagaagacacagtgtcaacactgcctgaggaattcctgagcataaatgttgtgggccctgtcttattccttcctcaactgtgactctttatccatctaagagtcacgcctgcaagcaaacagccaggcaagaaagactgttcctaaagtcctcagtgcacatccaggttggtgttgctcg

SEQ ID NO: 377383 - DNA, 621 bp, Homo sapiens
tttacatacatattttctattttccatatatatatatatatgcatacatatgtatacctatatctataattaccttttatagaagtttgacaaacatttaggcaattcaatcccagaaccctctaaacaaagtaagatacttagcacattaaataacattaaatatttattttcagactcatgcactgtataaatactctataaataataaaaaatgctgtttttatttcccatatataaattgcttctaagttaagtcrtatgacaaaaatagaagccttgaacctaacttgataatatacttacctcaataatttccctgtttgaaatctgcagtggtatgcccttctgaaatgtggcactaagaacactgcccctatttcttcatttgacctggatgattgtctgaaggaacatcaaaagctgcttagaacatcactggagaagacacagtgtcaacactgcctgaggaattcctgagcataaatgttgtgggccctgtcttattccttcctcaactgtgactctttatccatctaagagtcacgcctgcaagcaaacagccaggcaagaaagactgttcctaaagtcctcagtgcacatccaggttggtgttgctcg

SEQ ID NO: 377384 - DNA, 621 bp, Homo sapiens
tttacatacatattttctattttccatatatatatatatatgcatacatatgtatacctatatctataattaccttttatagaagtttgacaaacatttaggcaattcaatcccagaaccctctaaacaaagtaagatacttagcacattaaataacattaaatatttattttcagactcatgcactgtataaatactctataaataataaaaaatgctgtttttatttcccatatataaattgcttctaagttaagtcatatgacaaaaatagaagccttgaacctaacttgataatatacttacctcaataatttccctgtttgaaatctgcagtggtatgcccttctgaaatgtggcactaagaacactgcccctatttcttcatttgacctggatgattgtctgaaggaacatcaaaagctgcttagaacatcactggagaagacacagtgtcaacactgcctgaggaattcctgagcataaatgttgtgggccctgtyttattccttcctcaactgtgactctttatccatctaagagtcacgcctgcaagcaaacagccaggcaagaaagactgttcctaaagtcctcagtgcacatccaggttggtgttgctcg

SEQ ID NO: 377385 - DNA, 644 bp, Homo sapiens
cttattccttcctcaactgtgactctttatccatctaagagtcacgcctgcaagcaaacagccaggcaagaaagactgttcctaaagtcctcagtgcacatccaggttggtgttgctcggggtggctgcatgctcctgctttctgccctgtgttttggaggactgtacatcatccactagcctaaccaaagcaggactcatctgcytaaggacagacagaccctcctgcttattgatatgcatggttttgtgcatgctatggtaattgaattattgagatttcaccatgaagaagtgggacaacctgggcatggatggtggctggagcctgtaatactctggaggctgaagcaggaggattactggagcccaataccagcttgggcaacatagcaagaccccatctcaaaaaaaggaagagggacaagatcactgtcagtatctaaagagtggcaatcctgcagagctgccaatgaccagaaaggtgtgttcttcaaaccagggctaggcttgaggggaaaggcccctatatgagcagcagagttagaatcttctctcagtttatacttaatgggaaaactatgagataaaaagaaagatgatcatttgttcattcatttatacgacatgtacagagcacttgt

SEQ ID NO: 377386 - DNA, 421 bp, Homo sapiens
tttgtcaatctgaaagaaagacattaaagtgtaacaagaaaataatctgaaggtataaaatttactggtaatagtaaattcacagataaattcagaatactcaaaaaccgtaattgtgctgtgtaagccactcatatctctcatatgaagataatagacaaatctattagtctgttctcatgtgactataaagaactacctgggactgggtaatttatgaagaaaatgagtttacttcactcacagtcctgcatgtctggggaggcctcagtaaacttgcaataatggtggaaggtgaaagggaagcaggcacatcttcacatggacagcaggagagagagtgtgaaaagggakaagtgctacacactttcaaataacaagatcttgtgagaactctattacaagaacagcaagggggaag

SEQ ID NO: 377387 - DNA, 487 bp, Homo sapiens
tccaagtccaaagcctcatcagagacaaggcaagttgcctcctatgatcctgtaaaataaaaaacaagttggttacttccaagatacaatggggtcaggcactgggtaaatgttcccattcaaaaagggagaaattgggcaaaacaaaggggctacaggccccatgcaagtccagaattcagtagtgcagtcattaaatctcaaagctccagaataatcttttttgactgcacatctcacatctaggtcacactgatgcaagtgggtgggctcccatggccttgggcagcatcatcatgtggctttgcagggtacagtccacacagctgcctccatgagctggcaktgagtacctgcaggttttacaggtgcacggtgcaagctgtcagtggatctactgttctgggatctggaggatggtggccctcttctcacagctccactaggcagtgccacagtggagactctctgtgggggctccaacctc

SEQ ID NO: 377388 - DNA, 447 bp, Homo sapiens
tatgtggtctacaagaaactcacttcacctgcaaagacatgcatagactaagtgaaaaaatgaaaaagatgtttcatgcaaatggaaaccaaaaaagagcaggattagctatatttacatcagataaaacagatttcaagtccaaaactgtaaaaagagacaaagaatgtcattatataatgataaagagataaattcagcaagaggatataayaattataaataaatgtacccccattactggtgcaaacaaaatatataagagaaaatattaatagacctaaaggaagagattgactacaatacaataataatagtagatttcaacataccactttcagtaatggacagggcatccatacagaaaattaacaaagaaacattagagttaaactatgtcatagaccaaatggatctaaatcacatttaaatacatgttattcaaca

SEQ ID NO: 377389 - DNA, 447 bp, Homo sapiens
tatgtggtctacaagaaactcacttcacctgcaaagacatgcatagactaagtgaaaaaatgaaaaagatgtttcatgcaaatggaaaccaaaaaagagcaggattagctatatttacatcagataaaacagatttcaagtccaaaactgtaaaaagagacaaagaatgtcattatataatgataaagagataaattcagcaagaggatataataattataaataaatgtacccccattactrgtgcaaacaaaatatataagagaaaatattaatagacctaaaggaagagattgactacaatacaataataatagtagatttcaacataccactttcagtaatggacagggcatccatacagaaaattaacaaagaaacattagagttaaactatgtcatagaccaaatggatctaaatcacatttaaatacatgttattcaaca

SEQ ID NO: 377390 - DNA, 585 bp, Homo sapiens
tacttaatgccaactgattttttttatattaatgaatctccaaagattcttaatttgatgatttgacttgcatattttcttatttccactataattcaaatatgatctaaacatttttaaatctgtaaagacacattttgtaataaagattccaatatcctaatgcagggggtagtcctagagttacattatgtataacttcatatatcctatgggtgcttaggatatataacactcattctcatcagatggaaatgccaatagtcatgtgaaaatcatctgttgttttctcctcgcttcatggccaaatattcatcattctcatttcaagttaagawaaaatgtcaaagcaaatatttattttcctaagtcacaaagtgaagagtctccaggtcatagttcttggtgaaaactaaaaaaaattatgcccaaacttcaccatgctgttattgttctgccttccttagacttcgcttattttgtaacatacaacatgtttcccagtaactaccaggtctagctcctgaataccttctcttattctgataactgccttttgtaaatactcatcttttaagtgcttta

SEQ ID NO: 377391 - DNA, 440 bp, Homo sapiens
tcacagcacacaggaatcctgagtagttattttatctactaatcagctacacattgatacaggaaaaggactagaaggcaagtctaagcaagcaattcttggacaaatgggatttactattaacawatacggttttcacataaattgcatgcaaaaaatatgaataccttctgaattattacagctgatctgtagtgtagtagttgacagtaaggctaagaaatgaggccaatatgtattattaataatttgggtgtacttttctttaatgtatagaagcataaaagttattaaagcaaagactgaaaactcatctgatgctctttcatcaggctttgcctaggtttttcaaaaaatatggatttgaactccaataatctaaaacaatgtgtttttttacttttttcctcagaaaattgaaaaaaatctctaaatagagt

SEQ ID NO: 377392 - DNA, 448 bp, Homo sapiens
aacttaaagatttcatatcaaacctatttctaaaaagtcatctattttttttcaacaaataggatctttctataaaaatatataggtcattgtgactttttgttgtgatgttttattttggacattgatattgcatctgacttattggctgaactaatttataagacctactattgtgtcagtttattgtttttgtagatattacatgaaaattgtgaaaatttarcaaaataacctaaaaaaggcaaataagaattccaaagggaagcaaaattgtactgcaactgataaatatatttgggaagatttgattatcaagtttaattttgttaaatctctaattactaaggtattttgtcccaaagtcataatttacaaaaaaaaaattgtgtgagggaaaggtcatttttaccagatgtcacttaagggcagagagtacctacagccc

SEQ ID NO: 377393 - DNA, 588 bp, Homo sapiens
tatttatacgtcttcatatataacttaaagatttcatatcaaacctatttctaaaaagtcatctattttttttcaacaaataggatctttctataaaaatatataggtcattgtgactttttgttgtgatgttttattttggacattgatattgcatctgacttattggctgaactaatttataagacctactattgtgtcagtttattgtttttgtagatattacatgaaaattgtgaaaatttagcaaaataacytaaaaaaggcaaataagaattccaaagggaagcaaaattgtactgcaactgataaatatatttgggaagatttgattatcaagtttaattttgttaaatctctaattactaaggtattttgtcccaaagtcataatttacaaaaaaaaaattgtgtgagggaaaggtcatttttaccagatgtcacttaagggcagagagtacctacagcccacttattcttctctatatcatttatgaaatgtttccccagatattaccttgtttcaattaaatgctattaaatatgaaatactgcaagaatttaaatttgtctgctttgtaagcgtata

SEQ ID NO: 377394 - DNA, 448 bp, Homo sapiens
aacttaaagatttcatatcaaacctatttctaaaaagtcatctattttttttcaacaaataggatctttctataaaaatatataggtcattgtgactttttgttgtgatgttttattttggacattgatattgcatctgacttattggctgaactaatttataagacctactattgtgtcagtttattgtttttgtagatattacatgaaaattgtgaaaatttagcaaaataacctaaaaaaggcaaataagaattccaaagggaagcaaaattgtactgcaactgataaatatatttgggaaratttgattatcaagtttaattttgttaaatctctaattactaaggtattttgtcccaaagtcataatttacaaaaaaaaaattgtgtgagggaaaggtcatttttaccagatgtcacttaagggcagagagtacctacagccc

SEQ ID NO: 377395 - DNA, 440 bp, Homo sapiens
aacagacattttcaaaagaagaaatacaaatggccaacaaatatttgaaaaaaaaatgctcaacattgctattcatcagggaaaagcaaattgaaaccacaatgaaatatcatcrcttaccaatcagaatggctattaataaaaagtagaaaaaaaataacatgttggcaaagattgagagagaaggaaacagtcatatacactgttgatgggactgtaaattagtacacattctatggaaaagagcatggagatttcttaaagaactaaaaatagaactaccatttcatccagcaatctcaccactgtgcatatacccaaagggaaaaaaaaatactagcactcgtatgcttatcacagcattattcacaagaaaaaaattatggaatcaacttaactgtccatcaacagatgattggataaagaaaatgtggtatata

SEQ ID NO: 377396 - DNA, 440 bp, Homo sapiens
aacagacattttcaaaagaagaaatacaaatggccaacaaatatttgaaaaaaaaatgctcaacattgctattcatcagggaaaagcaaattgaaaccacaatgaaatatcatcgcttaccaatcagaatggctattaataaaaagtagaaaaaaaataacatgttggcaaagattgagagagaaggraacagtcatatacactgttgatgggactgtaaattagtacacattctatggaaaagagcatggagatttcttaaagaactaaaaatagaactaccatttcatccagcaatctcaccactgtgcatatacccaaagggaaaaaaaaatactagcactcgtatgcttatcacagcattattcacaagaaaaaaattatggaatcaacttaactgtccatcaacagatgattggataaagaaaatgtggtatata

SEQ ID NO: 377397 - DNA, 440 bp, Homo sapiens
aacagacattttcaaaagaagaaatacaaatggccaacaaatatttgaaaaaaaaatgctcaacattgctattcatcagggaaaagcaaattgaaaccacaatgaaatatcatcgcttaccaatcagaatggctattaataaaaagtagaaaaaaaataacatgttggcaaagattgagagagaaggaaacagtcatatacactgttgatgggactgtaaattagtacacattctatggaaaagagcatggagatttcttaaagaactaaaaatagaactaccatttcatccagcaatctcaccactgtkcatatacccaaagggaaaaaaaaatactagcactcgtatgcttatcacagcattattcacaagaaaaaaattatggaatcaacttaactgtccatcaacagatgattggataaagaaaatgtggtatata

SEQ ID NO: 377398 - DNA, 588 bp, Homo sapiens
gtgccaacactcacaatgaagtgaatcaaatggaccacagaatttctggtacttaatgttatttttcttttacagacatcttaaaaagatrtaggacaatggcaagttttctgttcacaaataaatgaaaaataatacccataataattaagacttaattaaggacattgccacaaattaagtattatccttgattatttttctaaaatatccagttgcgtgttacagttttaagaaaattctaaagtttccatttgctaaaaatcatatttcaaggaacagtggttttggaaaaagatcactaaagcagaatgaacaaaattgcttttctctttcattttggatgctgggcagaagacatacaaaagcctttgatagccaaaacacattacttaacaattaacattatgtttttaaaacttgtaatataaatgtagaaaataaatatttctaatgttacaactggatcatagcaaatgaaactaatcggttgaagtaattgatcaaaattttctgtttaagaaaaagtaaaattcttgcccaagtatcaaaactggcaagttaatgagtatgacataaatgaccaat

SEQ ID NO: 377399 - DNA, 588 bp, Homo sapiens
gtgccaacactcacaatgaagtgaatcaaatggaccacagaatttctggtacttaatgttatttttcttttacagacatcttaaaaagatataggacaatggcaagttttctgttcacaaataaatgaaaaataatacccataataattaagacttaattaaggacattgccacaaattaagtattatccttgattatttttctaaaatatccagttgcgtgttacagttttaagaaaattctaaagtttccatttgctaaaaatcatatttcaaggaacagtggttttggaaaaagatcactaaagcagaatgaacaaaattgcttttctctttcattttggatgctgggcagaagacatacaaaagcctttgatagccaaaacacattacttaacaattaacattatgtttttaaaacttgtaatataaatgtagaaaataaatatttctaatgttacaactggatcatagcaaatgaaactaatcggttgargtaattgatcaaaattttctgtttaagaaaaagtaaaattcttgcccaagtatcaaaactggcaagttaatgagtatgacataaatgaccaat

SEQ ID NO: 377400 - DNA, 590 bp, Homo sapiens
ctttgtttctaaaatgtatgtaataatgcacyaggttctaaaatccggtgagaattctgtgagattatgcatgcaaagtgctgagcatggggcctggctcatagaaagtatcaaataagtggtagacaagttgtcattttcacttgtggttgataatttccacttttgcctttctgcagcccagagacagaagcagataatgcaagtgtcatctacatctggcaaaagccaaaggtttggaagatggaaaaaggaatccaggcaaaaaggagcccaagattgaagtgaatgaccaggtgcaccagttcaaatgcaatcaggagggacaggggtagagggagaagcctagagcagcgcttctcaaactgactattcaagtcacctggagatcttggtgaaatgcagactctggtgcagtaggtcctggcgggaacttgaaattctgcattttgaccaaggtccaaggtgaatgtccagtgctgttgtccttggcctgcagcaggaggagcagggatctaagacttggagagcaaatgtcaagctcagaagaaagactggaagtttggggacaaaacccaaatatggctaaa

SEQ ID NO: 377401 - DNA, 558 bp, Homo sapiens
ttcgggtggtgcctgcatattatgcagaaccatctgtgaaccaggccctagtcttctcttcctctgtcagctgatcagagggaactccccacgaggccatcagggcaggctgggggtgagaaggcagggtggcaggagtggagaccatgggcatttgagccacttcctaatgtaacttacttgtgccttcaggacctgctcaagcctgatcacgtatatgccactttcatctgatgatggaatgctgctgtgcrtgactcactttatggctagatgtgtcagaaagcacccagttcgtgataggcagttcaggttgcatggtgacttgatgactcatagtcaaatgttcagtttctaccaaagcccagtaataggccaagagctgtctctcaaaaggagagtagttatctgcagaagatgacagggcttagatccaaaatcctagaagcctccattgcaattcacctatggaggcctgccaaaggctacaaacggcatccctacctgccactgacacctcaagcaccattggatctgctgggtcatatggcccaaatg

SEQ ID NO: 377402 - DNA, 547 bp, Homo sapiens
gtttttgtggtatctgttacagcagccacgggaaactaatacaagttgctaacaatttttggccctaacaaygttttcagggctttaacccttaatcttcataatgatgctttaaatgttttaattaaattaatttttttcttcttataacgaagctttttgggttcttttagaaactgggtctcgctccgttgtccaggctagggtgcagtggcgtgactgtagctcactgtaacctcaaccttctggcctcaagcagtcctcccacttctgcctctcaaagtgcagggattacaggagtgagctactgcacccagcccataatgataatttaaggtaaggattgtttttgcttcatttcataggcaaggaaactgaaaagcagagagttaaagtgacttatccaggtacattaagcaagaaaatggccaagcttgacttcaaatccaggctatctgatcccagagctagtacctttaatgactgtggcctcctgcttctccaagcggaattacaagcagaatccaccccctcctgcctcatgtgt

SEQ ID NO: 377403 - DNA, 547 bp, Homo sapiens
gtttttgtggtatctgttacagcagccacgggaaactaatacaagttgctaacaatttttggccctaacaatgttttcagggctttaacccttaatcttcataatgatgctttaaatgttttaattaaattaatttttttcttcttataacgaagctttttgggttcttttagaaactgggtctcgctccgttgyccaggctagggtgcagtggcgtgactgtagctcactgtaacctcaaccttctggcctcaagcagtcctcccacttctgcctctcaaagtgcagggattacaggagtgagctactgcacccagcccataatgataatttaaggtaaggattgtttttgcttcatttcataggcaaggaaactgaaaagcagagagttaaagtgacttatccaggtacattaagcaagaaaatggccaagcttgacttcaaatccaggctatctgatcccagagctagtacctttaatgactgtggcctcctgcttctccaagcggaattacaagcagaatccaccccctcctgcctcatgtgt

SEQ ID NO: 377404 - DNA, 547 bp, Homo sapiens
gtttttgtggtatctgttacagcagccacgggaaactaatacaagttgctaacaatttttggccctaacaatgttttcagggctttaacccttaatcttcataatgatgctttaaatgttttaattaaattaatttttttcttcttataacgaagctttttgggttcttttagaaactgggtctcgctccgttgtccaggctagggtgcagtggcgtgactgtagctcactgtaacctcaaccttctggcctcaagcagtcctcccacttctgcctctcaaagtgcagggattacaggagtgagctactgcacccagcccataatgataatttaaggtaaggattgtttttgcttcatttcataggcaaggaaactgaaaagcagagagttaaagtgacttatccaggtacattaagcaagaaaatggcmaagcttgacttcaaatccaggctatctgatcccagagctagtacctttaatgactgtggcctcctgcttctccaagcggaattacaagcagaatccaccccctcctgcctcatgtgt

SEQ ID NO: 377405 - DNA, 598 bp, Homo sapiens
tagcaagttcttaaatctaccctcatcccactgggatctgggttggaatagtgtgaactttcccattaatttcagtgcaactcattgtctccatgaggcttctctgttgcaggcaacagaatccaactctggctaatctaagcaaagagaaacttattgaaaatacattaagggcttgtgaaattctggggagacttgcacaatttttagggactaggtttgacatggataggaactaaggaagcttcacagtatcaaggaagcrgagaagagggctcctctctggaacctgaaagtctgatccaaatgcctctgactccaccatgaaaggcttctagccagttcctccttttgtactgggcatgactcaaaaagtgtacagagaaagtgcctgggtgactcagctgaggccttattcgctctctcccacctcttcccaactcctttcaccaaccagagtggagaacaggggatctggctttcccaattcaaagtggtaaccaagaattgccctctgcagaagatgctgtcaatacccgtgtgtatcctcttggcctcccccggaagttgcctctaggtttgcctctacacacattgg

SEQ ID NO: 377406 - DNA, 598 bp, Homo sapiens
tagcaagttcttaaatctaccctcatcccactgggatctgggttggaatagtgtgaactttcccattaatttcagtgcaactcattgtctccatgaggcttctctgttgcaggcaacagaatccaactctggctaatctaagcaaagagaaacttattgaaaatacattaagggcttgtgaaattctggggagacttgcacaatttttagggactaggtttgacatggataggaactaaggaagcttcacagtatcaaggaagcagagaagagggctcctctctggaacctgaaagtctgatccaaatgcctctgactccaccatgaaaggcttctagccagttcctccttttgtactgggcatgactcaaaaagtgtacagagaaagtgcctgggtgactcagctgaggccttattcgctctctcccacctcttcccaactcctttcaccaaccagagtggagaacaggggatctggctttcccaattcaaagtggtaaccaagaattgccctctgcagaagatgctgtcaatacccgtgtgtaycctcttggcctcccccggaagttgcctctaggtttgcctctacacacattgg

SEQ ID NO: 377407 - DNA, 544 bp, Homo sapiens
ggacacggggaatgtgggggaaatgggcaccccccattctacaggctgsagatggggttgcttctattttcaaacagctcctcccatccccatgcctttttcccaaggtcataagccctgagcggaagaagaaagctgagaggagtctgacgggtgaacggcagctttcagtggtggcattcagccctttgttgtctctgacttttccagccacagcccacattcccaataacatggcccagctccaaccacagccagctcctcaccagccctgaacggaccctgccctttcacttatcactgcatatgcacactgacctcccactaagtgccctggactcctttgctggctgagaattgacttatctttgaagatggcccacatatcacatccttcagaaaacctaaactgattcccctggtcagagttaataggactgccctctgggctcccagtcactttgctcatacccatttttagacagaaaccctgcagctgcaagtgcccacgcccaacaggaacttactgacttatgtagctgac

SEQ ID NO: 377408 - DNA, 544 bp, Homo sapiens
ggacacggggaatgtgggggaaatgggcaccccccattctacaggctggagatggggttgcttctattttcaaacagctcctcccatccccatgcctttttcccaaggtcataagccctgagcggaagaagaaagctgagaggagtctgacgggtgaacggcagctttcagtggtggcattcagccctttgttgtctctgacttttccagccacagcccacattcccaataacatggcccagctccaaccacagccagctcctcaccagccctgaacggaccctgccctttcacttatcactgcatatgcacactgacctcccactaagtgccctggactcctttgctggctgagaattgacttatctttgaagatggcccacatatcacatccttcagaaaacytaaactgattcccctggtcagagttaataggactgccctctgggctcccagtcactttgctcatacccatttttagacagaaaccctgcagctgcaagtgcccacgcccaacaggaacttactgacttatgtagctgac

SEQ ID NO: 377409 - DNA, 514 bp, Homo sapiens
gatatattccacgattgcggttttatttggtaaatctttcaaggcacaccatttaaagagaataaatgagtcttggaaatcttgtaggtaagggtaaatattaggatgcatccagttacatttacacacacatacagttacatttacacacacatacacgcatacagactgagtcacgtgtgtgtatatatatatatgaatttaccaattgatgttaactaatatttataagagccagttggattgatatatattgttgaacctgaaaaatatttattatatacatgtttaaaatacagaaataaatagcaattgcactaggcatttgaaactgtactaaaatataagctgtgaacattttgtgatcattacraattcttacactgaataaatatttttatttttacaatattaatatgtttgatacctgtgtatatttttttacaatgtgttattttatttttgtcatagagtcatgtcatgcataataacattttagtcaaagatggattac

SEQ ID NO: 377410 - DNA, 514 bp, Homo sapiens
gatatattccacgattgcggttttatttggtaaatctttcaaggcacaccatttaaagagaataaatgagtcttggaaatcttgtaggtaagggtaaatattaggatgcatccagttacatttacacacacatacagttacatttacacacacatacacgcatacagactgagtcacgtgtgtgtatatatatatatgaatttaccaattgatgttaactaatatttataagagccagttggattgatatatattgttgaacctgaaaaatatttattatatacatgtttaaaatacagaaataaatagcaattgcactaggcatttgaaactgtactaaaatataagctgtgaacattttgtgatcattacgaattcttacactgaataaatatttttatttttacaatattaatatgtttgatacctgtgtayatttttttacaatgtgttattttatttttgtcatagagtcatgtcatgcataataacattttagtcaaagatggattac

SEQ ID NO: 377411 - DNA, 623 bp, Homo sapiens
cttaccccaaagcatacaaaaatattaactcaaatgaattaaagacacacatgcaagaggtagaataaagcatatgggaaaatcttcaggattttggatctagcaaagaaatagctgtaaccccaaaaacatgagcaacagaataaaaattagatatttaaaatttcttaaaaattaaagacatcggtgtttcagaggacaaccaagcaagtcaaaaggcagctccaaaattgtgagaagatatttgaaaaacacgtatctatatgtctgtatatatatatgtatcttgaatatagaaaaattggtttaactccgtcacaaatatcccaactcaaaactgataaatgataggaatagatgtgtttcccaagaagatacatgaacggtcaataatcccataaaaatatactcaacagcatcactcttcaggcaactacaaatcaaaaccacagttagatactctatggctagaactgrccactttggaaaataatttgatggcttctaaatatatgaaacatagaattgtcatatgacccagaaatttattcctaggtatacacccagattattggaaagaggtgttcaaacacaaattgtacacaagtatttttagcaacagt

SEQ ID NO: 377412 - DNA, 623 bp, Homo sapiens
cttaccccaaagcatacaaaaatattaactcaaatgaattaaagacacacatgcaagaggtagaataaagcatatgggaaaatcttcaggattttggatctagcaaagaaatagctgtaaccccaaaaacatgagcaacagaataaaaattagatatttaaaatttcttaaaaattaaagacatcggtgtttcagaggacaaccaagcaagtcaaaaggcagctccaaaattgtgagaagatatttgaaaaacacgtatctatatgtctgtatatatatatgtatcttgaatatagaaaaattggtttaactccgtcacaaatatcccaactcaaaactgataaatgataggaatagatgtgtttcccaagaagatacatgaacggtcaataatcccataaaaatatactcaacagcatcactcttcaggcaactacaaatcaaaaccacagttagatactctatggctagaactgaccacwttggaaaataatttgatggcttctaaatatatgaaacatagaattgtcatatgacccagaaatttattcctaggtatacacccagattattggaaagaggtgttcaaacacaaattgtacacaagtatttttagcaacagt

SEQ ID NO: 377413 - DNA, 387 bp, Homo sapiens
ctgaccactttggaaaataatttgatggcttctaaatatatgaaacatagaattgtcatatgacccagaaatttattcctaggtatacacccagattattggaaagaggtgttcaaacacaaattgtacacaagtatttttagcarcagtacctaaaatagccaaaggctgaacacaactcaaatgtcaataaaaatattattggataaacaaaaggttatatccatgaaattgaatgttatacagttataaaaagaaataaagtaccaatacgtacatgaaccttgatagcattatgccaactgaacgaagccgggcagaaaaggccacctattgtacgattctatttagatgaaaacagaataggaaaatctatagagacagaaa

SEQ ID NO: 377414 - DNA, 387 bp, Homo sapiens
ctgaccactttggaaaataatttgatggcttctaaatatatgaaacatagaattgtcatatgacccagaaatttattcctaggtatacacccagattattggaaagaggtgttcaaacacaaattgtacacaagtatttttagcaacagtacctaaaatagccaaaggctgaacacaactcaaatgtcaataaaaataytattggataaacaaaaggttatatccatgaaattgaatgttatacagttataaaaagaaataaagtaccaatacgtacatgaaccttgatagcattatgccaactgaacgaagccgggcagaaaaggccacctattgtacgattctatttagatgaaaacagaataggaaaatctatagagacagaaa

SEQ ID NO: 377415 - DNA, 387 bp, Homo sapiens
ctgaccactttggaaaataatttgatggcttctaaatatatgaaacatagaattgtcatatgacccagaaatttattcctaggtatacacccagattattggaaagaggtgttcaaacacaaattgtacacaagtatttttagcaacagtacctaaaatagccaaaggctgaacacaactcaaatgtcaataaaaatattattggataaacaaaaggttatatccatgaaattgaatgttatasagttataaaaagaaataaagtaccaatacgtacatgaaccttgatagcattatgccaactgaacgaagccgggcagaaaaggccacctattgtacgattctatttagatgaaaacagaataggaaaatctatagagacagaaa

SEQ ID NO: 377416 - DNA, 588 bp, Homo sapiens
cagtgaggtggccaggaccactggtaagatcaagggtgaagatataaaataaytttggcggttaacatgcggcagatgatgatgggcttgcagaccattgtaagaaatgttgtttttaatgtacatgaaatggggagacaactcattatcccattatcaatattttaataaattggatccatgaaccaaatccaatgagattaaatcaattaataataatatgcaaatttgtattaaaattacaagaattacttgcacatttgagaacaggagagacatgatttttatcagcaataataaacattattaattttaattgtgatcagctaattgagattaattgcaatacatcttgatttataatgtgactgtcaaaaggaaaatatgattgtaatcttatactacatctatcaatgtcttttattcataagagtatagagtaagcccctagttttcaaagccaacctatgaagcagtgacatcttatgcaagtttgctgctttctgccacagtgatctttggtcagtgggcacaaattgtttacaaaggcccctaggtctagaaatagtttggatcacaatgaacaca

SEQ ID NO: 377417 - DNA, 567 bp, Homo sapiens
gacaactcattatcccattatcaatattttaataaattggatccatgaaccaaatccaatgagattaaatcaattaataataatatgcaaatttgtattaaaattacaagaattacttgcacatttgagaacaggagagacatgatttttatcagcaataataaacattattaattttaattgtgatcagctaattgagattaattgcaatacatcttgatttataatgtgactgtcaaaaggaaaatatgattgtaatcttatactacatctatcaatgtcttttattcataagagtatagagtaagcccctagttttcaaagccaacctatgaagcagtgacatcttatgcaagtttgctgctttctgccacagtgatcyttggtcagtgggcacaaattgtttacaaaggcccctaggtctagaaatagtttggatcacaatgaacacagaaacaccttcatcccttcagaaatacccatcaattacttccaatacagaatgaaaaactgacaaaggaaatacgtggattgtaaaaatgccagttagcttgcaactacatgaaa

SEQ ID NO: 377418 - DNA, 657 bp, Homo sapiens
ctctgcttccactggtcagatagactctctccttacattgtggtctctcactgaatgttctcacccactgcttcctcactacgtaatatctgcccaagaagctccccgtcttctcattctcccatcccatatgctgacattctttccagtccctgcattgttatgagagctcagtgggggagggagctgaatgtctgtatycagtccacaactacgatctaggatactctgtattaaccataaataattgatgcaagtttcttccactcagccatagctgagccagattacccgcaatgctatctcatcccaccacagtctctacgactaatttctattatacaaggtaagatcaacatttgaagtgattgagtttaaacataaaaagatgtattggctcctgcgactgggcagtcttcagggttagttgcttgagtgatcaacgataccattaagattatgattgggacatgaaaaaaagaactggcaaataaggagagaactttgacaatagaaaggcatttaatccttgtgttgttttgagcgccctaaaggaaaagacaaattaaaggcagatcctaacagaactattaacaaagaaggaagagggtgaatgagactcttgaatcaaaaattcttaattcttaactccacctg

SEQ ID NO: 377419 - DNA, 657 bp, Homo sapiens
ctctgcttccactggtcagatagactctctccttacattgtggtctctcactgaatgttctcacccactgcttcctcactacgtaatatctgcccaagaagctccccgtcttctcattctcccatcccatatgctgacattctttccagtccctgcattgttatgagagctcagtgggggagggagctgaatgtctgtattcagtccacaactaygatctaggatactctgtattaaccataaataattgatgcaagtttcttccactcagccatagctgagccagattacccgcaatgctatctcatcccaccacagtctctacgactaatttctattatacaaggtaagatcaacatttgaagtgattgagtttaaacataaaaagatgtattggctcctgcgactgggcagtcttcagggttagttgcttgagtgatcaacgataccattaagattatgattgggacatgaaaaaaagaactggcaaataaggagagaactttgacaatagaaaggcatttaatccttgtgttgttttgagcgccctaaaggaaaagacaaattaaaggcagatcctaacagaactattaacaaagaaggaagagggtgaatgagactcttgaatcaaaaattcttaattcttaactccacctg

SEQ ID NO: 377420 - DNA, 583 bp, Homo sapiens
caaataattacttttattttatttttataaatgtgctaggtacaagcatacttttattatatgattgttttgttatttggatatattgctagtggtgaagtctgagsttttactgtactcatcaccccaatagtgaacattgtacccaataatcatttttcaaccctcactcccctccaaccctggcatcttttggaatattctccagcgtctactttccagtgtatgtactattataataattttgtagccaccccctgttgctactgtggtgagctcatgttgccagtatctgccatgagcacttggtctcttcagtaaattctgtatctaagtaaatagtgtgttctctcacagttctcttttcattgtgcttagtgtaatactataaatcttgaataacaccatgagaccaatacaaagtgccacaagtgatgctgggagtgctcccaagaagcagagaaaagttgtgacattatgagaaaaagttagattgcttcctatagattgagttcttcagctgcctgccatttcaaaataaatgaatccagtgtaaggtcccttaaaaaaaaaaagagaaatt

SEQ ID NO: 377421 - DNA, 583 bp, Homo sapiens
caaataattacttttattttatttttataaatgtgctaggtacaagcatacttttattatatgattgttttgttatttggatatattgctagtggtgaagtctgaggttttactgtactcatcaccccaatagtgaacattgtacccaataatmatttttcaaccctcactcccctccaaccctggcatcttttggaatattctccagcgtctactttccagtgtatgtactattataataattttgtagccaccccctgttgctactgtggtgagctcatgttgccagtatctgccatgagcacttggtctcttcagtaaattctgtatctaagtaaatagtgtgttctctcacagttctcttttcattgtgcttagtgtaatactataaatcttgaataacaccatgagaccaatacaaagtgccacaagtgatgctgggagtgctcccaagaagcagagaaaagttgtgacattatgagaaaaagttagattgcttcctatagattgagttcttcagctgcctgccatttcaaaataaatgaatccagtgtaaggtcccttaaaaaaaaaaagagaaatt

SEQ ID NO: 377422 - DNA, 583 bp, Homo sapiens
caaataattacttttattttatttttataaatgtgctaggtacaagcatacttttattatatgattgttttgttatttggatatattgctagtggtgaagtctgaggttttactgtactcatcaccccaatagtgaacattgtacccaataatcatttttcaaccctcactcccctccaaccctggcatsttttggaatattctccagcgtctactttccagtgtatgtactattataataattttgtagccaccccctgttgctactgtggtgagctcatgttgccagtatctgccatgagcacttggtctcttcagtaaattctgtatctaagtaaatagtgtgttctctcacagttctcttttcattgtgcttagtgtaatactataaatcttgaataacaccatgagaccaatacaaagtgccacaagtgatgctgggagtgctcccaagaagcagagaaaagttgtgacattatgagaaaaagttagattgcttcctatagattgagttcttcagctgcctgccatttcaaaataaatgaatccagtgtaaggtcccttaaaaaaaaaaagagaaatt

SEQ ID NO: 377423 - DNA, 583 bp, Homo sapiens
caaataattacttttattttatttttataaatgtgctaggtacaagcatacttttattatatgattgttttgttatttggatatattgctagtggtgaagtctgaggttttactgtactcatcaccccaatagtgaacattgtacccaataatcatttttcaaccctcactcccctccaaccctggcatcttttggaatattctccagcgtctactttccagtgtatgtactattataataattttgtagccaccccctgttgctactgtggtgagctcatgttgccagtatctgccatgagcacttggtctcttcagtaaattctgtatctaagtaaatagtgtgttctytcacagttctcttttcattgtgcttagtgtaatactataaatcttgaataacaccatgagaccaatacaaagtgccacaagtgatgctgggagtgctcccaagaagcagagaaaagttgtgacattatgagaaaaagttagattgcttcctatagattgagttcttcagctgcctgccatttcaaaataaatgaatccagtgtaaggtcccttaaaaaaaaaaagagaaatt

SEQ ID NO: 377424 - DNA, 547 bp, Homo sapiens
caatacaaagtgccacaagtgatgctgggagtgctcccaagaagcagagaaaagttgtgacattatgagaaaaagttagattgcttcctatagattgagttcttcagctgcctgccatttcaaaataaatgaatccagtgtaaggtcccttaaaaaaaaaaagagaaattcataaggcctcatttcrtgccaacaggcatgaaaaccttgtcctttcttatctcatattcaaaatgcagcttttatgtggggtacagaattgctataagaaagacatacctatagactcttatttgattcaagaaatagcgaagtcattatttgacaacttaaagtaaaagcaaggtgaaagatctaaagctggagaatttaatgacagcaaaggatgatttgataattttagaaagtggtttggttttaaaaatgtcaggataatgggagtagcaacttctgccaaccaagaaccagcaagtgaattctcaaatgccgttaagaaaaacattgaggagaaaggatatctgcctgaataggtattaatgcagctgaa

SEQ ID NO: 377425 - DNA, 528 bp, Homo sapiens
tcagtgctttgtccctgaagtcagaagtaccttgccagtaagggactgctttttaaagttttttgttgttgttgtttaattggaaaatgccccctggccacccagaaccccatgagttcaacaccaaaggcactgaagtgtctccttttcccccaaacacatctctacytcagcctctagataagggagtcataaggacctttaaggctctacatatggcactctatggaaaggtttgtcaacattgcaaaagagaaacccaatagagagaacatcatggaagtctggaaggcttacacctttcaagatgtcatcagttgatatagaaaaccatgaaactcaaaacaataaattcctgctggacaaaagtacaatttgtgtccagatgttgtgcatagctacagaattacgacaaacccaatttagagaaaaccatggaaagaagtatggatatgaagggaaaaaaaggtgtggagtgaagggttgcaagatatggatcttggaggaatttaagaactaatacacacc

SEQ ID NO: 377426 - DNA, 554 bp, Homo sapiens
tccttttcccccaaacacatctctacctcagcctctagataagggagtcataaggacctttaaggctctacatatggcactctatggaaaggtttgtcaacattgcaaaagagaaacccaatagagagaacatcatggaagtctggaaggcttacacctttcaagatgtcatcagttgatatagaaaaccatgaaactcaaaacaataaattcctgctggacaaaagtacaatttgtgtccagatgttgtgcatagctacagaattacgacaaacccaatttagagaaaaccatggaaagaagtatggatatgaagggaaaaaaaggtgtggagtgaagggttgcaagatatggatcttggaggaatttaagarctaatacacaccacaccagaggaattaacaaaagatgacttcatggagatgagtgcttcctaaccagtgccagataatgaggaagaagacataggaacagcagtgccagaaaacaaattggcattcaacaatctggcaaaagaactttgattattcaagactacttttgacttcttttat

SEQ ID NO: 377427 - DNA, 400 bp, Homo sapiens
agctacagaattacgacaaacccaatttagagaaaaccatggaaagaagtatggatatgaagggaaaaaaaggtgtggagtgaagggttgcaagatatggatcttggaggaatttaagaactaatacacaccacaccagaggaattaacaaaagatgacttcatggagatgagtgcttcctaaccagtgccagataatgaggaagaagacataggaamagcagtgccagaaaacaaattggcattcaacaatctggcaaaagaactttgattattcaagactacttttgacttcttttatgacatagaccgttccatgatacaggaactgaaactgaagcaaatggtggaagacggataggtactacactgaaatgtttttagagaaatgaaaaagcaaa

SEQ ID NO: 377428 - DNA, 533 bp, Homo sapiens
aacaaattggcattcaacaatctggcaaaagaactttgattattcaagactacttttgacttcttttatgacatagaccgttccatgatacaggaactgaaactraagcaaatggtggaagacggataggtactacactgaaatgtttttagagaaatgaaaaagcaaaatagacagaaataatgatgtatttttgtaaagtttcaccaagtgtgcttgcctcttttgcttccccttccatcccttcaccctcttccacctctgctaccctaagacacaaagaccagctcctcctcctcctcctctgcctactcaacatgaacacaacaatgatgaagacctttaggatgatccacttccacttaatgaatgggtcatatattttctcttccttacaattttcttgactataatttcttttctgtagcttagtttattgtaagaatacagtatataatacacatagcatgcaaaatatgtcttaaatgtaacgcatgttatcagtaagccttctggtcaacaataggttatta

SEQ ID NO: 377429 - DNA, 534 bp, Homo sapiens
aatgatgtatttttgtaaagtttcaccaagtgtgcttgcctcttttgcttccccttccatcccttcaccctcttccacctctgctaccctaagacacaaagaccagctcctcctcctcctcctctgcctactcaacatgaacacaacaatgatgaagacctttaggatgatccacttccacttaatgaatgggtcatatattttctcttccttacaattttcttgaytataatttcttttctgtagcttagtttattgtaagaatacagtatataatacacatagcatgcaaaatatgtcttaaatgtaacgcatgttatcagtaagccttctggtcaacaataggttattagtagtttggggggaatcaaaatttgtatgcagatttttcactgtgtgggaggccagctcccctaaccctatattgttcaaggggcaacaatattctttctcactggcactttactttccataaattcaaatcccaaaagtagaactgcaagttcaaaaggatttttaaaaaaataattactg

SEQ ID NO: 377430 - DNA, 534 bp, Homo sapiens
aatgatgtatttttgtaaagtttcaccaagtgtgcttgcctcttttgcttccccttccatcccttcaccctcttccacctctgctaccctaagacacaaagaccagctcctcctcctcctcctctgcctactcaacatgaacacaacaatgatgaagacctttaggatgatccacttccacttaatgaatgggtcatatattttctcttccttacaattttcttgactataatttcttttctgtagcttagtttattgtaagaatacagtatataatacacatagcatgcaaaatatgtcttaaatgtaacgcatgttatcagtaagccttctggtcaacaataggttattagtagtttggggggaatcaaaakttgtatgcagatttttcactgtgtgggaggccagctcccctaaccctatattgttcaaggggcaacaatattctttctcactggcactttactttccataaattcaaatcccaaaagtagaactgcaagttcaaaaggatttttaaaaaaataattactg

SEQ ID NO: 377431 - DNA, 534 bp, Homo sapiens
aatgatgtatttttgtaaagtttcaccaagtgtgcttgcctcttttgcttccccttccatcccttcaccctcttccacctctgctaccctaagacacaaagaccagctcctcctcctcctcctctgcctactcaacatgaacacaacaatgatgaagacctttaggatgatccacttccacttaatgaatgggtcatatattttctcttccttacaattttcttgactataatttcttttctgtagcttagtttattgtaagaatacagtatataatacacatagcatgcaaaatatgtcttaaatgtaacgcatgttatcagtaagccttctggtcaacaataggttattagtagtttggggggaatcaaaatttgtatgcagatttttcactgtgtgggaggccagctcccctaaccctatrttgttcaaggggcaacaatattctttctcactggcactttactttccataaattcaaatcccaaaagtagaactgcaagttcaaaaggatttttaaaaaaataattactg

SEQ ID NO: 377432 - DNA, 550 bp, Homo sapiens
ttaccttgatgatctctatgtagggtcacactcaaggcatcttaaaatattttgctggccaacaaaagacacctcctgttctaattgggcattgtccttttctttaaactatgcagacaaacaatattataaagtgagaacatccgcataaaaaacctaaacataaatcttaatagtgagttcatgaaaattcttactgatgaaatggcaatgtcacagactgactgtttatgtccccccaaatttgtatattgaaatcctaacccccaagctactcgtgttaggagatagagccttggggaggtgattaggtcatgaggacaagattctcatgaatggratttgtgcccttataaaagagatcccagagagctcattggccccttccaaagtatggggatacagcaggaagttgccatctatgagccagaagggtgaacctcaccccagatgctgaatctgccttgatattggacttcccagcctgcacaactgtaagaaatttctgttgtttataagttactcagcttgtggtattttgttacagcag

SEQ ID NO: 377433 - DNA, 591 bp, Homo sapiens
caattaaaaacaaaataaaagcattttacaaaaaatcatgttatttttaataacttgtttttctaattttatacaccataaaataaatgtctttacatgacatttattttatgataataactaatttattcatttaaacagcaaggtacatttcattctacagatatactatataatatttactccgatctctggatgagaatttatgttgccygtaaatattgtatcacaaacattataagaataatctctgtaaaggttttcttcctgaattattatttgggtagaaaaattactagaaatagaataactgggtcaaagattaaagacaatttaaatttcaatatatagaatcaaattattctccaaaatattgtactctacagtatttgaattttgatttttttctccattttcactactgccaataactttaatctttgtcgataaatgagacaaaaaagacaaataatgcaatattatacaagggagattaataggtagaaaaagaaatgcaatggccaggagtaacagaagatgttcaacatcaatccaatcaaattaatgcgtctttaaaatgcaatagcagtc

SEQ ID NO: 377434 - DNA, 591 bp, Homo sapiens
caattaaaaacaaaataaaagcattttacaaaaaatcatgttatttttaataacttgtttttctaattttatacaccataaaataaatgtctttacatgacatttattttatgataataactaatttattcatttaaacagcaaggtacatttcattctacagatatactatataatatttactccgatctctggatgagaatttatgttgcctgtaaatattgtatcacaaacattataagaataatctctgtaaaggttttcttcctgaattattatttgggtagaaaaattactagaaatagaataactgggtcaaagattaaagacaatttaaatttcaatatatagaatcaaattattctccaaaatattgtactctacagtatttgaattttgatttttttctccattttcactactgccaataactttaatctttgtcgataaatgagacaaaaaagacaaataatgcaatattatacaagggagattaataggtagaaaaagaaatgcaatggccaggartaacagaagatgttcaacatcaatccaatcaaattaatgcgtctttaaaatgcaatagcagtc

SEQ ID NO: 377435 - DNA, 591 bp, Homo sapiens
caattaaaaacaaaataaaagcattttacaaaaaatcatgttatttttaataacttgtttttctaattttatacaccataaaataaatgtctttacatgacatttattttatgataataactaatttattcatttaaacagcaaggtacatttcattctacagatatactatataatatttactccgatctctggatgagaatttatgttgcctgtaaatattgtatcacaaacattataagaataatctctgtaaaggttttcttcctgaattattatttgggtagaaaaattactagaaatagaataactgggtcaaagattaaagacaatttaaatttcaatatatagaatcaaattattctccaaaatattgtactctacagtatttgaattttgatttttttctccattttcactactgccaataactttaatctttgtcgataaatgagacaaaaaagacaaataatgcaatattatacaagggagattaataggtagaaaaagaaatgcaatggccaggagtaacagaagatgttcaacatcaatccaaycaaattaatgcgtctttaaaatgcaatagcagtc

SEQ ID NO: 377436 - DNA, 591 bp, Homo sapiens
caattaaaaacaaaataaaagcattttacaaaaaatcatgttatttttaataacttgtttttctaattttatacaccataaaataaatgtctttacatgacatttattttatgataataactaatttattcatttaaacagcaaggtacatttcattctacagatatactatataatatttactccgatctctggatgagaatttatgttgcctgtaaatattgtatcacaaacattataagaataatctctgtaaaggttttcttcctgaattattatttgggtagaaaaattactagaaatagaataactgggtcaaagattaaagacaatttaaatttcaatatatagaatcaaattattctccaaaatattgtactctacagtatttgaattttgatttttttctccattttcactactgccaataactttaatctttgtcgataaatgagacaaaaaagacaaataatgcaatattatacaagggagattaataggtagaaaaagaaatgcaatggccaggagtaacagaagatgttcaacatcaatccaatcaaattawtgcgtctttaaaatgcaatagcagtc

SEQ ID NO: 377437 - DNA, 596 bp, Homo sapiens
gtgtttaacctgtccatttagtttttaattttcattatattttttatttctaaaagatctcttaaattcagtttcaatctgcttaatataagatacatacactgtctcaatttatattcctggcacacctcattgattttttaaacatattaaacacagcttttatagttatataatcgtcctaatatctgaaatctttatgggcataattctgtttctgctcatgatgtttatttcctcatgagttttgtaagagtcttacwtttttctcattttggatgaaattttacctgtggccattctttgagacatgggctgaatgtgggtttctccaaagacactttgccttcgtcttgtgtttggtggtaataccaacatgggataactataaaataaattatcagtttcatgtgtgggttttttttaacttatacttacagtgaaaatttaaaccacaaattcatgtgaagatggccttctcatttttcctctaaatagcaccgagtttgaggcaggaaaatttcctggttgtctccccctgaggaacaggtttttatctagtttatcctttcactgaaattatagtccttcgtatc

SEQ ID NO: 377438 - DNA, 428 bp, Homo sapiens
tgacttgaggccctctttgaaagcmgactcagaatctgtaatttatcaggatccccaggtaatttgtatgtgcagtctagtttggtagatctgctctggcagactggaagactcttctatctgcctcatgtaaggtgcaggtgacataattaggtaatcaagcaaaagatcacatattttaataagaaagagacactggctattattttgagtggtaaaacaggttattcagtcccagtttaaaatggaaatgacagagaccaagatgaagatttttaatttgagatgtgcctgcgatgcaattacatttgctgaatgaaactgcttcagtaattagatgcaggtttcttctctcttctttttgagatgtaaagaagacacaatagactcatggaacttaaagaactagacgccagctaacaaaacat

SEQ ID NO: 377439 - DNA, 559 bp, Homo sapiens
aacataggacagtgccagtttagcactgaaaaaaatcagttctcctaattctaaaaagaggagacagccaggcgtggtgggtcactaaaaatacaaaaaattagctgggcatggtggtgcatgcctgtaatcccagctacttgggaggctgaggcaaaagaatcacttaaacccgggaggtgaaggttgcagtgtgctgagatagcgccattgcactctcgcctgggcaacaagagcgaaactccgtctcaagaaaaaaaaaaaagagagagagagagaaactgtaatttcatttcagaagttttatagggtastatttccaattctttttttcttactccattaaagtgtaattagcagtatgtgaaaatttccactttatcctcaatcagaagcctctccttccaattagcatatattttttctattaactttgtaaagtgggattcttgttttatacatacccctggaaagtatacttaaactgtgagaccctgggattttatatttccaaatagaagataccatcctcttgtatcacaaaatgtacctaagatgg

SEQ ID NO: 377440 - DNA, 525 bp, Homo sapiens
ttttattcccctacatatggctcgccaattatcccaacatcatatgttgaaaagggtgtcctttccccactttattttttgcttactttgtcgaagatcagtckgctgtaagtatttgggttaatttatgggttctctcttctgttacattagtctatgtgcgtatttttaaaccagtaccatgctgttttggtagctatggccttattgtacagtttgaaatcaagtactgtgatgcctccaggtttgttctttttgcttagccttggttgggctacatggctctcttttggttccatattaattttagaattgtttttgtaattctgtgaagaatgatggtggtattcagatggggattgcattgaatttgtagattgcctttaacagaatggtaattttcacaatattggttctacccatccacgagcatggggatgcgtttccatctgtttgtgtcatctatgatttcttttctttctttctttttttttttttttcttcaaagggagttttgctcttgtc

SEQ ID NO: 377441 - DNA, 512 bp, Homo sapiens
cttggttgggctacatggctctcttttggttccatattaattttagaattgtttttgtaattctgtgaagaatgatggtggtattcagatggggattgcattgaatttgtagattgcctttaacagaatggtaattttcacaatattggttctacccatccacgagcatggggatgcgtttccatctgtttgtgtcatctatgatttcttttctttctttctttttttttttttttcttcaaagggagtttygctcttgtcgctgaggtgggagtgcaatggtgttatctcggctcactacaacttctgcctcccaggttcaagcgattctcctgcctcagcttcccgagtagctgggattatacgcatgtgccaacatgcttggctccaactatgatttctttcagcagtgttttgtaattttcatcgtagaggtcttttgattcctttgctaggtatattcctaagttttttgtttgtttgtttgtttgtttgtttttgcagctattgta

SEQ ID NO: 377442 - DNA, 421 bp, Homo sapiens
ttgaatttgtagattgcctttaacagaatggtaattttcacaatattggttctacccatccacgagcatggggatgcgtttccatctgtttgtgtcatctatgatttcttttctttctttctttttttttttttttcttcaaagggagttttgctcttgtcgctgaggtgggagtgcaatggtgtkatctcggctcactacaacttctgcctcccaggttcaagcgattctcctgcctcagcttcccgagtagctgggattatacgcatgtgccaacatgcttggctccaactatgatttctttcagcagtgttttgtaattttcatcgtagaggtcttttgattcctttgctaggtatattcctaagttttttgtttgtttgtttgtttgtttgtttttgcagctattgtaaaaggggtt

SEQ ID NO: 377443 - DNA, 512 bp, Homo sapiens
cttggttgggctacatggctctcttttggttccatattaattttagaattgtttttgtaattctgtgaagaatgatggtggtattcagatggggattgcattgaatttgtagattgcctttaacagaatggtaattttcacaatattggttctacccatccacgagcatggggatgcgtttccatctgtttgtgtcatctatgatttcttttctttctttctttttttttttttttcttcaaagggagttttgctcttgtcgctgaggtgggagtgcaatggtgttatctcggctcactacaacttctgcctcccaggttcaagcgattctcctgcctcagcttcccgagtagctgggattatasgcatgtgccaacatgcttggctccaactatgatttctttcagcagtgttttgtaattttcatcgtagaggtcttttgattcctttgctaggtatattcctaagttttttgtttgtttgtttgtttgtttgtttttgcagctattgta

SEQ ID NO: 377444 - DNA, 553 bp, Homo sapiens
gtatcatttcttctttgaatgaaagaagacattctttgaatgtctggtagaattctgctgtgaatctgtctggtcctcggtttttttkgttggtaattttaaaattaccatttcgatcttgctgcttgctttattggtctgcttgaggtatctacttcttcctgattaagctaggagggttgtatttttccaggaatttatccaactctcctaggttttctagtttatgtgccaaaaggtgttcatagtacccttgaataatctttaatatttcagtagtgtcagttgtaatatcccctgtttcatttcttagtgaggttatttggattttctctcttcttttcttggttaatcttgctaatggtctatcagttttatttatcttttcaaataaccaactttttgttttatttatgttttgtatttgttgttgttgttgttgttgttgtgtcgatttcatttagttctgctctgatcttggttatttcctttgtttgctgggattgggtttggcttgttcctgcttctctagttccctgagatgtgaacttag

SEQ ID NO: 377445 - DNA, 553 bp, Homo sapiens
gtatcatttcttctttgaatgaaagaagacattctttgaatgtctggtagaattctgctgtgaatctgtctggtcctcggtttttttggttggtaattttaaaattacmatttcgatcttgctgcttgctttattggtctgcttgaggtatctacttcttcctgattaagctaggagggttgtatttttccaggaatttatccaactctcctaggttttctagtttatgtgccaaaaggtgttcatagtacccttgaataatctttaatatttcagtagtgtcagttgtaatatcccctgtttcatttcttagtgaggttatttggattttctctcttcttttcttggttaatcttgctaatggtctatcagttttatttatcttttcaaataaccaactttttgttttatttatgttttgtatttgttgttgttgttgttgttgttgtgtcgatttcatttagttctgctctgatcttggttatttcctttgtttgctgggattgggtttggcttgttcctgcttctctagttccctgagatgtgaacttag

SEQ ID NO: 377446 - DNA, 553 bp, Homo sapiens
gtatcatttcttctttgaatgaaagaagacattctttgaatgtctggtagaattctgctgtgaatctgtctggtcctcggtttttttggttggtaattttaaaattaccatttcgatcttgctgcttgctttattggtctgcttgaggtatctacttcttcctgattaagctaggagggttgtatttttccaggaatttatccaactctcctaggttttctagtttatgtgccaaaaggtgttcatagtacccttgaataatctttaatatttcagtagtgtcagttgtaatatcccctgtttcatttcttagtgaggttatttggattttctctcttcttttcttggttaatcttgctaatggtctatcagttttatttatcttttcaaataaccaactttttgttttatttatgttttgtatttgttgttgttgttgttgttgttgtgtcratttcatttagttctgctctgatcttggttatttcctttgtttgctgggattgggtttggcttgttcctgcttctctagttccctgagatgtgaacttag

SEQ ID NO: 377447 - DNA, 577 bp, Homo sapiens
atgcttcaatctttataatttagttctcacatgagggagatctaatattggaaatactttcaatctgtatgtttatgtatttattctagttgtcctggcacaaggttatcaatgttgctgygtgaccagccattggcttttcacatttacaactcctctgaattttttcttgcctcatttctggtgctgggaaattctgatattttctcctcatctccattgtacattttagggattcttgaaacttgtgatgcacaaacatccacaccttccacataagtaaaatattttacttagatattttctagcagacactgagttctcatgagaaatcctcagtctctttatttggaacacccccaccccagtattccatatggagtagtcatgtgtagaatgtgattacttcattaatatgtcgaagtatgggtacattttgaacacatttgtgaacttgtaatccctttcttgatgaatagtacctgcggatgagcagatttgatattttctttggagcagtaagttagcactggtagaatctgttctgtaatcccaggtccctgggctccagtgtcaa

SEQ ID NO: 377448 - DNA, 577 bp, Homo sapiens
atgcttcaatctttataatttagttctcacatgagggagatctaatattggaaatactttcaatctgtatgtttatgtatttattctagttgtcctggcacaaggttatcaatgttgctgtgtgaccagccattggcttttcacatttacarctcctctgaattttttcttgcctcatttctggtgctgggaaattctgatattttctcctcatctccattgtacattttagggattcttgaaacttgtgatgcacaaacatccacaccttccacataagtaaaatattttacttagatattttctagcagacactgagttctcatgagaaatcctcagtctctttatttggaacacccccaccccagtattccatatggagtagtcatgtgtagaatgtgattacttcattaatatgtcgaagtatgggtacattttgaacacatttgtgaacttgtaatccctttcttgatgaatagtacctgcggatgagcagatttgatattttctttggagcagtaagttagcactggtagaatctgttctgtaatcccaggtccctgggctccagtgtcaa

SEQ ID NO: 377449 - DNA, 608 bp, Homo sapiens
ttcttgaaacttgtgatgcacaaacatccacaccttccacataagtaaaatattttacttagatattttctagcagacactgagttctcatgagaaatcctcagtctctttatttggaacacccccaccccagtattccatatggagtagtyatgtgtagaatgtgattacttcattaatatgtcgaagtatgggtacattttgaacacatttgtgaacttgtaatccctttcttgatgaatagtacctgcggatgagcagatttgatattttctttggagcagtaagttagcactggtagaatctgttctgtaatcccaggtccctgggctccagtgtcaatgcttcctccttagatcctccctgaccctgtaaatttacctcagtctctatttcttaatccaatagctatttcaattgatcttcaattactttgcatgtggccagatattatttatgggttatattctaattcacatttttctgatgtaatttcagagagcctagaaaatataataaactccttctgacaggtacttgagcctcagtatttaaacatgaacaaatgcagcatctattccctatcatgagcactcttaatggcagtt

SEQ ID NO: 377450 - DNA, 608 bp, Homo sapiens
ttcttgaaacttgtgatgcacaaacatccacaccttccacataagtaaaatattttacttagatattttctagcagacactgagttctcatgagaaatcctcagtctctttatttggaacacccccaccccagtattccatatggagtagtcatgtgtagaatgtgattacttcattaatatrtcgaagtatgggtacattttgaacacatttgtgaacttgtaatccctttcttgatgaatagtacctgcggatgagcagatttgatattttctttggagcagtaagttagcactggtagaatctgttctgtaatcccaggtccctgggctccagtgtcaatgcttcctccttagatcctccctgaccctgtaaatttacctcagtctctatttcttaatccaatagctatttcaattgatcttcaattactttgcatgtggccagatattatttatgggttatattctaattcacatttttctgatgtaatttcagagagcctagaaaatataataaactccttctgacaggtacttgagcctcagtatttaaacatgaacaaatgcagcatctattccctatcatgagcactcttaatggcagtt

SEQ ID NO: 377451 - DNA, 608 bp, Homo sapiens
ttcttgaaacttgtgatgcacaaacatccacaccttccacataagtaaaatattttacttagatattttctagcagacactgagttctcatgagaaatcctcagtctctttatttggaacacccccaccccagtattccatatggagtagtcatgtgtagaatgtgattacttcattaatatgtcgaagtatgggtacattttgaacacatttgtgaacttgtaatccctttcttgatgaatagtacctgcggatgagcagawttgatattttctttggagcagtaagttagcactggtagaatctgttctgtaatcccaggtccctgggctccagtgtcaatgcttcctccttagatcctccctgaccctgtaaatttacctcagtctctatttcttaatccaatagctatttcaattgatcttcaattactttgcatgtggccagatattatttatgggttatattctaattcacatttttctgatgtaatttcagagagcctagaaaatataataaactccttctgacaggtacttgagcctcagtatttaaacatgaacaaatgcagcatctattccctatcatgagcactcttaatggcagtt

SEQ ID NO: 377452 - DNA, 577 bp, Homo sapiens
atgcttcaatctttataatttagttctcacatgagggagatctaatattggaaatactttcaatctgtatgtttatgtatttattctagttgtcctggcacaaggttatcaatgttgctgtgtgaccagccattggcttttcacatttacaactcctctgaattttttcttgcctcatttctggtgctgggaaattctgatattttctcctcatctccattgtacattttagggattcttgaaacttgtgatgcacaaacatccacaccttccacataagtaaaatattttacttagatattttctagcagacactgagttctcatgagaaatcctcagtctctttatttggaacacccccaccccagtattccatatggagtagtcatgtgtagaatgtgattacttcattaatatgtcgaagtatgggtacattttgaacacatttgtgaacttgtaatccctttcttgatgaatagtacctgcggatgagcagatttgatattttctytggagcagtaagttagcactggtagaatctgttctgtaatcccaggtccctgggctccagtgtcaa

SEQ ID NO: 377453 - DNA, 608 bp, Homo sapiens
ataatcatttagagataaaagagatcccagatctgaaaagtcagctagcttaggagtttcaagactttaggatttcacaaatcaataaaattaaaaagaaaaaaatgtaaggtttaacatagagatatcacttaaacaatgactactattttgataaaaggacattcaacggtaaaggtgtgggaaatataacctcagagatgaaaatgtaatagcttgggccaagctcactaagtgtccttatttttgtgtttccaccatggatggctgacactgtcacctctggcatgagtccacatcagcaccctggaaatgcctcctatagggtaatcctgcagaaggcactagcacccccagactcgggcagacagctggctagacagtgctgctgggagagtactgcctctcaaaacccgtctctctgtaycagctgcccagtgtttctgtttctgcctacttggaggaacaaaagcaatcctgctcctctccccagagacaggtaattatgccgcattttctttcctgtttcttacatgacaagcactcaaaacttgtcactcttttggttctctccagtgccctccaaacagtccatgttcaagccaaag

SEQ ID NO: 377454 - DNA, 600 bp, Homo sapiens
ccagatctgaaaagtcagctagcttaggagtttcaagactttaggatttcacaaatcaataaaattaaaaagaaaaaaatgtaaggtttaacatagagatatcacttaaacaatgactactattttgataaaaggacattcaacggtaaaggtgtgggaaatataacctcagagatgaaaatgtaatagcttgggccaagctcactaagtgtccttatttttgtgtttccaccatggatggctgacactgtcacctctggcatgagtccacatcagcaccctggaaatgcctcctatagggtaatcctgcagaaggcactagcacccccagactcgggcagacagctggctagacagtgctgctgggagagtactgcctctcaaaacccgtctctctgtatcagctgcccagtgtttctgtttctgcctacttggaggaacaaaagcaatcctgctcctctccccagagacaggtaattatgccgcattttctttcctgtttcttacatgacaagcactcaaaacttstcactcttttggttctctccagtgccctccaaacagtccatgttcaagccaaagaggaatcacttctgctta

SEQ ID NO: 377455 - DNA, 600 bp, Homo sapiens
ccagatctgaaaagtcagctagcttaggagtttcaagactttaggatttcacaaatcaataaaattaaaaagaaaaaaatgtaaggtttaacatagagatatcacttaaacaatgactactattttgataaaaggacattcaacggtaaaggtgtgggaaatataacctcagagatgaaaatgtaatagcttgggccaagctcactaagtgtccttatttttgtgtttccaccatggatggctgacactgtcacctctggcatgagtccacatcagcaccctggaaatgcctcctatagggtaatcctgcagaaggcactagcacccccagactcgggcagacagctggctagacagtgctgctgggagagtactgcctctcaaaacccgtctctctgtatcagctgcccagtgtttctgtttctgcctacttggaggaacaaaagcaatcctgctcctctccccagagacaggtaattatgccgcattttctttcctgtttcttacatgacaagcactcaaaacttgtcactcttttggttctctccagtgccctccaaacagtccatgttcragccaaagaggaatcacttctgctta

SEQ ID NO: 377456 - DNA, 329 bp, Homo sapiens
tgccgcattttctttcctgtttcttacatgacaagcactcaaaacttgtcactcttttggttctctccagtgccctccaaacagtccatgttcaagccaaagaggaatcacttctgcttaccatgttaacttttaaaatagttaactgcagcctgcattatgaggatagcatgccagcataaggaagttagcatcatctagagtgaccacagaagctgcatctgtccgtgtgactggacactgtatatgtccagatctctgcaaggaagagtcatgtcgtactttagagtatgactgagtcacastcagagggaagtgattcccacaag

SEQ ID NO: 377457 - DNA, 574 bp, Homo sapiens
gatgttactaacgttcagtttccccatcttttcaccttaagcttcaagttccttcagcacatcatccgcccttcaagttattcctacaacagctttaccaaatatttcaccactgcataacatagattaccatctttccaaccctcagtaacggttctcttgctgactgccatctggccctagagccacatattttagggtttgtgttttggctgctccccactcctggtaccataacaccatctatcaaatctacctgtagatcatgaaattacatagggcttcaccaaaactgctatggaggtggggagagggacaattggaatggagytcagaaagctgcacttgcagagtcatttatgtaagactgtgagtgtgctgccggtccacatcagaggatggggactaccatggtctgaatgtctgtgtctctccaaatttcatatgtggaaacttaatcaaggtgatagttttaagaggtggggcatttaggagctgattaaggcatttggacagagcccttctgaatgggattaatgaccttataaaagaaatgaagatgaacaaatgaccc

SEQ ID NO: 377458 - DNA, 515 bp, Homo sapiens
aacggttctcttgctgactgccatctggccctagagccacatattttagggtttgtgttttggctgctccccactcctggtaccataacaccatctatcaaatctacctgtagatcatgaaattacatagggcttcaccaaaactgctatggaggtggggagagggacaattggaatggagctcagaaagctgcacttgcagagtcatttatgtaagactgtgagtgtgctgcyggtccacatcagaggatggggactaccatggtctgaatgtctgtgtctctccaaatttcatatgtggaaacttaatcaaggtgatagttttaagaggtggggcatttaggagctgattaaggcatttggacagagcccttctgaatgggattaatgaccttataaaagaaatgaagatgaacaaatgaccccttccaccacatgaggacatagcaagaaggtaccatcttaaagcagagagcaagccctcaccaagacactgaatctgcagatgccttgat

SEQ ID NO: 377459 - DNA, 594 bp, Homo sapiens
atcagaggatggggactaccatggtctgaatgtctgtgtctctccaaatttcatatgtggaaacttaatcaaggtgatagttttaagaggtggggcatttaggagctgattaaggcatttggacagagcccttctgaatgggattaatgaccttataaaagaaatgaagatgaacaaatgaccccttccaccacatgaggacatagcaagaaggtaccatcttaaagcagagagcaagccctcaccaagacactgaatctgcagatgccttgatcttagacttcccagcctctgamactgcaaaaaataaataaataaataaacttctattgtttataaattacccaatctaaggtattttgttttagcggctcaaaggaactaagacaaaggtcatggagaccatagggtgagtctcaagacttcccccagctctacttggctggtctcctgctggtattttccatctgtagagaggaaaaagaactcccattttaccttgcttacctgcacttatgaaaagtcaaactgagtcatgttgagagccagggaacataggagtcggttcttcagcaggagcactcagctagttga

SEQ ID NO: 377460 - DNA, 594 bp, Homo sapiens
atcagaggatggggactaccatggtctgaatgtctgtgtctctccaaatttcatatgtggaaacttaatcaaggtgatagttttaagaggtggggcatttaggagctgattaaggcatttggacagagcccttctgaatgggattaatgaccttataaaagaaatgaagatgaacaaatgaccccttccaccacatgaggacatagcaagaaggtaccatcttaaagcagagagcaagccctcaccaagacactgaatctgcagatgccttgatcttagacttcccagcctctgacactgcaaaaaataaataaataaataaacttctattgtttataaattacccaatctaaggtattttgttttagcggctcaaaggaactaagacaaaggtcatggagaccatagggtgagtctcaagacttcccccarctctacttggctggtctcctgctggtattttccatctgtagagaggaaaaagaactcccattttaccttgcttacctgcacttatgaaaagtcaaactgagtcatgttgagagccagggaacataggagtcggttcttcagcaggagcactcagctagttga

SEQ ID NO: 377461 - DNA, 446 bp, Homo sapiens
ggaactaagacaaaggtcatggagaccatagggtgagtctcaagacttcccccagctctacttggctggtctcctgctggtattttccatctgtagagaggaaaaagaactcccattttaccttgcttacctgcacttatgaaaagtcaaactgagtcatgttgagagccagggaacataggagtcggttcttcagcaggagcactcagctagttgaaggcaatgtggagtgatgggaagagarcagtgatgcagtgattctggcaccaactcctttactatggcatccattgtaccagctgccatacacctggctacttctacaccttatctctaatcactccagaatacgtattagtttccccatcttctagaaaggaaaactcagacccagagacactaagcaagtagctcaagatcacacacgttatctgtgattaagcctc

SEQ ID NO: 377462 - DNA, 588 bp, Homo sapiens
gaatatggaagcctcctgctacttctcagaagataagacaatggcattccaccaccagtgtttactgtggtacccaaagggagctccagttacttccctctgtgcctataacccttggatcacctggttgcaccagacccatcctgactaaaatccctccaaaggaccaaagaggagatacggacaaaaataaaaaataaatctcatctgctctctttcctaaggacccagcagcctctatccatccgtcgttcattcactcattccacacactttcatctagcccctgctgaatgccaagcactgggctggaactctggggactgtggaggtggaataggagaatatgggcttyctgtgagcagtgattgcctaaaatatatacatcaaggttgtaggatcatgtgcaccactgcactctagccggggtgacagagtgagaccctgtctcagaaaaataaaaaaaaaattgtaggatcatggagaaagtgtcttaagtgtttggtgctgtggacaggcaacacaggcagaaactggtggctagggaatcagagaagttttcaggagggagcatttgacttgggcttg

SEQ ID NO: 377463 - DNA, 588 bp, Homo sapiens
gaatatggaagcctcctgctacttctcagaagataagacaatggcattccaccaccagtgtttactgtggtacccaaagggagctccagttacttccctctgtgcctataacccttggatcacctggttgcaccagacccatcctgactaaaatccctccaaaggaccaaagaggagatacggacaaaaataaaaaataaatctcatctgctctctttcctaaggacccagcagcctctatccatccgtcgttcattcactcattccacacactttcatctagcccctgctgaatgccaagcactgggctggaactctggggactgtggaggtggaataggagaatatgggctttctgtgagcagtgattgcctaaaatatatacatcaaggttgtaggatcaygtgcaccactgcactctagccggggtgacagagtgagaccctgtctcagaaaaataaaaaaaaaattgtaggatcatggagaaagtgtcttaagtgtttggtgctgtggacaggcaacacaggcagaaactggtggctagggaatcagagaagttttcaggagggagcatttgacttgggcttg

SEQ ID NO: 377464 - DNA, 588 bp, Homo sapiens
gaatatggaagcctcctgctacttctcagaagataagacaatggcattccaccaccagtgtttactgtggtacccaaagggagctccagttacttccctctgtgcctataacccttggatcacctggttgcaccagacccatcctgactaaaatccctccaaaggaccaaagaggagatacggacaaaaataaaaaataaatctcatctgctctctttcctaaggacccagcagcctctatccatccgtcgttcattcactcattccacacactttcatctagcccctgctgaatgccaagcactgggctggaactctggggactgtggaggtggaataggagaatatgggctttctgtgagcagtgattgcctaaaatatatacatcaaggttgtaggatcatgtgcaccactgcactctagccggggtgacagagtgagaccctgtytcagaaaaataaaaaaaaaattgtaggatcatggagaaagtgtcttaagtgtttggtgctgtggacaggcaacacaggcagaaactggtggctagggaatcagagaagttttcaggagggagcatttgacttgggcttg

SEQ ID NO: 377465 - DNA, 588 bp, Homo sapiens
gaatatggaagcctcctgctacttctcagaagataagacaatggcattccaccaccagtgtttactgtggtacccaaagggagctccagttacttccctctgtgcctataacccttggatcacctggttgcaccagacccatcctgactaaaatccctccaaaggaccaaagaggagatacggacaaaaataaaaaataaatctcatctgctctctttcctaaggacccagcagcctctatccatccgtcgttcattcactcattccacacactttcatctagcccctgctgaatgccaagcactgggctggaactctggggactgtggaggtggaataggagaatatgggctttctgtgagcagtgattgcctaaaatatatacatcaaggttgtaggatcatgtgcaccactgcactctagccggggtgacagagtgagaccctgtctcaraaaaataaaaaaaaaattgtaggatcatggagaaagtgtcttaagtgtttggtgctgtggacaggcaacacaggcagaaactggtggctagggaatcagagaagttttcaggagggagcatttgacttgggcttg

SEQ ID NO: 377466 - DNA, 441 bp, Homo sapiens
gtgattgcctaaaatatatacatcaaggttgtaggatcatgtgcaccactgcactctagccggggtgacagagtgagaccctgtctcagaaaawtaaaaaaaaaattgtaggatcatggagaaagtgtcttaagtgtttggtgctgtggacaggcaacacaggcagaaactggtggctagggaatcagagaagttttcaggagggagcatttgacttgggcttgaactgagcatcatagggcaatatagaaacaagtttatggataattcactgaattggtggcagtttataacttgaatcttccttcagatgattgaagttagtagcccagctatgaaagtctaggttacagatgtctcagccacagcttgcatatatatggatgaggttcatacatatgcagacttgggctcctgccaagatatgagagttttggtcag

SEQ ID NO: 377467 - DNA, 441 bp, Homo sapiens
gtgattgcctaaaatatatacatcaaggttgtaggatcatgtgcaccactgcactctagccggggtgacagagtgagaccctgtctcagaaaaataaaaaaaaaattgtaggatcatggagaaagtgtcttaagtgtttggtgctgtggacaggcaacacaggcagaaactggtggctagggaatcagagaagttttcaggagggagcatttgacttgggcttgaactgagcatcatagggcaatatagaaacaagtttatggataattmactgaattggtggcagtttataacttgaatcttccttcagatgattgaagttagtagcccagctatgaaagtctaggttacagatgtctcagccacagcttgcatatatatggatgaggttcatacatatgcagacttgggctcctgccaagatatgagagttttggtcag

SEQ ID NO: 377468 - DNA, 552 bp, Homo sapiens
aatcagagaagttttcaggagggagcatttgacttgggcttgaactgagcatcatagggcaatatagaaacaagtttatggataattcactgaattggtggcagtttataacttgaatcttccttcagatgattgaagttagtagcccagctatgaaagtctaggttacagatgtctcagccacagcttgcatatatatggatgaggttcatacatatgcagacttgggctcctgccaagatatgagagttttggtcagtctctgtctcaattctaatgtctctgcctacatacctsagtccagagttgtcatgcaaagaacagaaccctggaacaatcacacaaggatttggtactaggcttagccattttctagccatggggacaaaagaaaattactgaacctctctgagtcccagtttatttgtctataaaatagggatagtgatactggggttacaaggaaattgtgagaattaaaatagttcaggagaggttaagttgtcctggggccacctttgtcattgcagtgaccacactctgtagtgaggg

SEQ ID NO: 377469 - DNA, 581 bp, Homo sapiens
ttgaactgagcatcatagggcaatatagaaacaagtttatggataattcactgaattggtggcagtttataacttgaatcttccttcagatgattgaagttagtagcccagctatgaaagtctaggttacagatgtctcagccacagcttgcatatatatggatgaggttcatacatatgcagacttgggctcctgccaagatatgagagttttggtcagtctctgtctcaattctaatgtctctgcctacatacctgagtccagagttgtcatgcaaagaacagaaccctggaacaatcacacarggatttggtactaggcttagccattttctagccatggggacaaaagaaaattactgaacctctctgagtcccagtttatttgtctataaaatagggatagtgatactggggttacaaggaaattgtgagaattaaaatagttcaggagaggttaagttgtcctggggccacctttgtcattgcagtgaccacactctgtagtgagggcacccttgagagcagacagcagagctgctatgtgattcatctctagaatccatgattcttggaacact

SEQ ID NO: 377470 - DNA, 581 bp, Homo sapiens
ttgaactgagcatcatagggcaatatagaaacaagtttatggataattcactgaattggtggcagtttataacttgaatcttccttcagatgattgaagttagtagcccagctatgaaagtctaggttacagatgtctcagccacagcttgcatatatatggatgaggttcatacatatgcagacttgggctcctgccaagatatgagagttttggtcagtctctgtctcaattctaatgtctctgcctacatacctgagtccagagttgtcatgcaaagaacagaaccctggaacaatcacacaaggatttggtactaggcttagccattttctagccatggggrcaaaagaaaattactgaacctctctgagtcccagtttatttgtctataaaatagggatagtgatactggggttacaaggaaattgtgagaattaaaatagttcaggagaggttaagttgtcctggggccacctttgtcattgcagtgaccacactctgtagtgagggcacccttgagagcagacagcagagctgctatgtgattcatctctagaatccatgattcttggaacact

SEQ ID NO: 377471 - DNA, 332 bp, Homo sapiens
gctaatggaatgtgggtgactcagtgaatgccacatccaagcagaggygttaaatattcctgcatggcctctggtgatcctgtcctccagcatgagatgaacatgcttcagatagctgctgctactcccctggatcctcttctgagagccaagtgaagcaaataggaacccaattcaccacccagatccaggcccatctgaatctagccagcccagaagagccctgtagaaccacagctgacctatggaaatgagaagtaaatgtttgttgttgttagcattgagatttggggattactttttatgtggcatcatcacaacaaagcctgact

SEQ ID NO: 377472 - DNA, 568 bp, Homo sapiens
ccaattcaccacccagatccaggcccatctgaatctagccagcccagaagagccctgtagaaccacagctgacctatggaaatgagaagtaaatgtttgttgttgttagcattgagatttggggattactttttatgtggcatcatcacaacaaagcctgactaatatattgtataaagttaattgagtactaacaacatgccaggtattgttctaagtcctttatataaagaatcccatctaatcgttacagcactgcataaggaggtatcataagtatctccattcagctgattagaattgaggcatctggtcaatccccttcatgttattcctcctcacttcctgcatccgaatgaaccaagcctcctgtgttcattagaaccacagaccaagcctrctggagaaagacagggctatgaagatgggaatgaattggcaaacagctttgggatgacaatgttaaggccaggcaaatgctctcagtaacctcaaatgagtgttgatgttcatgaagcctgctcaaaaaagacacagaaattgacgtcttttatctgaggacccttcc

SEQ ID NO: 377473 - DNA, 568 bp, Homo sapiens
ccaattcaccacccagatccaggcccatctgaatctagccagcccagaagagccctgtagaaccacagctgacctatggaaatgagaagtaaatgtttgttgttgttagcattgagatttggggattactttttatgtggcatcatcacaacaaagcctgactaatatattgtataaagttaattgagtactaacaacatgccaggtattgttctaagtcctttatataaagaatcccatctaatcgttacagcactgcataaggaggtatcataagtatctccattcagctgattagaattgaggcatctggtcaatccccttcatgttattcctcctcacttcctgcatccgaatgaaccaagcctcctgtgttcattagaaccacagaccaagcctgctggagaaagacagggctrtgaagatgggaatgaattggcaaacagctttgggatgacaatgttaaggccaggcaaatgctctcagtaacctcaaatgagtgttgatgttcatgaagcctgctcaaaaaagacacagaaattgacgtcttttatctgaggacccttcc

SEQ ID NO: 377474 - DNA, 596 bp, Homo sapiens
ttcagctgattagaattgaggcatctggtcaatccccttcatgttattcctcctcacttcctgcatccgaatgaaccaagcctcctgtgttcattagaaccacagaccaagcctgctggagaaagacagggctatgaagatgggaatgaattggcaaacagctttggratgacaatgttaaggccaggcaaatgctctcagtaacctcaaatgagtgttgatgttcatgaagcctgctcaaaaaagacacagaaattgacgtcttttatctgaggacccttccttagcctcaggacttaaggctatgggagcatgagccacataaccatgagaggcagggggttcagtgagaagaataagctcaagagtctcacctgtgggtcagaatctcagctgtgccacacatactgtgtgatcttgagcaaatcaccaaacctctctattcctcatttttgtcacctgtaaagtgggactattacttgtacctacatcctggatttgttgggacagtaaatgagttagtgttcccaaggtgcttaacacagagcctttgcatgcagcaagcacccagtcaatgcccatgaccatggccccct

SEQ ID NO: 377475 - DNA, 542 bp, Homo sapiens
tgctcttttgttccccctgaggtcttttggggacagagagtgtgaaaatgccctctacctacacaaggaaacaggactcagggacagaggacctgtgccctgaccaaggcaatgcatccctcaccatatatgcagtggtgcatcctttcctgttgccttttggatcagcaattaaggctttagtcttttttgttggtgtgcaaaggtattttcttaatggycctgcagcccagccatcacaaaaatgctttccagctctcagggagaacatttctgatgcatgctgaatccagaattcaaatgaagcaaaacaaaggcaccaggggctcttatgagacagagtgactcaaaatagagggaatgtggggacttggggcataagattgatcatgaatcaccaaatagaaaaaccttgggatggctttcaagaaaaatcttccttgaagttttaactttcacctacaagcaagttttctcactgctctgtacagcagggtaaggacagcagcctcacagcatcagtctgaggatagaatgggtta

SEQ ID NO: 377476 - DNA, 605 bp, Homo sapiens
aaatcttccttgaagttttaactttcacctayaagcaagttttctcactgctctgtacagcagggtaaggacagcagcctcacagcatcagtctgaggatagaatgggttaatgcagccaggcacagtggctcatgcctgtaatcccagcactttaggaggccgaagcaggcggatcatgaggtcaagagatcaagacaccctggccaacacggtgaaaccccgtctatactaaaatacaaaaatactagctgagtgtggtggtgcatgcctgtaggcccagctacttgggaggctgaggcaggagaattgcttgaacctgggagacggaggttgcagtgagccaagatcacaccactgcactccagcctgggtgacagagtgagactttgtctccgcaaaaaaaaaaaaaaaaaaaaaaagaatgggttaatgcctgaaaactctttggcacagtgcccagcacaaattcagcagtcactcagtgttggctatcatctttggtgatgttggtcccaaacccagacctctgctcttgtcctcggctcatacacccacctgtatagcccatatgcactttaaacatgagtccaaaatggaatccaa

SEQ ID NO: 377477 - DNA, 542 bp, Homo sapiens
tgctcttttgttccccctgaggtcttttggggacagagagtgtgaaaatgccctctacctacacaaggaaacaggactcagggacagaggacctgtgccctgaccaaggcaatgcatccctcaccatatatgcagtggtgcatcctttcctgttgccttttggatcagcaattaaggctttagtcttttttgttggtgtgcaaaggtattttcttaatggtcctgcagcccagccatcacaaaaatgctttccagctctcagggagaacatttctgatgcatgctgaatccagaattcaaatgaagcaaaacaaaggcaccaggggctcttatgagacagagtgactcaaaatagagggaatgtggggacttggggcataagattgatcatgaatcaccaaatagaaaaaccttgggatggctttcaagaaaaatcttccttgaagttttaactttcacctacaarcaagttttctcactgctctgtacagcagggtaaggacagcagcctcacagcatcagtctgaggatagaatgggtta

SEQ ID NO: 377478 - DNA, 522 bp, Homo sapiens
gatcatgaatcaccaaatagaaaaaccttgggatggctttcaagaaaaatcttccttgaagttttaactttcacctacaagcaagttttctcactgctctgtacagcagggtaaggacagcagcctcacagcatcagtctgaggatagaatgggttaatgcagccaggcacagtggctcatgcctgtaatcccagcactttaggaggccgaagcaggcgkatcatgaggtcaagagatcaagacaccctggccaacacggtgaaaccccgtctatactaaaatacaaaaatactagctgagtgtggtggtgcatgcctgtaggcccagctacttgggaggctgaggcaggagaattgcttgaacctgggagacggaggttgcagtgagccaagatcacaccactgcactccagcctgggtgacagagtgagactttgtctccgcaaaaaaaaaaaaaaaaaaaaaaagaatgggttaatgcctgaaaactctttggcacagtgcccagcacaaattcagcag

SEQ ID NO: 377479 - DNA, 605 bp, Homo sapiens
aaatcttccttgaagttttaactttcacctacaagcaagttttctcactgctctgtacagcagggtaaggacagcagcctcacagcatcagtctgaggatagaatgggttaatgcagccaggcacagtggctcatgcctgtaatcccagcactttaggaggccgaagcaggcggatcatgaggtcaagagatcaagacaccctggccaacayggtgaaaccccgtctatactaaaatacaaaaatactagctgagtgtggtggtgcatgcctgtaggcccagctacttgggaggctgaggcaggagaattgcttgaacctgggagacggaggttgcagtgagccaagatcacaccactgcactccagcctgggtgacagagtgagactttgtctccgcaaaaaaaaaaaaaaaaaaaaaaagaatgggttaatgcctgaaaactctttggcacagtgcccagcacaaattcagcagtcactcagtgttggctatcatctttggtgatgttggtcccaaacccagacctctgctcttgtcctcggctcatacacccacctgtatagcccatatgcactttaaacatgagtccaaaatggaatccaa

SEQ ID NO: 377480 - DNA, 605 bp, Homo sapiens
aaatcttccttgaagttttaactttcacctacaagcaagttttctcactgctctgtacagcagggtaaggacagcagcctcacagcatcagtctgaggatagaatgggttaatgcagccaggcacagtggctcatgcctgtaatcccagcactttaggaggccgaagcaggcggatcatgaggtcaagagatcaagacaccctggccaacacggtgaaaccccgtctatactaaaatacaaaaatactagctgagtgtggtggtgcatgcctgtaggcccagctacttgggaggctgaggcaggagaattgcttgaacctgggagacggaggttgcagtgagccaagatcrcaccactgcactccagcctgggtgacagagtgagactttgtctccgcaaaaaaaaaaaaaaaaaaaaaaagaatgggttaatgcctgaaaactctttggcacagtgcccagcacaaattcagcagtcactcagtgttggctatcatctttggtgatgttggtcccaaacccagacctctgctcttgtcctcggctcatacacccacctgtatagcccatatgcactttaaacatgagtccaaaatggaatccaa

SEQ ID NO: 377481 - DNA, 605 bp, Homo sapiens
aaatcttccttgaagttttaactttcacctacaagcaagttttctcactgctctgtacagcagggtaaggacagcagcctcacagcatcagtctgaggatagaatgggttaatgcagccaggcacagtggctcatgcctgtaatcccagcactttaggaggccgaagcaggcggatcatgaggtcaagagatcaagacaccctggccaacacggtgaaaccccgtctatactaaaatacaaaaatactagctgagtgtggtggtgcatgcctgtaggcccagctacttgggaggctgaggcaggagaattgcttgaacctgggagacggaggttgcagtgagccaagatcacaccactgcactccagcctgggtgacagagtgagactttgtctccgcaaaaaaaaaaaaaaaaaaaaaaagaatgggttaatgcctgaaaactctttggcacagtgyccagcacaaattcagcagtcactcagtgttggctatcatctttggtgatgttggtcccaaacccagacctctgctcttgtcctcggctcatacacccacctgtatagcccatatgcactttaaacatgagtccaaaatggaatccaa

SEQ ID NO: 377482 - DNA, 538 bp, Homo sapiens
gtgtacttatttgtgcacttgtgtgcttgcaattgcatcttgggcacatgtgtattgtggaggcatctgtgtgcctgtggagtgtgtatacataagtacctgatgtatgtttggctgcagaggcacagaaggtcagcaacagcaggtggctgcatgcaggggcactaataattactcattttatacaaactgtttagcaacaatgttagctattctactgctgactttacgaacagagaaaatgtggccggacacaatggctcctacctgtaatcctagcactttgtaggggctgaggcagaagaagcccttgagctcaggagtttgagaccaacctgggtgaygtagtgcgacctagtctctaataaaaattaaaaaaaaaaaaaaaaaaactatccaggtgtggtggcacatgcctataatcccagctacttggtaggctgtagcaggaggatcaccagagcccaagagtttcaggctgcagtgaaccatgattgctccacttcactctagcctggatgacagagcaggaccctgt

SEQ ID NO: 377483 - DNA, 527 bp, Homo sapiens
tcattttatacaaactgtttagcaacaatgttagctattctactgctgactttacgaacagagaaaatgtggccggacacaatggctcctacctgtaatcctagcactttgtaggggctgaggcagaagaagcccttgagctcaggagtttgagaccaacctgggtgatgtagtgcgacctagtctctaataaaaattaaaaaaaaaaaaaaaaaaactatccaggtgtggtggyacatgcctataatcccagctacttggtaggctgtagcaggaggatcaccagagcccaagagtttcaggctgcagtgaaccatgattgctccacttcactctagcctggatgacagagcaggaccctgtccccctgccacaaaaaaagaaaagaaaagaaaagaaaaaagaaacatagaatagaaaacgtctcctggtttgcatcctggaatagagaaatgagcacaggctttcaaatcaaacagtagtgattcatatcctgcccctggcactcacccagcatctctgaacct

SEQ ID NO: 377484 - DNA, 527 bp, Homo sapiens
tcattttatacaaactgtttagcaacaatgttagctattctactgctgactttacgaacagagaaaatgtggccggacacaatggctcctacctgtaatcctagcactttgtaggggctgaggcagaagaagcccttgagctcaggagtttgagaccaacctgggtgatgtagtgcgacctagtctctaataaaaattaaaaaaaaaaaaaaaaaaactatccaggtgtggtggcrcatgcctataatcccagctacttggtaggctgtagcaggaggatcaccagagcccaagagtttcaggctgcagtgaaccatgattgctccacttcactctagcctggatgacagagcaggaccctgtccccctgccacaaaaaaagaaaagaaaagaaaagaaaaaagaaacatagaatagaaaacgtctcctggtttgcatcctggaatagagaaatgagcacaggctttcaaatcaaacagtagtgattcatatcctgcccctggcactcacccagcatctctgaacct

SEQ ID NO: 377485 - DNA, 538 bp, Homo sapiens
gtgtacttatttgtgcacttgtgtgcttgcaattgcatcttgggcacatgtgtattgtggaggcatctgtgtgcctgtggagtgtgtatacataagtacctgatgtatgtttggctgcagaggcacagaaggtcagcaacagcaggtggctgcatgcaggggcactaataattactcattttatacaaactgtttagcaacaatgttagctattctactgctgactttacgaacagagaaaatgtggccggacacaatggctcctacctgtaatcctagcactttgtaggggctgaggcagaagaagcccttgagctcaggagtttgagaccaacctgggtgatgtagtgcgacctagtctctaataaaaattaaaaaaaaaaaaaaaaaaactatccaggtgtggtggcacatgcctataatcccagctacttggkaggctgtagcaggaggatcaccagagcccaagagtttcaggctgcagtgaaccatgattgctccacttcactctagcctggatgacagagcaggaccctgt

SEQ ID NO: 377486 - DNA, 530 bp, Homo sapiens
agagggtgagcaggatggaagtcattttctttttgtaacttctcagaggtgctgttcatcagtttcaccatattgtgtttgttaggaacaagacattaggttcagccaagatataagggagtggagaggattatacaagggcatgaataccaggagacatggatcactggaggccatcttaggggctgctgggaagcctgtcctccagcccccagtgattcacatcctccaccccatgcaaaatacacttgtgtcctgccaagatccctaaaaatctcctcccccttcagcatcaactaaagttcagaatctcatcaaatcaggtattggggtggggacttcttgagaatgactagtcacatgcagctcctagagtacagttcctctctctctgagagcctgtgaaactagagagacacagtatctgcttccatackcctagcattaaatggtataacaggcatgggttagctctatatctgtctcctttttctctagatgtttgatgagacaagtattttaattttgta

SEQ ID NO: 377487 - DNA, 473 bp, Homo sapiens
tggctatatacattctaacacattcaatttttttwaaaaagtgaagcttaggtcctattccttagaaattcagatttaactaatttggagtgggccccagacatcaatattttaactttcaagtggttctaggaaagacaggtttaggggctgtggagagacacagaatggcaagtacttagaacattcacacatcccccacctcccaagctcctaacagaaatcatttattagccagtcccctcaatgtcattggttggaatgcaattgtgtagtctttctcatcccaggactccaggcagcccctacccatgaagccaagttgacatatgaatgaaggcatatgtgttagccctgacaagccacactgggcatgctttcccaaacctacaaattatcaagggtgtagaaaaatagagccctctccatgctgagcagatctcactcatgtagacaactgaggtctaattacc

SEQ ID NO: 377488 - DNA, 473 bp, Homo sapiens
tggctatatacattctaacacattcaattttttttaaaaagtgaagcttaggtcctattccttagaaattcagatttaactaatttggagtgggccccagacatcaatattttaactttcaagtggttctaggaaagacaggtttaggggctgtggagagacacagaatggcaagtacttagaacattcacacatcccccacctcccaagctcctaacagaaatcatttattarccagtcccctcaatgtcattggttggaatgcaattgtgtagtctttctcatcccaggactccaggcagcccctacccatgaagccaagttgacatatgaatgaaggcatatgtgttagccctgacaagccacactgggcatgctttcccaaacctacaaattatcaagggtgtagaaaaatagagccctctccatgctgagcagatctcactcatgtagacaactgaggtctaattacc

SEQ ID NO: 377489 - DNA, 473 bp, Homo sapiens
tggctatatacattctaacacattcaattttttttaaaaagtgaagcttaggtcctattccttagaaattcagatttaactaatttggagtgggccccagacatcaatattttaactttcaagtggttctaggaaagacaggtttaggggctgtggagagacacagaatggcaagtacttagaacattcacacatcccccacctcccaagctcctaacagaaatcatttattagccagtcccctcaatgtcattggttggaatgcaattgtgtagtctttctcatcccaggactccaggcagcccctacccatgaagscaagttgacatatgaatgaaggcatatgtgttagccctgacaagccacactgggcatgctttcccaaacctacaaattatcaagggtgtagaaaaatagagccctctccatgctgagcagatctcactcatgtagacaactgaggtctaattacc

SEQ ID NO: 377490 - DNA, 425 bp, Homo sapiens
ctgagcagatctcactcatgtagacaactgaggtctaattacccattggaaagggccattggaagagcacaggaaaasgtccaagatggagagggaatttacagccaagtctgataatggtttcagaacctcaaaatacttcacctggagaggacccatgggcaatatacatgaaggagctctcctcttcctgagtccctccaaagagttgtgtaaagcccaaaaggggggctctccaggagtagatgctcttcaaatcccacttctatcccttactagaagtataacctggcttgctattgagcctctctcagcctccttttccaaatgaggacaatggtgcctatgtcacaagaatattgcagtgattccatgagaagatgtatacaaagcaccttgcccaatagatagtcaacaaatgctgg

SEQ ID NO: 377491 - DNA, 573 bp, Homo sapiens
atagttcactaagagtttttaggacagcaatgatcttagaagagaatcagatcaaagttctgagtgttttccctggaactggcattgtattattaatatcctacaaatgggagacatgcatcccctggtctcatacctggaatatcaaaatggtacttcattaacagtgtcaaagcaaaagtctgatggctctgcctgctcttgtgagtaggggtactcatattccctttaagcccttcccccaaattggcctagaggtccagggggttccacatgggctcaacattctctgattaactctcccctcatatcaacaacttcctcctatcaagcttgacatcttgtgctatttcttcctattctaggtgtaggcaagtctagtttgctcttcagctactctatccctctcctgcatattgactcttgaattcttgatccctagtagcttctcacactgtctgtaaaatggagcatggaacmactacatagaaacaggaaggttctgccctgtactctcagctcttaagggcacagtcacaagaagaccatttttaaattctcattgtgtttcac

SEQ ID NO: 377492 - DNA, 573 bp, Homo sapiens
ataacgctttaatttttttaatagagaaaatgtattgatgtgttgtatgcatagcattaacaaaattagctttctaagattttagagaatcatcaaagatgattcacaaaagtagaatcatcatcaccagtaagaaactaagtgactactaaaagtaatcattaattcagtcataggactaatgatgcattgacaaggytattgagatatataattatggaaatggctaaaatagagataaagtatctatttctacctcccaaccactaacagaaaattcaacacattatacacactgagcagctcaaagaaattgtaaagatccattattatttttaaaaggaaatttaaccagtggatgctttcactgaaaatgataaacaatatattcccagtataaaccagaaacaaagtctgcagtagaaaactacaatgtccctagattcaagtgggggtggggagtcatatttaaataataagtgcagaaaaaccaaaatattttaaaataattgtccatgcaagaaagaaaacagtatcctctagcttgaagacccactgtttttattttataat

SEQ ID NO: 377493 - DNA, 576 bp, Homo sapiens
tgatgtgttgtatgcatagcattaacaaaattagctttctaagattttagagaatcatcaaagatgattcacaaaagtagaatcatcatcaccagtaagaaactaagtgactactaaaagtaatcattaattcagtcataggactaatgatgcattgacaaggttattgagatatataattatggaaatggctaaaatagagataaagtatctatttctacctcccaaccactaacagaaaattcaacacattatacacactgagcagctcaaagaaattgtaaagrtccattattatttttaaaaggaaatttaaccagtggatgctttcactgaaaatgataaacaatatattcccagtataaaccagaaacaaagtctgcagtagaaaactacaatgtccctagattcaagtgggggtggggagtcatatttaaataataagtgcagaaaaaccaaaatattttaaaataattgtccatgcaagaaagaaaacagtatcctctagcttgaagacccactgtttttattttataatttatttcatgacctttagactgctagaaaaataaaacc

SEQ ID NO: 377494 - DNA, 573 bp, Homo sapiens
ataacgctttaatttttttaatagagaaaatgtattgatgtgttgtatgcatagcattaacaaaattagctttctaagattttagagaatcatcaaagatgattcacaaaagtagaatcatcatcaccagtaagaaactaagtgactactaaaagtaatcattaattcagtcataggactaatgatgcattgacaaggttattgagatatataattatggaaatggctaaaatagagataaagtatctatttctacctcccaaccactaacagaaaattcaacacattatacacactgagcagctcaaagaaattgtaaagatccattattatttttaaaaggaaatttaaccagtggatgctttcactgaaaatgataaacaatatattcccagtataaaccagaaacaaagtctgcagtagaaaactacaatgtccctagattcaagtgggggtggggagtcatatttaaataataagtgcagaaaaaccaaaatattttaaaataattgtccatgcaagaaaraaaacagtatcctctagcttgaagacccactgtttttattttataat

SEQ ID NO: 377495 - DNA, 491 bp, Homo sapiens
ataatagtgtgatttatccagaaggtgatagaaatttcattttcctagaccacagatataagccaaggagaatagaaagctctgacctaaacttcacaagtgtcccttccaarcagggacacgtaagagtaaacaaaaaaagaagatcaaactaaactcaaagtgagaagataggaaaaaataaagatgagaatataaatcaataaaacagaaaggggaaagaaaatagagaaaagtccatgaaaacaaaggctgactcaagaagatcaataagattgataaatctctagccagactgatcaggaaaaaaataagacaagatacaaattattagtatcaagaatgaggaaggtgaaatcactacagattctacaggtattaaaataataagaaacattatgatcaactccattcctttaatttgtcaagatagacaaaatgaacaaatttcttgaaaggtgcaaatttatgcaaggagagacagataacct

SEQ ID NO: 377496 - DNA, 398 bp, Homo sapiens
aagctctgacctaaacttcacaagtgtcccttccaagcagggacacgtaagagtaaacaaaaaaagaagatcaaaytaaactcaaagtgagaagataggaaaaaataaagatgagaatataaatcaataaaacagaaaggggaaagaaaatagagaaaagtccatgaaaacaaaggctgactcaagaagatcaataagattgataaatctctagccagactgatcaggaaaaaaataagacaagatacaaattattagtatcaagaatgaggaaggtgaaatcactacagattctacaggtattaaaataataagaaacattatgatcaactccattcctttaatttgtcaagatagacaaaatgaacaaatttcttgaaaggtgcaaatttatgcaa

SEQ ID NO: 377497 - DNA, 398 bp, Homo sapiens
aagctctgacctaaacttcacaagtgtcccttccaagcagggacacgtaagagtaaacaaaaaaagaagatcaaactaaactcaaagtgagaarataggaaaaaataaagatgagaatataaatcaataaaacagaaaggggaaagaaaatagagaaaagtccatgaaaacaaaggctgactcaagaagatcaataagattgataaatctctagccagactgatcaggaaaaaaataagacaagatacaaattattagtatcaagaatgaggaaggtgaaatcactacagattctacaggtattaaaataataagaaacattatgatcaactccattcctttaatttgtcaagatagacaaaatgaacaaatttcttgaaaggtgcaaatttatgcaa

SEQ ID NO: 377498 - DNA, 491 bp, Homo sapiens
ataatagtgtgatttatccagaaggtgatagaaatttcattttcctagaccacagatataagccaaggagaatagaaagctctgacctaaacttcacaagtgtcccttccaagcagggacacgtaagagtaaacaaaaaaagaagatcaaactaaactcaaagtgagaagataggaaaaaataaagatgagaatataaatcaataaaacagaaaggggaaagaaaatagagaaaagtccatgaaaacaaaggctgactcaagaagatcaataagaytgataaatctctagccagactgatcaggaaaaaaataagacaagatacaaattattagtatcaagaatgaggaaggtgaaatcactacagattctacaggtattaaaataataagaaacattatgatcaactccattcctttaatttgtcaagatagacaaaatgaacaaatttcttgaaaggtgcaaatttatgcaaggagagacagataacct

SEQ ID NO: 377499 - DNA, 491 bp, Homo sapiens
ataatagtgtgatttatccagaaggtgatagaaatttcattttcctagaccacagatataagccaaggagaatagaaagctctgacctaaacttcacaagtgtcccttccaagcagggacacgtaagagtaaacaaaaaaagaagatcaaactaaactcaaagtgagaagataggaaaaaataaagatgagaatataaatcaataaaacagaaaggggaaagaaaatagagaaaagtccatgaaaacaaaggctgactcaagaagatcaataagattgataaatctctagccagactgatcaggaaaaaaataagacaagatacaaattattagtatcaagaatgaggaaggtgaaatcactacagattctacaggtattaaaataataagaaacattatgatcaactccattcctttaatttgtcaagatagacraaatgaacaaatttcttgaaaggtgcaaatttatgcaaggagagacagataacct

SEQ ID NO: 377500 - DNA, 536 bp, Homo sapiens
gctgaggcaggggaatcacttgaacctgggaggcagtggttgcatgagctgagattgtgccattgcactccagcctaggcaacaagagcraaactccatctcaaaagaaagaagaaaaaaaaaaagaaaacacaacaaaaaccccccacaaagaaaatttcaggccaagatggtttcactaataaattcatgtataatataagaagatacatttccactactacacaacttttccagaaaactgaagatgagaatatactttctgattcattctatgaagctggagttatgctgataccaaaaccagatgaagacattacaagaaattaagactacaggctggggcatggtgactcacgcctgtaatcccagcattttgggaagccaaggtgggaaaattgcttgagctcagaagttcgagaccagcctggacaacatagtgagatgctgtctctattaaaaattttaaaaaagtagttgggtgtgttggcacacagctatggtcccagctacttgtgagacagaggtgggaggtc

SEQ ID NO: 377501 - DNA, 536 bp, Homo sapiens
gctgaggcaggggaatcacttgaacctgggaggcagtggttgcatgagctgagattgtgccattgcactccagcctaggcaacaagagcgaaactccatctcaaaagaaagaagaaaaaaaaaaagaaaacacaacaaaarccccccacaaagaaaatttcaggccaagatggtttcactaataaattcatgtataatataagaagatacatttccactactacacaacttttccagaaaactgaagatgagaatatactttctgattcattctatgaagctggagttatgctgataccaaaaccagatgaagacattacaagaaattaagactacaggctggggcatggtgactcacgcctgtaatcccagcattttgggaagccaaggtgggaaaattgcttgagctcagaagttcgagaccagcctggacaacatagtgagatgctgtctctattaaaaattttaaaaaagtagttgggtgtgttggcacacagctatggtcccagctacttgtgagacagaggtgggaggtc

SEQ ID NO: 377502 - DNA, 536 bp, Homo sapiens
gctgaggcaggggaatcacttgaacctgggaggcagtggttgcatgagctgagattgtgccattgcactccagcctaggcaacaagagcgaaactccatctcaaaagaaagaagaaaaaaaaaaagaaaacacaacaaaaaccccccacaaagaaaatttcaggccaagatggtttcactaataaattcatgtataatataagaagatacatttccactactacacaacttttccagaaaactgaagatgagaatatactttctgattcattctatgaagctggagttatgctgataccaaaaccagatgaagacattacaagaawttaagactacaggctggggcatggtgactcacgcctgtaatcccagcattttgggaagccaaggtgggaaaattgcttgagctcagaagttcgagaccagcctggacaacatagtgagatgctgtctctattaaaaattttaaaaaagtagttgggtgtgttggcacacagctatggtcccagctacttgtgagacagaggtgggaggtc

SEQ ID NO: 377503 - DNA, 536 bp, Homo sapiens
gctgaggcaggggaatcacttgaacctgggaggcagtggttgcatgagctgagattgtgccattgcactccagcctaggcaacaagagcgaaactccatctcaaaagaaagaagaaaaaaaaaaagaaaacacaacaaaaaccccccacaaagaaaatttcaggccaagatggtttcactaataaattcatgtataatataagaagatacatttccactactacacaacttttccagaaaactgaagatgagaatatactttctgattcattctatgaagctggagttatgctgataccaaaaccagatgaagacattacaagaaaktaagactacaggctggggcatggtgactcacgcctgtaatcccagcattttgggaagccaaggtgggaaaattgcttgagctcagaagttcgagaccagcctggacaacatagtgagatgctgtctctattaaaaattttaaaaaagtagttgggtgtgttggcacacagctatggtcccagctacttgtgagacagaggtgggaggtc

SEQ ID NO: 377504 - DNA, 468 bp, Homo sapiens
gcaacaaattgtattcaatatagagtaaggataaggaagaactctctcattaactggtctcgcggtgattacagtaatagctaacatctattgagtacttactatgtactratctaagtattttttactctcaacaatcccatatagtaggttttattatcctcgtttgagatgagtgtgctgaggaataaaatggttaagtaacttgtccaaggtcgcttagctagcaagcctggctccagcgtccctgggttggaagcatattctgtactgctacatcagcatgaaagtttatttttgctagtgtgtaacagtattcttcctgtcattaaaattaagtcagtttccttcactattcaacagttctcttatgaactcaacatttctacctcattcaccattgtatttagaggaaaatttattattattgttattacttttatttttgagacaagaacttgatccgtc

SEQ ID NO: 377505 - DNA, 468 bp, Homo sapiens
gcaacaaattgtattcaatatagagtaaggataaggaagaactctctcattaactggtctcgcggtgattacagtaatagctaacatctattgagtacttactatgtactaatctaagtattttttactctcaacaatcccatatagtaggttttattatcctygtttgagatgagtgtgctgaggaataaaatggttaagtaacttgtccaaggtcgcttagctagcaagcctggctccagcgtccctgggttggaagcatattctgtactgctacatcagcatgaaagtttatttttgctagtgtgtaacagtattcttcctgtcattaaaattaagtcagtttccttcactattcaacagttctcttatgaactcaacatttctacctcattcaccattgtatttagaggaaaatttattattattgttattacttttatttttgagacaagaacttgatccgtc

SEQ ID NO: 377506 - DNA, 468 bp, Homo sapiens
gcaacaaattgtattcaatatagagtaaggataaggaagaactctctcattaactggtctcgcggtgattacagtaatagctaacatctattgagtacttactatgtactaatctaagtattttttactctcaacaatcccatatagtaggttttattatcctcrtttgagatgagtgtgctgaggaataaaatggttaagtaacttgtccaaggtcgcttagctagcaagcctggctccagcgtccctgggttggaagcatattctgtactgctacatcagcatgaaagtttatttttgctagtgtgtaacagtattcttcctgtcattaaaattaagtcagtttccttcactattcaacagttctcttatgaactcaacatttctacctcattcaccattgtatttagaggaaaatttattattattgttattacttttatttttgagacaagaacttgatccgtc

SEQ ID NO: 377507 - DNA, 468 bp, Homo sapiens
gcaacaaattgtattcaatatagagtaaggataaggaagaactctctcattaactggtctcgcggtgattacagtaatagctaacatctattgagtacttactatgtactaatctaagtattttttactctcaacaatcccatatagtaggttttattatcctcgtttgagatgagtgtgctgaggaataaaatggttaagtaasttgtccaaggtcgcttagctagcaagcctggctccagcgtccctgggttggaagcatattctgtactgctacatcagcatgaaagtttatttttgctagtgtgtaacagtattcttcctgtcattaaaattaagtcagtttccttcactattcaacagttctcttatgaactcaacatttctacctcattcaccattgtatttagaggaaaatttattattattgttattacttttatttttgagacaagaacttgatccgtc

SEQ ID NO: 377508 - DNA, 538 bp, Homo sapiens
gtactccaagcctcctaggatatggcagttgagaaaatagatgtgtaaaactcagcaacataaaaggtcaaagccagcaactaaggaattttagaacagcaaaaacaaatgcaaacatatggaaatttaggacaaattgcttcaaggaaggcaaaataagctaatcactaacagtgatttaaacatttaagtataacaaataacttaaatgtttgctgctacagagacatcactacaatgaaacattaaaaattaaggtttatatgacatcaacattgactcatgaactgcaattactgcaccaaaaagtaaataaaagtcaatcacactttaagaattaacactagaagaaagtattggggggttatttttcttctaacaactatcactctacttaaaaggagaaatggataaccataaggaattctatattctatagctataaacaaccaaaaccagtaggccaaagaatgcaatgagaaacataagcaatmgataaatgcataaactttacactgtagagagctggtaacattaa

SEQ ID NO: 377509 - DNA, 538 bp, Homo sapiens
gtactccaagcctcctaggatatggcagttgagaaaatagatgtgtaaaactcagcaacataaaaggtcaaagccagcaactaaggaattttagaacagcaaaaacaaatgcaaacatatggaaatttaggacaaattgcttcaaggaaggcaaaataagctaatcactaacagtgatttaaacatttaagtataacaaataacttaaatgtttgctgctacagagacatcactacaatgaaacattaaaaattaaggtttatatgacatcaacattgactcatgaactgcaattactgcaccaaaaagtaaataaaagtcaatcacactttaagaattaacactagaagaaagtattggggggttatttttcttctaacaactatcactctacttaaaaggagaaatggataaccataaggaattctatattctatagctataaacaaccaaaaccagtaggccaaagaatgcaatgagaaacataagcaatagataaatgcataaactttamactgtagagagctggtaacattaa

SEQ ID NO: 377510 - DNA, 392 bp, Homo sapiens
ttcatttttaagtcacaaactcaacccacacacattgaagtccagcaatccaactcattctctccagcaaacactttatttttttccccctccaggattaccctcaggtgttctttcttacccatcaaatctctaacctagctcaggtaatcactatgctgatttcactgagcagcaaccactgcaggtcaattacctcactttcataatttcmaatcaacttgaatctgtacctatgtcttcttccctactattagtagggaagtgttgtcaaaagccatttctcttttctcattttactcatgctcctaacatctggcatactgttctgctggatttggcagcagcccacctgtggatatttcactgacttcctcgctaatctttcttca

SEQ ID NO: 377511 - DNA, 392 bp, Homo sapiens
ttcatttttaagtcacaaactcaacccacacacattgaagtccagcaatccaactcattctctccagcaaacactttatttttttccccctccaggattaccctcaggtgttctttcttacccatcaaatctctaacctagctcaggtaatcactatgctgatttcactgagcagcaaccactgcaggtcaattacctcactttcataatttcaaatcaacttgaatctgtacctatgtcttcttccctactattagtagggawgtgttgtcaaaagccatttctcttttctcattttactcatgctcctaacatctggcatactgttctgctggatttggcagcagcccacctgtggatatttcactgacttcctcgctaatctttcttca

SEQ ID NO: 377512 - DNA, 392 bp, Homo sapiens
ttcatttttaagtcacaaactcaacccacacacattgaagtccagcaatccaactcattctctccagcaaacactttatttttttccccctccaggattaccctcaggtgttctttcttacccatcaaatctctaacctagctcaggtaatcactatgctgatttcactgagcagcaaccactgcaggtcaattacctcactttcataatttcaaatcaacttgaatctgtacctatgtcttcttccctactattagtagggaagtgttgtcaaaagccatttctcttttctcattttactcatgctcctracatctggcatactgttctgctggatttggcagcagcccacctgtggatatttcactgacttcctcgctaatctttcttca

SEQ ID NO: 377513 - DNA, 499 bp, Homo sapiens
cacctgtggatatttcactgacttcctcgctaatctttcttcatctcctgtacgtgttcttcctctatttgacttccaaagccctggagtttcccagggcttgagcctagatcctaaatggtgttatctacaatgagggcatcttgsaagttgatgcttcccacattcttatttctagttttaatcaaagatctccaaattagcaggattttcaacttcctccttagcatttccattttctcacataaaacccctcttaattttgccatggttaaaatttctcccttaaccggtttcatcccagtcttccccatccttataaatggcatccagtcccttgtcactctcctctgctccttcagtcctctcccccaacacctcgtcaatgcaaatcatcagcaaattcaagactttttatcttcaagttttgtctccgatccttctgcttcttgtcacttccaccactagcagcccactcgtggccaccaccatctctcac

SEQ ID NO: 377514 - DNA, 499 bp, Homo sapiens
cacctgtggatatttcactgacttcctcgctaatctttcttcatctcctgtacgtgttcttcctctatttgacttccaaagccctggagtttcccagggcttgagcctagatcctaaatggtgttatctacaatgagggcatcttgcaagttgatgcttcccacattcttatttctagttttaatcaaagatctccaaattagcaggattttcaacttcctycttagcatttccattttctcacataaaacccctcttaattttgccatggttaaaatttctcccttaaccggtttcatcccagtcttccccatccttataaatggcatccagtcccttgtcactctcctctgctccttcagtcctctcccccaacacctcgtcaatgcaaatcatcagcaaattcaagactttttatcttcaagttttgtctccgatccttctgcttcttgtcacttccaccactagcagcccactcgtggccaccaccatctctcac

SEQ ID NO: 377515 - DNA, 499 bp, Homo sapiens
cacctgtggatatttcactgacttcctcgctaatctttcttcatctcctgtacgtgttcttcctctatttgacttccaaagccctggagtttcccagggcttgagcctagatcctaaatggtgttatctacaatgagggcatcttgcaagttgatgcttcccacattcttatttctagttttaatcaaagatctccaaattagcaggattttcaacttcctccttagcatttccattttctcacataaaacccctcttaattttgccatgkttaaaatttctcccttaaccggtttcatcccagtcttccccatccttataaatggcatccagtcccttgtcactctcctctgctccttcagtcctctcccccaacacctcgtcaatgcaaatcatcagcaaattcaagactttttatcttcaagttttgtctccgatccttctgcttcttgtcacttccaccactagcagcccactcgtggccaccaccatctctcac

SEQ ID NO: 377516 - DNA, 556 bp, Homo sapiens
aaaatttaactattgactataaatatatgtttcaagagatttgagtgaaaataccattctacgttaaaataaaaaatataacattcgataactatagtaataacatgttctcaaagattcaaggggctaaagcyaatgagaaaaagttaaatataaacatcttacaatttacctaattacttgaaatagaaacttatgttcattcctgtatttctccatttttccaatttctaatgtctacttctttccattttgtattttcttgtattgaggcaatttaaagaggatatgccaggtcttcaaaaagccaagaactgaacataagcactctggaacctatctgaacttaattttgtccaagatttttttaatggttgaaaattggctcaactggggatactaagaggaaatatcaggggcaaaggggatttgggttaaacagatcgaacaggattcttactgaaggcaggccagactgatcagaaatcatctggagggtggtgggagataacaaatttgatcagatatcaaaggtgatcagtactgagagtggggg

SEQ ID NO: 377517 - DNA, 556 bp, Homo sapiens
aaaatttaactattgactataaatatatgtttcaagagatttgagtgaaaataccattctacgttaaaataaaaaatataacattcgataactatagtaataacatgttctcaaagattcaaggggctaaagccaatgagaaaaagttaaatataaacatcttacaatttacctaattacttgaaatagaaacttatgttcattcctgtatttctccatttttccaatttctaatgtctacttctttccattttgtattttcttrtattgaggcaatttaaagaggatatgccaggtcttcaaaaagccaagaactgaacataagcactctggaacctatctgaacttaattttgtccaagatttttttaatggttgaaaattggctcaactggggatactaagaggaaatatcaggggcaaaggggatttgggttaaacagatcgaacaggattcttactgaaggcaggccagactgatcagaaatcatctggagggtggtgggagataacaaatttgatcagatatcaaaggtgatcagtactgagagtggggg

SEQ ID NO: 377518 - DNA, 556 bp, Homo sapiens
aaaatttaactattgactataaatatatgtttcaagagatttgagtgaaaataccattctacgttaaaataaaaaatataacattcgataactatagtaataacatgttctcaaagattcaaggggctaaagccaatgagaaaaagttaaatataaacatcttacaatttacctaattacttgaaatagaaacttatgttcattcctgtatttctccatttttccaatttctaatgtctacttctttccattttgtattttcttgtattgaggcaatttaaagaggatatgccaggtcttcaraaagccaagaactgaacataagcactctggaacctatctgaacttaattttgtccaagatttttttaatggttgaaaattggctcaactggggatactaagaggaaatatcaggggcaaaggggatttgggttaaacagatcgaacaggattcttactgaaggcaggccagactgatcagaaatcatctggagggtggtgggagataacaaatttgatcagatatcaaaggtgatcagtactgagagtggggg

SEQ ID NO: 377519 - DNA, 622 bp, Homo sapiens
accattctacgttaaaataaaaaatataacattcgataactatagtaataacatgttctcaaagattcaaggggctaaagccaatgagaaaaagttaaatataaacatcttacaatttacctaattacttgaaatagaaacttatgttcattcctgtatttctccatttttccaatttctaatgtctacttctttccattttgtattttcttgtattgaggcaatttaaagaggatatgccaggtcttcaaaaagccaagaactgaacataagcactctggaacctayctgaacttaattttgtccaagatttttttaatggttgaaaattggctcaactggggatactaagaggaaatatcaggggcaaaggggatttgggttaaacagatcgaacaggattcttactgaaggcaggccagactgatcagaaatcatctggagggtggtgggagataacaaatttgatcagatatcaaaggtgatcagtactgagagtgggggattctttgcaagtttcttcctaaacctgagagatgtgggccagactaggatgaacactgaaagctgaggctgagaggtggcttagaggatcccaactagagtttgggcaaggggagag

SEQ ID NO: 377520 - DNA, 603 bp, Homo sapiens
actgaaagctgaggctgagaggtggcttagaggatcccaactagagtttgggcaaggggagaggctttgtcaatgcaaacatgcattcagcaatattaccaagtacagatgcatgcacataaaaatactgaaaggaaatataagaaaatgtttaaaaatttttagtggcttatttattttatgtaatttaaatatatrtatatataaaattaaggtgtactttgaacacatactaacacattcaaagaattaagtatacatttgataatacataatagttacaaaataagcaaggtcttcatgcaaacgagtttagaatttccagggtttattacttagcatttgatcagcaggcctgtaacttcttctgctgcccattcattgcccattttattaaaaattcctcaagtggatgcattggaatggaagaaacactgactctttccttcaaagaaggaaacaacaaaccttgtttgacaaccctggtcaaacaagacaaggaccaagtggccagtggtaaggaaagttggtcaaaactaatgaatgacattttagattaaaagtgaattttatttaacccaattattcttatcctatgcacac

SEQ ID NO: 377521 - DNA, 603 bp, Homo sapiens
actgaaagctgaggctgagaggtggcttagaggatcccaactagagtttgggcaaggggagaggctttgtcaatgcaaacatgcattcagcaatattaccaagtacagatgcatgcacataaaaatactgaaaggaaatataagaaaatgtttaaaaatttttagtggcttatttattttatgtaatttaaatatatatatatataaaattaaggtgtactttgaacacatactaacacattcaaagaattaagtatacrtttgataatacataatagttacaaaataagcaaggtcttcatgcaaacgagtttagaatttccagggtttattacttagcatttgatcagcaggcctgtaacttcttctgctgcccattcattgcccattttattaaaaattcctcaagtggatgcattggaatggaagaaacactgactctttccttcaaagaaggaaacaacaaaccttgtttgacaaccctggtcaaacaagacaaggaccaagtggccagtggtaaggaaagttggtcaaaactaatgaatgacattttagattaaaagtgaattttatttaacccaattattcttatcctatgcacac

SEQ ID NO: 377522 - DNA, 603 bp, Homo sapiens
actgaaagctgaggctgagaggtggcttagaggatcccaactagagtttgggcaaggggagaggctttgtcaatgcaaacatgcattcagcaatattaccaagtacagatgcatgcacataaaaatactgaaaggaaatataagaaaatgtttaaaaatttttagtggcttatttattttatgtaatttaaatatatatatatataaaattaaggtgtactttgaacacatactaacacattcaaagaattaagtatacatttgataatacataatagttacaaaataagcaaggtcttcatgcaaacgagtttagaatttccagggtttattacttagcatttgatcagcaggcctgtaacttcttctgctgcccattcattgcccattttattaaaaattcctcaagtggatgcattggaatggaagaaacactgactctttccttcaaagaaggaaacaacaaaccttgtttgacaaccctggtcaaacaagacaaggrccaagtggccagtggtaaggaaagttggtcaaaactaatgaatgacattttagattaaaagtgaattttatttaacccaattattcttatcctatgcacac

SEQ ID NO: 377523 - DNA, 512 bp, Homo sapiens
actgtgacttttcatgatgagtagaagatagattttactcatgctacaatcaatattaattccttgcagttcaaagacactgaggccttgtctaataatatagaagttgaacttggacttgggagatgactcctgcctctcrtcctctctgtggctctgctttctattattttactcataagcttgttttgtctccttgctgagaattgtcaaacatgaaatgtaatttcaggctatagtgaagaaagatgacgtaggcagaagaaattggcaatcatttggcctgtacgtgttgctttttgtttttttttctggacttaggatatagaccacaccttgacatttctggcctttgagtctttcacaactgtgattataatacattagctcttctagaagttagaagtgactttggattaagtctttcataaggtggctaaatgaatttatatggctcatcacaattcactagattggataagcaggaagtttacagagatttttttctttgc

SEQ ID NO: 377524 - DNA, 486 bp, Homo sapiens
actgtgacttttcatgatgagtagaagatagattttactcatgctacaatcaatattaattccttgcagttcaaagacactgaggccttgtctaataatatagaagttgaacttggacttgggagatgactcctgcctctcgtcctctytgtggctctgctttctattattttactcataagcttgttttgtctccttgctgagaattgtcaaacatgaaatgtaatttcaggctatagtgaagaaagatgacgtaggcagaagaaattggcaatcatttggcctgtacgtgttgctttttgtttttttttctggacttaggatatagaccacaccttgacatttctggcctttgagtctttcacaactgtgattataatacattagctcttctagaagttagaagtgactttggattaagtctttcataaggtggctaaatgaatttatatggctcatcacaattcactagattggataagcagg

SEQ ID NO: 377525 - DNA, 512 bp, Homo sapiens
actgtgacttttcatgatgagtagaagatagattttactcatgctacaatcaatattaattccttgcagttcaaagacactgaggccttgtctaataatatagaagttgaacttggacttgggagatgactcctgcctctcgtcctctctgtggctctgctttctattattttactcataagcttgttttgtctccttgctgagaattgtcaaacatgaaatgtaatttcaggctatagtgaagaaagatgacgtaggcagaagaaattggcaatcatttgscctgtacgtgttgctttttgtttttttttctggacttaggatatagaccacaccttgacatttctggcctttgagtctttcacaactgtgattataatacattagctcttctagaagttagaagtgactttggattaagtctttcataaggtggctaaatgaatttatatggctcatcacaattcactagattggataagcaggaagtttacagagatttttttctttgc

SEQ ID NO: 377526 - DNA, 512 bp, Homo sapiens
actgtgacttttcatgatgagtagaagatagattttactcatgctacaatcaatattaattccttgcagttcaaagacactgaggccttgtctaataatatagaagttgaacttggacttgggagatgactcctgcctctcgtcctctctgtggctctgctttctattattttactcataagcttgttttgtctccttgctgagaattgtcaaacatgaaatgtaatttcaggctatagtgaagaaagatgacgtaggcagaagaaattggcaatcatttggcctgtacrtgttgctttttgtttttttttctggacttaggatatagaccacaccttgacatttctggcctttgagtctttcacaactgtgattataatacattagctcttctagaagttagaagtgactttggattaagtctttcataaggtggctaaatgaatttatatggctcatcacaattcactagattggataagcaggaagtttacagagatttttttctttgc

SEQ ID NO: 377527 - DNA, 577 bp, Homo sapiens
cctctctgtggctctgctttctattattttactcataagcttgttttgtctccttgctgagaattgtcaaacatgaaatgtaatttcaggctatagtgaagaaagatgacgtaggcagaagaaattggcaatcatttggcctgtacgtgttgcttttkgtttttttttctggacttaggatatagaccacaccttgacatttctggcctttgagtctttcacaactgtgattataatacattagctcttctagaagttagaagtgactttggattaagtctttcataaggtggctaaatgaatttatatggctcatcacaattcactagattggataagcaggaagtttacagagatttttttctttgctgtaaatgtttttctaaattgaaaaacttctattactgtcttctggagtactagaaataagtgcaagtgattgtttttggcaggaggccacataaacatttctgcttctctgtgccttatgggtagcattgatatacattgttaaaaataatgattgtagatagataatgtatcagaatttgggctcacctgcggtagctgctgttga

SEQ ID NO: 377528 - DNA, 585 bp, Homo sapiens
tagtttaattctgtcatcagagaaaataattcactgaattttaattgtttaactttagggtttgttttatgacccagaatatgatctctcaccaccaccatccagataattcttcaggttttgacgtttcccaacctgtctgctggttacttttcagagtacttgggtcattgctatttatattttgtccagagtttcaaattgtgatcagtggaaatgacaggccgtagcatgcatacgccatcctggccagcatcacaggcggtcagcatatctttctgttgttgttttgagacagggtctcactctgttgcccaggctggagcacagtggcatgatcagggatcactgcattctcaacctgctaggctcaagtgatcctcccacctcagcctcccgaatagctgggtctayaggtgtgctgccatgcccagctaatttttgtattttttataaagacgtgattttgccttgttgcccaggctggtctcaaactcctgagctcaggccatcctctcactcgggcctcccaaaatactaggattataggcatgaccaccacacctggccagtacatcttaaaaa

SEQ ID NO: 377529 - DNA, 606 bp, Homo sapiens
atccacgttgaataatgatggcctgtaaatattttctcttgcacttgccttgttgggttttgatatcaaggttatttttattttaaccttgtaaaatgaactsgggagtcttctttttttattctctgtgttggtggcagagttttttttgttgttgttgtttggttggttggtttgtttctcttgtatgtttcatggaactttttggtgaaggcacttgggcctggaaatttctttatgggaagttttttcattactgattcaatatatttaatctatgtaagttttttttctactttttgagtcaattttgatttttttcctagaaattcatatctcaccaagtatggtggcttatgcttgtaatcccagcactttgggaggctcaggtgggaggaccacttgactacagtagttcaagaccagcctgggcaatatagtgagactccatctctacaaaaaaaataaaaattagcttggtgtggtggtgggtgcctgtagtgtgagctacttgggatgctgaggtgggaggatcatttgagcctggaaggtcgagactgcagtgagctgtgattgtgccttcttccttccccctcctcctccttt

SEQ ID NO: 377530 - DNA, 619 bp, Homo sapiens
gatggttccacgactacacgggctcacastcgcaagagcaaaagtaaatcatcacaaaggtgcttcttgataattctagagaatggagaattactgtaacatctttctgattttaggagaggtagcagttccctttttagcctaaacgctatttctttttaaagctcagccaagagactccattataattttcaaatgtgtgtaacttaaattctcatatgaaataccactatgcttaaattagtcaaaacattttccccatctacaactctatcttgtcattgtaatcattttcacaaaagtgactgcagctctcagaccctaaaaagagaaaatccagggtagtttatctgatctagttagtttcgaagacaggatctagagattatttaatacgaaatgggtcacctgaaatgaagtgtttactgaaaacagcttggatcagcccagttttctaccactgaaccatgcatttggtttaaaaaacacaacaactctgcggaatatcggctgcttccaactgtgttgaaggtgttaaagaaaagagcataaaattaaaaatgatcatctgaggcctttatagtctctgctcaagagactagagttttccattcttaac

SEQ ID NO: 377531 - DNA, 597 bp, Homo sapiens
gctaatttttgtatttttagtagaaatgggatttcaccatgttggccaggctggtctcgaacccctgacctcaggtgatccaccctcctcggcctccygaagtgttgggattacaggcgtgagccaccactcccggccatatattagttttttagcaaaaatttaacacttgtattctccacagtgtcctaccggattagatatagctctcctggactaaattgtttctcacccacaacaatattgccatccgggagaaaagagatttatagtagtttactttgtactcctagaaatcctttcaagaagtataaaagtgaatacatacatatttaaatgataaacatttatctttgtgataaaatagttaagtttccatgtgagtcaggtttaccacatgagtgatgaaccagctttaattaacaatataaccattctcctctgtcactgtaggctgttctaaaaaaagaaaaaagtttacaaaagccttaattaccttatgctatttggggagaattaagcaatgaatggagtgttgcatttaacaggttatagaaaatttttctgtgtccagcatataatcaactactaattttc

SEQ ID NO: 377532 - DNA, 597 bp, Homo sapiens
gctaatttttgtatttttagtagaaatgggatttcaccatgttggccaggctggtctcgaacccctgacctcaggtgatccaccctcctcggcctcccgaagtgttgggattacaggcgtgagccaccactcccggccatatattagttttttagcaaaaatttaacacttgtattctccacagtgtcctaccggattagatatagctctcctggactaaattgtttctcacccacaacaatattgccatccgggagaaaagagatttatagtagtttactttgtactcctagaaatcctttcaagaagtataaaagtgaatacatacatatttaaatgataaacatttatctttgtgataaaatagttaagtttccatgtgagtcaggtttaccacatgagtgatgaaccagctttaattaacaatataaccattctcctctgtcactgtaggctgttctaaaaaaagaaaaaagtttayaaaagccttaattaccttatgctatttggggagaattaagcaatgaatggagtgttgcatttaacaggttatagaaaatttttctgtgtccagcatataatcaactactaattttc

SEQ ID NO: 377533 - DNA, 379 bp, Homo sapiens
ctcacacacgggaacccttgacatccacgtgcatgtgcagacargcttgggaacaaggggaccacgtccccctccagggatcccttcagggtgctgcagcctcactttagtgaggcaaacattgactgtttgccttgccatagccctgacaacggcggtgccggccctggcacgaggcccaggtgtgtactctgggaacatccatgcagagctgggcccctggaggatcactctgactgagctctccctggctaggggcctgggggacagagtggggatgcagagtaagcatctcctggtgtctcccctaaaacccagtgctggggagaagccccgccagcccctggcctctgacccagcagagctgaggacgtggagg

SEQ ID NO: 377534 - DNA, 379 bp, Homo sapiens
ctcacacacgggaacccttgacatccacgtgcatgtgcagacaagcttgggaacaaggggaccacgtccccctccagggatcccttcagggtgctgcagcctcactttagtgaggcaaacattgactgtttgccttgccatrgccctgacaacggcggtgccggccctggcacgaggcccaggtgtgtactctgggaacatccatgcagagctgggcccctggaggatcactctgactgagctctccctggctaggggcctgggggacagagtggggatgcagagtaagcatctcctggtgtctcccctaaaacccagtgctggggagaagccccgccagcccctggcctctgacccagcagagctgaggacgtggagg

SEQ ID NO: 377535 - DNA, 379 bp, Homo sapiens
ctcacacacgggaacccttgacatccacgtgcatgtgcagacaagcttgggaacaaggggaccacgtccccctccagggatcccttcagggtgctgcagcctcactttagtgaggcaaacattgactgtttgccttgccatagcccygacaacggcggtgccggccctggcacgaggcccaggtgtgtactctgggaacatccatgcagagctgggcccctggaggatcactctgactgagctctccctggctaggggcctgggggacagagtggggatgcagagtaagcatctcctggtgtctcccctaaaacccagtgctggggagaagccccgccagcccctggcctctgacccagcagagctgaggacgtggagg

SEQ ID NO: 377536 - DNA, 519 bp, Homo sapiens
aaagttacagagttcttttgtataaacattagaacacttatcacagcctgcctataatggagaataattccatgttgtatactatacaacactcttactaaagtccattagacagaaatatgtagcatttgagacatcttccaattataaaactctatgcaaacaaaaattaacaaagcagatctgagactattatattatcctgtgaaggagggtctgtctgtctgcacagttggtcctaggctggcttctgaggacttgaatttcaagagggttccataactggtaatcatggtttactgtatctagactatggaaataatgtggcttatcctgctattctttttgtgagtctggaaatttcacacatgctaggcagagtacacatatgtgacccagccgagataaaamctgtgtttcttgggaagtcacataggttgttgtattttcattaagggggaaagaaggtagtctgtgtgatcctcatggaaggcacagcacataaggaagccggtacat

SEQ ID NO: 377537 - DNA, 554 bp, Homo sapiens
attataaaactctatgcaaacaaaaattaacaaagcagatctgagactattatattatcctgtgaaggagggtctgtctgtctgcacagttggtcctaggctggcttctgaggacttgaatttcaagagggttccataactggtaatcatggtttactgtatctagactatggaaataatgtggcttatcctgctattctttttgtgagtctggaaatttcacacatgctaggcagagtacacatatgtgacccagccgagataaaacctgtgtttcttgggaagtcacataggttgttgtattttcattragggggaaagaaggtagtctgtgtgatcctcatggaaggcacagcacataaggaagccggtacatggatttttccagactctgtcagtgtcttttgccattgagatctttctactatatatccatactatgttacagtaataaatcttagccattacaaccctaagctgatcccatgagtccttctagcaaatctccaaacatggaggcagtcttgtggatccctgacacaaatatagtgttg

SEQ ID NO: 377538 - DNA, 608 bp, Homo sapiens
tagccaggtatggtggcatgcatttgtgatcccagctactctagaggctgagacaggaggactgcttgagcctaagaagtcaaggttgcagtaagccatgatcatgctactgcattccagcttaaacaactgagatgctatctcttaaaaacagaagtagaagcaaacaactataggggaaaatgagggatacatactttaagaatttttaaaaatttacatggaaaaacaccaggattctatagaaaataaaacagtattaaataacattatttataaaatagatactagcaaattaccttacgtaaagattcaagtcagtaacttaaaggatcttacataaaagtactttccgttggttggargagagatttttactatacactgtttttcaatttttttagacaaattacatttaaaagtttaaatttgcttatctacattcttaatgtgaattgccaccttactataggaaggctatttttgttcctgcagtctacaaaaagaacaaaaatattaaaaacgtacaactcttctcacagaactaagttggttttatacaaagacatctggcacaaaatacaatgatatttcaatatagaattaca

SEQ ID NO: 377539 - DNA, 592 bp, Homo sapiens
aaagcagcagacaatcatgatgcaaactgaaaataatcaatcaaaactgacccagaacttaaatagatgttaaaattagcagaggaggacattaaaactgtttttatacatgtatctcatataatcaaaacattaaatagagacatgggagataaacaagaaaagccaaaatcaaactttcaaagacaaaaacatttgagatgaaaattacattggatgaactaaggcagattagaaactgcagaagaaaagattagcaaacttgaagatacaagaacagacactagctaaagtacaaaaagaaaaaaaaatgttaaaaagtgatttttaaaaagcatcagtgagcagtcaggcaacttcaaatggcctaataatatgcaggtaactggagtccccaaaggagaaaaaaaagaaagagaaaaaaaatacttgaagaaacaactgctgaaaatgttctagccataasaagacctattaactcacggatccaagaaactcagcaaaccccaagcacaagaaacatgaagaaaattacactaagggataacataatcaaattgttcaaaatcaaggaaacattattaatagcagg

SEQ ID NO: 377540 - DNA, 612 bp, Homo sapiens
gggaacaatagaaactggggactactcgagggtagaaggagggagggggtaaaggttgaaaaacaactactatgcctagtacctgagtgatcggatcaatcatgccgcaaacctcagcattacacaacatacccatgtaacaaacctgcacatgtacccactgtatctaaaatcaaaagttgaaattataaaaaataaaaaaataaaatcaacaatgtatatttctctcacacagccatsacgatgatgtatttggaataatatatgcataaggatgttcattgcagtgttgtctgcaagggcaaagtgaaaacaatctgaataaccaacaatatgacacagagtaagtaattattggtacgtctgtacaatgcctcatgcaatcaccactgacagcgtgggaaagagagacatctattatgaaaagaccactaagacatatgattacatgataagtgcaaggttcatgaataaatagtatgtatactagtatagcatacttctttctaagaaagaaaccataacacatacaagaatggacaagaagttattaacaatagctaactttggtgataagactgtaggttgtaaaaagccagactttcatttctc

SEQ ID NO: 377541 - DNA, 612 bp, Homo sapiens
gggaacaatagaaactggggactactcgagggtagaaggagggagggggtaaaggttgaaaaacaactactatgcctagtacctgagtgatcggatcaatcatgccgcaaacctcagcattacacaacatacccatgtaacaaacctgcacatgtacccactgtatctaaaatcaaaagttgaaattataaaaaataaaaaaataaaatcaacaatgtatatttctctcacacagccatgacgatgatgtatttggaataakatatgcataaggatgttcattgcagtgttgtctgcaagggcaaagtgaaaacaatctgaataaccaacaatatgacacagagtaagtaattattggtacgtctgtacaatgcctcatgcaatcaccactgacagcgtgggaaagagagacatctattatgaaaagaccactaagacatatgattacatgataagtgcaaggttcatgaataaatagtatgtatactagtatagcatacttctttctaagaaagaaaccataacacatacaagaatggacaagaagttattaacaatagctaactttggtgataagactgtaggttgtaaaaagccagactttcatttctc

SEQ ID NO: 377542 - DNA, 612 bp, Homo sapiens
gggaacaatagaaactggggactactcgagggtagaaggagggagggggtaaaggttgaaaaacaactactatgcctagtacctgagtgatcggatcaatcatgccgcaaacctcagcattacacaacatacccatgtaacaaacctgcacatgtacccactgtatctaaaatcaaaagttgaaattataaaaaataaaaaaataaaatcaacaatgtatatttctctcacacagccatgacgatgatgtatttggaataatatatgcataaggatgttcrttgcagtgttgtctgcaagggcaaagtgaaaacaatctgaataaccaacaatatgacacagagtaagtaattattggtacgtctgtacaatgcctcatgcaatcaccactgacagcgtgggaaagagagacatctattatgaaaagaccactaagacatatgattacatgataagtgcaaggttcatgaataaatagtatgtatactagtatagcatacttctttctaagaaagaaaccataacacatacaagaatggacaagaagttattaacaatagctaactttggtgataagactgtaggttgtaaaaagccagactttcatttctc

SEQ ID NO: 377543 - DNA, 612 bp, Homo sapiens
gggaacaatagaaactggggactactcgagggtagaaggagggagggggtaaaggttgaaaaacaactactatgcctagtacctgagtgatcggatcaatcatgccgcaaacctcagcattacacaacatacccatgtaacaaacctgcacatgtacccactgtatctaaaatcaaaagttgaaattataaaaaataaaaaaataaaatcaacaatgtatatttctctcacacagccatgacgatgatgtatttggaataatatatgcataaggatgttcattgcagtgttgtctgcaagggcaaagtgaaaacaatctgaataaccaacaatatgacacagagtaagtaattattggtacgtctgtacaatgcctcatgcaatcaccactgacagcgtgggaaagagagacatctattatgaaaagaccactaagacatatgattacatgataagtgcaaggttcatgaataaatagyatgtatactagtatagcatacttctttctaagaaagaaaccataacacatacaagaatggacaagaagttattaacaatagctaactttggtgataagactgtaggttgtaaaaagccagactttcatttctc

SEQ ID NO: 377544 - DNA, 577 bp, Homo sapiens
cttattattacattatgctgagatttctaataacgctgcccttttctgggtattttgtattaaacctaaaatttgtgatgttttagactgtttcactaacatgttttgataacrtctcagtacccttgggaaagcattataaagtagtgggcaatgatgaaacctactctggatgtttttaggcaaattttttaacttctctgattctagtgttctcttttataaaataggtgaaccaggatgagcccataggatagttgtgctgatgaggtgcaaggatgcatgccaggcacccagcactggctcttcccagacatggagtgctcagtaatcgtgagctattagaatacaggtgcccaaccagtgcttgagcaattgtgttctgtgtccaacagaactcaacagaatcccacgtttgtctttatatgtgaattcagttccttttgagttagtaagaaattttgcctgtgttggggtaattgaactttcaggaggagggaattgtctgccacaattattctctgaacttaatgtttccatgtctttttcttcattttggaagttgtggaaaaattat

SEQ ID NO: 377545 - DNA, 577 bp, Homo sapiens
cttattattacattatgctgagatttctaataacgctgcccttttctgggtattttgtattaaacctaaaatttgtgatgttttagactgtttcactaacatgttttgataacgtctcagtamccttgggaaagcattataaagtagtgggcaatgatgaaacctactctggatgtttttaggcaaattttttaacttctctgattctagtgttctcttttataaaataggtgaaccaggatgagcccataggatagttgtgctgatgaggtgcaaggatgcatgccaggcacccagcactggctcttcccagacatggagtgctcagtaatcgtgagctattagaatacaggtgcccaaccagtgcttgagcaattgtgttctgtgtccaacagaactcaacagaatcccacgtttgtctttatatgtgaattcagttccttttgagttagtaagaaattttgcctgtgttggggtaattgaactttcaggaggagggaattgtctgccacaattattctctgaacttaatgtttccatgtctttttcttcattttggaagttgtggaaaaattat

SEQ ID NO: 377546 - DNA, 562 bp, Homo sapiens
atggacctgaaaattgcttataataaatttgaactgaacatataggcataaatgtggttcagaagtgtccagttgaagcaacttcactttgttaggtcaacaaaagttggggacaccaagatctactcctctgattttgttctagcattatcttaatggaaatgtttactgaaatggaaatacatgtagtggacatcgtggtggtgtctcaagcattcagtgttccctgctctcacacactcctaaccaaataatgaatttctcagcttcacaatgtttaagtgacatgagtcccatgcccaattcttggtcattgtaattggtgcatggaaggaacstgtgccttctgctaatcaaatcagaatgaagtacaactttttcattccatgattgaagagggaaatgccttctttccaaatgcagcagaggaagcatgaggtactaggattggaagttgtctactcatgacatgatattttaagccatagaataaaactgagacctaatgtgttagtcctttcaggtcgctataccagaatatcacagcctggatggtttatga

SEQ ID NO: 377547 - DNA, 490 bp, Homo sapiens
gaaatacatgtagtggacatcgtggtggtgtctcaagcattcagtgttccctgctctcacacactcctaaccaaataatgaatttctcagcttcacaatgtttaagtgacatgagtcccatgcccaattcttggtcattgtaattggtgcatggaaggaacctgtgccttctgctaatcaaatcagaatgaagtacaactttttcattccatgattgaagagggaaatgccttctttccaaatgcagcagaggaagcaygaggtactaggattggaagttgtctactcatgacatgatattttaagccatagaataaaactgagacctaatgtgttagtcctttcaggtcgctataccagaatatcacagcctggatggtttatgaacaacataaatttatttcttacagttctagaggccaggaagtccaagatcaaggtgtcaacagattcagggtctaatgaggatttgtttcctggttcacagaca

SEQ ID NO: 377548 - DNA, 490 bp, Homo sapiens
gaaatacatgtagtggacatcgtggtggtgtctcaagcattcagtgttccctgctctcacacactcctaaccaaataatgaatttctcagcttcacaatgtttaagtgacatgagtcccatgcccaattcttggtcattgtaattggtgcatggaaggaacctgtgccttctgctaatcaaatcagaatgaagtacaactttttcattccatgattgaagagggaaatgccttctttccaaatgcagcagaggaagcatgaggtactaggattggaagttgtctactcatgacatgatattttaagccatagaataaaactgagacctaatgtsttagtcctttcaggtcgctataccagaatatcacagcctggatggtttatgaacaacataaatttatttcttacagttctagaggccaggaagtccaagatcaaggtgtcaacagattcagggtctaatgaggatttgtttcctggttcacagaca

SEQ ID NO: 377549 - DNA, 556 bp, Homo sapiens
caaatatcatcacactagggattagatttaaacatacaaattttgggggggatacaaacattcaatctatatcacttaaggtagagtgaagaaacagggaggacaagaagcatttattttgtgtcattattaaacttctgcattargctatcttgagcctatactattgttcaaaatctctttattatacaagccattttgaattttgattgtttgcaaccaaaattaacctaataagttaaaatgtactataatgttacatcataatttgtctgtactagtagtatttgctagagtgtttaggggaatacttgcttgttaactttttagtaaatataacactccatgttcaaatacatttgggaaatgctgagcatttcacacttttagagactcaaaacaggcagcacatttttaaaaaataaaaataaaaccaaatagcattgcatttggagaatggtacaaaaaaagagaatttgataaaccagagttatcagaactcagtggatactatgtgttagacattattataagccattaaacattttacaagctt

SEQ ID NO: 377550 - DNA, 592 bp, Homo sapiens
gtagctggaactacatgcatccacctctatgcctggctaatttttgtattttattttattttatttttttagagatgggctatttttacgttgcccagactcgtctcgaacacctgggctaaagcaatctgcccacctcggcctcccaaagtactgggattacaggcaggagccactgtrtctggcccaatgcttaagatcttttgagacaaaaaggaggaagtgggagatagtttcaataccacaggaagctcagaaaaaaaaacaccccccaacccccccaaaaaacacacatgtatttatttgatatttggctgtgcaggttaaaaagttatttatttatttatttgcttttggaaaaactcgagtcagcttgatgaggtcactttttcctgctactccttcttatttggggagtaaagggacttccatgatctggatggatgattgtgatgaggaggttaccgggattgccctgagagaatggactgtgagctttcagggatggaagctgcatcttcatctctataatcccttgtttggcacagtgtcagcctgagaagatgcttggcgacaaatatgaattatggca

SEQ ID NO: 377551 - DNA, 592 bp, Homo sapiens
gtagctggaactacatgcatccacctctatgcctggctaatttttgtattttattttattttatttttttagagatgggctatttttacgttgcccagactcgtctcgaacacctgggctaaagcaatctgcccacctcggcctcccaaagtactgggattacaggcaggagccactgtgtctggcccaatgcttaagatcttttgagacaaaaaggaggaagtgggagatagtttcaataccacaggaagctcagaaaaaaaaacaccccccaacccccccaaaaaacayacatgtatttatttgatatttggctgtgcaggttaaaaagttatttatttatttatttgcttttggaaaaactcgagtcagcttgatgaggtcactttttcctgctactccttcttatttggggagtaaagggacttccatgatctggatggatgattgtgatgaggaggttaccgggattgccctgagagaatggactgtgagctttcagggatggaagctgcatcttcatctctataatcccttgtttggcacagtgtcagcctgagaagatgcttggcgacaaatatgaattatggca

SEQ ID NO: 377552 - DNA, 548 bp, Homo sapiens
aaggtggagcctttggacaaaatgataaaaggaatctggggcctcagctacatcactgagccttttcaagtccttgccttcttcctcttaaatcctgttatgttacataactaaatgtctttattgcaaaagccacaagtagtcaggctttctgttattcacagctgaaagcatttctcttattttcaaataatttcagacttatagaagaattaattgtaaggcaaagaactttcatgmccttcacccaccttcaccaattgttatttgccacatttactttctccatctatatagtctattctactctattatctttccctgaaccatttgaaattcagttgcagacatccttctcctctcccttaaacattccagaacatattccatcagaacaagaagactctagtgctcaagttcggggaatttgaggttgatgccatacaatcgtgtagtccttgataattgtctaatatacagttcacttaaaatttcgccaacagtcccaataatgccctttaaggcacgtttcccctgatccagctgtc

SEQ ID NO: 377553 - DNA, 548 bp, Homo sapiens
aaggtggagcctttggacaaaatgataaaaggaatctggggcctcagctacatcactgagccttttcaagtccttgccttcttcctcttaaatcctgttatgttacataactaaatgtctttattgcaaaagccacaagtagtcaggctttctgttattcacagctgaaagcatttctcttattttcaaataatttcagacttatagaagaattaattgtaaggcaaagaactttcatgaccttcacccaccttcaccaattgttatttgccacatttactttctccatctatatagtctattctactctattatctttccctgaaccatttgaaattcagttgcagrcatccttctcctctcccttaaacattccagaacatattccatcagaacaagaagactctagtgctcaagttcggggaatttgaggttgatgccatacaatcgtgtagtccttgataattgtctaatatacagttcacttaaaatttcgccaacagtcccaataatgccctttaaggcacgtttcccctgatccagctgtc

SEQ ID NO: 377554 - DNA, 548 bp, Homo sapiens
aaggtggagcctttggacaaaatgataaaaggaatctggggcctcagctacatcactgagccttttcaagtccttgccttcttcctcttaaatcctgttatgttacataactaaatgtctttattgcaaaagccacaagtagtcaggctttctgttattcacagctgaaagcatttctcttattttcaaataatttcagacttatagaagaattaattgtaaggcaaagaactttcatgaccttcacccaccttcaccaattgttatttgccacatttactttctccatctatatagtctattctactctattatctttccctgaaccatttgaaattcagttgcagacatccttctcctctcccttaaacattycagaacatattccatcagaacaagaagactctagtgctcaagttcggggaatttgaggttgatgccatacaatcgtgtagtccttgataattgtctaatatacagttcacttaaaatttcgccaacagtcccaataatgccctttaaggcacgtttcccctgatccagctgtc

SEQ ID NO: 377555 - DNA, 619 bp, Homo sapiens
ttgacatgtccctgtcattttttaaatgcttccttgctttctggcaccacacagcactctgggctcaccttgtacttccctaccccagccttagcatcagccatttctacaaggagctctgagtccttttagtgaagggtggtatttataaaccacaatctggatggtttgtggatattgcacagcattcagtcagaagccatgggaaatgaagcgacatttattgaaacttgtattagtcaagcaacttaatgctaggctaagttgcagtgagtaataatccctaaccccagtgacagtgcagaaaaagaagggtttcatatstggagtgtgatgcatgtcaatgggagtttcctccacctggtgactcaggtatccaggcacattcatctctgcgggtctgccatcttgacacgaggggggggcagaaggagagagggtgtagagtcatgccagttcttaggtgctcctgacaaggagatctgcagcactctgctcacattcctgttttccagaactcagccagtacccagtgcaactgccaaagagtctgggaagcatagagagtacacggatagctggagatccctcatcactactgtcatgatatgttcattta

SEQ ID NO: 377556 - DNA, 581 bp, Homo sapiens
gaagcgacatttattgaaacttgtattagtcaagcaacttaatgctaggctaagttgcagtgagtaataatccctaaccccagtgacagtgcagaaaaagaagggtttcatatgtggagtgtgatgcatgtcaatgggagtttcctccacctggtgactcaggtatccaggcacattcatctctgcrggtctgccatcttgacacgaggggggggcagaaggagagagggtgtagagtcatgccagttcttaggtgctcctgacaaggagatctgcagcactctgctcacattcctgttttccagaactcagccagtacccagtgcaactgccaaagagtctgggaagcatagagagtacacggatagctggagatccctcatcactactgtcatgatatgttcatttatgcaatacatatcaatgggttcaccccagtcaggctgactccaagaggctaagatgacttcaccttgggtggtttgcagctgggaaagaaaggcaagtcggcaccgatcgaacagatcattcacttcagtgggctgtcgagctgtgctagaggcaggtgcagtgtgctgcag

SEQ ID NO: 377557 - DNA, 581 bp, Homo sapiens
gaagcgacatttattgaaacttgtattagtcaagcaacttaatgctaggctaagttgcagtgagtaataatccctaaccccagtgacagtgcagaaaaagaagggtttcatatgtggagtgtgatgcatgtcaatgggagtttcctccacctggtgactcaggtatccaggcacattcatctctgcgggtctgccatcttgacacgaggggggggcagaaggagagagggtgtagagtcatgccagttcttaggtgctcctgacaaggagatctgcagcactctgctcacattcctgttttccagaactcagccagtacccagtgcaactgccaaagagtctgggaagcatagagagtacacggatagctggagayccctcatcactactgtcatgatatgttcatttatgcaatacatatcaatgggttcaccccagtcaggctgactccaagaggctaagatgacttcaccttgggtggtttgcagctgggaaagaaaggcaagtcggcaccgatcgaacagatcattcacttcagtgggctgtcgagctgtgctagaggcaggtgcagtgtgctgcag

SEQ ID NO: 377558 - DNA, 581 bp, Homo sapiens
gaagcgacatttattgaaacttgtattagtcaagcaacttaatgctaggctaagttgcagtgagtaataatccctaaccccagtgacagtgcagaaaaagaagggtttcatatgtggagtgtgatgcatgtcaatgggagtttcctccacctggtgactcaggtatccaggcacattcatctctgcgggtctgccatcttgacacgaggggggggcagaaggagagagggtgtagagtcatgccagttcttaggtgctcctgacaaggagatctgcagcactctgctcacattcctgttttccagaactcagccagtacccagtgcaactgccaaagagtctgggaagcatagagagtacacggatagctggagatccytcatcactactgtcatgatatgttcatttatgcaatacatatcaatgggttcaccccagtcaggctgactccaagaggctaagatgacttcaccttgggtggtttgcagctgggaaagaaaggcaagtcggcaccgatcgaacagatcattcacttcagtgggctgtcgagctgtgctagaggcaggtgcagtgtgctgcag

SEQ ID NO: 377559 - DNA, 574 bp, Homo sapiens
tatgccgatgtcaataatataaacaagtgttcttccttacagtagaaaaccaacaatacatttagaaagattacagaatttttttaaaaaacaygatttgacaaccacagtaataactgattcagggaagggctactaataaatgctaaaaccaatggatgcaagtttgagaaataataggatatcttcatagtctcaaagtatttctccaaaggaaatacatattaattataaagagtaaaacggtggacagcaccgtaaccccatgaacaaagttaacattgctagtaatgggactaattaatagcacctgcccctcatgccttgagctacaggagctcagcatggcatcagtgatattcctgcccaacatgcataacagaatctgatcatggaaaagcaccaaaaaaccgaagttgaaggacaattataccaagtaactggccaggtaatcttcacaaaggtctgtgtcaagaaagacaaagcagcagaaactttcaaattacaggggacagctaaatgcaacacatggtcttggattgttttgttataaaggacattattgtgaagtctg

SEQ ID NO: 377560 - DNA, 574 bp, Homo sapiens
tatgccgatgtcaataatataaacaagtgttcttccttacagtagaaaaccaacaatacatttagaaagattacagaatttttttaaaaaacatgatttgacaaccacagtaataactgattcagggaagggctactaataaatgctaaaaccaatggatgcaagtttgagaaataataggatatcttcatagtctcaaagtatttctccaaaggaaatacatattaattataaagagtaaaacggtggacagcaccgtaaccccatgaacaaagttaacattgctagtaatgggrctaattaatagcacctgcccctcatgccttgagctacaggagctcagcatggcatcagtgatattcctgcccaacatgcataacagaatctgatcatggaaaagcaccaaaaaaccgaagttgaaggacaattataccaagtaactggccaggtaatcttcacaaaggtctgtgtcaagaaagacaaagcagcagaaactttcaaattacaggggacagctaaatgcaacacatggtcttggattgttttgttataaaggacattattgtgaagtctg

SEQ ID NO: 377561 - DNA, 573 bp, Homo sapiens
tgctaaaaccaatggatgcaagtttgagaaataataggatatcttcatagtctcaaagtatttctccaaaggaaatacatattaattataaagagtaaaacggtggacagcaccgtaaccccatgaacaaagttaacattgctagtaatgggactaattaatagcacctgcccctcatgccttgagctacaggagctcagcatggcatcagtkatattcctgcccaacatgcataacagaatctgatcatggaaaagcaccaaaaaaccgaagttgaaggacaattataccaagtaactggccaggtaatcttcacaaaggtctgtgtcaagaaagacaaagcagcagaaactttcaaattacaggggacagctaaatgcaacacatggtcttggattgttttgttataaaggacattattgtgaagtctgaataaagtctgtagatgagacgagagaattccctgtttttaggaaatatgcaacaaaatattcaagagtaaatgggcatcacaccttagatgactcagaagaaaaagggaagaacagagataagtgatacagtgaaaccctg

SEQ ID NO: 377562 - DNA, 565 bp, Homo sapiens
ggaagggctactaataaatgctaaaaccaatggatgcaagtttgagaaataataggatatcttcatagtctcaaagtatttctccaaaggaaatacatattaattataaagagtaaaacggtggacagcaccgtaaccccatgaacaaagttaacattgctagtaatgggactaattaatagcacctgcccctcatgccttgagctacaggagctcagcatggcatcagtgatattcctgcccaacatgcataacagaatctratcatggaaaagcaccaaaaaaccgaagttgaaggacaattataccaagtaactggccaggtaatcttcacaaaggtctgtgtcaagaaagacaaagcagcagaaactttcaaattacaggggacagctaaatgcaacacatggtcttggattgttttgttataaaggacattattgtgaagtctgaataaagtctgtagatgagacgagagaattccctgtttttaggaaatatgcaacaaaatattcaagagtaaatgggcatcacaccttagatgactcagaagaaaaagggaagaaca

SEQ ID NO: 377563 - DNA, 262 bp, Homo sapiens
gttataaaggacattattgtgaagtctgaataaagtctgtagatgagacgagagaattccctgtttttaggaaatatgcaacaaaatattcaagagtaaatgggcatcacaccttagatgactcagaagaaaaagggaagaacagagataagtgatacagtgaaaccctgatgtttgggggatctgggtaaacaatattyagaaattctttgtaccgtgttgcaaggtttctgtaagtctgaaactatgtgagaacaagtgt

SEQ ID NO: 377564 - DNA, 549 bp, Homo sapiens
aacctgggtttgctgaacttatttcaccagagaccccatccattaacatctgcatcacaaagcacaattgggtaaacagtgatccagctgaagtccttccatttacagacacagacagaaaatgaggcccagaaaggttaattgactcactcaaggtcatgcgaccatctcctgaatcgtagagctgtgtgcttttcactgcccctaatgttgcctaatggttcacttagctatccattcacaggaggtcagaaactgaacacgggcctcagattccagtatcattttgactaaattttatataaaaattgatgtaccgaataggatttgctttcaatmtcactattccagaatagtcattcattcaacaaatatttattaagtacgatgtgccaggagctgcacattttgcagttggctgcacagaagactgacaataaaattagccttagagagatcaaaattgattgaactgtccttgataaaactgcttcaaagcagggacttgcaagaaattgcatattcacatttcatttgcttccattaata

SEQ ID NO: 377565 - DNA, 546 bp, Homo sapiens
ctcctctcgaaacaaaataaaggttatagtgaacaggcgaaattaattttaatgccttccattttgaccgatatatctaaaatattaccatttcaacatgtaatatgtaattatgtgctgtattttatgtttgcaggacatctcagttcagactaactacattgcagatcccaagtgtgtgtcattaaaatagtgatagatttgtggtgtacatacctataatattatcatttatagtttcttgattagaattctgcataatcaagtcttactaagacaggtttattatattttctcattacttcttggtccaaaggaattctacctctaaagagagaatgagttgaataataaaatgtcatgactccattttgctgtagtatcttagcattaatatttggaattgttattctagaccttagcaaaaatatatgttttgattatgaattttctgaagctttccagttaagtgyaaaacaagtgaaaaatataacttcgtattttgtgtattttgctttttataggtgtctactgcagatatttcat

SEQ ID NO: 377566 - DNA, 630 bp, Homo sapiens
tttgtgtattttgctttttataggtgtctactgcagatatttcatcaaataaggatgatgaagaaaactctgtgctcgatatggttgtgttgttttctagcagtgacaarttcactttgaatcaggtttgaacttgacaatttactgtcttcctcattgaattcctccttgcacatttctgctttatctcatatacacagaagtgatccaatatttagctatagagctatattagttaagaaggtatttttaaagtaaaatttgtaggtttttagcttagtctccatttaaaatatgttctgttttcttaacttcaggatacatgtgtagtttgtggcagttttggccaaggagcagaaggaagattacttgcctgttctcagtgtggtcagtgttaccatccatactgtgtcagtattaaggtaaacatccttaaactgagttaacaaatatgtattgaatttttatttggttttagtagtaacatgagctcccagttctcacaattaagtattatgattattaaacatatgtgacagtatttaagtactttaaatactgcttttaagggtttcctatctcaagaaatttgctcctctataaatcttatattgtactaatatcctgctt

SEQ ID NO: 377567 - DNA, 591 bp, Homo sapiens
gacaatttactgtcttcctcattgaattcctccttgcacatttctgctttatctcatatacacagaagtgatccaatatttagctatagagctatattagttaagaaggtatttttaaagtaaaatttgtaggtttttagcttagtctccatttaaaatatgttctgttttcttaacttcaggatacatgtgtagtttgtggcagttttggccaaggagcagaaggaagattacttgcctgttctcagtgtggtcagtgttaccatccatactgtgtcagtattaaggtaaacatccttaaactgagttaacaaatatgtattgaatttttatttggttttagtagtaacatgagctcccagttctcacaattaagtattatgattattaaacatatgtgacmgtatttaagtactttaaatactgcttttaagggtttcctatctcaagaaatttgctcctctataaatcttatattgtactaatatcctgcttttgtcttgaaaaagtaaaacataaaaatatatgcatttaatttaaaagacaatttatactattcacaaagattttaggtttagctgattcattttg

SEQ ID NO: 377568 - DNA, 550 bp, Homo sapiens
aagaaaacaagtgtcatatttaatgcaatcggtaataatcgagagtcagcactgctcactttcaagcatttcaggatagaggctttctggggaascttttaagtggtatcgtgtgcttggttttaaatatggacaggtctcaatacttcactagttgtatctaaggttcttggttttttctttttaagaactcagtcttaataaaacttacatatttgaataaagtgtcatggccactggaagcaagcatggaggtatagctgtacagcagaggtcttaaactgtatactccacaaggaaatcttttctagtattgccataccatgtaatataaatactaacctcagtttcaataataggttgtgaaccatgagtgatttttataccattctcccctgcccttcagacatcactgtgttatatcattgtcagtaaaatgtcagtatagtaagcaaatcaacattatctccttcagaattctttgttgataactacactagtatttattttatagggtaatacaggtttttgtgaatttaggaatcaaaat

SEQ ID NO: 377569 - DNA, 620 bp, Homo sapiens
ctcaatacttcactagttgtatctaaggttcttggttttttctttttaagaactcagtcttaataaaacttacatatttgaataaagtgtcatggccactggaagcaagcatggaggtatagctgtacagcagaggtcttaaactgtatactccacaaggaaatcttttctagtattgccataccatgtaatataaatactaacctcagtttcaataataggttgtgaaccatgagtgatttttataccattctccccygcccttcagacatcactgtgttatatcattgtcagtaaaatgtcagtatagtaagcaaatcaacattatctccttcagaattctttgttgataactacactagtatttattttatagggtaatacaggtttttgtgaatttaggaatcaaaatgaaagattgtaattaatactatccaaaatagaagactagtacggttaatttctgtagttttttaaaattagttgctcatgctatgtgactgaaaaacacagagtatataaagccaattaaaaatggagttatatatgcataaaacatgtttcttttcttctttgtactttatattctgtataaaagtagctgctatcattagattttg

SEQ ID NO: 377570 - DNA, 620 bp, Homo sapiens
ctcaatacttcactagttgtatctaaggttcttggttttttctttttaagaactcagtcttaataaaacttacatatttgaataaagtgtcatggccactggaagcaagcatggaggtatagctgtacagcagaggtcttaaactgtatactccacaaggaaatcttttctagtattgccataccatgtaatataaatactaacctcagtttcaataataggttgtgaaccatgagtgatttttataccattctcccctgcccttcagacatcactgtgttatatcattgtcagtaaaatgtcagtatagtaagcaaatcaacattatctccttcagaattctttgttgataactacactagtatttattttatagggtaatacaggtttttgtgaatttaggaatcaaaatgaaagattgtaattaatactatccaaaatagaagactagtacggttaatttmtgtagttttttaaaattagttgctcatgctatgtgactgaaaaacacagagtatataaagccaattaaaaatggagttatatatgcataaaacatgtttcttttcttctttgtactttatattctgtataaaagtagctgctatcattagattttg

SEQ ID NO: 377571 - DNA, 620 bp, Homo sapiens
ctcaatacttcactagttgtatctaaggttcttggttttttctttttaagaactcagtcttaataaaacttacatatttgaataaagtgtcatggccactggaagcaagcatggaggtatagctgtacagcagaggtcttaaactgtatactccacaaggaaatcttttctagtattgccataccatgtaatataaatactaacctcagtttcaataataggttgtgaaccatgagtgatttttataccattctcccctgcccttcagacatcactgtgttatatcattgtcagtaaaatgtcagtatagtaagcaaatcaacattatctccttcagaattctttgttgataactacactagtatttattttatagggtaatacaggtttttgtgaatttaggaatcaaaatgaaagattgtaattaatactatccaaaatagaagactagtacggttaatttctgtagttttttaaaattagttgctcatgstatgtgactgaaaaacacagagtatataaagccaattaaaaatggagttatatatgcataaaacatgtttcttttcttctttgtactttatattctgtataaaagtagctgctatcattagattttg

SEQ ID NO: 377572 - DNA, 636 bp, Homo sapiens
caagatagtaatgtatttcttttaacccatccaacaattaccgaattcccattttacagatgagtacgacttacataagttaagattggacaattagtgcactatcagacacctagttattcctgtttttaaaaattatgtgtggttccttttacatgacactgttttggacagtayagaatactgcagtctcattgagaaatacagcagtatctagaaatatactagggatatatgaattggctcagcttgcatttttattgcaggaggcaattgtttgtggataagtttgatacctttgaagcttctttttaagcttgctggggcaagtctagaaagccttcactctaaggtggatattttcaaactttatggttttagaaccttaacactctttaaaattactggggacgccatagtttttgttcatgaggattttaactatggactattcagcattttagaaattaaaactaggaacattttgtaacacaagactacagaagcacaacctgtacaatgtcaatgtaatattatgatacaacatgtagcttctataaacaccactgtataattgtgaataaattaaagtgaaaaaaggcaaattaaatcttagtattatttaaacttgtttta

SEQ ID NO: 377573 - DNA, 588 bp, Homo sapiens
ttggacagtatagaatactgcagtctcattgagaaatacagcagtatctagaaatatactagggatatrtgaattggctcagcttgcatttttattgcaggaggcaattgtttgtggataagtttgatacctttgaagcttctttttaagcttgctggggcaagtctagaaagccttcactctaaggtggatattttcaaactttatggttttagaaccttaacactctttaaaattactggggacgccatagtttttgttcatgaggattttaactatggactattcagcattttagaaattaaaactaggaacattttgtaacacaagactacagaagcacaacctgtacaatgtcaatgtaatattatgatacaacatgtagcttctataaacaccactgtataattgtgaataaattaaagtgaaaaaaggcaaattaaatcttagtattatttaaacttgttttaactttacagacccactggggttccctagtccacattttggtagctgcagtcctagcattagtttaaccctatacttaagacttggcctttctgggatcactactgaattctaccccct

SEQ ID NO: 377574 - DNA, 636 bp, Homo sapiens
caagatagtaatgtatttcttttaacccatccaacaattaccgaattcccattttacagatgagtacgacttacataagttaagattggacaattagtgcactatcagacacctagttattcctgtttttaaaaattatgtgtggttccttttacatgacactgttttggacagtatagaatactgcagtctcattgagaaatacagcagtatctagaaatatactagggatatatgaattggctcagcttgcatttttattgcaggaggcaattgtttgtggataagtttgatacctttgaagcttctttttaagcttgctggggcaagtctagaaagccttcactctaaggtggatattttcaaactttatggttttagaaccttaacactctttaaaattactggggacgccatagtttttgttcatgaggattttaactatggactattcagcattttagaaattaaaactaggaacattttgtaacacaagactacagaagcacaacctgtacaatgtcaatgtaatattatgatacaacatgtagcttctataaacaccactgtataattgtgaataaattaargtgaaaaaaggcaaattaaatcttagtattatttaaacttgtttta

SEQ ID NO: 377575 - DNA, 588 bp, Homo sapiens
aaggcattaaaatatgtgccattttctattattctgctcagtagcctcctaaaagcgtgtatgaacatgcccaacccagtattgggcctccgtaggygctcaataaatgttagttgattgcccctttctgcttctaggtacataagcaccatattaatttatatagtatatttgattatgttaggttaatgcataaatcacatggattggttgtttcttttacagatcactaaagtggttcttagcaaaggttggaggtgtcttgagtgcactgtgtgtgaggcctgtgggaaggcaactgacccaggaagattcctgctgtgtgatgattgtgacataagttatcacacctactgcctagaccctccattgcagacagttcccaaaggagactggaagtgcaaatggttctctagggtttgtttgccttgttagtctttcaagttcagagctttctcataccactttagtttttaaaaattagccatacctatttaattgaataaaacacatattgtatgatagatacctctgatcaggaagattttcccatacacattaaatcatttgccccattatgttcgtatg

SEQ ID NO: 377576 - DNA, 574 bp, Homo sapiens
ttatatagtatatttgattatgttaggttaatgcataaatcacatggattggttgtttcttttacagatcactaaagtggttcttagcaaaggttggaggtgtcttgagtgcactgtktgtgaggcctgtgggaaggcaactgacccaggaagattcctgctgtgtgatgattgtgacataagttatcacacctactgcctagaccctccattgcagacagttcccaaaggagactggaagtgcaaatggttctctagggtttgtttgccttgttagtctttcaagttcagagctttctcataccactttagtttttaaaaattagccatacctatttaattgaataaaacacatattgtatgatagatacctctgatcaggaagattttcccatacacattaaatcatttgccccattatgttcgtatgcagcttcatgaagggcagtaactgaatacctaagaaagatagaattgaggcttttgggggggatttggatttcaggtgtgttgggtgcagacagtgtggagcaacatctgcaggtctaagatgtggagggcagaacaattgcac

SEQ ID NO: 377577 - DNA, 588 bp, Homo sapiens
aaggcattaaaatatgtgccattttctattattctgctcagtagcctcctaaaagcgtgtatgaacatgcccaacccagtattgggcctccgtaggcgctcaataaatgttagttgattgcccctttctgcttctaggtacataagcaccatattaatttatatagtatatttgattatgttaggttaatgcataaatcacatggattggttgtttcttttacagatcactaaagtggttcttagcaaaggttggaggtgtcttgagtgcactgtgtgtgaggcctgtgggaaggcaactgacccaggaagaytcctgctgtgtgatgattgtgacataagttatcacacctactgcctagaccctccattgcagacagttcccaaaggagactggaagtgcaaatggttctctagggtttgtttgccttgttagtctttcaagttcagagctttctcataccactttagtttttaaaaattagccatacctatttaattgaataaaacacatattgtatgatagatacctctgatcaggaagattttcccatacacattaaatcatttgccccattatgttcgtatg

SEQ ID NO: 377578 - DNA, 591 bp, Homo sapiens
acaagttttaggtacagagctttttgccttgtagatttttagtcacctagaaacttacagaattgatttcctgttttgaactctcaactccagactaaagttttgttttgttttgttttgttttgttttgttttgttttgttttgtttttaaatttacagacagagtcttgctctgtcgccaggctggagtgcatcggcgctatctcggctcactgcaaactccacctccgcctcctgggttcaagcgattctcctgcctcagcctccrgagtagcagggactacaggtgcatgccaccacgcccagctaatttttgtatttttagtagagacagggtttcaccatgttggccaggatggtctccatcttttgaccttgtgatccacccgcctcagcctccctaagttttatgattataggtgtgagccactgtgtccacccaagactgaagatttttaatttaggcctttttgagggtttaggaatcccttgaaattagatggagaattattgccttcatctatgctgtttcttatgaaggatttctgaatcttttaatagattataaaaaatatctaacactttctgtt

SEQ ID NO: 377579 - DNA, 591 bp, Homo sapiens
acaagttttaggtacagagctttttgccttgtagatttttagtcacctagaaacttacagaattgatttcctgttttgaactctcaactccagactaaagttttgttttgttttgttttgttttgttttgttttgttttgttttgtttttaaatttacagacagagtcttgctctgtcgccaggctggagtgcatcggcgctatctcggctcactgcaaactccacctccgcctcctgggttcaagcgattctcctgcctcagcctccagagtagcagggactacaggtgcatgccaccacgcccagctaatttttgtatttttagtagagacagggtttcaccatgttggccaggatggtctccatcttttgaccttgtgatccacccgcctcagcctcccwaagttttatgattataggtgtgagccactgtgtccacccaagactgaagatttttaatttaggcctttttgagggtttaggaatcccttgaaattagatggagaattattgccttcatctatgctgtttcttatgaaggatttctgaatcttttaatagattataaaaaatatctaacactttctgtt

SEQ ID NO: 377580 - DNA, 591 bp, Homo sapiens
acaagttttaggtacagagctttttgccttgtagatttttagtcacctagaaacttacagaattgatttcctgttttgaactctcaactccagactaaagttttgttttgttttgttttgttttgttttgttttgttttgttttgtttttaaatttacagacagagtcttgctctgtcgccaggctggagtgcatcggcgctatctcggctcactgcaaactccacctccgcctcctgggttcaagcgattctcctgcctcagcctccagagtagcagggactacaggtgcatgccaccacgcccagctaatttttgtatttttagtagagacagggtttcaccatgttggccaggatggtctccatcttttgaccttgtgatccacccgcctcagcctccctaagttttatgattataggtgtgagccactgtgtccacccaagactgaagatttttaatttaggcctttttgagggtttaggaatcccttgaaattagatggagaattattgmcttcatctatgctgtttcttatgaaggatttctgaatcttttaatagattataaaaaatatctaacactttctgtt

SEQ ID NO: 377581 - DNA, 554 bp, Homo sapiens
cctgggttcaagcgattctcctgcctcagcctccagagtagcagggactacaggtgcatgccaccacgcccagctaatttttgtatttttagtagagacagggtttcaccatgttggccaggatggtctccatcttttgaccttgtgatccacccgcctcagcctccctaagttttatgattataggtgtgagccactgtgtccacccaagactgaagatttttaatttaggcctttttgagggtttaggaatcccttgaaattagatggagaattattgccttcatctatgctgtttcttatgaaggrtttctgaatcttttaatagattataaaaaatatctaacactttctgttctccttaaaccactttctctagaagctctagatactagatatactaggtattagatagcaccttctgccctccctacgtaattatgtggaatttcaaaatcaagaatgtttccttgctttcattggtatattgttgtactctttagaagttaagcagtgaacatatattgatagtattattttatcagtagtacagt

SEQ ID NO: 377582 - DNA, 554 bp, Homo sapiens
cctgggttcaagcgattctcctgcctcagcctccagagtagcagggactacaggtgcatgccaccacgcccagctaatttttgtatttttagtagagacagggtttcaccatgttggccaggatggtctccatcttttgaccttgtgatccacccgcctcagcctccctaagttttatgattataggtgtgagccactgtgtccacccaagactgaagatttttaatttaggcctttttgagggtttaggaatcccttgaaattagatggagaattattgccttcatctatgctgtttcttatgaaggatttctgaatcttttaatagattataaaaaatatctaacactttctgttctccttaaaccactttctctwgaagctctagatactagatatactaggtattagatagcaccttctgccctccctacgtaattatgtggaatttcaaaatcaagaatgtttccttgctttcattggtatattgttgtactctttagaagttaagcagtgaacatatattgatagtattattttatcagtagtacagt

SEQ ID NO: 377583 - DNA, 554 bp, Homo sapiens
cctgggttcaagcgattctcctgcctcagcctccagagtagcagggactacaggtgcatgccaccacgcccagctaatttttgtatttttagtagagacagggtttcaccatgttggccaggatggtctccatcttttgaccttgtgatccacccgcctcagcctccctaagttttatgattataggtgtgagccactgtgtccacccaagactgaagatttttaatttaggcctttttgagggtttaggaatcccttgaaattagatggagaattattgccttcatctatgctgtttcttatgaaggatttctgaatcttttaatagattataaaaaatatctaacactttctgttctccttaaaccactttctctaraagctctagatactagatatactaggtattagatagcaccttctgccctccctacgtaattatgtggaatttcaaaatcaagaatgtttccttgctttcattggtatattgttgtactctttagaagttaagcagtgaacatatattgatagtattattttatcagtagtacagt

SEQ ID NO: 377584 - DNA, 591 bp, Homo sapiens
tttcattggtatattgttgtactctttagaagttaagcagtgaacatatattgatagtattattttatcagtagtacagtattcttgggactctggctactaattatctgttccattgcaagacaactttttactttatttcccaattaccattcaacatcgctttccatgakatatgtctacttcaagttagatgcattgcctggagcccatatatgctagcactgccatttgccgttttctgaatacctttgtgtttgccctaactaacttccttgctgtctttgaaatatttaatatatgatgataaaataattagcttccttatgtaatgtgctttgcttcctctctaatagttgttctcattcctttttatttcctccttagctctatgaaagtttttctgttaatagggatagttaggagaaaagggcaaggtaggaggagcatgtgaggcttagggcttttaagtttgatgactcagtgttacaggttttaaaaggtagcagttctcagtatattccattttttttaaaaaaatgtacaaatatggtctttttagatggatgcatgcagttcgtcagaacttaa

SEQ ID NO: 377585 - DNA, 591 bp, Homo sapiens
tttcattggtatattgttgtactctttagaagttaagcagtgaacatatattgatagtattattttatcagtagtacagtattcttgggactctggctactaattatctgttccattgcaagacaactttttactttatttcccaattaccattcaacatcgctttccatgatatatgtctacttcaagtkagatgcattgcctggagcccatatatgctagcactgccatttgccgttttctgaatacctttgtgtttgccctaactaacttccttgctgtctttgaaatatttaatatatgatgataaaataattagcttccttatgtaatgtgctttgcttcctctctaatagttgttctcattcctttttatttcctccttagctctatgaaagtttttctgttaatagggatagttaggagaaaagggcaaggtaggaggagcatgtgaggcttagggcttttaagtttgatgactcagtgttacaggttttaaaaggtagcagttctcagtatattccattttttttaaaaaaatgtacaaatatggtctttttagatggatgcatgcagttcgtcagaacttaa

SEQ ID NO: 377586 - DNA, 591 bp, Homo sapiens
tttcattggtatattgttgtactctttagaagttaagcagtgaacatatattgatagtattattttatcagtagtacagtattcttgggactctggctactaattatctgttccattgcaagacaactttttactttatttcccaattaccattcaacatcgctttccatgatatatgtctacttcaagttagatgcattgcctggagcccatatatgctagcactgccatttgccgttttctgaatacctttgtgtttgccctaactaacttccttgctgtctttgaaatatttaatatatgatgataaaataattagcttccttatgtaatgtgctttgcttcctctctaatagttgttctcattcctttttatttcctccttagctctatgaaagtttttctgttamtagggatagttaggagaaaagggcaaggtaggaggagcatgtgaggcttagggcttttaagtttgatgactcagtgttacaggttttaaaaggtagcagttctcagtatattccattttttttaaaaaaatgtacaaatatggtctttttagatggatgcatgcagttcgtcagaacttaa

SEQ ID NO: 377587 - DNA, 591 bp, Homo sapiens
tttcattggtatattgttgtactctttagaagttaagcagtgaacatatattgatagtattattttatcagtagtacagtattcttgggactctggctactaattatctgttccattgcaagacaactttttactttatttcccaattaccattcaacatcgctttccatgatatatgtctacttcaagttagatgcattgcctggagcccatatatgctagcactgccatttgccgttttctgaatacctttgtgtttgccctaactaacttccttgctgtctttgaaatatttaatatatgatgataaaataattagcttccttatgtaatgtgctttgcttcctctctaatagttgttctcattcctttttatttcctccttagctctatgaaagtttttctgttaatagggatagttaggagaaaagggcaaggtaggaggagcatgtgaggcttagggcttttaagtttgawgactcagtgttacaggttttaaaaggtagcagttctcagtatattccattttttttaaaaaaatgtacaaatatggtctttttagatggatgcatgcagttcgtcagaacttaa

SEQ ID NO: 377588 - DNA, 427 bp, Homo sapiens
acaaatatggtctttttagatggatgcatgcagttcgtcagaacttaaatactgaggaagaagtggaaaatgtagcagacattggttttgattgtaacatgtgcagaccctatatgcctgcrtctaatggtaagagaataatttaaactgtgagtctgcactcttgtaccactcacttgcaccttactgtccataaccaatgaattagcttagctctactctattttgtctttgtgaaacttactttgacaagtattttatgaaaaatattattgttggttatacatgacttatcacaacttgttataaaacaatttacatgaaacaataaaaagcatatactttagatgtaaactataattttgcttccaaggaacatgatcttgtagttattgacaatatgttaaaatccaatgtgttgattctt

SEQ ID NO: 377589 - DNA, 427 bp, Homo sapiens
acaaatatggtctttttagatggatgcatgcagttcgtcagaacttaaatactgaggaagaagtggaaaatgtagcagacattggttttgattgtaacatgtgcagaccctatatgcctgcgtctaatggtaagagaataatttaaactgtgagtctgcactcttgtaccactcwcttgcaccttactgtccataaccaatgaattagcttagctctactctattttgtctttgtgaaacttactttgacaagtattttatgaaaaatattattgttggttatacatgacttatcacaacttgttataaaacaatttacatgaaacaataaaaagcatatactttagatgtaaactataattttgcttccaaggaacatgatcttgtagttattgacaatatgttaaaatccaatgtgttgattctt

SEQ ID NO: 377590 - DNA, 633 bp, Homo sapiens
ttttgattgtaacatgtgcagaccctatatgcctgcgtctaatggtaagagaataatttaaactgtgagtctgcactcttgtaccactcacttgcaccttactgtccataaccaatgaattagcttagctctactctattttgtctttgtgaaacttactttgacaagtattttatgaaaaatattattgttggttatacatgacttatcacaacttgttataaaacaatttacatgaaacaataaaaagcrtatactttagatgtaaactataattttgcttccaaggaacatgatcttgtagttattgacaatatgttaaaatccaatgtgttgattctttcttagccaggttttcctccatgacttgagtatttccttcatcacttcttgttttgttgttgctttaaaaagtgcttttaactttagtgttcaaacatttattttaataaaatgagtatagaaacagaaattttaatcatatgtaagtatgtaaatacactctaccttttctgaaaagattacatggatttttttttttcatttcagtgccttcctcagactgctgtggatcttcacttgtagcacaaattgtcacaaaagtaaaagagctagttaaaatttgaaatgctt

SEQ ID NO: 377591 - DNA, 388 bp, Homo sapiens
tgcctgcgtctaatggtaagagaataatttaaactgtgagtctgcactcttgtaccactcacttgcaccttactgtccataaccaatgaattagcttagctctactctattttgtctttgtgaaacttactttgacaagtattttatgaaaaatattattgttggttatacatgacttatcacaacttgttataaaacaatttacatgaaacaataaaaagcatatactttagatgtaaactataattttgcttccaaggaacatgatcttgtagttattgacaatatgtyaaaatccaatgtgttgattctttcttagccaggttttcctccatgacttgagtatttccttcatcacttcttgttttgttgttgctttaaaaagtgc

SEQ ID NO: 377592 - DNA, 633 bp, Homo sapiens
ttttgattgtaacatgtgcagaccctatatgcctgcgtctaatggtaagagaataatttaaactgtgagtctgcactcttgtaccactcacttgcaccttactgtccataaccaatgaattagcttagctctactctattttgtctttgtgaaacttactttgacaagtattttatgaaaaatattattgttggttatacatgacttatcacaacttgttataaaacaatttacatgaaacaataaaaagcatatactttagatgtaaactataattttgcttccaaggaacatgatcttgtagttattgacaatatgttaaaatccaatgtgttgattctttcttagccaggttttcctccatgacttgagtatttccttcatcacttcttgttttgttgttgctttaaaaagtgcttttaactttagtgttcaaacatttattttaataaaatgagtatagaaacagaaattttaatcatatgtaagtatgtaaatacactytaccttttctgaaaagattacatggatttttttttttcatttcagtgccttcctcagactgctgtggatcttcacttgtagcacaaattgtcacaaaagtaaaagagctagttaaaatttgaaatgctt

SEQ ID NO: 377593 - DNA, 605 bp, Homo sapiens
ttttttatactcattatacaaacccaccctatttgttacttacacaccctgtatggccctgcttccaccccacaaaaatgcttgkggaatgaatgaatggattggtggaagtcagggggactggaacatctgaaaacaaatgtcagtgtgtgtggccagcgtctgtgcacctttcttgattgattgaatcttctgtgcattgatttcatggtattgggcacagaatccccttttttgctcattaccaacaaagatttgtcaagcacccactcactgtgttcacttggggaattcagacatgaacaagacacaatttcttgatttaagaagctgagattctagaaggccaggcagtgatgtgaaagatggtgcattccagggtcataatggctacactaggagccagcccagggctctcctggagcacaggacacctgttcagtgcagaggactcagtaagtctttctggagaagtgattgagctggctctgcaggatggagaggtttgaaaattgctaagtgctttgtacaacttataaaaatccacgttgcccagtttccaagcagtctcatgttcagtagacaaaaggcaattttcaaactga

SEQ ID NO: 377594 - DNA, 605 bp, Homo sapiens
ttttttatactcattatacaaacccaccctatttgttacttacacaccctgtatggccctgcttccaccccacaaaaatgcttggggaatgaatgaatggrttggtggaagtcagggggactggaacatctgaaaacaaatgtcagtgtgtgtggccagcgtctgtgcacctttcttgattgattgaatcttctgtgcattgatttcatggtattgggcacagaatccccttttttgctcattaccaacaaagatttgtcaagcacccactcactgtgttcacttggggaattcagacatgaacaagacacaatttcttgatttaagaagctgagattctagaaggccaggcagtgatgtgaaagatggtgcattccagggtcataatggctacactaggagccagcccagggctctcctggagcacaggacacctgttcagtgcagaggactcagtaagtctttctggagaagtgattgagctggctctgcaggatggagaggtttgaaaattgctaagtgctttgtacaacttataaaaatccacgttgcccagtttccaagcagtctcatgttcagtagacaaaaggcaattttcaaactga

SEQ ID NO: 377595 - DNA, 605 bp, Homo sapiens
ttttttatactcattatacaaacccaccctatttgttacttacacaccctgtatggccctgcttccaccccacaaaaatgcttggggaatgaatgaatggattggtggaagtcagggggactggaacatctgaaaacaaatgtcagtgtgtgtggccagcgtctgtgcacctttcttgattgattgaatcttctgtgcattgatttcatggtattgggcacagaatccccttttttgctcattaccaacaaagatttgtcaagcacccactcactgtgttcacttggggaattcagacatgaacaagacacaatttcytgatttaagaagctgagattctagaaggccaggcagtgatgtgaaagatggtgcattccagggtcataatggctacactaggagccagcccagggctctcctggagcacaggacacctgttcagtgcagaggactcagtaagtctttctggagaagtgattgagctggctctgcaggatggagaggtttgaaaattgctaagtgctttgtacaacttataaaaatccacgttgcccagtttccaagcagtctcatgttcagtagacaaaaggcaattttcaaactga

SEQ ID NO: 377596 - DNA, 582 bp, Homo sapiens
cccctggctaatttttgtatttttttgtagagatggggttttgccattttgccaagactggtcttgaactcctgggctcaagccatttgctctgctcagcctgctgaattcttgagatagcaaaatattttaatagtaacctaaaatcccatatgaattaaagaggattactgtaggtttcctcatttttggggcagttatttattttcaactgattcagaagtgaagtgataattatttctgttccattacattttatttcatagcttttttttttttttttttttttttaaggggcagtgtcttgttacattgcccaggctggtttccaactcctgggctcaagtgatcctcctgcctcagcctctcaagtagcaggtactataggcatgcrccactgcagccggcttttagacaatagaatttattgaatacctactgtatgtcagatgttggaaatcatatcagtgtacaaagcaggtagaattctctgcatagagtttatattttaatgttaggtaactcaactcttaaaaaaaatcagttaattataatgtgtttggcaagttccatggtaaaaat

SEQ ID NO: 377597 - DNA, 582 bp, Homo sapiens
cccctggctaatttttgtatttttttgtagagatggggttttgccattttgccaagactggtcttgaactcctgggctcaagccatttgctctgctcagcctgctgaattcttgagatagcaaaatattttaatagtaacctaaaatcccatatgaattaaagaggattactgtaggtttcctcatttttggggcagttatttattttcaactgattcagaagtgaagtgataattatttctgttccattacattttatttcatagcttttttttttttttttttttttttaaggggcagtgtcttgttacattgcccaggctggtttccaactcctgggctcaagtgatcctcctgcctcagcctctcaagtagcaggtactataggcatgcgccactgcagccggcttttagacaatagaatttattgaatacctactgtakgtcagatgttggaaatcatatcagtgtacaaagcaggtagaattctctgcatagagtttatattttaatgttaggtaactcaactcttaaaaaaaatcagttaattataatgtgtttggcaagttccatggtaaaaat

SEQ ID NO: 377598 - DNA, 540 bp, Homo sapiens
gtcagggggactggaacatctgaaaacaaatgtcagtgtgtgtggccagcgtctgtgcacctttcttgattgattgaatcttctgtgcattgatttcatggtattgggcacagaatccccttttttgctcattaccaacaaagatttgtcaagcacccactcactgtgttcacttggggaattcagacatgaacaagacacaatttcttgatttaagaagctgagattctagaaggccaggcagtgatgtgaaagatggtgcattccagggtcataayggctacactaggagccagcccagggctctcctggagcacaggacacctgttcagtgcagaggactcagtaagtctttctggagaagtgattgagctggctctgcaggatggagaggtttgaaaattgctaagtgctttgtacaacttataaaaatccacgttgcccagtttccaagcagtctcatgttcagtagacaaaaggcaattttcaaactgaaattctttacttgcatttctatttctattttccttccttcctttc

SEQ ID NO: 377599 - DNA, 540 bp, Homo sapiens
gtcagggggactggaacatctgaaaacaaatgtcagtgtgtgtggccagcgtctgtgcacctttcttgattgattgaatcttctgtgcattgatttcatggtattgggcacagaatccccttttttgctcattaccaacaaagatttgtcaagcacccactcactgtgttcacttggggaattcagacatgaacaagacacaatttcttgatttaagaagctgagattctagaaggccaggcagtgatgtgaaagatggtgcattccagggtcataatggctrcactaggagccagcccagggctctcctggagcacaggacacctgttcagtgcagaggactcagtaagtctttctggagaagtgattgagctggctctgcaggatggagaggtttgaaaattgctaagtgctttgtacaacttataaaaatccacgttgcccagtttccaagcagtctcatgttcagtagacaaaaggcaattttcaaactgaaattctttacttgcatttctatttctattttccttccttcctttc

SEQ ID NO: 377600 - DNA, 540 bp, Homo sapiens
gtcagggggactggaacatctgaaaacaaatgtcagtgtgtgtggccagcgtctgtgcacctttcttgattgattgaatcttctgtgcattgatttcatggtattgggcacagaatccccttttttgctcattaccaacaaagatttgtcaagcacccactcactgtgttcacttggggaattcagacatgaacaagacacaatttcttgatttaagaagctgagattctagaaggccaggcagtgatgtgaaagatggtgcattccagggtcataatggctacactaggagccagcccagggctctcctggagcayaggacacctgttcagtgcagaggactcagtaagtctttctggagaagtgattgagctggctctgcaggatggagaggtttgaaaattgctaagtgctttgtacaacttataaaaatccacgttgcccagtttccaagcagtctcatgttcagtagacaaaaggcaattttcaaactgaaattctttacttgcatttctatttctattttccttccttcctttc

SEQ ID NO: 377601 - DNA, 436 bp, Homo sapiens
cacagtaattttatgagataagttctatttattatccctatcttaaggatgaggaaactgtggtttaaagagcttaagtaatttgggcaaatcatraaagaagcagtgaagacagaattcaaatctaggcaacctgaaatctgagcctgagcactttgcctccctaataactatctccctttgagagttgtattacaaagttgacaacatttagcaacccttattcccctccccacccctatctctctccaagaaatctgctgtgaggtagagaatgtgttgattttctctgcagtttttagtgcatagcatagggcttagaaaggagaaaatgatgaaaaatatttattaaaataattgtttttctttgatagttgttataaccatctaattgtgagtgcttaacaattactataaaggagaatggaaatcacag

SEQ ID NO: 377602 - DNA, 386 bp, Homo sapiens
aataggagaaacctagaatttatgtaaacagtgagaagattggatgcgttttccgtctcatattttaatactrgcagcatattatatatgtcaaaccatcaggcattcagaaatacatgcttatgaaaattttttgcaccatcagacaaaagacaagggtagaagacatttgtaaccctataaacactagtaaattaaaaacagaaggaccttaatgtcctaacatacctgtgttgtgaaaggctgccctgtgaaataccggatttcttaaacatattttaaaaatcataggcgtcaatattttttagatatccttttaaattttctcttgttattttacaatgcctatttatttatttagtggctctgctgattttgatgtatat

SEQ ID NO: 377603 - DNA, 527 bp, Homo sapiens
attgacaaatgtctcctggggaaaactctccaccagttgacaggtaaagttctggaaatattggatttgtcaattgagattttatgttatccaaaacaaatatttttctttgttcttaaacatctacttccatctacttatctacttatttttacttttatttgtaacttaattccatcaaggagagagagtgcattttctgttatgctaaatttttgaagaatgtattgatwttttatgacctgatatatggatgatatgtagatattacatgtttgtattatcaaatttcagggtgataataaaataaatacttataatatttatattgtcactgtatattagttattttctttcttcactacaggagtttttcaacctataggctatgtttcaattctaggttatccagtagattttgaaatgttatgattaaatatctacttctcaagcattcatctttgcaaatgaaacaatcctaagctcttataatacacatcatataaagggcagattagtcaatgtat

SEQ ID NO: 377604 - DNA, 527 bp, Homo sapiens
attgacaaatgtctcctggggaaaactctccaccagttgacaggtaaagttctggaaatattggatttgtcaattgagattttatgttatccaaaacaaatatttttctttgttcttaaacatctacttccatctacttatctacttatttttacttttatttgtaacttaattccatcaaggagagagagtgcattttctgttatgctaaatttttgaagaatgtattgatattttatgacctgatatatggatgatawgtagatattacatgtttgtattatcaaatttcagggtgataataaaataaatacttataatatttatattgtcactgtatattagttattttctttcttcactacaggagtttttcaacctataggctatgtttcaattctaggttatccagtagattttgaaatgttatgattaaatatctacttctcaagcattcatctttgcaaatgaaacaatcctaagctcttataatacacatcatataaagggcagattagtcaatgtat

SEQ ID NO: 377605 - DNA, 527 bp, Homo sapiens
attgacaaatgtctcctggggaaaactctccaccagttgacaggtaaagttctggaaatattggatttgtcaattgagattttatgttatccaaaacaaatatttttctttgttcttaaacatctacttccatctacttatctacttatttttacttttatttgtaacttaattccatcaaggagagagagtgcattttctgttatgctaaatttttgaagaatgtattgatattttatgacctgatatatggatgatatgtagatattacatgtttgtattatcaaatttcagggtgataataaaataaatacttataatatttatattgtcactgtatattagttattttctttcttcactacaggagtttttcaacctataggctatgtttcaattctaggttatccagtagattttgaaatgttatkattaaatatctacttctcaagcattcatctttgcaaatgaaacaatcctaagctcttataatacacatcatataaagggcagattagtcaatgtat

SEQ ID NO: 377606 - DNA, 564 bp, Homo sapiens
ttaactcagataacaataatccaaattaaaatttgatttcattacataatttaaaatgacaycagaatgctagtaaaaattatacaaaaaatttatgtaatcttattaagctgtgggactttattagcataaattcaaatacaggaaccaaagtaagattgagacctatagtcaaaggttaaaatgtacacattataggggcatgattaaactaatttaaagcataataacatggagaaatattgcaaaacatacattttactgaattaattgttagtatctaatcattttgtgagaaccaaattaaaaagtagctacacacgcacacacccacacacaagtgcaatactgtcaaataaacgatgttcagctacactagaaatcacacctgtgttttctccacagaaaagattaaaaatcacaataatttttattgtacatatggaggtaaagatactcaaaatattaccctaaaatacattatttttttgagatggagttttgtttttattgcccaggctagagtgcaatggcacaatcttggctcactgcaacttcagcctc

SEQ ID NO: 377607 - DNA, 564 bp, Homo sapiens
ttaactcagataacaataatccaaattaaaatttgatttcattacataatttaaaatgacatcagaatgctagtaaaaattatacaaaaaatttatgtaatcttattaagctgtgggactttattagcataaattcaaatacaggaaccaaagtaagattgagasctatagtcaaaggttaaaatgtacacattataggggcatgattaaactaatttaaagcataataacatggagaaatattgcaaaacatacattttactgaattaattgttagtatctaatcattttgtgagaaccaaattaaaaagtagctacacacgcacacacccacacacaagtgcaatactgtcaaataaacgatgttcagctacactagaaatcacacctgtgttttctccacagaaaagattaaaaatcacaataatttttattgtacatatggaggtaaagatactcaaaatattaccctaaaatacattatttttttgagatggagttttgtttttattgcccaggctagagtgcaatggcacaatcttggctcactgcaacttcagcctc

SEQ ID NO: 377608 - DNA, 564 bp, Homo sapiens
ttaactcagataacaataatccaaattaaaatttgatttcattacataatttaaaatgacatcagaatgctagtaaaaattatacaaaaaatttatgtaatcttattaagctgtgggactttattagcataaattcaaatacaggaaccaaagtaagattgagacctatagtcaaaggttaaaatgtacacattataggggcatgattaaactaatttaaagcataataacatggagaaatattgcaaaacatacattttactgaattaattgttagtatctaatcattttgtgagaaccaaattaaaaagtagctacacacgcacacacccacacacaagtgcaatactgtcaaataaacgatgttcagctacactagaaatcacacctgtgttttctccacagaaaagattaaaaatcrcaataatttttattgtacatatggaggtaaagatactcaaaatattaccctaaaatacattatttttttgagatggagttttgtttttattgcccaggctagagtgcaatggcacaatcttggctcactgcaacttcagcctc

SEQ ID NO: 377609 - DNA, 604 bp, Homo sapiens
gctaatacaagtctacagataatgctgtatgaaaaactagttttcccaatcatagctggcatagtccacattttgcattacactttccccccctttttttaaattttaaacacaggtctttttctcttctttttttcaattttaattaaattatacaagacggagtctcagtatgttgcccaggctggtcttcaactcctgagctcaagcgatacaaccgtctccgcctcccaaastgctgagattgcaggcctgagacactgtgcctggccttaaacacaaatcttaattcattcttacaattattctgaggttacaaaaatggaaggggaagaaaaatggcaagtaggtaggctgacttcggcttcattatttggaaggacagtttgctcggttaaaacacactactgcctacaaaggccaagacaacagaaaaatacagacttacataaatagattttatatgtgacagcagtttgaatggagactttttcaatgcaatgagaaacagctgtgcttgggaataaatgacaacgaattttttttatctcaacagctgtcctgagagcatgtctctacatctctacctgcattctggaatcag

SEQ ID NO: 377610 - DNA, 604 bp, Homo sapiens
gctaatacaagtctacagataatgctgtatgaaaaactagttttcccaatcatagctggcatagtccacattttgcattacactttccccccctttttttaaattttaaacacaggtctttttctcttctttttttcaattttaattaaattatacaagacggagtctcagtatgttgcccaggctggtcttcaactcctgagctcaagcgatacaaccgtctccgcctcccaaagtgctgagattgcaggcctgagacactgtgcctggscttaaacacaaatcttaattcattcttacaattattctgaggttacaaaaatggaaggggaagaaaaatggcaagtaggtaggctgacttcggcttcattatttggaaggacagtttgctcggttaaaacacactactgcctacaaaggccaagacaacagaaaaatacagacttacataaatagattttatatgtgacagcagtttgaatggagactttttcaatgcaatgagaaacagctgtgcttgggaataaatgacaacgaattttttttatctcaacagctgtcctgagagcatgtctctacatctctacctgcattctggaatcag

SEQ ID NO: 377611 - DNA, 553 bp, Homo sapiens
aggaatctgcactcattcattttgctacatgtccgtagggcaaaatcagtatcagtgtttaggtgtattttgtctgctccctgcattcccatggttttgaccttatcttttacttttttttgtgaacataccaatgcttcaatttttttccagtaatataatcaactatactataagagaaaaatttcgataaaacacaaatttcatgttttcctactctaattggcttttacgtaaaaaatacaggtaaaatttatttgtgcttttttgctatttctgttttgctattttctgtttgtctatgtcttcaccacatagacacaattagggaattttgtacactcttgtgccaactgctttgayagtaacaaaatgtatttctcgaattcctaggtataaaactcaagtatccactatttaaattcttttttgctcacttctagtatgtttccagtctcaatagaaatcgatgccaatccagaaatacaagcattattctaatacttctcacacattactggtatggatgacattttctagatctccttaaata

SEQ ID NO: 377612 - DNA, 553 bp, Homo sapiens
aggaatctgcactcattcattttgctacatgtccgtagggcaaaatcagtatcagtgtttaggtgtattttgtctgctccctgcattcccatggttttgaccttatcttttacttttttttgtgaacataccaatgcttcaatttttttccagtaatataatcaactatactataagagaaaaatttcgataaaacacaaatttcatgttttcctactctaattggcttttacgtaaaaaatacaggtaaaatttatttgtgcttttttgctatttctgttttgctattttctgtttgtctatgtcttcaccacatagacacaattagggaattttgtacactcttgtgccaactgctttgacagtaacaaaatgtatttctcgaaytcctaggtataaaactcaagtatccactatttaaattcttttttgctcacttctagtatgtttccagtctcaatagaaatcgatgccaatccagaaatacaagcattattctaatacttctcacacattactggtatggatgacattttctagatctccttaaata

SEQ ID NO: 377613 - DNA, 556 bp, Homo sapiens
caccgtgccacctgtccacactccttggctctgccatcatgctgaagatcgctttaaaggactggcttccctccccccaaaattaaaagagcacagactgagaaactgaatgtgggagacagcagtggattatgctgttctcaggggtcacctcaggtttggaagcattctttcaaattaacccatctcaggccatctgcagagaagaaaggtggtacytaactttttttcttgtcggcttttggtaggggtgttttattgaccaaatatgttcccacaacctcgttttttgtgactaactaaatatagtagagttttaaattttatcatcaaaatctatagacaatttttgatgaaaatagactccatctctatgtcctgcttttcttcttcttattaattacattgctgtataaaagaacaagacttcagcatcaagaatatcttgtctcttggcattgaatttatacaaggtgctctttctttaatgctgtctcaaaggacatatttttactcattaaaaaggaagatcggaatctagttgtatgcactgctc

SEQ ID NO: 377614 - DNA, 556 bp, Homo sapiens
caccgtgccacctgtccacactccttggctctgccatcatgctgaagatcgctttaaaggactggcttccctccccccaaaattaaaagagcacagactgagaaactgaatgtgggagacagcagtggattatgctgttctcaggggtcacctcaggtttggaagcattctttcaaattaacccatctcaggccatctgcagagaagaaaggtggtacttaactttttttcttgtcggcwtttggtaggggtgttttattgaccaaatatgttcccacaacctcgttttttgtgactaactaaatatagtagagttttaaattttatcatcaaaatctatagacaatttttgatgaaaatagactccatctctatgtcctgcttttcttcttcttattaattacattgctgtataaaagaacaagacttcagcatcaagaatatcttgtctcttggcattgaatttatacaaggtgctctttctttaatgctgtctcaaaggacatatttttactcattaaaaaggaagatcggaatctagttgtatgcactgctc

SEQ ID NO: 377615 - DNA, 556 bp, Homo sapiens
caccgtgccacctgtccacactccttggctctgccatcatgctgaagatcgctttaaaggactggcttccctccccccaaaattaaaagagcacagactgagaaactgaatgtgggagacagcagtggattatgctgttctcaggggtcacctcaggtttggaagcattctttcaaattaacccatctcaggccatctgcagagaagaaaggtggtacttaactttttttcttgtcggcttttggtaggggtgttttattgaccaaatatgttcccacaacctmgttttttgtgactaactaaatatagtagagttttaaattttatcatcaaaatctatagacaatttttgatgaaaatagactccatctctatgtcctgcttttcttcttcttattaattacattgctgtataaaagaacaagacttcagcatcaagaatatcttgtctcttggcattgaatttatacaaggtgctctttctttaatgctgtctcaaaggacatatttttactcattaaaaaggaagatcggaatctagttgtatgcactgctc

SEQ ID NO: 377616 - DNA, 590 bp, Homo sapiens
acttcagcatcaagaatatcttgtctcttggcattgaatttatacaaggtgctctttctttaatgctgtctcaaaggacatatttttactcattaaaaaggaagatcggaatctagttgtatgcactgctccaacatattaataattaaaattaggaggtaaatgtggtcaaagctatagaaagactgagatgtcatttayatcgattactctatagcactctacaaacagaaattgttaaataatagtttatataaatattttgtagcatttcaaatatttgagtgcttgaagtttctcctcttttatagttcagattatcaatttgaagacttactccgctagttaatatgtttttagtctcgtttgagtattatataaaagcaattttcagttaaatgtgttccgcttacataaaacgttacaaattattgaggatttaattacttattcatgttcctgtaatgtctttagaagattttcttattattacctatcaatatatgtatgctttgtcaaagaaaaatcaaacatatatatcattgaaattgaaactttttaaaagtacttattaattctattgaaaaacc

SEQ ID NO: 377617 - DNA, 590 bp, Homo sapiens
acttcagcatcaagaatatcttgtctcttggcattgaatttatacaaggtgctctttctttaatgctgtctcaaaggacatatttttactcattaaaaaggaagatcggaatctagttgtatgcactgctccaacatattaataattaaaattaggaggtaaatgtggtcaaagctatagaaagactgagatgtcatttacatsgattactctatagcactctacaaacagaaattgttaaataatagtttatataaatattttgtagcatttcaaatatttgagtgcttgaagtttctcctcttttatagttcagattatcaatttgaagacttactccgctagttaatatgtttttagtctcgtttgagtattatataaaagcaattttcagttaaatgtgttccgcttacataaaacgttacaaattattgaggatttaattacttattcatgttcctgtaatgtctttagaagattttcttattattacctatcaatatatgtatgctttgtcaaagaaaaatcaaacatatatatcattgaaattgaaactttttaaaagtacttattaattctattgaaaaacc

SEQ ID NO: 377618 - DNA, 590 bp, Homo sapiens
acttcagcatcaagaatatcttgtctcttggcattgaatttatacaaggtgctctttctttaatgctgtctcaaaggacatatttttactcattaaaaaggaagatcggaatctagttgtatgcactgctccaacatattaataattaaaattaggaggtaaatgtggtcaaagctatagaaagactgagatgtcatttacatcgattactctatagcactctacaaacagaaattgttaaataatagtttatataaatattttgtagcatttcaaatatttgagtgcttgaagtttctcctcttytatagttcagattatcaatttgaagacttactccgctagttaatatgtttttagtctcgtttgagtattatataaaagcaattttcagttaaatgtgttccgcttacataaaacgttacaaattattgaggatttaattacttattcatgttcctgtaatgtctttagaagattttcttattattacctatcaatatatgtatgctttgtcaaagaaaaatcaaacatatatatcattgaaattgaaactttttaaaagtacttattaattctattgaaaaacc

SEQ ID NO: 377619 - DNA, 493 bp, Homo sapiens
gagttgaaacattatcagatattagtgccttttttctagaagtttgcaatctactgggacagaacagcctacttaattccgtataaataggactagtcaaaaacaacatgctgaataaatggtgaatatgagtgtactgccacacatccaccatcccaagatctatttgaatgtcacatgatgatatgagccacatttgccatccataaatcagcatgaattatctgctgggctccattctggattctgaggataaagcagaaaacagcaaggtatctgtctgcatggagtttacactctaatattgcagttatcatcctatcatgaccattgatatgaagaaaaataatgcagcacatggcaataggaaaaagagagtcatccragaagcctctctgagaagggttcatttgatggagagtaggatgtaaaggagaactcagtcatatccagggtagaagcattgcagaggagaaaagagcaaggacaaagc

SEQ ID NO: 377620 - DNA, 592 bp, Homo sapiens
taagttataatgcttacaggagacctcctttaaatacaaatagtgggccgggcacggtgcctcatgcttgtaatcccagcactttaggaggccaaggcaggcaagatcacttgaggtcaggagttcgagaccagcctggccaacaggtgaagmcctgtctctactaaaaatacaaaaattacccaggcatggttgtgggcacctgtaatcccagctactcaggaggctgaggcaggagaatcacttgaacccagaaggcagaggttgcagtaagccgagatcacaccattgcactcaagcctggatgtcagagcaagattctgtctcaaaaaaaaaaaaaaaatacaaatagtggttttcttagaaaagtaaccaattcacctgttagaatcaacagttttacctgattaagccattactatacaaggcttgactccaaataatgatcactgctgattgtgcttactttcctgatctttttctcatgttactattaatgcaaatgatcatgattatctgtacaatttgctgagcacccataatgaattcggcccagtaattagtacttgccacacattatttctagtactga

SEQ ID NO: 377621 - DNA, 592 bp, Homo sapiens
taagttataatgcttacaggagacctcctttaaatacaaatagtgggccgggcacggtgcctcatgcttgtaatcccagcactttaggaggccaaggcaggcaagatcacttgaggtcaggagttcgagaccagcctggccaacaggtgaagacctgtctctactaaaaatacaaaaattacccaggcatggttgtgggcrcctgtaatcccagctactcaggaggctgaggcaggagaatcacttgaacccagaaggcagaggttgcagtaagccgagatcacaccattgcactcaagcctggatgtcagagcaagattctgtctcaaaaaaaaaaaaaaaatacaaatagtggttttcttagaaaagtaaccaattcacctgttagaatcaacagttttacctgattaagccattactatacaaggcttgactccaaataatgatcactgctgattgtgcttactttcctgatctttttctcatgttactattaatgcaaatgatcatgattatctgtacaatttgctgagcacccataatgaattcggcccagtaattagtacttgccacacattatttctagtactga

SEQ ID NO: 377622 - DNA, 593 bp, Homo sapiens
ctggcttacaaaccaatgccgaattttaaatctgagcttttggccttgatgtgattgatatgtactgaaaaatgttcccaccacctcacttatcccctggtccgtcwttatcaattgttatgaaatttgttccctctggtttaacaagaattccggttccaaaactgaataacttatggcacagagaaagaaataatttaaagacacaaaatgccagccactgatttccttagccccttttcgtttattgatcatcataactgtgggggtagatgttattagtcctatttatatttgaagataggggatcacatgggtacaaaatgataaagcagatgcaatgtcaggatctccacccccagacgaggaagctgtcttaattgcactaggcagcatcttctttcaatgcaaataggctgaagaaagcaacatgtttgttacactagggagtaaatgacataaagaagaaggagaaggagaataaaagcaaaatatcaggcaagtaaggagtctctggagagtggagggaaaagggtgtcagcaagtggaacaagaataaagaagggaaaaatagatgggcacccaaaccaaac

SEQ ID NO: 377623 - DNA, 543 bp, Homo sapiens
tggcctggcacccagttttagatctcccttcaggctcatttcatgcagatatgcttggacttacgattctgatcatcctttgacctgtctcatcatccttctcatatcctaagttagcacttcccccaattattcaacttttgtgtaaatccgtattttgttatattgagtcttcttaacgtgagttatactcatgatacaaagcagagccaagtgtaggagtgagtttggaggtgataactctttctgagtggacccaaacaattcagtactttgtataagatgatttagagtctggtacaaagcacctcttaggggcctattcagtgtgaacaagttctctaacattaagaacctgacagtttggttgaggaagaacaacaggytcctatgaagtcatccagaagtgtatgtttacatggcagctacttagtttatcagcctttctctggctacctgccttaaattatttccttagcaaaatcgactttgcttatccaaatgccctaaaatgcaaaccagttttgcttccccataaatctc

SEQ ID NO: 377624 - DNA, 608 bp, Homo sapiens
gaaaatgtcaccattgattgttattattgtattataaataggtattctttcttgaaaagatggcttaatttattacatcatgatttgactaatacattcaaattractttgtctgaaatgattttataaaatcctctacttttgaaaaaatagatttattttttagagtaattttagacttacaaaaaaattgaggtgataatatagagaatacctacataccccacaccagtttcccctatgattatcatcttatattagtatggtacatttattacaattaatagacagtattaattgattcactattattaactaaagtccatagttcagtcaaatttccttggattttacctgatgtccttctgttccaacatctcatctagttatcacattacatttagttggcatgccttcttaagcttctctcagttgtcacggtctcagactttttttgttctctgaccacctggacattttcaggagtactggtcaggtattttgtggaatgcccactgttaaatttgtctgttttttcatgattagattgaggttttggagaggaagcttacaaagataaaatgatgttgttttcatacgtcaaaggt

SEQ ID NO: 377625 - DNA, 542 bp, Homo sapiens
ttcaatattgttgtttttgttctttttaaattttcttaatataacattctttaacctgacagttttttcctttccctgagacatttagaggaagcaattgaaatgcttattatggtagctggaggaatcaactggcaatttaaaagaagttattctggctgggcgtggtggcttacccctgtaattccagcactttgggagactaaagtgggcggaccgcttsaggcgaggagttcgagaccagcctgggcaagatgggggaaaccccatctctacaaaaaaaaaaatgcaaaaattagctgggcatggtggcttgtgcctgtagttccagctgctctggaggctgaggcacaagaatcacaggcacctgggaggcagaggctgtagtgagccgagatggtgccattgcactccagactgggagacagagtgagactctatctaaaaaataataaataaataaaataaataaataaaataagttactctgaataaatgacagttccagcaagagggagttggcctaatataaagcaatcagt

SEQ ID NO: 377626 - DNA, 546 bp, Homo sapiens
ttatttttgtcctcttcttgccttcctatttttcttagtccagtaaaaacttttgaatcattgggaagttggtatatacgcccctcatccagtcctcgtgaaagaggagtaatgatgtgttgtttagtgagacaggaacaaaatagatgactaaacactgtagcttagtccctcaggttagcttgtatccaccacatccattcctctttccatgcagtaaatcaacttgggtagaatccttgcctcataaaggcaaatatgaaagtcagtcattatgtctgtctctgtggttctttctttctctctctctctgtcttttctctctctgtcttttctctctctctttctctctctctctctctcwcacacacacacacacacacacacacatttcccttgagtttgaagaatagatgcaagttaacatttctattggtctcagacacaagacttattctctatctcagctttatttgtgtaaatttctcaagtggtacaaagtaaaactgtgcttggcagcgttataaaagggactacttttataac

SEQ ID NO: 377627 - DNA, 588 bp, Homo sapiens
gtttgttaaaaataatttctttttaggtaggtatggtctaagaaaaacaggaacagaatataaatatttcttttgttttgcaggactatgttggcaaaataaattactttaatagcataataaaaaacaaccttgttaatttatacgtgcataacctttttgttgagagcataattgatgagtcttgttgctatcttctaacaggccattctgatgggaagggttggtaggattgggtaagcaagaatttgaaatcatcatccaccagctgaacttttttatttagtgattaatttatttaattctaaatgtagtgtttgccyccactgactccttcataaataatttgtttaaactaattagagtaataaattagatttaaaaaggtaaatgtattcaacatcaatgtataaatcagtgaagaaatgtggataaaatagatttggaattaatttaagaaaccattagcaaaagaaataagatcaagatggataaataataaaatgtgttatttgattggttcattatttcatttataggtcaatagtgaatttaaaaagaaaaaacactactacagcaaaaatgtta

SEQ ID NO: 377628 - DNA, 583 bp, Homo sapiens
caggaaatcaaaggtaattcagaagctcaaaaagtaaatcattaatgtggaaatttaatataactaggtttaggaaagaaaatttggcagactatattggaagttattcacttttcttctgtctttccattatgaatcccttgtctgtatgcatgaaaatgtgctgtagtggttattaacaataattattttctttctttagctatgaacacttttaacgaaaacttactcaacagccaatatataaaacaggcaaactgatactccttttgaaatcccttctagtagaagaaacattgaatttccatttacaataatatggaagactcaatcagaaaagaccctgcataaaatgatattttgattcattgctaggcttttagaraggaataaaaattttaacagaaaaggaaagaaagggaaaaaaataaaagttaagaaaatgaaacacacaaaaaacagacatagttcccaagctgacataaaatttgtgatgtccctcagtgcacgtatgaattagccgtgtgatattcatactgcatctaagatgaacatcaaggagagggaggcaaacctaagaacc

SEQ ID NO: 377629 - DNA, 604 bp, Homo sapiens
ctttctaaaagtaagcttagaatttctaaaacgtgtaacgttaaatttgcttgatttgaatttaatcatgtttattgtgagaattatacatacacatgtatatatatttccatgggtttatacacttaaaaaattcaaactttgagctgtctcacaagtaaaaagtaaagtactcaaaaaatgccaatgaaatattaaagtatagattaaatcaactattacacttaaataaaatgtaagttataagaatggaataaaaatacagagaataaatactattgaaaatgaagaggagagcaaaacattatagggctgaagatatagattaatcaatatactgtaagccatgtgcaaaaagacagtaaaacaagcaaaaaaaaaaaamcagtttaacaactttgagtattataataaatctagattctacactttgtttttcctcactctttatgttaagagaccgaatactacttcaggttgtctgaaatataatacactgacttaggacatctacatggactattacgttggcaaatattcctagcaaaaattggggaaacatggttgatatgcaatcattttctatgaagcttatattcaaaag

SEQ ID NO: 377630 - DNA, 580 bp, Homo sapiens
acttacctaaactgcggcttctagagcctgaatgcatttatgttaacataagattctttgaaattttagcaacatgataattctgacaaataggagatcattgaaagagaacatgccattatgttgtcatgagaaacaaagatatgaatgcctcccaggtgagagcagggaggatcctttgatgaaagtcaggcttcattgccactaggtaaataaatgaatctcagctccagtcctccctcacttaactcatgagtgatgagcaaacacaaatatcaaattccttttagattgcttctcagtctaccagaacataatctctgatacttcaatgttttataatccatatattttattttactttttgatgtgatcttgtgatctagacactgttcctgacttatcgtctcagtcctccctataaattgagtccacactgttcctgttggaaagacattcatytatatcaaatgaacacttcaataagatgttcccatttcattttcagctgatttaaaccagcagctgggctccaatttgcaagttgaatttgcctgctctaaaatgccacagccacaaa

SEQ ID NO: 377631 - DNA, 603 bp, Homo sapiens
aatttaatgtaaacttctagtcaagttttggggttgattcagtgatgtacactctgctccccactgctgggcactgccccttctgatgctgagagctgctttgcccaagtttgctttttctcagctgtgtaaatataaaaagcttgattatccacatccaacttgggacaaccctgaagggttcttcaggttccagcagacttcctttaaggtyctttgattttctgtggggctatattgcaactgcacttctccttgagtccgctcccacctcctttctctccctttcacagatgtggctcccaaaggcaatgaaatcatctcagagctggcttctgaaaggacccaacttgctacacagttaatatttgataaggcaagcctccatttttcctccttcaccttccaatgctatttgattaatttattgcaggtttgttttaatttaattttataacatggatataagaaagcaaaagggagagatgaatgcaggaacaaaaggcagaagaatgaaatgtgatccgtgatcttagttttcatggacaatgaggaggttcccaggatcatgccttttagtgctaaaatcttaaagtactgagc

SEQ ID NO: 377632 - DNA, 613 bp, Homo sapiens
  misc_feature (1)...(613): n = A,T,C or G
nnnnnnnnnnnnnnntaaatctctatctcaagatatttcctcttcaattgtattttaatttttgtaattatcttagagtgcatgttttagtttgtggataacatgcattttaacacttccctggcatttgctattttttttagaaaaggagcaatctccacattctgtgtcatccaaaaaggcattttcagctctaatttataataatattgtcaagttttcagtgattttcgtttaatcattgcttattgttcatgtaagggaagatgttttcctacctaaaaattggagaaatttttattttaaataaatttaagttaaagagaagagtggctgtaaagtaaaacattcagtaaaacggtcayagagatgataggatataaagctatggcaagagctcaacctgatgtaaaaacagatttttgaaaagtaccatctagataatttaaaataccttaaaaattaatcgtgaatatgattaactgtcgttttagagaaattaccttgaacatggagtgaagtatcagtgaacaagaggagtgggagacagaggcaaggagatatactacaatttgtgaaagaaaacctgaaagtgcacacgcttaatgtaatt

SEQ ID NO: 377633 - DNA, 537 bp, Homo sapiens
agacaaaaatatttcagaaacattaagcaagaaaaacatgaaatgcaagcacaccaagcatagtatattcatttaagcagctaaaaatcaaagacaaaaaaataaaaacaacaaacaaagacaatattggtagcagccatagggggagaaaatattatcatactragaaacaaggataagaattttagtacattcctcaccagaaaacattcaagaaagaaggcagtgaagttacatctttaaaatactgaaaggaaaagtaaaaaacaaaagaaaaaactgtcaattcagaattttatactagcaaaacatctttcaaaagtgaaaaaaaagtaaagaatttctcagattaataaaaaccaaggccacctttattgtatgatttccccaaacccttaacttcagtccaagcataagaaaatctcaaacacaaattggggagcatacaaaatatctgactaatattcttcatatgtgtaaagatcataaaactgaagaaatccaagggaaaaagtcaaaggcaggaagagattaagg

SEQ ID NO: 377634 - DNA, 560 bp, Homo sapiens
tttcctggagaactgtgtctagtcctgcagctgcrgctattcttcttggatttttggattccaaatattttttccttttaagttctaggcatgataatgattttattgttttgaggttcatttaactctctctatatctttataaacggctcctttattaaactcttttcatttgttcagttgagtgcctccaccccttctgagaccttgattgataacaatgcatagtactaagagttgcgccacaaaacaggtcattaagtaggtttgtgggataggtttgctcacatatctgcagtcctccttgctgagaggaaaaaggacacagatagtgtgagacatccagtgccataataattgttcaaattatcatgcacaatcataggattaaaaatgcggatggatggaaagtcaagcatctcgagatcatgtggccatggcacttagttgctgaggagatcatagtcaatataaggattgtgggataagctggttgcttctgttgaccctaaaatgaatgttgactttgtcagtctaactcaaactaggatgcaaagtct

SEQ ID NO: 377635 - DNA, 560 bp, Homo sapiens
tttcctggagaactgtgtctagtcctgcagctgcggctattcttcttggatttttggattccaaatattttttccttttaagttctaggcatgataatgattttattgttttgaggttcatttaactctctctatatctttataaacggctcctttattaaactcttttcatttgttcagttgagtgcctccaccccttctgagaccttgattgataacaatgcatagtactaagagttgcgccacaaaacaggtcattaagtaggtttgtgggataggtttgctcacatatctgcagtcctccttgctgagaggaaaaaggacacagatagtgtgagacatccagtgccataataattgttcaaattatcatgcacaatcataggattaaaaatgcrgatggatggaaagtcaagcatctcgagatcatgtggccatggcacttagttgctgaggagatcatagtcaatataaggattgtgggataagctggttgcttctgttgaccctaaaatgaatgttgactttgtcagtctaactcaaactaggatgcaaagtct

SEQ ID NO: 377636 - DNA, 596 bp, Homo sapiens
tagaacataaaaccttcataatctcaaaatctccccttaggaggaaggaatggtaatgctcatagattgcctacctggttccatacttttctcctcaaaatgtgtttaaataaaaakaagaaacaatggatgaatgaatgagggaatgaatgaatgaagaaagacaatatatatattagtgttctgaaatgaaaagtcttggtcatcttcactgtacattaaaaatttatgcagttgttttagtaaaattcaacagtcatttattgaaacccactctgcctaacttaagttgttagaaaacttttatcacagtattagacaaactattagtaactgaacaaaatttccagaagccacgaatctgtaaatatattgatgcctccccaaatgtatcttgaagaaattctgttcaaaaactatttcagtaatatagttttgttgcataaatatttcaagactaaaaatgtaatatcctataaaaaaagataaaacataaatatgagaaggaaattataaattttaaactaaaaactgattaaaaactgggtctgtggtcattattagtaagttctatgtacttagcttatggtacccgg

SEQ ID NO: 377637 - DNA, 489 bp, Homo sapiens
tggaccgtccctttttattactttttccaagattccaagagccatcagggaagcataacagaactgtcacttagatcacttgccagcatgttagatcctggatgtttacaaactctcttatcaactgcatattccaactgtcttattctagcacctgcaggatccattctcaggcatactgactggtaatgttagtcaggtatcagcaccttttacatatattctttttatccatctgtactctgggcaattcccmgtagattcatgctgaaatttgaccctaattatatcatgaccaggggtggagaaaaaccctgcagaggaatagcactgtttggaagacaactgcctcatttgagtgctctaccttatcttctgagagtcttttaacaggggagggtgggccactcttggagatccagatagtgcaggaggaactgatgattcaacattctcaagtgtgttacagagttagtctcattcaaaatc

SEQ ID NO: 377638 - DNA, 581 bp, Homo sapiens
  misc_feature (1)...(581): n = A,T,C or G
nnnnnnnnnnnnnnnnaaagctccttatatagccctgcccctagaaatttctcactgatcaccctttaaccacgatgtggttaaaggaatgttgcatagctgtaaaaaatgccttttattttagtatatttccacttaaattttctctctttgagactaccgaggtatttattatagtatagtatatattacgtattctaaatatttagtgccttattcagagaaatttgcacagctttgcatatcacatttattttcccagactgaatacaaagactttccttccccaaatcataatagcaaaaaattccatttatgtaatgctctaaataaaatgacagttttcaacctaaggaaaagtctgttgctctgatgattaacctctttaactattttaatgttttaaacacaaatacaataaacttcttttctcttccytggtcttcctggagtaagtaaaagctggattgagagggtgaaacgacaacaacaacgtcaataatggcaacaatttgtctccagttacattgagtttaagtaattaatagctcttttgattataatagctttataatatattt

SEQ ID NO: 377639 - DNA, 581 bp, Homo sapiens
  misc_feature (1)...(581): n = A,T,C or G
nnnnnnnnnnnnnnnnaaagctccttatatagccctgcccctagaaatttctcactgatcaccctttaaccacgatgtggttaaaggaatgttgcatagctgtaaaaaatgccttttattttagtatatttccacttaaattttctctctttgagactaccgaggtatttattatagtatagtatatattacgtattctaaatatttagtgccttattcagagaaatttgcacagctttgcatatcacatttattttcccagactgaatacaaagactttccttccccaaatcataatagcaaaaaattccatttatgtaatgctctaaataaaatgacagttttcaacctaaggaaaagtctgttgctctgatgattaacctctttaactattttaatgttttaaacacaaatacaataaacttcttttctcttccttggtcttcctggagtaagtaaaagctggattgagagggtgaaaygacaacaacaacgtcaataatggcaacaatttgtctccagttacattgagtttaagtaattaatagctcttttgattataatagctttataatatattt

SEQ ID NO: 377640 - DNA, 546 bp, Homo sapiens
gaaacagtaaattcctagaaaaagacatagggaaaygtttcctttatgttggccttggcagtatatttttggatatcaaccaaaagctcaggcaacaaaagcaagaacaaacaagtaggattgcatcaaattaacggcttccacacagcaaaagaagcaatcaacaaaatgaaaaagcagcctatgaattgggagaaaatatttgcaaaccatataattggtaagggggttaatatccaaaatatctaagaaaatcaataatgaaaaaccaaaaaaatttaattaaaaaaatgggcaagaatctgaatacactttttttcaaacaagacataaaaatggccagtaggaatataaaatgttgtcaatatcactaatcatcaggaaatgcaaatcaaaactacaccaatatattaagtctggtattacaccacactgttaagatggctgttattacaaacgtaagagataataaggcatgggtgtggagaaaagataaacattatacattatacattatacattatacattatataccattggtggaa

SEQ ID NO: 377641 - DNA, 536 bp, Homo sapiens
  misc_feature (1)...(536): n = A,T,C or G
aaccaccatggcacgtgtatacctatgtaacaagcctgcaagttctgcacttgtatcccagaacttaaagtatattaaaaaaaagttaactatgcaaaatttgtgtgtatattttttaatttaattaattaattaattwatttatttatttatttagagatggagtcttgctctgtagcccaggctggactgcagtggtgcgatctcagctcactgcaaccttcacctcccaggttcaagcaattctcctggctcagcctcctgagtagctgggattacaggtgcccactactacactcagctaatttttttgtattttttgtagagacggggtttcaccatgttggccaggctggtctcaaactcctgacctcgtgatttgcctgcctcagcctaagcacaaaagggagccaccacacctggccaaatttgagtgtattttttatccaatattaaaatgccccgcccatgaggctgacatgcagtggacatgannnnnnnnnnnnnnnnnnnnnnnnnnnnnnnnnnnnnnnnnn

SEQ ID NO: 377642 - DNA, 560 bp, Homo sapiens
acaagaagagtaacttgcatttttgtagatgacttataaaacactaaataaaatgaataaacttgcactgtcattacctatgacatcacctacagatcactttagtaaccttttaattgatgtccttgctttcacgttgtcttccttcaaataaccatttatagcttcactatccacttccagggcttcccaacagtttctttttaattatttcaaatattaccttaaaatttatttttctcaaagacataccaagaagaaaattcttcatgggctaagaagaaaattatatagtatatatgctagcaatattcaatttagacaactgtcaaagtgcctaascatgatttaaaagatggtgcaggatttatccttttcaactttaaggtttcaacttaaatatttttctaagaaggtcattaaaaccatcaatccacccgcaaccaaacagtgcttgtcatgcactctagtgtccagcacagagtgtggcacatagtaggtactcaacaaataatggatgaatatattcattgatcaaggaactaataaaatcatattaa

SEQ ID NO: 377643 - DNA, 594 bp, Homo sapiens
gttattagaattttataaaatagtgttcaaaatatttcaggagtctctaatttctgagatcttttgtaattgcttttaatacaattattcaaaactattatgttgctactaatttttatttttcttctaaacgtgtaggcagattattctttaagaagtaattaattwggcaatagaattgaccctaattttaaactacatctttcttttttcttcattctttctcccttccttatttttacctgtttgtttttcacttatgaatcaccaggaaagtttgttgaatgaatattttattgccatgtgcttgtgccaatttctaaatagtatgtagagatgaatatacaaaacctaactccagccatcaagtgacttatagtccagtaaaaaacaaaagacgtgtaaatgaataaatgaagcagaaatacagtagatagatacatgagatcaagtggtgaaagatgattaggcatccatctgttaaacaaggcatggaaaaatatttcagacacaaagagaaaaataatccaaagcaaaatgatattttggaaccataaaatatcatattgtgtaaagaaaggaagcattaatggt

SEQ ID NO: 377644 - DNA, 549 bp, Homo sapiens
tctgagatcttttgtaattgcttttaatacaattattcaaaactattatgttgctactaatttttatttttcttctaaacgtgtaggcagattattctttaagaagtaattaattaggcaatagaattgaccctaattttaaactacatctttcttttttcttcattctttctcccttccttatttttacctgtttgtttttcacttatgaatcaccaggaaagtttgttgaatgaatattttattgccatgtgcttgtgccaatttctaaatagtatgtagagatgaatatayaaaacctaactccagccatcaagtgacttatagtccagtaaaaaacaaaagacgtgtaaatgaataaatgaagcagaaatacagtagatagatacatgagatcaagtggtgaaagatgattaggcatccatctgttaaacaaggcatggaaaaatatttcagacacaaagagaaaaataatccaaagcaaaatgatattttggaaccataaaatatcatattgtgtaaagaaaggaagcattaatggtaggtagc

SEQ ID NO: 377645 - DNA, 592 bp, Homo sapiens
ctttgggttcaatctgccctctcagagggtttggggacatagttgagccaagagtgttagaaagtcagctcagggccatttgaaagtgagtcctagagaaccacggggagaggtgagatgacttcaatagtgagagtctgtgagtgaaggattaaggtaatgccagggatgggtgaaacgttcattgatcacgtcacaggaattgtcatgacagcataaaaatgtctgaagagtgtctcaaaaagttcatgaaagtgtcagctttgtacagctgccagtrcagagactgtagagcagcttacactaccatctatcacatactgagaaagaatattcctgctcctctattcaattcttccaccattaacactagctgtgtagcaaaataatacatgactctctactcatgttaagtggcaagccctattcttgatttaggaattaaaagtttccattcaaaagtgttaattcatatttcaatcacgaattcaaaaataatactctttctctccagattgccaggccattgccatagaatgacagacaaaattatcatttgttgcctctctccagctcctagctgcagtttgag

SEQ ID NO: 377646 - DNA, 560 bp, Homo sapiens
aatagaaactaatttaaggagaggtagtactgctatctagagtgtgtgtgaaatgctaatggacctgaataatcaaagggcccctgggactggaatccaaaaggttaaggagaaaatagcaaaagatgcatctagaaggcagaagtctggctgatcaactgacgcttggaggtcttattagggaaatatggtgatgggcccaggtttgaaaaagggtggcacaaaatcaagtttttaacaagaaaactctgtcaccagtggagacagtagattagaagtgagtcagagttgatgggagaagattattttggagaaagtgccaggagtacagcttagaggtgacattagcatagattaaatggaagtataaaaaagtggacattttcaaacaagttttaggaatgaaattgaaaagatattatggattacaagaggcatgaggaaaagaattctaagaatgacttargtttctggaatgctgtatgaattagtggtggtgtccttgactactagcagtatcaccaagtgtaaacattttgaataacagaaggaagataggt

SEQ ID NO: 377647 - DNA, 480 bp, Homo sapiens
actatgtcgtccaaacaaacactgacatgaatatgacttccaataggcaagaaaagaggcctaggtcragatactgcaagacatgcaagcaatctagtaatggcataaaacctgctatccgaattggctaaaattatgtattctcccaaaataaagacttcagagtatgagtagatttttatttttacatagacaaagatactaattctttcataagatatggcatctctcgaatgctgaaactttggttcccatatatcataattattttctctgactcaataataaaattaaaaatctggggaatcaaaaaatgttgactgaaattctcctatttttaaggattttattgacagtgtaatatttattacccacaaaatgagcaggctgtggaaatttggcagtaaatttaaacataccctactgactgacatattacgatacttataatgacaaaccaaccaaaaacaatacaaacat

SEQ ID NO: 377648 - DNA, 480 bp, Homo sapiens
actatgtcgtccaaacaaacactgacatgaatatgacttccaataggcaagaaaagaggcctaggtcaagatactgcaagacatgcaagcaatctagtaatggcataaaacctgctatccgaattggctaaaattatgtattctcccaaaataaagacttcagagtatgagtagatttttatttttacatagacaaagatactaattctttcataagatatggcatctctcgaatgctgaaactttggttcccatatatcataattattttctctgactcaataayaaaattaaaaatctggggaatcaaaaaatgttgactgaaattctcctatttttaaggattttattgacagtgtaatatttattacccacaaaatgagcaggctgtggaaatttggcagtaaatttaaacataccctactgactgacatattacgatacttataatgacaaaccaaccaaaaacaatacaaacat

SEQ ID NO: 377649 - DNA, 486 bp, Homo sapiens
acaagttaagagttgagaatcagggagattggcttactggttaaaacatagggaaaggtaagttaaggatgtgtgaaattagaggggagagttagaattccaaagtcatagagaattcagttcaggatgtcagactgagtaaatatgcttacattagtttatttgaagaacaccactgatattctgaaaacaggaactggtatgaacagtagaccaaaataattctagaaatagttttaattatgagagataagactgacagaaaaagttgatgtcacctartgtaaaaaaaagggagttgctacagaaatgataatgatgatgatggtgttaatggtgggtgatgatgataatgatgatgatatttcaaagagaatcctggcaaaatcacagctctatgggtagactaatatcagaaacagagcaaggatttactaatggaattatttattcaaggagaaaatgcttcacgtcatggccatttgt

SEQ ID NO: 377650 - DNA, 583 bp, Homo sapiens
ttatctctctcataaacgtccaatgacacatggtaacacacgccagaaatagacctcataaatataagaaatgtgggaaaacatttaattttctctatgtacttcaaatgcataaagtaactcacattggagaaaaaccctgtgaatagaagaaaggtgataaagccttgagattttgaagttcttttcaaaagcatgaaagaactcacagtggagaaaaaccttataaatgtcggaaatggcataaagcctgtggatattccrgtcagcttcagaatcataaagtactcatacttaagagaaactggcaatgtaggaaatgcgggaaagaattcagttgtcttagttattttcaagcacgtaagagggttcacaatggtgaaaaatcttctgtggttaattaatatggtaaggaatttactctttctagttccctacagaaacatgaaacaaattatactggaaagaaaccctataaatgtaagaaatgtggtgaagtcttcagtcattcctcctccaagctaagtcaaaaagaatacatactggagagaaatcctatgattgtaaaaaaatgtgggaaagc

SEQ ID NO: 377651 - DNA, 567 bp, Homo sapiens
caaattcaccaatattcaatgttgataatattgtagcattatcagagagctgtgtatttttttttttttggtcatttacgtgtgtagacagtggtgtcttcttttcaatgtactaattgtatagcaaattacttaggtataagggtgagtttgatgagtcaacaggatttcatttctctttaaacttttcacatttccatcttgaaccagatgatattagaaaggaaaataaaataaaacatgaaaatattctgagcatttttctaattcttttttaacttttacttaggtatcttctagatatcatacaattaaccatttcatatagataattcaaacatttttagtragttttctctgattaaaccatcatcctaaataggttttggaacatttttctcccatcatgccaatttataattgattctggttcctgcctagacttaggcaaccacaaatctactttcgtcttgcttttgccttttgtgaagatttcatataaatggattcatagaatatgtgggcttatgtctagcttgtttcacttaccatgtgttttgaagttta

SEQ ID NO: 377652 - DNA, 615 bp, Homo sapiens
cgtgaacatattatatattggctaacataaactagttggtagacgttaaattgtttgcagcttttctctactaagaataatgctgctgtaaaaaattgcatgcartttttttctgaacatgtttttactcacagatactttgagatagatacagccgggcgcggtggctaacacctgtaatcccagcactttgggaggccgaggcaggcagatcacgaggtcagcagattgagaccatcctggctaacacggtaaaaccttgtctctactaaaaatacaaaaaattagccgggcgtggtggcaggcgcctgtagtcccagctactcgggaggctgaggcaggagaatggtgtgaacccgggaggcggagcttgcggtgagccgagatcgcgccactgcactccagcctgggcgacagagtgagacaccttctcccaaaaaaaaaaaaaagaaaaagaaatagataggtagatacatgcatacatatatacatacatagaatcttagaaatggtgttactgatcacctggtagttttagttttaacatttggagaaaatgccaaactatttttcacagtggttgcaccattttacagtacaatcagcaatgtatga

SEQ ID NO: 377653 - DNA, 615 bp, Homo sapiens
cgtgaacatattatatattggctaacataaactagttggtagacgttaaattgtttgcagcttttctctactaagaataatgctgctgtaaaaaattgcatgcagtttttttctgaacatgtttttactyacagatactttgagatagatacagccgggcgcggtggctaacacctgtaatcccagcactttgggaggccgaggcaggcagatcacgaggtcagcagattgagaccatcctggctaacacggtaaaaccttgtctctactaaaaatacaaaaaattagccgggcgtggtggcaggcgcctgtagtcccagctactcgggaggctgaggcaggagaatggtgtgaacccgggaggcggagcttgcggtgagccgagatcgcgccactgcactccagcctgggcgacagagtgagacaccttctcccaaaaaaaaaaaaaagaaaaagaaatagataggtagatacatgcatacatatatacatacatagaatcttagaaatggtgttactgatcacctggtagttttagttttaacatttggagaaaatgccaaactatttttcacagtggttgcaccattttacagtacaatcagcaatgtatga

SEQ ID NO: 377654 - DNA, 615 bp, Homo sapiens
cgtgaacatattatatattggctaacataaactagttggtagacgttaaattgtttgcagcttttctctactaagaataatgctgctgtaaaaaattgcatgcagtttttttctgaacatgtttttactcacagatactttgaratagatacagccgggcgcggtggctaacacctgtaatcccagcactttgggaggccgaggcaggcagatcacgaggtcagcagattgagaccatcctggctaacacggtaaaaccttgtctctactaaaaatacaaaaaattagccgggcgtggtggcaggcgcctgtagtcccagctactcgggaggctgaggcaggagaatggtgtgaacccgggaggcggagcttgcggtgagccgagatcgcgccactgcactccagcctgggcgacagagtgagacaccttctcccaaaaaaaaaaaaaagaaaaagaaatagataggtagatacatgcatacatatatacatacatagaatcttagaaatggtgttactgatcacctggtagttttagttttaacatttggagaaaatgccaaactatttttcacagtggttgcaccattttacagtacaatcagcaatgtatga

SEQ ID NO: 377655 - DNA, 615 bp, Homo sapiens
cgtgaacatattatatattggctaacataaactagttggtagacgttaaattgtttgcagcttttctctactaagaataatgctgctgtaaaaaattgcatgcagtttttttctgaacatgtttttactcacagatactttgagatagatacagccgggcgcggtggctaacacctgtaatcccagcactttgggaggccgaggcaggcagatcacgaggtcagcagattgagaccatcctggctaacacggtaaaaccttgtctctactaaaaatacaaaaaattagccrggcgtggtggcaggcgcctgtagtcccagctactcgggaggctgaggcaggagaatggtgtgaacccgggaggcggagcttgcggtgagccgagatcgcgccactgcactccagcctgggcgacagagtgagacaccttctcccaaaaaaaaaaaaaagaaaaagaaatagataggtagatacatgcatacatatatacatacatagaatcttagaaatggtgttactgatcacctggtagttttagttttaacatttggagaaaatgccaaactatttttcacagtggttgcaccattttacagtacaatcagcaatgtatga

SEQ ID NO: 377656 - DNA, 584 bp, Homo sapiens
aacaaaataatgacctccttgcttatttccctgaaacaaattctaaatcagtttctgaatactattaccycagtttttttgccaattgttggtgtagaatcctctagaatttctaattctacgaataaattcctcttctttctctctctctcttcctaattctctgataaattttatcaacatgatcactcacctcactaagaaatctactttcttttacttcccaacaacatcacgttgatttcttcccagctttctctcttattttgcttaaaaaacatcctctaaagtccactaaaaataaaaactttgtaaattttctaagtgcttattttaatttgaaatttgattcttttgctgtcatatttgtgatagttttattacacatgcaattctaaatgtattttctgcaatatatttagaacattattttgtttcttcattcagcactactctactatagttatttgtcataattattcattttcaggtaatagatgtttatccttctgaacacttttaacattttccctttgtcattaatgttttagaactatgatgtagttccttgtggaattgtgata

SEQ ID NO: 377657 - DNA, 584 bp, Homo sapiens
aacaaaataatgacctccttgcttatttccctgaaacaaattctaaatcagtttctgaatactattacctcagtttttttgccaattgttggtgtagaatcctctagaatttctaattctacgaataaattcctcttctttctctctctctcttcctaattctctgataaattttatcaacatgatcactcacctcactaagaaatctactttcttttacttcccaacaacatcacgttgatttcttcccagctttctctcttattttgcttaaaaaacatcctctaaagtccactaaaaataaaaactttgtaaattttctaagtgcttattttaatttgaaatttgattcttttgctgtcrtatttgtgatagttttattacacatgcaattctaaatgtattttctgcaatatatttagaacattattttgtttcttcattcagcactactctactatagttatttgtcataattattcattttcaggtaatagatgtttatccttctgaacacttttaacattttccctttgtcattaatgttttagaactatgatgtagttccttgtggaattgtgata

SEQ ID NO: 377658 - DNA, 565 bp, Homo sapiens
atttgaaatttgattcttttgctgtcatatttgtgayagttttattacacatgcaattctaaatgtattttctgcaatatatttagaacattattttgtttcttcattcagcactactctactatagttatttgtcataattattcattttcaggtaatagatgtttatccttctgaacacttttaacattttccctttgtcattaatgttttagaactatgatgtagttccttgtggaattgtgataattgcacatgccagagaaaatttaaaaaatagaagcaggagaggaatatttgcagaaataatttttatgattccacaaactaaaccatgatgcaagaactcaaatgagaagttgtcggagagagccaaagcaactcatttattatttagataagagaacacaaacacacagcaacacacactctcacacttacacagaagtccaccttttgtcatcaagtatttctctccgttttgaaaaaatatcctgccttcaattaaactagttgattcattaatatttctggtgataacagaaggatatagaaacatggccct

SEQ ID NO: 377659 - DNA, 620 bp, Homo sapiens
tttttattttacccaaatatacatttgctaaattgtgctgcatagaaagataaagagttaggctgtaaagttttcatgctggctcttaagaaaccaaaatctgacaaagccagaaggcttaacaaataaataagcagaccagaaaatgaagtcctggagatagtggtagattaactctgaagttccacaactgcttctcacttgggaacacttagtgattatgggtccaagtagagaatgcaaatcaggcttggccctgctaaaagtgacaaggaaatcagcagcacacacgtggaactggagggagaagataggagtcttgtaagccttaaagcataaacaatctcaccatcaagacatttagcaaattttaaaacagcatggaatgaaaaatcaaagacctcaacagaagcactctgaagtataraactgaaacttctggagtgtatcagagcagtggaggcagagtgctgccctgttccaaataaaaaactccgaattaatcaccctaggaatagtggcattccacaggtgggctaacttttatggaacttgcatcccagtcacaactctgcataacctctgattggattaatttggtaatcacaccctaccacaca

SEQ ID NO: 377660 - DNA, 583 bp, Homo sapiens
tctgtgtctaaaaggacaccaaatcctgctgaatctcaacactgacagcagttaaagccttatcttcagaagctgtccatcaaaataagctgtgtttgtgagacacagggccagaaattaaacttcaacttctcaaattccagtaactatcatggaagaggtgagtgcctgagattataagggctgattttgagagataacgtaagtttattttctctataaattagccattaatgtaaaaggcacactgatgcaagaaaagcatatagacmcctgtccaagtaccagggtttcatgaaacactagctggctccttaataaaagttgtaaaggttataaaagacaggaaaattatatgttatggtcaagatgaccaaaatgttatagattgttgataaaattttgaaaaataaatttaattagcttcatgttgtttttattagggcttattgtttggaatattaagtctcttctctcaaagaatgaaggttttcacctgtttttgaaatccttgagttatcactacggttaaatgaatgacttattttgcaatgatctttgatcctattttgtgatatcaaat

SEQ ID NO: 377661 - DNA, 583 bp, Homo sapiens
tctgtgtctaaaaggacaccaaatcctgctgaatctcaacactgacagcagttaaagccttatcttcagaagctgtccatcaaaataagctgtgtttgtgagacacagggccagaaattaaacttcaacttctcaaattccagtaactatcatggaagaggtgagtgcctgagattataagggctgattttgagagataacgtaagtttattttctctataaattagccattaatgtaaaaggcacactgatgcaagaaaagcatatagacacctgtccaagtaccagggtttcatgaaacactagctggctccttaataaaagttgtaaaggttataaaagacaggaaaattatatgttatggtcaagatgaccaaaatgttatagattgttgataaaattttgaaaaataaatttaattagcttcatgttgtttttattagggcttattgtttggaatattaagtctcttctctcaaagaatgaaggttttcacctgtttttgaaakccttgagttatcactacggttaaatgaatgacttattttgcaatgatctttgatcctattttgtgatatcaaat

SEQ ID NO: 377662 - DNA, 550 bp, Homo sapiens
aaaatatttaaaaataagttacaagctatattctcatgtggctctcttgcctcaaaaagatatattactaagtgcaatgtaatgaagtgtccctaacccaaaaataaaatttatgtccacccagaaactcatgtgactttatttggaaatagggttttgcagatataattagttaagatgaaatcatactgattttgtcgacctgaattcgacaatggatgtccttataagaaagccatgtaatggcacagagacatacagggagaattccatgtaacaggtgaagctaattgaagtgatatctacaagccacggaatgccaawggggaccataaccatcagaaactagtaagagcccaggaaggattcttccctagcctcaaatgtcaccactctgctgacaccttgattttacaattctagtcttgagaactataagaaaataggtttctattattttaagccaccctatttatggtattttgttatagcagtcctgggaaacgaatagactaatattgaatctatgagaattgtgcttcaaatgatt

SEQ ID NO: 377663 - DNA, 570 bp, Homo sapiens
atgtaaatgtcaggtgatttgcagtgatctagccaaagactggcagatcatttcaatccatcrattgtgctaagagcattaaataacacatattataattaagctatttaatctattgacccaatgctatgattagaatctggaagaaattagacaaataattacatgacagatttagaaaggagaaataaaccagatagcggattaatccgttatttctttgaagatatttagggcaagtgtagctgttgttccatttttttaaaaaaaaatgaggagaccctcattctaatattaagctatcaatctctaagaaacaaatatcttttgggagttaaccgttacttacaataacagtaagcaactcaacaaatataattattcctggactaattatagtattctatcatgaaacaagtgcttactaatcagatttccaatgagaccattactcttcagaaagagactgcctgaggggtagcataaaaaaccccttgtccctgttaccacaccaaattaaaaactccctagttctttcaaatacatgtaagacatatgtcttgcccatgt

SEQ ID NO: 377664 - DNA, 570 bp, Homo sapiens
atgtaaatgtcaggtgatttgcagtgatctagccaaagactggcagatcatttcaatccatcgattgtgctaagagcattaaataacacatattataattaagctatttaatctattgacccaatgctatgattagaatctggaagaaattagacaaataattacatgacagatttagaaaggagaaataaaccagatagcggattaatccgttatttctttgaagatatttagggcaagtgtagctgttgttccatttttttwaaaaaaaatgaggagaccctcattctaatattaagctatcaatctctaagaaacaaatatcttttgggagttaaccgttacttacaataacagtaagcaactcaacaaatataattattcctggactaattatagtattctatcatgaaacaagtgcttactaatcagatttccaatgagaccattactcttcagaaagagactgcctgaggggtagcataaaaaaccccttgtccctgttaccacaccaaattaaaaactccctagttctttcaaatacatgtaagacatatgtcttgcccatgt

SEQ ID NO: 377665 - DNA, 557 bp, Homo sapiens
gataggaataattaatgtggcagattagcaggaaaaaaaaggatgagtaaaaggagagacagaatgagaaaaaacataagaaaagataggaaaaaatatagataatattataattgatacaaatttgcaaactatycctaactttaattaccatttaatcagtaatgtcaacaggtttcaagagattccataaaattataatgttaatcttttctttgagtcaccagaaaggatttgttcaacatttgttttcatgtaacatagtgatgattgaaacccgaaatataaatgaatgccacataatgaaaagacacatgctgtgtgtgacagacaaacccttcatgcagcaggaacaagccatttttaaataaccttgttaatacccacactttacttgaaaatgtatcagaataatttaagataaaatatatacacaaaatttaatatttacaataatttgtcctgttatggtagtaaatataaatgcaaattatgtaaatatatgatgataaatcataagttacctgtgtattttgatacataactagtggttttgc

SEQ ID NO: 377666 - DNA, 557 bp, Homo sapiens
gataggaataattaatgtggcagattagcaggaaaaaaaaggatgagtaaaaggagagacagaatgagaaaaaacataagaaaagataggaaaaaatatagataatattataattgatacaaatttgcaaactattcctaactttaattaccatttaatcagtaatgtcaacaggyttcaagagattccataaaattataatgttaatcttttctttgagtcaccagaaaggatttgttcaacatttgttttcatgtaacatagtgatgattgaaacccgaaatataaatgaatgccacataatgaaaagacacatgctgtgtgtgacagacaaacccttcatgcagcaggaacaagccatttttaaataaccttgttaatacccacactttacttgaaaatgtatcagaataatttaagataaaatatatacacaaaatttaatatttacaataatttgtcctgttatggtagtaaatataaatgcaaattatgtaaatatatgatgataaatcataagttacctgtgtattttgatacataactagtggttttgc

SEQ ID NO: 377667 - DNA, 557 bp, Homo sapiens
gataggaataattaatgtggcagattagcaggaaaaaaaaggatgagtaaaaggagagacagaatgagaaaaaacataagaaaagataggaaaaaatatagataatattataattgatacaaatttgcaaactattcctaactttaattaccatttaatcagtaatgtcaacaggtttcaagagattccataaaattataatgttaatcttttctttgagtcaccagaaaggatttgttcaacatttgttttcatgtaacatagtgatgattgaaacccraaatataaatgaatgccacataatgaaaagacacatgctgtgtgtgacagacaaacccttcatgcagcaggaacaagccatttttaaataaccttgttaatacccacactttacttgaaaatgtatcagaataatttaagataaaatatatacacaaaatttaatatttacaataatttgtcctgttatggtagtaaatataaatgcaaattatgtaaatatatgatgataaatcataagttacctgtgtattttgatacataactagtggttttgc

SEQ ID NO: 377668 - DNA, 557 bp, Homo sapiens
gataggaataattaatgtggcagattagcaggaaaaaaaaggatgagtaaaaggagagacagaatgagaaaaaacataagaaaagataggaaaaaatatagataatattataattgatacaaatttgcaaactattcctaactttaattaccatttaatcagtaatgtcaacaggtttcaagagattccataaaattataatgttaatcttttctttgagtcaccagaaaggatttgttcaacatttgttttcatgtaacatagtgatgattgaaacccgaaatataaatgaatgccacataatgaaaagacacatgctgtgtgtgacagacaaacccttcatgcagcaggaacaagccatttttaaataaccttgttaatacccacaytttacttgaaaatgtatcagaataatttaagataaaatatatacacaaaatttaatatttacaataatttgtcctgttatggtagtaaatataaatgcaaattatgtaaatatatgatgataaatcataagttacctgtgtattttgatacataactagtggttttgc

SEQ ID NO: 377669 - DNA, 583 bp, Homo sapiens
tgaatgaaggaaacatagatacttccaataggatcatgatataattttttataataatttaatagttgcacatttggtgaaaaatccatttcactcttagagacttataaaattacatattactcttgagatgactaagaaagatgtgatgaatgaagttattcagttaatgtatttctaaaaatctttctgttgataattaaattctcttgaatcaatttttgattgagttgttgatatttatatttttatatactattatcttaagatatcttacattttaagaatcaaawttcttaagagggcttaattactgactctgaggtttcttaatattgtgacacctattttgcaagtttatgtgtattcaagcagacaatatcaattacataatgcctatcaacagccactaagtgattgtaaggtcaattctgatttcatgtatattgaaatgtgagaaaaacgtgtagccttaaaggatgaaataaaatgtaatagtgttttccttccatttacgaacaaatttaatgtaaataatttaatttcagacaatattttgtaaaaatacatttgttgaaaaatt

SEQ ID NO: 377670 - DNA, 607 bp, Homo sapiens
ataaactgtgaaatttatcatcattgaaatatgagattttggaattgaacaaaataatctccttctggtaaatacttaacatatttgtgagctgagataattttaattttgaaggaaaagaaattaccaccagttacatagatgatattgggaaccaagaatggttactctccctgctgctgctatgtaagccataccttctgattctgcttctaagtcaacaagtaaaaaacataaaataggctgggcacagggctcacgcctgtaatcccagcactttgggaggctgaggccggcagatcacctgaggtcaggagttcaagaccagcctgaccaacatggagaaaccctgtccctactaaaaatacaaaattagctgggtgtggtggcacttgtctgtaatcccacctactcagagggctgagccaggagaatcgcttgaacccagggggcagagcttgcagtgagccrtgatggcaccattgcactccagcctgggcaacaagagcgaaccttcgtctgaaaaaacaaaacagaacaaaacaaaacaaaaaataaataaaataataaatatgattattgtaaaagtttaaatatgaaacgttac

SEQ ID NO: 377671 - DNA, 579 bp, Homo sapiens
aaggaagactgcctcaaggcatttaacaatcaaactctgaaagatctaggataaacaaaagatcttagaagcagcaagataaaagaagcaaatagcacacaatggagctctaagacatctcacaatagacttttcagtgaaagtcctacaggccaggaaagagcggcataacatatttaaagatttaacatgctgaaataaaaaatactctagaatagtatacctaataaaaatatcctttcataatgaagaagaaataacaactttcccagacaaacaattttcccatggagggatttcatcaacatcagatctgtcctataagaaatgctcaatcagaaagaaaaggatggtaataagcaataaataatcaactgaagttacaaaactcactgctaataatgatttcaaagaaaaacacagaatattatcacaactgtgrgtggaaactatctttattcatactagaaaaactaaatgatgaaccaatcaaaaataactacaacaatttttaagacacagtaccataacatataaatagaaaaaaaaaaagctggtggacaaagtagagtttttatt

SEQ ID NO: 377672 - DNA, 569 bp, Homo sapiens
ggttcagtgattctataattaatatttctttacaagattaaagatattttcataaatggttttttaaagctgaatgctagaaatcattctttraatttgaattaaaatacatttgattttaatttattctattcctcaaatataagtttttaaaactatataagttgcttcatttttaatattaaatgtgggctattacttccattccaatgcaagtgaggcttcttggcagggggctgaggaaaggtagattttttttttaaaaaagacactaggaacacattgatttatacagctaaatgctaaaattggcataaaatcactatttgtatgtaggattgacagcatagatggtatgcctttaagaaacaaaatattgcaagaaactaaataaatgtggaactactgagctaaaactaataatgatgacaataataggtatgacaggcataatgataatcatgttgccttttcacgacaatcttaaagcacagatagcattaaagctgcataaatataagtacttggcttagtttagacactttaatctcaatttacacagtatgata

SEQ ID NO: 377673 - DNA, 569 bp, Homo sapiens
ggttcagtgattctataattaatatttctttacaagattaaagatattttcataaatggttttttaaagctgaatgctagaaatcattctttgaatttgaattaaaatacatttgattttaatttattctattcctcaaatataagtttttaaaactatataagttgcttcatttttaatattaaatgtgggctattacttccattccaatgcaagtgaggcttcttggcagggggctgaggaaaggtagattttttttttaaaaaagacactaggaacacattgatttatacagctaaatgctaaaattggcataaaatcactatttgtatgtaggattgacagcatagatggtatgcctttaagaaacaaaatattgcaagaaactaaataaatgtggaactactgagctaaaactaataatgatgacaataataggtatgacaggcataatgataatcatsttgccttttcacgacaatcttaaagcacagatagcattaaagctgcataaatataagtacttggcttagtttagacactttaatctcaatttacacagtatgata

SEQ ID NO: 377674 - DNA, 606 bp, Homo sapiens
ccaataattttatttcaattttatgttattatttgcagtgaaatccaaaacttactttgatactgaattatttctgctttccctgtgaaatgccccacttcttaacaataatccccagatgagaatcacaatgtagtgtaatcttccatgacaaaagtatgcrtactgaaaaaaaaatgcccagctctatgtgtgacttcctgactgtactgttttatcttagccactgatgtggtccccatttaccataatgtatctccatgatataacctcactttagtcctaatacttcagaaatagataatttttttaaaaaaatttattattcacaataatgaagatgtggaagcaacccaaatgtcaatcaactgataaatggataaagaaaatataaatacatattatagaatatttttccatcttaaaaaagaaatattttcatatgtgaaaacatcagttagttttacagatgtcattctaagtgaaataaccaaattgcagaataaaaactactacacaattccactttactgaagtatgtaaaatggacaaactcatacaagcataaagtagaatcgtgtttgccaggggttggggagagagaat

SEQ ID NO: 377675 - DNA, 606 bp, Homo sapiens
ccaataattttatttcaattttatgttattatttgcagtgaaatccaaaacttactttgatactgaattatttctgctttccctgtgaaatgccccacttcttaacaataatccccagatgagaatcacaatgtagtgtaatcttccatgacaaaagtatgcgtactgaaaaaaaaatgcccagctctatgtgtgacttcctgactgtactgttttatcttagccactgatgtggtccccatttaccataatgtatctccatgatataacctcactttagtcctaatacttcagaaatagataatttttttaaaaaaatttattattcacaataatgaagatgtggaagcaacccaaatgtcaatcaactgataaatggataaagaaaatataaatacatattatagaatatttttccatcttaaaaaagaaatattttcatatgtgaaaacatcagttagttttacagatgtcattctaagtgaaataaccaaattgcagaataaaaactactacacaattccactttamtgaagtatgtaaaatggacaaactcatacaagcataaagtagaatcgtgtttgccaggggttggggagagagaat

SEQ ID NO: 377676 - DNA, 627 bp, Homo sapiens
taggtaaaatttctatttcggcatttacagttaatacattgtatgttgctgaaaatgcttttatgacatgttggctctaaagatataacctgaacaattgtatcattttttcaattttgagggaaatgcttctttaracttatcaaaaaattgtcttttgaagcagaaaccatgagatgctacaaaaatctactaaattggcaaattaaatgctttgtgaagacagcattacacttaaattatgaatttgtaatttttctcttgctcttatcaatagaataacaaagtataaatggtagaaaataatcttatttctactataattcaaactataaattcaaaaatacaattcttgaaatagattggtggaacatagcctaattcagttttcatgttgtaaaacaacctaacacttttgttaatgttccaagcacttttttttttcttttgccatcagcataaatagtaaaagcgtattggatgccaaggatattgtcgtttctcacgttgaagaccatgccaaatttcaacatttaaaagtttttagaaaaatagcatcgttgataaaagttttcattgtgaaaagttaagagagttgggagtagtttcctcttttttggtgttttc

SEQ ID NO: 377677 - DNA, 627 bp, Homo sapiens
taggtaaaatttctatttcggcatttacagttaatacattgtatgttgctgaaaatgcttttatgacatgttggctctaaagatataacctgaacaattgtatcattttttcaattttgagggaaatgcttctttaaacttatcaraaaattgtcttttgaagcagaaaccatgagatgctacaaaaatctactaaattggcaaattaaatgctttgtgaagacagcattacacttaaattatgaatttgtaatttttctcttgctcttatcaatagaataacaaagtataaatggtagaaaataatcttatttctactataattcaaactataaattcaaaaatacaattcttgaaatagattggtggaacatagcctaattcagttttcatgttgtaaaacaacctaacacttttgttaatgttccaagcacttttttttttcttttgccatcagcataaatagtaaaagcgtattggatgccaaggatattgtcgtttctcacgttgaagaccatgccaaatttcaacatttaaaagtttttagaaaaatagcatcgttgataaaagttttcattgtgaaaagttaagagagttgggagtagtttcctcttttttggtgttttc

SEQ ID NO: 377678 - DNA, 559 bp, Homo sapiens
caactttccttcatattcctatttgaaatcatagctccaatcacttcgtctctttatcatggtttatttttattgtgtatataaaatcataatgatacattacatatttatttattcattgtttatttccacagtatcagtcagggatcttaatagcagtcaatgaaagtgattctgctaatgaagcgaaaatggtcattaaaaaaaaagaaaaataaaatcagttcacagaattgtttgtagagttggggaactagcctcagaactcgacaacatgatggagaaaaaaattgcccgtcagggaaacatcatgattgccattgcctcactgagccctggaggcaactgctgcttctaatgatactgccagcttcattgatgccttttctgtgcccaaaactcaatccacagctgctcctgaaattaagatgcctgctgaattagccaaaaattaattcccatctccttagagtttccttcctcaattsgctcacttccaaatcaaagtctctcattaatacgtttgaatggtatgggtttggctcaataaaatttgaat

SEQ ID NO: 377679 - DNA, 483 bp, Homo sapiens
ttttgatctcattacttgttattggtctgctcargttttggatatgttcctggttcaattttagtagcttgcatgtgtctagcaatttatccatttcttccaaatttttctatttctttctatatagctatttatagcagccactaacgatcctttaaattctgcggtatcagttgtgatgtctccttttacatctctgattttacttatttgggtctaaaagtttgtcaattttgtttacctttttttaaaaaacaactttttgtttagcgatcttttgtattattttcttcattttctactcatttatctctaatctttattatttattttcttccactaattttgtgtttgatttgctcttgcttttgaagttctttaatatgcatcactgggttgtttatttgaagtttttctattttttcatgtaagtacttaaagctataaacttccctcttagtactgcttttgctgtatcccata

SEQ ID NO: 377680 - DNA, 604 bp, Homo sapiens
tagttgtgggaggtggtatcccaacaatgaaccwtttggggccaaataagcactttaacacaacttactccatccctttccttaaaccaaagtctgtcttgcccactgggcatgtttaactttgactgctaattttatttccctgcagaggcaaaggaggcaggaaaaaggagggaaaataactgatggcatgtgggtgaggttttgtccaggaaataatttttaaaagatcctagccagtatagggatgcaggaagcagttggtgcctgaaactatattacccttgcatcacagattaagaagtaggagccagttgaagttaaataacttgcctacagttacacagcagttttcagtgttggggttggtactgggaactaggttattcattgctccagtgaggaaattggacaatccagcttttttgctgataaagatgctctcctaatatccctactcacgttttctttccttcttttctttggctactgtcttttaacatctaaaaaagtattctgctgataatctcaggtgtagaggctagttattaaatatatttagacttttaaaaccattagaattagctgagctgtaaggacagtg

SEQ ID NO: 377681 - DNA, 531 bp, Homo sapiens
tggtaaattacttttggcagcacatcactgagtaacactgagttaaatgtttatgagtcgcacataaggtaaagtagctgttttcaaagtgttaagttctctttggtcttgtccacaacatggatactgagaggtcytgataggccaatgtttcttttgaatatagccaacctatggagagaaaaatctgttaagtgtttctaggggttgggcaatgtgaaagggtattggtaagttatggtgaactggactcaaaatattactggaaaagaaaacagtccacaaaactaacaggaaactgttactttaaatcctttattttaaaattataatattccccttaaagacttctagcggtggggtgggagaatacaaaatatttaattttataaaagaaatagtctgctaatttacaaataatttaaaaatgaattagtcaatatttaaaatattaaataatgtgctgtaatcaacatttaaaatcatctacattcagatctgttatcctaaaattatcagtaatataatatg

SEQ ID NO: 377682 - DNA, 439 bp, Homo sapiens
agtattctgattttgactatatgtttatttttaccagtaagttttattctttcatataattttattttatcatctagtatccttttatttccactccaagagctttctttagcatttcttctaagtcttgtgatgacctccctcagttttcctttgtctggttatgttattatccctccttcatttttgaaggacagcttttgtggatatactgttttatttggcaggtttttttttttttttcttttagcactttgaatctattattccattccctcctggyttacaaggtttttcttgagaaatctactgattgtcttttggatgttcacttatatggaacaaggctcttttctttcactactttcaagatctctctttgtctttcacttttgacaatttggttataatatgtcttagagcattcctgtttgggatc

SEQ ID NO: 377683 - DNA, 635 bp, Homo sapiens
ttcttataggcagatagcttttcaaaatgaagggccagacctagctcagtaatttacaaaataagcataagtttttcaagtctacttgacaatttatagttcttactcttcataggactttctgttgagagaaaccacagaagccaggtacctcaattttcaaaagtaaaattggctttattgatgagtaaagtgtacattttataataaccatataataatgatacaacatccagctctgtagtgggtccagaaggactaaatacatattaaataaaataaaattattttgaattacatagtcttctctcaaaatatcaaatttaaatgtaaagcatgtaaaatagtcctgtggatgcttcctcagtcatgggtgaaattctttttgtttaaatttaggtttagagctcttctatggagtsgttgtacccacaggcccaggtgagatccttgttagtactctaagtgaattagcaagtagatttattaatggcttaaggggcatctctagccaggcccaactagtatgaagggaagatgaactatttctgtattctgtaacatagaattggacctatcccactggagaacacagctatgccaacctagaagtaaaaagaacttcaaacaaacaa

SEQ ID NO: 377684 - DNA, 635 bp, Homo sapiens
ttcttataggcagatagcttttcaaaatgaagggccagacctagctcagtaatttacaaaataagcataagtttttcaagtctacttgacaatttatagttcttactcttcataggactttctgttgagagaaaccacagaagccaggtacctcaattttcaaaagtaaaattggctttattgatgagtaaagtgtacattttataataaccatataataatgatacaacatccagctctgtagtgggtccagaaggactaaatacatattaaataaaataaaattattttgaattacatagtcttctctcaaaatatcaaatttaaatgtaaagcatgtaaaatagtcctgtggatgcttcctcagtcatgggtgaaattctttttgtttaaatttaggtttagagctcttctatggagtggttgtacccacaggcccaggtgagatccttgttagtactctaagtgaattagcaagtagatttattaatggcttaaggggcatctctagccaggcccaamtagtatgaagggaagatgaactatttctgtattctgtaacatagaattggacctatcccactggagaacacagctatgccaacctagaagtaaaaagaacttcaaacaaacaa

SEQ ID NO: 377685 - DNA, 532 bp, Homo sapiens
tatcgcattgttgtaaagataaagaatataaaaaacactgtccctagaagacagtaaaagctcaatgaatgtcattttttatttttctattaatattataactatcattatcaatctcagaagtttgccatgtttcataatcttttgctggctcatgtttacttcattagctgagcaagtgaaattcatacactaaaataaatacagataattgaaattaattatagagaacagtacaataaacgtattataagaaaacactaagaatattttcatagctttggggtagaaaaatgttccttggcataatccaaggtaaagaccctcaaaaagttgagagatatgactacataaaaattgaaaacatctttagagtaaataattccatataaaagttagaagtcaaatgccaaaagggtgaaaatattttatatatgtcaaaaagtgagtatctttaaaatacagtcttacaaaataatgagagatacayataagcatgtatgggagtgtgtaaaacattttttacagcaga

SEQ ID NO: 377686 - DNA, 623 bp, Homo sapiens
catattcatggacatatttctggactcttattccaggaatctatttatttacccttgcatcaatgatgcatgactaartagtgaacatttagaagaaatcttaatatctggtagtgtaaatcttttagctgtgctcatcttttagattcttttagttagtcttgttcctttttatttccataaaaatgttagaatctgcttgttaatctctacaatatgtaatttgctgggattttgattgagatggtattttgggaatactgatatctaatctataaatgcattataattcatacttattttattcttctttaatcagtaatattttatagttttctgcacagtggacttgcatactttttgttagattcatttctacaattagattttttaatgctcttgtaattggtatcattttaagttttattttctaaatgtgtattgttactatataagaaaacaattcatatctatctatctatctatctatgacacagagagagagagagagtcagaaagagagaggagagagagagattcaccttggccaggaatcttgctaaatttacttattaattctattagactttgtgggttcttttgaattttttataacacagtca

SEQ ID NO: 377687 - DNA, 576 bp, Homo sapiens
ttggtatttgacttgctttcattaccatagtgcctcctcaaatagatatccccttaaagtagtgactcagaagactcccagacacatcctagggttaacacatttgaataagccaatctagcttttggatataaaatggaggagagctgtcattaaagaaaatctgggaaaaaatgtctccaagaataaatatttgactctggacatcctgttttctactagtagaaattccctaatcaatactctcccatgaaactcattccccttattcagcttcagcataacacacttatcstaacttttactctttcaggttacagaatcacatcatattttctcaaagcaaggtaaatctgtgtttgaaattcaaatgaatcttttatatctttcctaagtttctaccctcaattccttcctgacctctggctggccaccaacctcctactcctaaaatagtccttttttttttctgcaaatggcaccacccaggtactcgagaaaaacatcttgagagtcatcctaaacttctctttttctttaacagcatccaacttccaccccttcaccgatacagta

SEQ ID NO: 377688 - DNA, 484 bp, Homo sapiens
ttgaaactaaggcaataaactagacttctttatggcagaacttgagaaatatcagggtttatttcttttatctctgcaattcacccacatttaaacattcttgcgagtaaaagaaatttgaataatttctaattggttatacagttttgagggtttcccattcataagagaccatattatataattgattattttttcctccgagttgaagctctatatcaccccagagtttaaaactgtatggaagaataggtattgggcttttctgtaaytgatgtagatacaatgaataataaatatgcttgttataccaagtagcatgctggttaagatcacagactttgaggtctcagtgatgtaactgacggaatactcattgcatggcatcaggtctcatgggttctaaggatctcgaatagctgtgtcaggtaagagtttgcccacaggaagtgctccaaatagaattaagagtcataagaacctg

SEQ ID NO: 377689 - DNA, 545 bp, Homo sapiens
tttaaaaagaaaactgaaagctaacacattcatatgtgtacaagtactcagtaaaacgtggcccaaatatacaatctaaaccactgcatatacatttttgaggaggcatagcacggtgtttgctatagtatcataagaagttatcttaactcataaggatatttgcatttttatttcatgttttcttttaagaaaagcaaatcccaaattgcttttaacctatttacttgctcattcttattaacagagagttcgcaaagttctatgatgtataatgtactggtcatcactggtgagtttaaaagtatgcaaagataaaacacaagccctattctcaaaatagtaggtaaggttagagatatttgcataaactcagataaaccaaagaaaataaaaagaaaatgggtggaaagaaataaagatgcaaagggtaacatgttcagtacagcttagtacytaaggcattgacattaaaacatggcttaatatttcctgttttagcagaaaggctaatagtagggtcctacccatatttagatgcaagg

SEQ ID NO: 377690 - DNA, 604 bp, Homo sapiens
taaaccaaagaaaataaaaagaaaatgggtggaaagaaataaagatgcaaagggtaacatgttcagtacagcttagtacctaaggcattgacattaaaacatggcttaatatttcctgttttagcagaaaggctaatagtagggtcctacccatatttagatgcaaggatgccaaacaaatggatgggttgcttttaaatttctttagtaaagaattgaagctggatgggaacaggcaggatgttgagtttactttaaagccaatttggtgattttgactatagaaagatttaactaaaaacagctctcctattaaaaattgaatttgatgttgtgttcccattagaaaatgatctctctaaatttgctatgaaatctcaatgatgaccttgatgccacatttactaataatctccacagagatttaggcattcaaagtttcaaaagcagttttaataatggaaatgcaatacctaaacatatgcttgattatataatmtagtacatctacagtaaaatgcccattaaaattttaaaaatctgaggattttaattgactatatcattaatatgcatgcacagtatttttgcaaacaacaaacca

SEQ ID NO: 377691 - DNA, 510 bp, Homo sapiens
gctgaaatgaaagaagaatcattaagggtaactagagacaagggacaggtaacctacaaagggaatcccatcaagctaagagtggacctttcagcagaaatgctgcaagccagaagagactgggggtctatattcaggattcttaaagaaaaaatgtttaaccaataatttcatttccagtcaaactaagctccgtaagtgaaggagaaataagattcttttcagacaagaaaatgctgagggaatttgttaccaccagacctgccttacaagaaatcctgaaaggarcaataaatatgtaaaggaaagaccattaccagcccctacaaaaacacacttaagtacatagacaagtgacactaaaaagccaccacacaaataagtctgcataataaccagccaacaacacaaacacatgatcaaatccacaaaaatcaatattaatcttgaatgtaaatgggctaaatgccccaattaaaaggcacagagtggcaagctagataaaaaagc

SEQ ID NO: 377692 - DNA, 510 bp, Homo sapiens
gctgaaatgaaagaagaatcattaagggtaactagagacaagggacaggtaacctacaaagggaatcccatcaagctaagagtggacctttcagcagaaatgctgcaagccagaagagactgggggtctatattcaggattcttaaagaaaaaatgtttaaccaataatttcatttccagtcaaactaagctccgtaagtgaaggagaaataagattcttttcagacaagaaaatgctgagggaatttgttaccaccagacctgccttacaagaaatcctgaaaggaacaataaatatgtaaaggaaagaccattaccagcccctacaaaaacacacttaagtacatagacargtgacactaaaaagccaccacacaaataagtctgcataataaccagccaacaacacaaacacatgatcaaatccacaaaaatcaatattaatcttgaatgtaaatgggctaaatgccccaattaaaaggcacagagtggcaagctagataaaaaagc

SEQ ID NO: 377693 - DNA, 510 bp, Homo sapiens
gctgaaatgaaagaagaatcattaagggtaactagagacaagggacaggtaacctacaaagggaatcccatcaagctaagagtggacctttcagcagaaatgctgcaagccagaagagactgggggtctatattcaggattcttaaagaaaaaatgtttaaccaataatttcatttccagtcaaactaagctccgtaagtgaaggagaaataagattcttttcagacaagaaaatgctgagggaatttgttaccaccagacctgccttacaagaaatcctgaaaggaacaataaatatgtaaaggaaagaccattaccagcccctacaaaaacacacttaagtacatagacaagtgacactaaaaagccaccacacaaataagtctgcataataaccagccaacaacacaaacacatgatcaaatccacaaaaatcaatattaatcttgaawgtaaatgggctaaatgccccaattaaaaggcacagagtggcaagctagataaaaaagc

SEQ ID NO: 377694 - DNA, 537 bp, Homo sapiens
ttattatcaataggtgggacctgagcagtctgatatctttctggccttgtatgagtcactgtgcagaagtacagattaaactaaatgatgaaagcttttatcagatgataaatgggatctcaaataagtactcagacaatacaactgtacaatggaaaatccatactttagtgtcctaaaagaggcatggcactctgcttcaaatgtatttttaaaatakgcattcaccaaacaaatgctgagtgtcccctgtgcttagcacagtatcaggtgcaggggacacagtggagagcaaccagacaaggtcttgccctgtggtccagcgacctagtaaatggaaccccacccaagttctgaatgaggagggaggagtgccactggaaagatgatgtgaaaatcatcccagaaactgagatctttcaaatccaggacacctccatcatttcactgtctatgccatcttcctttttcctcccaaattactttccagaatagttgccctcacccgcacctctcgccagcaggacacaaagagtt

SEQ ID NO: 377695 - DNA, 478 bp, Homo sapiens
acgaccaccaatcatccaggacaaaattaatgtttgagtttgtgcataaagggttgatttggacttcacaggattatttcttctttgaaatgtgggaaatcatttgttcctacgcaattcacaaggctatctggttcaacccatgctttcccaagtcaaaatgttctttcccacagcccagcaagataaagtactcaggacagctggattttaagaacacctttgtgarttgggtctttattgggataatcagagaaaatgactacatttaggtcttctttcatattttatactagtaccagaaaatacaaattgggtgcagaaaacctgggtgcatgaacattgcatgtttaaaccaagctaaaaagagaatttgtagccaaactacaatggaacttattgatgatggctagagaactgctatgtggtaattttatgtttgacatgatatgtagttctctttacttttatttggaaa

SEQ ID NO: 377696 - DNA, 611 bp, Homo sapiens
ttacaaggttagttgcaaacgtggacaagacaactctggtggtgagctsttctctcggaattaatacatttcaaagtcgagagccaggcaagtggcaatgctaatcaagctagtgacagcattaatctcctttggctcagctcaaaataggatatgccacaggtgaccccaagtccttccctccccttctcaagccattagctgaacatcatatttctttctgctgccaacgccggcgccagcagcagcacaattcaaatgggggaaagagcacatgtgacaagaacagcttattaactctgtccgggaatttctgtgctcacctatggctggttctaaggtattctctccatttgccaaaagtaatgagaggacagccctttgccaattaccctacacacctcacagaaagatgaacagctaaaagtattaagattcaaatttaagttgtgtgttacaacaaccaacgaaaggtttttgccaagggaaatttcaggaagtgatttaaatagaaatgaattgtcaagaaaaacctaggtgtcgctattctattgcagtatctcagtcatgacaaggtgccacaaatgatgtgaaattacggtctgacaagg

SEQ ID NO: 377697 - DNA, 601 bp, Homo sapiens
gcttctgttggcagcttcccactcttgtcaagcagagtctaagtcattgctgctcatttccagatctgaagcacatctttatttctcttctccctcctgcaacatgtggtcttcaggaggtcgccatgttctccccttctgaattacaaattctagcaaaagtctctgaatctattcctttggagaagaaagtaagggaagaaamtaccatgaaagcactttccccaactcctccaccatgaacaccttggatcagactgcaaccaggttgacccagtggggccccagattctgcagtgaagaagccatgtttagggacccctgaccccacattcagccacagcttgttggaccaactgtgaacacatgacccaagagccatcaaacagtgggctggcaggtgacttgaagcagaatcccagcagcaggtgacagggaatatgtatacctcagaaaagggggagtaagatgcaatttagagttagaaatgcatggctggagaaaaatcacacctgctgttttcacaatacacattatagaaaggagtgtttgatgactttctgggcctgtggagatgcacaggagatagtgatgtgagatt

SEQ ID NO: 377698 - DNA, 569 bp, Homo sapiens
aagagctcctcagatcaaaacgtaagccatataaccggccttggcaggcccggtgcacatcaaggccgcacttcagatcatcgcggccccttcagacccctcgcagccactgacatgtttactacttttattttccctggcagatgtttggcagacatctcgtctcagaagattcgtgcctttgtctcagagtcgagggttaataggacccttaattgcggtctcagttataataagatcctgcctttttaaaaagaaatgccttctacaagcttagtaattggtcttcccatttgagatgatataatctccaagtcacagtacaaagttagaacatgaagggaaatggacaggaccctgtccccagacaccgtccrtggcatctgtggctggtccccagagccagtgaaagggaggtaggtgcttggaccagtgctcccaggtggctgtccccggaccccttcagggtcctcctggtggccagggcccctgcggacagtttgagcagtaactaagctcaggggcgctggtaagagctgaattttatccctgaaaaactcatatgttta

SEQ ID NO: 377699 - DNA, 498 bp, Homo sapiens
cttaagcctccaatgtgtgttactttgtaaacattatgtaaattcccaataaccagccaggttgtcatcagtactaacctttgaactcacgtgaacgagactcttcttaaacttctgagaggtgacagcgtgctggcagcccccacagccctcgctcgctctgggcacctccttggcctcggcgctcactctggccacacttgaggagcccttcagcccaccgctgcactgtgggagcccctttctgggctggccaaggccggagctggctccctcggcttgaggggaggtgtggagggagaggccacgggcgggaaccatggctgcgcagggcgcttgcgggccagtgcaagttccgggtgggcgtgggctccgtcggcccctcaggccccccactctgagcggcyggccggccccagcgggccggggcagtgagaggcttagcaccctggccagcagctgtggagggtgcactgggttccccaacagtgccggccc

SEQ ID NO: 377700 - DNA, 516 bp, Homo sapiens
gacagatcaagaagactgtgggcggtttggtcattcttcttttcctgcctctggcacacctcaccacctacatattttcatgcatctggctttggatcatagaatcctagacattatttgggtggcatggattcatgaacacccataaacttggatgggggaaaaaatgacatctttattttcattaacttctaacttaaatttagtatttccttcaaatatgaatgcaggcagcaaacctagtctcagagactttatggccaagagaaatcacagatattttcatatcacattaagcttgtgcaggtatctcaaaatatttactctcatcactatttcaaaatttcagtygctgttagagctgccatgagagcttgctgtttaatgtggtaataaagcccatatatcacaaccactaaatccccaatttgaggtatatatatatatttgattattatatttaaccattatattataattggtttccttagcaattctatgtattttattttatgc

SEQ ID NO: 377701 - DNA, 520 bp, Homo sapiens
ttaagagataggtaatataaaaatatgtaaattaagtcaaaatataggggtgggatggagttaaagtgtagagtttatttttctcattgtttgtttatttctattattttctttgtgatctaagtaaagttaccaactttttaaaataacttgttttatctataagatgtttttgtaagcctcatggtaaccacaatgcaaaaacctatggtatattcactaaaaatgaaaagcaatgaattaaaacatactttcggagaaaaatcacataactacaaatgaaracagtaagaaaggaagagagaagttacaaaacaaccagaaaacaagcaataaaattgcattactaagtcttcacttatgaataataacactaaatattaatggactcaattctccaattaaaagacacaaagtggcagaatggataaagaaacaagacccaactatatgttacctacaataaacacattttacctattaagacacacaaacactgaaggggaaaggatgaaaaaca

SEQ ID NO: 377702 - DNA, 520 bp, Homo sapiens
ttaagagataggtaatataaaaatatgtaaattaagtcaaaatataggggtgggatggagttaaagtgtagagtttatttttctcattgtttgtttatttctattattttctttgtgatctaagtaaagttaccaactttttaaaataacttgttttatctataagatgtttttgtaagcctcatggtaaccacaatgcaaaaacctatggtatattcactaaaaatgaaaagcaatgaattaaaacatactttcggagaaaaatcacataactacaaatgaaaacagtaagaaaggaagagagaagttacaaaacaaccagaaaacaagcaayaaaattgcattactaagtcttcacttatgaataataacactaaatattaatggactcaattctccaattaaaagacacaaagtggcagaatggataaagaaacaagacccaactatatgttacctacaataaacacattttacctattaagacacacaaacactgaaggggaaaggatgaaaaaca

SEQ ID NO: 377703 - DNA, 554 bp, Homo sapiens
aacaaattttctttattcattcatctgttgatggacacttacgttgcttccaaatcttagctattgtgaacagtcctgcaataaacataggagtgcagatgtatctttgatatactgatttcctctcctttggatataaacccagcagtgggattgctggggccatatggtagctttattttagttttttgaggaacctccaaactgttctccataatagttgtactaattaatattcccaccaacagtgtacaaggattccctttttccacatcctcatcaatatttattgtcttttgaacatgaaccattttaactgggatgagatgrtatctcattgtaactttggtttgcatttctctgatgatcaatgatgttgcgcaccttttcatatgcccgttttccatttgtatgtcttattttgaaaaatgtctattcaaatcttttgcccatttttttgatcagattgttaggttttttttcttacagagttgttagagcgccatatatattctggttattaataccttgtcagaagtgggggtagtttgcaa

SEQ ID NO: 377704 - DNA, 554 bp, Homo sapiens
aacaaattttctttattcattcatctgttgatggacacttacgttgcttccaaatcttagctattgtgaacagtcctgcaataaacataggagtgcagatgtatctttgatatactgatttcctctcctttggatataaacccagcagtgggattgctggggccatatggtagctttattttagttttttgaggaacctccaaactgttctccataatagttgtactaattaatattcccaccaacagtgtacaaggattccctttttccacatcctcatcaatatttattgtcttttgaacatgaaccattttaactgggatgagatggtatctcattgtaactttggtttgcatttctctgatgatcaatgaygttgcgcaccttttcatatgcccgttttccatttgtatgtcttattttgaaaaatgtctattcaaatcttttgcccatttttttgatcagattgttaggttttttttcttacagagttgttagagcgccatatatattctggttattaataccttgtcagaagtgggggtagtttgcaa

SEQ ID NO: 377705 - DNA, 554 bp, Homo sapiens
aacaaattttctttattcattcatctgttgatggacacttacgttgcttccaaatcttagctattgtgaacagtcctgcaataaacataggagtgcagatgtatctttgatatactgatttcctctcctttggatataaacccagcagtgggattgctggggccatatggtagctttattttagttttttgaggaacctccaaactgttctccataatagttgtactaattaatattcccaccaacagtgtacaaggattccctttttccacatcctcatcaatatttattgtcttttgaacatgaaccattttaactgggatgagatggtatctcattgtaactttggtttgcatttctctgatgatcaatgatgttgmgcaccttttcatatgcccgttttccatttgtatgtcttattttgaaaaatgtctattcaaatcttttgcccatttttttgatcagattgttaggttttttttcttacagagttgttagagcgccatatatattctggttattaataccttgtcagaagtgggggtagtttgcaa

SEQ ID NO: 377706 - DNA, 554 bp, Homo sapiens
aacaaattttctttattcattcatctgttgatggacacttacgttgcttccaaatcttagctattgtgaacagtcctgcaataaacataggagtgcagatgtatctttgatatactgatttcctctcctttggatataaacccagcagtgggattgctggggccatatggtagctttattttagttttttgaggaacctccaaactgttctccataatagttgtactaattaatattcccaccaacagtgtacaaggattccctttttccacatcctcatcaatatttattgtcttttgaacatgaaccattttaactgggatgagatggtatctcattgtaactttggtttgcatttctctgatgatcaatgatgttgcgcaccttttcatatgcccgttttccatttgtatgtcttattttgaaaaatgtctattcaaatcttttgcccatttttttgatcagattgttaggttttttttcttacagagttgttwgagcgccatatatattctggttattaataccttgtcagaagtgggggtagtttgcaa

SEQ ID NO: 377707 - DNA, 641 bp, Homo sapiens
caaaatttaatttaagttgacccttcagaatacagactcaaagggtaaccaagatttcagggatgatgttcatcctatacttagagagcccctgttgtaaccccattccaaccatgctcctctgcaccaggtgagcagtctgtgaacaaaaaggcggttctcacctttaccccctacctgactttcttgatctcattctrggtatccaaggccctggtattccctgtccacacagattttcttccaagccctgtatagatgtctttctcagatttgtcctgtagagggtacctgtacctctggtgcatgtgtcccccagccctgagggtggctcaagtttggctgtttatagatagaagcagtgattgaagcttggatgagaggcgggagtggtcatacataggctggcacatgagcaattttgagagcttaaagaatccttaaacttgaagtttggccttctgagtcatttgaagctatatttgccaaagtagtataagaaaagattatttaggagtttgcctgattcatgaataacgtgtacctatttagacataaaagcacgtgggcctccatggttctctttccctgtgaatgataggatacacctgatattcagaatacttagtggggagaggggt

SEQ ID NO: 377708 - DNA, 601 bp, Homo sapiens
cctgttgtaaccccattccaaccatgctcctctgcaccaggtgagcagtctgtgaacaaaaaggcggttctcacctttaccccctacctgactttcttgatctcattctaggtatccaaggycctggtattccctgtccacacagattttcttccaagccctgtatagatgtctttctcagatttgtcctgtagagggtacctgtacctctggtgcatgtgtcccccagccctgagggtggctcaagtttggctgtttatagatagaagcagtgattgaagcttggatgagaggcgggagtggtcatacataggctggcacatgagcaattttgagagcttaaagaatccttaaacttgaagtttggccttctgagtcatttgaagctatatttgccaaagtagtataagaaaagattatttaggagtttgcctgattcatgaataacgtgtacctatttagacataaaagcacgtgggcctccatggttctctttccctgtgaatgataggatacacctgatattcagaatacttagtggggagaggggtggaataatatagcagaatagaagactccatggatcattccctcccacaag

SEQ ID NO: 377709 - DNA, 641 bp, Homo sapiens
caaaatttaatttaagttgacccttcagaatacagactcaaagggtaaccaagatttcagggatgatgttcatcctatacttagagagcccctgttgtaaccccattccaaccatgctcctctgcaccaggtgagcagtctgtgaacaaaaaggcggttctcacctttaccccctacctgactttcttgatctcattctaggtatccaaggccctggtattccctgtccacacagattttcttccaagccctgtatagatgtctttctcagatttgtcctgtagagggtacctgtacctctggtgcatgtgtcccccagccctgagggtggctcaagtttggctgtttatagatagaagcagtgattgaagcttggatgagaggcgggagtggtcatacataggctggcacatgagcaattttgagagcttaaagaatccttaaacttgaagtttggccttctragtcatttgaagctatatttgccaaagtagtataagaaaagattatttaggagtttgcctgattcatgaataacgtgtacctatttagacataaaagcacgtgggcctccatggttctctttccctgtgaatgataggatacacctgatattcagaatacttagtggggagaggggt

SEQ ID NO: 377710 - DNA, 589 bp, Homo sapiens
ggtggctcaagtttggctgtttatagatagaagcagtgattgaagcttggatgagaggcgggagtggtcatacataggctggcacatgagcaattttgagagcttaaagaatccttaaacttgaagtttggccttctgagtcatttgaagctatatttgccaaagtagtataagaaaagattatttaggagtttgcctgattcatgaataacgtgtacctatttagacataaaagcacgtgggcctccatggttctctttccctgtgaatgataggatacacctgatattcagaatacttagtggggagaggggtggaataatatagcagaatagaagactccatggatcattccctcccacaaggacaacaatttaacaactatctacgcacaaaaaaaaaaacctcataagaaccaaaaatcaggtaagcactcayagtaccttgttttaacttcatattgctgaaagaggcactgaagagacagaaaaaacagtcttgaattgctgacatcccccatcccccaccatctagcagtgaggtgaggtgtggaaagcatttctgtgcactgggggagggagggtgcagc

SEQ ID NO: 377711 - DNA, 605 bp, Homo sapiens
agaggggtggaataatatagcagaatagaagactccatggatcattccctcccacaaggacaacaatttaacaactatctacgcacaaaaaaaaaaacctcataagaaccaaaaatcaggtaagcactcacagtaccttgttttaacttcatattgctgaaagaggcactgaagagacagaaaaaacagtcttgaattgctgacatcccccatcccccaccatctagcagtgaggtgaggtgtggaaagcatttctgtgcactgggggagggagggtgcagcaattgtgaggcattggacttagtgctgtcctgttacagcaaagaggaaaacyggaacaaactcagctgacatctgcccactgatggaacatttaaaccagccctagccacagaggaatcactgatcccagcagtcagaacttgggttcttgcaagccacaccaccatgagctaaaatactctggggccccagataagcttgaaaggcagtgtaggccacagggactgcaacttctaggtgagtcctgggcccagagccagtggcctggggggacacataagctactgagacaacagctggggtggctaaggaagtgctggcat

SEQ ID NO: 377712 - DNA, 551 bp, Homo sapiens
atggttctctttccctgtgaatgataggatacacctgatattcagaatacttagtggggagaggggtggaataatatagcagaatagaagactccatggatcattccctcccacaaggacaacaatttaacaactatctacgcacaaaaaaaaaaacctcataagaaccaaaaatcaggtaagcactcacagtaccttgttttaacttcatattgctgaaagaggcactgaagagacagaaaaaacagtcttgaattgctgacatcccccatcccccaccatctagcagtgaggtgaggtgtggaaagcatttctgtgcactgggggagggagggtgcagcaattgtgaggcattggacttagtgctgtcctgttacagcaaagaggaaaaccggaacaaactcagctgacatctgcccactgatggracatttaaaccagccctagccacagaggaatcactgatcccagcagtcagaacttgggttcttgcaagccacaccaccatgagctaaaatactctggggccccagataagcttgaaaggcagt

SEQ ID NO: 377713 - DNA, 597 bp, Homo sapiens
cccctaatagtaaaagaagtttgaaaatgtatctgtaatatatgtatatttattgacacattgtgatgggcactgccacgcactgcccagagtccccagagaaggacatgttgccctgtgctgtgggcagagagcccccagtgatcagttcttcagggatgctgcaactgcagagggccacctggatgaatgcatgtccctctcaagacagcctatatgcagtgactcatccgtgcaggtatataaaggcctggccacctgggcccagctctagagagctctgaagggccattctagctcccatgctctgcatggcgttgacccaggctgtcacagagcctgtgtcacagatggacctctccttctgctccaccctgattccttctgtccttcgtacagatgtcaatgcccaggwtatgccctagcaaacatcccacatgctccactccttcccagagtctacttcccaggaaacccaacctgtaacacaaactacatatgcaaacatctcaattactttgttaaacattagcaaagcttaatatctttatgatttgaatacctcagcctcggaaatggtagtgaggagaccagaat

SEQ ID NO: 377714 - DNA, 617 bp, Homo sapiens
agtacttccagcatctgactttttacaggccaggagagagtgacatgaagtatttaaagtgctgaagaaggaaaaaaccttttaccctagaatagtatgtccagtgaaaatatccttcaaacatgaaggagaaagaaatacttttccatgcaaaagctgagggrtttcatctgtcctacaagaagtgctaaagggagtacttcagtcggcaagaaaaggatgttaatgagcagtaagtaatcaccgaatgaaggcacacaactcactgctaatagtaaatacacagaaagacacagaatattataacactgtaactgtgttgtgtaaactactcttatcccaagtagaaagactaaatgatgaaccaaccaaaaataactacaacttttcaagacagacagtacaataagatataaatagaaacaacagaaaattaaaaagcaggggaagaaaattaaggtgtagagcttttattggttttctttttgtttatgccaacagtgttgttatcagcttaaaacaatgggtttttagatagaatttgcaagcctcatggtaatcacaaaccaaaaaaaaaaaaaaaaaatacaatggatacacaaaaaataaaaagcaag

SEQ ID NO: 377715 - DNA, 617 bp, Homo sapiens
agtacttccagcatctgactttttacaggccaggagagagtgacatgaagtatttaaagtgctgaagaaggaaaaaaccttttaccctagaatagtatgtccagtgaaaatatccttcaaacatgaaggagaaagaaatacttttccatgcaaaagctgaggggtttcatctgtcctacaagaagtgctaaagggagtacttcagtcggcaagaaaaggatgttaatgagcagtaagtaatcaccgaatgaaggcacacaactcactgctaatagtaaatacacagaaagacacagaatattataacactgtaactgtgttgtgtaaactactcttatcccaagtagaaagactaaatgatgaacsaaccaaaaataactacaacttttcaagacagacagtacaataagatataaatagaaacaacagaaaattaaaaagcaggggaagaaaattaaggtgtagagcttttattggttttctttttgtttatgccaacagtgttgttatcagcttaaaacaatgggtttttagatagaatttgcaagcctcatggtaatcacaaaccaaaaaaaaaaaaaaaaaatacaatggatacacaaaaaataaaaagcaag

SEQ ID NO: 377716 - DNA, 453 bp, Homo sapiens
ccaacagtcctacttctgcctgaatttgccaagaggcacaacttcctgttgccctgggaacaccaggatggcagggtaggcaactctccccacccttgcttcctacagccagaagggccacacccactagagcttccaacccagtggccctacttctgcctgagctctgccggaaggtacaaacctgtgtttccccaggaagcaaacaaacatcagattagggccaatctaggaaggataaggcttatctgccaactgtggmccctgcttgacagagtctcatggaccaaaacacccaacaaaaaaacatgggcatggagacagtaattggagggggctcctccaaagagcctgtagcagactagaactgaaaccagtcaaccaaacccccctttacaccatcatcaaatccccaagggcatcaaagaagcaaaaagcaaaaaaaaaaaaaaa

SEQ ID NO: 377717 - DNA, 565 bp, Homo sapiens
acgtatattttactaaattaatttatgcttaggctaactggaagacccagctatttgggacgccaaggtgggagaattgcttgagcctgggagatcaaggctgcagtgagccatgtttgtgcccctgcactccagcctgggatayagagtgagaccctgtctccaaacaaacaaacagataaataaatattgtctagcatttttattagtgtcatgagggaggaattttgtctaggacagcgctggagaagttgatatcttcagtctaggaaaaaggaacagggataggaaatgacatctcccagaatcaggtgtgtaaaatagcacaacgtgtttagggagacaaaaggggttctgtgtgtctggatttcagttaggtagagtggggaccaatgaaggggtacagctaggataaatgtgggactagagagtaaggtgggggctgggtcacaaaaattataagccccctttataatgaggcagccttggtctcacctccctcattccagctgaggtaaaaggacttgccttcctccttctctaacttacttagacaccttcaatt

SEQ ID NO: 377718 - DNA, 457 bp, Homo sapiens
atgacaggaaaaatggtaattttggggaatggggctggggaaatccagcaatgatttttattttattttgttttaaaaaaagtgttaaaactgaaaacatattttgccaaccacctcctcccttgcctttttgaaagtccatatgttctttagggaaaaattgaattcagcttcatttgagtctttgcaaaattttaaaagtgttatttgatgtgcaagatttctaggtcttcagaaatcagacctaaagtcaattgtttggatgaaattcaaactgcattttctcaacactttgaaaaaaatttgagtaagattcaraagttcaatctttttctactgctagttggcagcagattgacacactgggagagtgtatttacacattgcttattttctggtagatgttaggaggtcataaattttgttcataaccatttttattcagtatttaataaac

SEQ ID NO: 377719 - DNA, 581 bp, Homo sapiens
tgggtactcacatcctcatgttctcagcatccagctggccagatctcacctcccagtctctactcttcattgacctagaatgatatatgcaaatcacatgcaaatgaagaacatttacacatttcattatttaccagttgaagatggagctgtttaatttttgtttgtttgttttttgttttttgtttgaggccggatctgtctctgttgcacaggctggagggtaktggtgcaatcttggctcactgtaacctctgcctcccaggctcaagctatcctcccacttcagcctccctagtatctgggactacaggcatgcaccaccatgtcaggctaatatatatttatatatatatttttgtgtttttttgtagagacggggttttgccatgtttcacaggctgatttcgaacccctgagctcaatcagtctgcccgcctctgcttcccaaagtgctgggattacaggcataagccaccatgcctagtcctgtttaatttttgacaagacattgcaataatacacaatttccgagttgaacttaaaattcatttgccagaataatatcttattattcaagc

SEQ ID NO: 377720 - DNA, 592 bp, Homo sapiens
aattaatattctatcccagagttggctgtttatgctttcatttcatcttcatgcagggtccactgttctggaattacacttggtatcatactgaaagttgcaagcattccagatggtgtaactgacatgagagacaaatcagtcattcaatttagggatgccagtgagttccaaaaggtgaggggaagtttgtttttcattgcttacatgtggaaaggcagcatctcaagtccaattttctggtcaggtctctatccagaactctttgggtactcacatcctcatgttctcagcatccagctggccagatctcacctcccagtctctactcttcattgacctagaatgatatatgcaaatcacatgcaaatgaagaacatttacacatttcattatttaccagttgaagatggagctgtttaatttttgtttgtttgttttttgttttttgtttgaggccggatctgtctctgttgcacaggctggagggtagtggygcaatcttggctcactgtaacctctgcctcccaggctcaagctatcctcccacttcagcctccctagtatctgggactacaggcatgcaccacca

SEQ ID NO: 377721 - DNA, 506 bp, Homo sapiens
ggagtttggggaagcttaggtgaattgaatttgcagggcaggatccttgagaaaagtgagcttagtgaagagagttcccaaaatctgcacagaagtcttctttagtctttaagtgacagtttgtgcatgtattagatacaatttcagaaatatgcacataaaacaatttctgggaaaagaaaaattacctaagagctgtaaattcaataattcccaggtttacacaggaatgggatcttgtgaccttttacatccagaaggaagagaacttgtaaaatacaggggacaattattaggaatcgtagaacagtaaggtcttagtatttctactgaattccacctataggaaaatctgycacagactagacctaagataacttgaaaacgatgcttaacaggaacaaactattgagcaaataaatgaattgcttgctgtaacaaagtctaaaagtctgtcaaatactacatcaaaatagagcactctattatgtaaaagtcacaatatc

SEQ ID NO: 377722 - DNA, 488 bp, Homo sapiens
atggctaaaacctggtatcttgatttctaggttagttcatgtttataaattgatattgtctctctaagtcctacccacaccctctgtgccttgtgacattaccgtgatcaggaacccaggcacatgctggtctgtctactgctgacactgccccaggagagatccctactgagctgccatccacttcyacccaacttccttagtgagaccttagtccattccccaggcagtggacctccaactttagctgcattaaaatcacttcaatgcctgataaaacacaaattgctgagagtttcacacccacagagtttcagtccccataggtctagatggggccgaaaacttttcatttcaaacatgtgttttgggacaattttctatgagtctcttgtatttctgcacatcttgcaagcagaggcactatcttcctttttttgtggactacttttcaaggatgtatttatacttaaatacaaggatatttt

SEQ ID NO: 377723 - DNA, 533 bp, Homo sapiens
ctagggtcgcaggagcacagagcaggaagggatacttgataggggctgaggttagagacaagcagaaggggacctcatgacaatttggaaaagtaaaaatcatgaacatagaaacccaccagactcattcaaacactgccaacagtttcataataaaaagtacttatggctgggcatggtggctcacccctgtaatcccagcactttgggaggccgaggcaggtggatcacctgaggtcaggagtttgagaccagcctgcccaacttggaaaaaccccatctctactgaaaatacaaaaaattagctgggcatggtagcaggcgcctggaatcccagctactcaggaggctgaggcaggagaatcacttgaacctgtggggcggaggttgcagtgagcagcatgggcaacaagagcaaacctctgtyttaaaaaaaaaaaaaaagaaaagaaaaaaaagtgcttatttcagacaccttataagggaaagatctcacctggatgccaatatagcatgattattactcttcatgt

SEQ ID NO: 377724 - DNA, 605 bp, Homo sapiens
tagacaagttgcttattctcagccttagtctcctcattcttaaagtgagcattcctagaatcaaatgaaataatgcatgtaaggtgctttgcacagtacctggcacataatgagtatgccataaaaagtaacttctgttatctggagtattaatattttattcccacattcaacccacagacccttaggacaaaatctttcccattccttgggcattgaggccctaaggaaagggtcagatgcagatgacagctccaattctggggctgctccagagaaatgttattgaaatcacttygtcatgcaaaatttaaggagcatctacttcctaataatcatagaattaggcagaaataaaagctagaatttggaatgacattttctatagaaatgatgattgcagtgtagcaggggagcggaggggagggaggtagttgtttctctatctcagttgctaacattgttcatgtagcaaagtatcaagctccaaacagccaataagcaaataaaatttgaaggccagggagtatctcatgttcacagaatatgacaaaacaaacagaattatacatttcaacatgccattaaaactaatattgtggttc

SEQ ID NO: 377725 - DNA, 536 bp, Homo sapiens
gtcagatgcagatgacagctccaattctggggctgctccagagaaatgttattgaaatcactttgtcatgcaaaatttaaggagcatctacttcctaataatcatagaattaggcagaaataaaagctagaatttggaatgayattttctatagaaatgatgattgcagtgtagcaggggagcggaggggagggaggtagttgtttctctatctcagttgctaacattgttcatgtagcaaagtatcaagctccaaacagccaataagcaaataaaatttgaaggccagggagtatctcatgttcacagaatatgacaaaacaaacagaattatacatttcaacatgccattaaaactaatattgtggttcacttcttttttatccatattataatggaagtttcaaaatctctaggttatgaaagtagttcccaagtctttccgagccctcaggaagggaataaactcttctttcaggtcattcatctttccttaagtcagtaaaccagacagagggtcacagcacaaaatgacc

SEQ ID NO: 377726 - DNA, 505 bp, Homo sapiens
aactcacagaggcaggaaaatgtagtccacccatttggggaagaactataaagttatatggcaacatgttcagatgtatacttctgtaacagagagggagtgaaaagttgggagcagtaattcagtctatcatagtcccagaccctcaagatggccaagtaagcgtgtgagttggggatctactggctttgtaacttcctgtccatgaatcattttacctaacatgcatcttttytgagccttcatctgtgctggaatagtcaccataatccctgttcagtattcctcacaaatttattgtatggggctgggtgcggtggctcgcacctgtaatccagcactttgggaggctgaggtggacggatcacgaggtcaggagatcgagaccatcctggccaacatggtgaaacctcgtctctactgaaaaaaaaaaaaaaaatattagccaggcatggtagtgtgcgcctgtagtctcagctattcaggaggctgatgcagaagaact

SEQ ID NO: 377727 - DNA, 638 bp, Homo sapiens
cttggtgaggtgcagaggaggcaaggcttacagtctgtctgcaccaccatggatgcagcccttatcctgaggatgtgcaagaaagcctgtctttgtttgtagccagtggggatctggctgctggtgccagggtgctcagggatccaagggctttggggctctatgtggccctgagcactggctctgcccaggccccatgcagctctttatgtcattctgaataccccagggggaagtggggcaggggaatctctcatgtacaggattgcaaaggtcccctggggaaatgtgggtccttggggtctcttattcacttacctgtttcttgtgttgaggagcctcctttgccttcatgccagtgatgggtggatgactgtcctgccktgctcctctgctctccatggatcaccattgcttccttgatgaatcacaaaatggcatcctgaatgatccacttgaggagctattgtttacttgttgctctgtttcctctctgagagagtagcacacactaactagctgtttctcatcagccatcttggcaccaaaatatgtaaatgatttttaaagccctaccaagagcttagaatttttcctgtgggcaatgggagttactggacgttattgattaagtcaga

SEQ ID NO: 377728 - DNA, 624 bp, Homo sapiens
tggcttattgttctcattgacaaaaaattcattcaagagaagagctgcagtgtagaagacaccytattgtactgggacctaggatataattctaaactctgactgggtgactttgggcaaatcactctcttggcccatctttcttcatctacaataggaggaaaggcttttgagattcatctcatctctgaatttttaagtttatgaacattttaactatgacaagatttttagatttctaagctttaatattttaaaatactacaaaaacaggtagtttaagtagaatattgctttgtgctctctttctaaaatacatagcagatgatacaataacacatcaatataaagtctatgagactcatctgaaattggtctttgtgcagagcagtcacccttcatccttcatatatacatccttcatccttcatgcttcagatatatctagtcagagaaaaaataaaaaacaagcgtgctgtttttcctagacgcttgccttattctcactgcctgcaaattttgaccctagaaagcttttcaatgagttacttggagaaagattcattgttggcatataataaccaaagagctgttcatctaaaaagagattcagctttccaggtt

SEQ ID NO: 377729 - DNA, 657 bp, Homo sapiens
attcttgaccccaaaattcatgagcatagaaaattgattgctgctttatgctactacttttggattggtatttgacacagcaaaatttattgtaatttttctggatgatgtatatatttacattcttccattattgcatgtacttctaaaatactcagaccagcaaataaattaaacacatacaataatatgaaacagcagagtgttgctgattatgcaatataaaccatttctaagtttaccttttctttttataaaaacatatattcctaatatatccagggtataaaaaattgcattaaaakatttagtgtctctctagatgtttatagtatttagggagcatgtgacagtcttttatagcactataaaaagtgtgtcagtcatttccaaacttttttgaataggcatccaccagtgtattcatgcacaaattcacaaagacaaaaaaataaaagaacgagatgaaaactgaatagaaatagaaattttcaaaattttgcttgatgccacaattaaatgtcttgccaacctgtcaaagtacccacatcttactctaaagatcactgaacttaacagtggataaaaaagaatatccaaatatttttgaaatggtacaaaaatgtaagttaactatttgggctcatcaccagtttc

SEQ ID NO: 377730 - DNA, 551 bp, Homo sapiens
atgctcactaaatgaattaaaataatttaacattagatattcagtgtgagcataattgaacaggttttccttcagttactgtcacaaaagaatggcatcatgtaaatgtaaaatacaaatacatataaatataaaatgaattaatcatctagttttccacttactagattattccagtccagtttaattacaggctgttttcatgcctactctgttctgcagataatcaaatcacgtattttttctaaaatgtaattttttatagcattagttcagcaaagcatgatggagagaataataagccttgaaaaccagttgctatcttactttttacctactagagttagtcctctcctaacacacagagccatgctttctgcaaagaaaatgttgatttcttctgaataytacttccttccccaacacgtgcaagtatgttttctgttctaagtgaacatattttctcccttgcgggacagacagtggagaagttcaaaaaggcaagcactgtcttgtgctttcctgaggcatgggtagagtccactatcatt

SEQ ID NO: 377731 - DNA, 592 bp, Homo sapiens
gctatcatactggtgaacccctcaaaataaaaaaagttagcaattgagttaaaaaagaaaagtttttttttccctttctatgtctaagtactaggttagtatatatatatttttatactgaattcttcatttgagtgtcgtgaccctttaaaccagctggatttttggtttggaagaatctgcaatttcaatttcaaaattaaagataatattactctattaatttatgagtttactgctgtataatcttgaataagttgacaagtctgttataaaatagaagtaatgaagaatagaatttaccttatatttcaggttttccaatttttaatgacttcagtatggattttctacatgatttacctaatgtttagatactgtctgctgtttctttagggccacaacaatgtgtttagaaaatcagtcattggttgcagttaggattaaaagtatcttaatttttttgtcacttgtttttttaattattaaaacatcatgtctccattaaacaaaaatcttcagaratagagaaaaacataaagaataaaaccaagcaactcataatccagaggaaggctcttgtattgtatgt

SEQ ID NO: 377732 - DNA, 574 bp, Homo sapiens
gccatgtcacaatttttttttctattggacactgatcacttgttgtsaattggcatttcatgtattacacatctcagtccaattgcttcaaaagttggagacacttttttagagaaagaaagaaaaggggaggtgtggatgctggaaacatacacacaatgattgggtgcgcttagacactttcctcctgaaaaggcagtaaatatgcttagcttattttatggcgagtcattttatgcttgtgtaactccattttttgaataccccttctcccgcaatcccactccattccacagtagccaggtggtgctgctggtaatgatgttgctgcttcaagcaggacagtttagctcctgcatttgtagcagtatcagatgttttgccttccagagtagggaattatgtgggatcaggcatcactccaacattttatctgtgttgcctgcatttggaaatatatctcaaagtttggatccccatttgaatgtgtgctataaatttaagtgaacactcttacagtttccttttgaatgattggaaccactatactgcattttcttatctgattgtcctt

SEQ ID NO: 377733 - DNA, 574 bp, Homo sapiens
gccatgtcacaatttttttttctattggacactgatcacttgttgtcaattggcatttcatgtattacacatctcagtccaattgcttcaaaagttggagacacttttttagagaaagaaagaaaaggggaggtgtggatgctggaaacatacacacaatgattgggtgygcttagacactttcctcctgaaaaggcagtaaatatgcttagcttattttatggcgagtcattttatgcttgtgtaactccattttttgaataccccttctcccgcaatcccactccattccacagtagccaggtggtgctgctggtaatgatgttgctgcttcaagcaggacagtttagctcctgcatttgtagcagtatcagatgttttgccttccagagtagggaattatgtgggatcaggcatcactccaacattttatctgtgttgcctgcatttggaaatatatctcaaagtttggatccccatttgaatgtgtgctataaatttaagtgaacactcttacagtttccttttgaatgattggaaccactatactgcattttcttatctgattgtcctt

SEQ ID NO: 377734 - DNA, 539 bp, Homo sapiens
attaaactatttatgtgcctcccatccaatgacgttagcctggtacactggtttagaattgaaaataaatgcttgatgccatctargttgcttgtgcattttaatttcagggtgacatattcaaactatctttctcagaactctgccaaagtatcacctataactcatacctagactggaatttccatctctattgcttcaatcctatggaatagacaatcatgccttgcatagctagcatcttcccttgtattttgctctcatgcaatatagagaaaaaatgtaccttatggggaaatccattgcactgtctttgttgatactcttaatctgtgaactaaaaagtttaataactagggtacagcagtagcaaacagttgatttgtggccttcataagactgtggatggatctgcactttcccagttgcatgcatgttaatctagattattcctcatttccagcatgaggacagcagaatgcttttgtgctactcctttcctttcatttctattcaaagggatttgttttcattttctg

SEQ ID NO: 377735 - DNA, 539 bp, Homo sapiens
attaaactatttatgtgcctcccatccaatgacgttagcctggtacactggtttagaattgaaaataaatgcttgatgccatctaggttgcttgtgcattttaatttcagggtgacatattcaaactatctttctcagaactctgccaaagtatcacctataactcatacctagactggaatttccatctctattgcttcaatcctatggaatagacaatcatgccttgcatagctagcatcttcccttgtattttgctctcatgcaatatagagaaaaaatgtaccttatggggaaatccattgcactgtctttgttgatactcttaatctgtgaactaaaaagtttaataactagggtacagcagtagcaaacagttgatttgtggccttcataagactgtggatggatctgcactttcccagttgcatgcatgttaatctagattattcctcatttccagcatgargacagcagaatgcttttgtgctactcctttcctttcatttctattcaaagggatttgttttcattttctg

SEQ ID NO: 377736 - DNA, 547 bp, Homo sapiens
ctaaccaaatccaacagtatatcaaaaagataatccaccacaatcaagtgagttttttttttttaaccagggttgcagggatggtttaccacacacaagtcaataaatgtgatacatcatataaacagaattaaaaacaaaaatcgtatgactatctaaatagatgccgaaaaagcattggacaatatccagcatccctttatgattaaaaccctcagcaaaactggcatagaagggacatacctcaaggtaatagaagccatctatgacaaacccacagccagcataacatcgaatggggaaaagttkaaagtattctccctgagaacaggaataagacaaggatccccagttttacaacttctattcaacataggactggaattcctagccagggcaatcagacgacagaaagaaataaagggcatccaaatcactaaaaaggaagtcaaactgacactgttcccagatgatatgatagtatacctaaaaaaccctaaagactcatccaaaaacctcctagatctgataaatgaattcagtaaag

SEQ ID NO: 377737 - DNA, 513 bp, Homo sapiens
agaggaatctatctctgatttatacacacatccatttttgttgtcactcagatactgaaatatctattgctccatctcaggctttattaatctgtttaaaaaactccatttcagtggaattgtccactatatgcacatattaatggtattagatgccttatactgctagaaagtatcttcaataaggttagaaaccctgaagggaggagaagaaggggagcagtcagatgggaaagaaagaatagaaacaaaaatccttagtaacatgctagattttttttcataactcygtaatattgtattatgttgtattgtattttttaatttcaggtacttatgagacttttatttgcctttcttcactatatatttctatataaatatgatactttgagatggcagtttcttttatattttagttgaaagtcgtattttgtttaatcactgtggtaaaaaaaattgtgtatctattttttcatcaaattttagaacacttttttctttaaaaatata

SEQ ID NO: 377738 - DNA, 599 bp, Homo sapiens
tcaagaagctgtcacagaaggcagaagaaaacctgaggaaagcgggacagccagtcacaatgagtaatttaatggtagctatgatagcggttatcrccactgccatgagtattccttcaacaagggctgacacagagaacaattatacttattgggcatatttatcaatcttggctggaaacaatgcctggacataatcactctatgacacagttacacatgctttctgatctcagtatttaccataataaatctgctcctataattgaggcataccaccttcaaaaacctatttgtaaacaaaatagaacctggccagaaataatgaacgtacttgtttaggaagattgctttgcagaataggcagaggtgctgcacaatgattcctgtggaatcattattgattggtcccctaaggggatgtttagcttaaattgcacctctcggtctgtgtgccatggccacactgtgttcagctgatctgaacaaaatggtcagatggtagaaatgataagaagtacagcaaaagttcctattatctggaaccatggtggtatagtggcacctcaacctcaaatgatatggttcgttgtaggagc

SEQ ID NO: 377739 - DNA, 538 bp, Homo sapiens
ttggtcccctaaggggatgtttagcttaaattgcacctctcggtctgtgtgccatggccacactgtgttcagctgatctgaacaaaatggtcagatggtagaaatgataagaagtacagcaaaagttcctattatctggaaccatggtggtatagtggcacctcaacctcaaatgatatggttcgttgtaggagctaaacataaggatttgtggaaactattaatagctgttaataagatcaaaatttgsgaaagaataaaaacacacctagaaagacactctacaaacttgtctttggatagtgcaaaattaaagaacaaatatttaaagcatcccaggcacacctgaccttaatgtcaggaactggagtgcttgaaggagttacaaacaaattagcagctagtaacccattaaaatggataaaaacacttggaagctctgtgatttcaatgatgattatgcttttaatctgtgttgtttgtctttgtatagtctgctgatgtggatcctgactcctgtgagaagtagctcaccatg

SEQ ID NO: 377740 - DNA, 538 bp, Homo sapiens
ttggtcccctaaggggatgtttagcttaaattgcacctctcggtctgtgtgccatggccacactgtgttcagctgatctgaacaaaatggtcagatggtagaaatgataagaagtacagcaaaagttcctattatctggaaccatggtggtatagtggcacctcaacctcaaatgatatggttcgttgtaggagctaaacataaggatttgtggaaactattaatagctgttaataagatcaaaatttgggaaagaataaaaacacacctagaaagacastctacaaacttgtctttggatagtgcaaaattaaagaacaaatatttaaagcatcccaggcacacctgaccttaatgtcaggaactggagtgcttgaaggagttacaaacaaattagcagctagtaacccattaaaatggataaaaacacttggaagctctgtgatttcaatgatgattatgcttttaatctgtgttgtttgtctttgtatagtctgctgatgtggatcctgactcctgtgagaagtagctcaccatg

SEQ ID NO: 377741 - DNA, 629 bp, Homo sapiens
atctgtgttgtttgtctttgtatagtctgctgatgtggatcctgactcctgtgagaagtagctcaccatgacaaagctgcctttgcttttattgatttgcaaatcagagaagggggacatgttgggaacaagccccccacaatctggccacaaactggccccaaaactggccataaacagaatctctgtagcactgtgacatgtttgtgatggccataaagctcacgctggaaggttgtgggtttactggaatgagggcaaggaacacctggcccacccagggtggaaaaccgcttaaaggcattcttaarccacaaacaatagcatgagcaatctgtgccttaaggacatgctcctgctgcagttaactagcccaacctattcctttaatttggcccatccaaagggatacttttagttaatttaaaatctatagaaacaatgctaatgactggcttgctgttaataaatatgtgggtaaatctctgtttggggctctcagctttgaaggctctgaaacccctgatttccgacttcacacctctatatttctgtgtgtgtgtctttaattcctctagtgctgctgggttagggtctccacaactgagctggtcttggcaaggtctaac

SEQ ID NO: 377742 - DNA, 600 bp, Homo sapiens
tggcaattcaattataatgggttttaatgtaggtatttttagtttcaaactctttggaatcttttaagctttgtgaatctggatgtcagtttttttcccaagacttgggaattttcagtcattatttatttaaataaggcttccacctttttttcttctccttctaagacttccagaacacatatatttgctaccctgttggtgtcccataagttgcataagctttcttttttccatttcttttcctttttactcctataactggataattccaaatgacctgacttctattttattgatttttttttgcttcattagtctgmtgttaaaggtctctattcaattttttagttcattttactcctagctctagattttatgattcccatatttttgttgaatttctagttttgttcatgtattattttccagatttcattttgtaatctccttccaacttctattttaggttgaaggtggacatttacatgtttgttacatgggtaaattgaatgtcatgggggatttgtgtacagataatatcatcaaggtaatctgcataatacatggtaggtagtttttcaatccttatcctctttt

SEQ ID NO: 377743 - DNA, 589 bp, Homo sapiens
gacatttacatgtttgttacatgggtaaattgaatgtcatgggggatttgtgtacagataatatcatcaaggtaatctgcataatacatggtargtagtttttcaatccttatcctcttttcaaactctatcctcaaataggtctcagtgtgtatttttcttttctttgtgtccatgtgtactcattgtttaacttcttatatgtgagaacatgcagtatttggttctctgttcctgcattactttgcttggaataataacctctagctccatccatgtttctggaaaagacatgatttcattcatttttacagctgcacagtattccatggtgtataggtacattttcttaatccagtccaccatgagagggcatctagtttgatttcacatatttgctcttgtaaatattgctgcaaggaatatacatgtgcatgtgtctttatggtagatcagtgtatagtcctttgggtgtatacccagtaataaaattactgagttaaatggcagttctattttaagttctttgagaaatctccaaactgctttccacagtggctgaactaatttacattcctatcagtagtgc

SEQ ID NO: 377744 - DNA, 589 bp, Homo sapiens
gacatttacatgtttgttacatgggtaaattgaatgtcatgggggatttgtgtacagataatatcatcaaggtaatctgcataatacatggtaggtagtttttcaatccttatcctcttttcaaactctatcctcaaatargtctcagtgtgtatttttcttttctttgtgtccatgtgtactcattgtttaacttcttatatgtgagaacatgcagtatttggttctctgttcctgcattactttgcttggaataataacctctagctccatccatgtttctggaaaagacatgatttcattcatttttacagctgcacagtattccatggtgtataggtacattttcttaatccagtccaccatgagagggcatctagtttgatttcacatatttgctcttgtaaatattgctgcaaggaatatacatgtgcatgtgtctttatggtagatcagtgtatagtcctttgggtgtatacccagtaataaaattactgagttaaatggcagttctattttaagttctttgagaaatctccaaactgctttccacagtggctgaactaatttacattcctatcagtagtgc

SEQ ID NO: 377745 - DNA, 545 bp, Homo sapiens
cttctgccacccatgccttatttcatctcactcattttttctctctccatactccattcttctstgaattgtgtcacaaagttttgctaatatcatatctagaatggtttaggtacctgtctagttccagaaaactgaggctacttcactaggcacctttgtatcataaaccttttccatcaaggtggctccctgaaaaagattgttttatttcacagaagaattccataaagaatctcctcctttatttcctccatgttacactgattttaattaaaaagctttgttcctcttatatatttagtacattttctgcttcaacaacatgtgaccatttttaacttataattttgtgcttacctccctatatatcctaaacattcagtttgaaaagaatgggtctatctcctgacacaagtatgagtctacttctcggtctctcttctgttatgtcagcctctctcattttatgagaaatgaaatccaacatcactaagtgatttgcccaatgttccaaaactcagaacacttaacagggaatacaa

SEQ ID NO: 377746 - DNA, 603 bp, Homo sapiens
cagactgaaagtaccataggggttgaaagacatggatgattgattccagatggactgatcaaggagacttctggagataggtcttgaaagattaacagaagggaaaagggcaaggctggggcagagagcattccagacaggaaaaaccccgagaaaaactgtaaaagacaggacattaaaaagcatagtttggcagtgctaaaccaatttggagtgaggcagaagtggaaggaaaaatatcaggaatgggwtcagcttgtgttgggttgcagaggactgtgaataatggtgcaattatttttatttatttattacaaaagtaatacatgctcactgtaagaagttcaaatcataatgggatctaagaaatagaaagtgaaaatccttttcttctaattgtggagtattattagtatgcactacatgtgctgaacctgctttttgattgaacaatgtaggcattatggccgcctttctacatcaaacataaatataagccttgtcattttaatgatttcagcatgtttttatatgaaagtaccatgatttgtgtcatcaatttttcgaagttttctcccttatttcactagtatacccattatg

SEQ ID NO: 377747 - DNA, 509 bp, Homo sapiens
tggttttcctaatatgggacagcgatgattcataatattttgttcaaaaggtctacctaattacccctctttgtatacaaacctagactttgtattagatggggcttctgcttgtccaaaaacttttcaatttatccttaagtttacgctcttagtctgtatttttaagtttaatacaggctagtactttttaggrtcagttggcttttattcttactgtgattttcctgttctgtccacaaatgagcacacgccgtggttagttgttagagagatgttacacaagatgttatttgcataatgagttaactcaccttcattaatttcctgttagtcctctttctttttctaatccttgctcactagggcagttgtgatgtttgcctggctaactccactttccatgtttgatatcccttctatgagtttttaaaaaattcactctccttctaggaaattagtgcttccctgttacttccatcttctatccattataattcagaaaagat

SEQ ID NO: 377748 - DNA, 481 bp, Homo sapiens
ttataattcagaaaagatgttatgttagtatcttactataaaattccatccattttgtatatttagggttatctggaacataaaccttatctcacattgtgatctaagacagaggtcagtaaatttcttctgtaaaaggccaggtggtaaatattttaggctttataacccacatatggtctctgtggcagattttttcttttattgatttttttacagccgtttagaaatgtaaaaagcattcttagatcacaggccatactaaaaagggttttagaattggcccacagccatatttttctgtcttmtgacctaagaggctacactgcgaggatgaaaattttccatttatttcgacatttgcccaggagacatcaaagctaaccactgtaatttttctaagcagctaagaatcatgaagtttgaaagactccagtataccggactcttattggacttaatggaaaactgtttttgacca

SEQ ID NO: 377749 - DNA, 572 bp, Homo sapiens
aatggttaatattaataagtgcttcagtgaggccaagagaaggcaaaaggataaatgatacataaagctaaaatagctacttggrttgaaacaaaatgtgtgaccagttttgatgacataataggattttgtggaaatgaaagccggaatgcggtgggctatggagagaaatgaggatggtagtgtgcattttgtccaagacacttatgttcgaaggaaaagttatagtagccgtggaataaagcaccagctatttctaaaaatacagtccatgaaagcagatataccccttattgactgttataaatttcttttacagtgtctgacactgaattcatttgttaaatgaatgcataaactatataggagagacatgaggatgtctatttatcaatagaaaaaaaaagagactcagtgtaggtggtggactccaagtaagagcaaactttaagagagccttgggctaagatgttgtggctaggaggaggagaagctctgggactgagcataaaacacacacattggaatgaagactctcctactcatacccgtgggaataggatggtgaataa

SEQ ID NO: 377750 - DNA, 535 bp, Homo sapiens
tgatgattctaaataaataaaaatgtttgagtagcctgaaaaggaattcaaaatactgttttaagtaagctcagtgaacttcaaaaaaaatacagagaaacaattcaaaaaaatgaagaaaacaataaatgaccaaaatgagaaatttaatagagatagaaatgtttaaaaaattgaatagaaattctggagctaatgcaatcaatgaaatgaaaaatgtgtgtatgtgtatgtgtgtgtgtgtgagagagagagaagggggggagagagagagaaagagcaagagagaatcagttgcagaattgatcaagccaaagtacatctgaactcaaagacagggtatttgaacatatgcagtcagagragcaaaaagaaaaaaagaatgaaatgtaatgaagaaagtttatgggagtagtgggacagcatcagaagagcaaattttcaagtcaaaggacctcaagaaagagaaaaggaagacgaaggtgttgaaagcttatttaaaaaaacaatagtgaaaactttccaaacctaggga

SEQ ID NO: 377751 - DNA, 509 bp, Homo sapiens
caagtagtctgaaagtgaagagatagaaaaagatattttatgcaaatagaatccataaaakagcacaggttaaaaattatatcaaatacaatagcctttaagtcaaaactgtaaagtgaaggtaattacaaagaaggtaatttataatgacaaaggggtcagttcagcaagatgagatagcaattgtaaatacattcaatattggagcacctaaatataaaaaaaattaatagaactgaagggagaaataaactgcaatacaataatagggtactttaatataccacttttagcaatggaccaatcatccagatagcaaataaacaagaaaatattggacttaaactatattttagaccaaatgggacataacagaccaatatagaacattttgccaaacagcagcagaatacacatacttctcaagtgcacacagaaccttctccagggtagatcatatgttaggccacaaagtaagtcttagcaaattttaaaatactgaaattata

SEQ ID NO: 377752 - DNA, 392 bp, Homo sapiens
atccattgttactttgttgactttctgtcttaaagattatactttctgtctagtgctttcagtagagtattgaagtcccccactattattgtattgctatctcatttctttggtctagtagyaattgttttatcaattagggagctccagtgttaggtgcatatatatatttaggattgtaatattttccccttggacaagtcgttttatcattatataatgtctctctttgtcttttttaactgctgttgccttaaagtttgttttgtctgatataagaatagctacgtctgcttgcttttggtgtccatttgcatggaatatcttttaccactcctttaccttaagtttatgtgaacacttatgttttaagtgagcctcttaaaggcagc

SEQ ID NO: 377753 - DNA, 607 bp, Homo sapiens
tgcttgctttcttttagggatgcagatgagtcataagtttggcctctttatataatcccatatttcctggaggttttattcattcttttctattattttttctttatttttgtccgagttgattcaaagaactagtttttgagttctggcattcattcctcatcttggtctattcattcagctcttaatacttcttattgtatggtaaagttcttttgtttttttgttttcccaagacggaatcttgctctgttgcccaggctggagtgcaatggtgcgatctcggctcactgcaaccttccaggttaaagcaattctcctatgagtagctgggastacaggtgcacaacaccatgcctggctaatttttgtatttttagtagagacagggtttctccattttggtcaagctggtcttgaactcctgacctcaggtgatctgcccacctcggcctcccaaagtcttgggattacagacatgagccaccgtgcctggtgataaatttcttatagtatatgtttcagctttataagatcagtttagttatttcttaaatggctattatgtctttagcttttcagttatttttgtgaattctatacgttc

SEQ ID NO: 377754 - DNA, 583 bp, Homo sapiens
gtctgggaagggctagaagtagccgggtcctcactgtaccatttacagatccacgtgaggctgaattagggagctgcattaagcatagaaaagagctgtcagtgaacaaacaatataatctgggctcagcgaggttttcctgggagaaagagcggggagctcaaaagagggagaggaaggcagggatagagaatgggaaagaggaaagcaggcaccacccaagccactctttatcactcaaagagggcacataggtactcattattaattatcaaaggcttttgttaaatgcaaatttacttgaaaagcaatgtgatgaagtaaagcaggattagtatttctgaatgttgctgtatatacacccaatagggaggctcaatgaaagaggaaagaggatacaagctgttaactcaagaagatgaagttctctatagtattccaattamctatactgccatagttttatcgaggtctaataggatgccaaggatggcactcacttcttagttattcattcttagctggagacagaatcataccactatattgtatatagaggactatggacgttccttcccaatac

SEQ ID NO: 377755 - DNA, 622 bp, Homo sapiens
tcataccactatattgtatatagaggactatggacgttccttcccaatacacacaactgttgcattttaggagaagggttttcactattataatcattgatagtaaaacaatataatctgagtctacatatatgctattgttaggaaaagagtaaaataacattaaaaatgctctcctagaaaatgatatgtttttgtatcctaacccttatgacatatctgcttccataaatgaagaacgtaaagtctcatttcttgyactacataaagatagtaagagagcaactcttctaggagggaaaatactaatgtggatggtacatgttatagtttatataacataatttatcatttttccttttacctaaactgagttgaaagcactaagattaataaaatatcccataagcaagcaaaatgcattccacagtagtacagagaacctagcacttaatctgattcgaaagtcaaagaaaacagtaatcaccatggcatggatcagtgttgtattgttgatatgatggtcagtcaacttacagagggtagaggaagggagagaagggagcagtttttatcatatatggggagcattagctttctctgatctgaacagctgaaaatt

SEQ ID NO: 377756 - DNA, 586 bp, Homo sapiens
cccgtttgaacacatgatgttttgttaaataaatggaacaatttatttatagaaaaattatttattagaaaaaatagttcatcccattggaattgcatttttcaatgataataataaatagtagttaatattcattgagagattagtatatctacatgccagtctacatagagttctacatagattatctaattttatcttcacaataacgtgatgagtagatagtttatgattccatattaaagatgacactgatgtccagatgggtttaaaaaaacccttcctgcttgaatttacatagctcctaaacgagctatcccaggtcaaactgaccactctgcttatctccaaacccctgtgctatgtgaatacaacaatcttttacacaattmaaataggattaagaattaaagaaataggagttttgtttatgtcccaaacctgtttcactcatatgccttcgctgattggtcaattggtcaatgaatctaaaaagcttttttttttttttttttttttcccaaatacggtttaaaacagaagtataaatccaaattagaaaagtttttttatgtagttgttgact

SEQ ID NO: 377757 - DNA, 615 bp, Homo sapiens
ggtgtctcaagtttatttcaaggtgaccaatgaacaatgattttggatctcattaaattcttaaattttctggctgtatagctctttgtatatttctgtatgactacatatcactcttttatagtatattcatataagattttctgcacttttttgtaccatccagaagagccatattgtaggtagaggttattatatactttatgaattgcagaagtaaacagttttgaataattcaatacactaagaatatatggttccacatggacctcctagaacatttttgacacmaataattacatcacaggagtgattaatacttacgcagatatggctggctaggtctttcagtatactgaatgtttactgtatgtgagaatgatcccttgcaccttttcaagcacagctgtctagtaaacatttattgactatttgtccaataggctatgtagctctgatatttgataataggattaatattttgccttttctgtctacattactgtactaatttgattattttccctgggcctatcatgatgacaaggaattatgtctgttgaccttaaaatgaccttgaggaaatgaggtgctaatatcaatttaggtgacaga

SEQ ID NO: 377758 - DNA, 564 bp, Homo sapiens
gttcctgctctcctatcttaccatttaggaacaagtccttatactttcaactatatctagaaacaaccaataattacgttgccctcaaaatataactccatttttctcttgctggtgtcagtgaagagaattaactcttacttctgaatttggcctggatgaccaaaactctagtgcatccttccagctggagggctgccatgaagaggtttgtaagtataataatagtacagctccraaggtagaatcatcacaacatttttctttcccaatactgaagctttgtcccataatcaatatcagcaggtagtatcatgatggccaagaacaaatgatcagcccctttttccttgattcccaagtatagatggctgctggaattccccattgctgtatccccctgctggagtgagaaccccaatgttgactatttcctacattgtggatgaagcaactatgtgatatcatgcctggataccctgtaggacccagtatgatctactctagatcagttctcttcaccccacccacagatctaatgtcagatcccaaatgttcctgtca

SEQ ID NO: 377759 - DNA, 531 bp, Homo sapiens
tgaccaccctgaacgaaagctcatttcctaagtaacctctgtcctcaaagaagttactgtttccaggtaacctgttccacttacattttattggtttcagtcattttaggatgtgacatggtttaattaagcattctggcccagtttgaggcaggagccataaataaggaagtttgtactactacctgtagaagaactcaggagatttattttcactaagctgtacaattgaaaggtttgtgaattgctgaggtttaagcgtttactgtggacttttgtttattacagcaccctgcaatttaaaggcagctrtcattactgccatcagatctttgtaaaatgattaattaaacaatgatgatatttctctgtgaatttctaactcctggtattatcagtgtacagagtacctaaaagaaaagtgagaataaacttcaggagaaatcaactgtggttctcagggaaccacaataaatttcttccttcaaaatggctcaaatcagtatctgaaatacaaaacaaccatagagc

SEQ ID NO: 377760 - DNA, 580 bp, Homo sapiens
aggctgggtgcagatgatcagagggaatttttggggaagtggttaagcagagcagggccgtggagaccggagtcttagtggttggaaataagaggcaccctgaaaaactgaggtcttcttctcaatcccattttatcgtagactcaaagcataaatctgtggttttcaagaagctgtaggattgctgtaagctaaagaaaagcttgattgaatactatttattttacgtacctttcaaagatttctttcttttcttttttttttttttttttttttkgggacagagtctcactttcgccgaggctggagtgcagtggtgtgatctcaactcactgcaacctctgcctcctgggttcaagcaattcttgtgcctcaacctcccgagtagctggaattccagccatgtgccaccatgcctggctaatgtttttgtatttttacttgaaacaaggtttcaccttgttggccaagctggcgtttcaaagatttcgaccctgataagttccataaaggctcctgcccacttgaagtaactgtaggttggtcttgatgtttggagaatcatgtgataactctttca

SEQ ID NO: 377761 - DNA, 580 bp, Homo sapiens
aggctgggtgcagatgatcagagggaatttttggggaagtggttaagcagagcagggccgtggagaccggagtcttagtggttggaaataagaggcaccctgaaaaactgaggtcttcttctcaatcccattttatcgtagactcaaagcataaatctgtggttttcaagaagctgtaggattgctgtaagctaaagaaaagcttgattgaatactatttattttacgtacctttcaaagatttctttcttttcttttttttttttttttttttttggggacagagtctcactttcgccgaggctggagtgcagtggtgtgatctcarctcactgcaacctctgcctcctgggttcaagcaattcttgtgcctcaacctcccgagtagctggaattccagccatgtgccaccatgcctggctaatgtttttgtatttttacttgaaacaaggtttcaccttgttggccaagctggcgtttcaaagatttcgaccctgataagttccataaaggctcctgcccacttgaagtaactgtaggttggtcttgatgtttggagaatcatgtgataactctttca

SEQ ID NO: 377762 - DNA, 499 bp, Homo sapiens
cacactatatgtctgacacagtactaaatgctttatacacactttctcactatctttacaataacttggagaaagatggagtttgagaaagatagtgcacccctagatatgctaaccaaaaaacaaaaaaaaagattctgggccagcaaagctgtggatgaaatcataggccgtgaatacatctaacttaccccaaacaaaccaaccagtatccttyagaataaagcacagttgttttaagagctggctctgtaggtagatccgggtttgaattttggctctgagacttaatagacatggtagtcatgcaaccttgggtgagtttttcaacctcactctgcctcagtgtcctaacctgtagaatgggaataataatagaatcctcctagggttatcgcaagtcatagaaccttcatacggttatcataaagcttaagtgagttaatagtgaaactcttacaacagtgcctagtacatacttaattatcaaaatatgttg

SEQ ID NO: 377763 - DNA, 568 bp, Homo sapiens
ttgtcttgtcacattttcacaatccactactctctgtccaattctgtatataagcattcaattctaactgcttctttgggtcttcatttccttaggagagctcccatgtcacataaaagtcacattaaataaatttgtatgcttttctcctgttaatctgccttaagtcagtttaattctcaggcccaaagaactctaagagagcagagataaaatttcacctcccctacaaatatatcctaagaaaatgatcactaatgtccacaaatatatgtctagaaaaacatttatcccagcttaaacattttatctcacctgaataacctaaatggaaacagcatagatgtataaaaatgtgacattagygaaattgattatgctgttttgtattatgaaatacagctccaccatccccttactattatctttaaatccaaaatatgcagaaaatcaaaagtttatatataacttatttagcagcaaaactttttctgaccaggactcatttgacaccaaaacctaatctgaagtgaggctagtcatagtcattttctcacacagtgtgatt

SEQ ID NO: 377764 - DNA, 568 bp, Homo sapiens
ttgtcttgtcacattttcacaatccactactctctgtccaattctgtatataagcattcaattctaactgcttctttgggtcttcatttccttaggagagctcccatgtcacataaaagtcacattaaataaatttgtatgcttttctcctgttaatctgccttaagtcagtttaattctcaggcccaaagaactctaagagagcagagataaaatttcacctcccctacaaatatatcctaagaaaatgatcactaatgtccacaaatatatgtctagaaaaacatttatcccagcttaaacattttatctcacctgaataacctaaatggaaacagcatagatgtataaaaatgtgacattagcgaaattgattatgctgttttgtattatgaaatacagctccaccatccccttactattawctttaaatccaaaatatgcagaaaatcaaaagtttatatataacttatttagcagcaaaactttttctgaccaggactcatttgacaccaaaacctaatctgaagtgaggctagtcatagtcattttctcacacagtgtgatt

SEQ ID NO: 377765 - DNA, 618 bp, Homo sapiens
agcacttcaattctctggtgccaacaatgcagccacagggggattgttttttgagtggctgtgctattgaaacatgttttataagtattctatatttatcgtagtatctgctgcacaggactttactagccatagaattggttgttggaattgctgaaagtgtttatgtttgtgttttaacaataagggctttgggttgggaaactggagacctgacactttatcagtgatttcatgtttgatctatagttgatttggatgtgctctaatattacattttgccatttttctattgttaattttgaaaaataagaaaatatttttgctaattatttactggccaagcatactgaattcatggtctataaaaagtacagaataatagcccagtcatttaaaatcacatttacaggcttttaagcattattaatttatatgtaaatacaaaattattttgtgaaaatttaagatacacatggcttaaatttagagycacataaagaataacaattaaaaatagttctgtcccaattaggagaaatcaatctttttcttttgcaaatagtctaattaaaatattctatcaaaggtttatccaaatgacacatctagttgaca

SEQ ID NO: 377766 - DNA, 565 bp, Homo sapiens
atctctgaaaaatacaattaatagcctatatatacttgtttataactttatacccaataggcacagaacatattattttttagcatacattaaacactaaaaaaagaccatttattaggtaatataggaaacsctgatacatgcaaaaggctaaatatataaattgcaggatatagaggaggaggtaatacttccaaactaattccacaaggccagtgttatcctgatacccaaaccagacaaagacacatcaaaaaaagaagactataggccaatattccagatggacattgacatgaaaattctcaatgaaatactagcaaaccaaattcaacaaaacatttaaaaattattcattatgaccaagtcagatttatcccagggatacaaaaatagttcaacatattacaaatcaatcaatgggatacatgacgtcaaaagaatgaaggacaaaaaccatataatcatttcaattgatgctgaaaatgcacttgataaaattcatcatccttctggataaaaatcctcaaataactgtgtatagaaggaacatatctcaacacaa

SEQ ID NO: 377767 - DNA, 565 bp, Homo sapiens
atctctgaaaaatacaattaatagcctatatatacttgtttataactttatacccaataggcacagaacatattattttttagcatacattaaacactaaaaaaagaccatttattaggtaatataggaaaccctgatacatgcaaaaggctaaatatataaattgcaggatatagaggaggaggtaatacttccaaactaattccacaaggccagtgttatcctgatacccaaaccagacaaagacacaycaaaaaaagaagactataggccaatattccagatggacattgacatgaaaattctcaatgaaatactagcaaaccaaattcaacaaaacatttaaaaattattcattatgaccaagtcagatttatcccagggatacaaaaatagttcaacatattacaaatcaatcaatgggatacatgacgtcaaaagaatgaaggacaaaaaccatataatcatttcaattgatgctgaaaatgcacttgataaaattcatcatccttctggataaaaatcctcaaataactgtgtatagaaggaacatatctcaacacaa

SEQ ID NO: 377768 - DNA, 611 bp, Homo sapiens
ctgtcagctcctgcaatgttttawgatgatttttagcttcctttcattgggttacaatgtacttctttagctcagtgatctttgttcctgtccatattctgaattctacttcagccatctcagcctcagtctggttccagagtcttgctggagaggtattgcagtcatttggaagaaagagcgcattctggctttttgagtttttagcattctagaaccatcatttaactgatgctttctcatctttgtgtgcttatctacattcagtttttgaggttgctgacctttggatggtttttatttttccttaacagtctggccacttttctgtaggtctgcttgtggtatgctgggggtccactgcagtttctagttgccttggattttccagtatttggagttatcgtcagtgaagtctgtgaagcagctaagatgccagcctgccccttctcctgggagtgccatcccagggaggtaaggaccagctgccagcctgaatgcacctgcaggacatggctggagaccctaatttggtggtctcatccagtcatgaggaatgggattgggaacccacttaacaaagtagtctggccatgttttcatagagtagc

SEQ ID NO: 377769 - DNA, 585 bp, Homo sapiens
aatttctatagtaagaaaaatgataagttttggttccagaaggttgtttctgagctgtttttcaaagaatctgttctgaaagttctgtttattcatcctctttctggctgctctttgtcctgggtgtatttatatttcctgagggttttggtagcttccctttgtaaggttaaataaaataccttcttttttttttattatactttaagttctagggtacatgtgcacaatgtgcaggtttgatacataggtataaatgttccatgttggtttgctgcacccataaactcatcatttacattaagtatttctcctaatgctatccctcccccagcccccaacacccaacaggccccggtgtgtgatgttcccygccctgtgtccaagctggaaaccatcattctcagcaaactgtcaaaaggacagaaaaccaaacaccacatgttctcactcataggtgggaattgaacaataagaaaatactttctatttttagtttgataagagtttttattataaatgaattttatcaaatgcttattcattacatctattgagataatcttgcagttgttttcctttaat

SEQ ID NO: 377770 - DNA, 585 bp, Homo sapiens
aatttctatagtaagaaaaatgataagttttggttccagaaggttgtttctgagctgtttttcaaagaatctgttctgaaagttctgtttattcatcctctttctggctgctctttgtcctgggtgtatttatatttcctgagggttttggtagcttccctttgtaaggttaaataaaataccttcttttttttttattatactttaagttctagggtacatgtgcacaatgtgcaggtttgatacataggtataaatgttccatgttggtttgctgcacccataaactcatcatttacattaagtatttctcctaatgctatccctcccccagcccccaacacccaacaggccccggtgtgtgatgttccccgccctgtgtccaagctggaaaccatcattctcagcaaactrtcaaaaggacagaaaaccaaacaccacatgttctcactcataggtgggaattgaacaataagaaaatactttctatttttagtttgataagagtttttattataaatgaattttatcaaatgcttattcattacatctattgagataatcttgcagttgttttcctttaat

SEQ ID NO: 377771 - DNA, 594 bp, Homo sapiens
ttgaattgtataaatcattcatatacttatataaaaattacaatgaatatttactagattgaataccaaaaataactttttgtagaagccttaattgttcatgagaaaatgtcaaagtttaattttggcagaaaagataaatttagatcatagaaaaatatgaccttataaccatggcttatcaccagtgtacagtgttccctgatagtccctcactgtgcaaccccacgtgtggtaatacacctaataataataatwattattattattattttttgagacagagtcttactccgtcacccaggctggagtgcagtggtgctgtctcggctcactgcaagctccgcctcctgggttcacgccattctcctgcctcagcctcccgagtagctgggactacaggtgcccgccacgacgcccggctaattgtttgtattttttttagtagagacgggatttcactgtgttagccaggatggtctcgatctcctgacctcatgatctgcccacctcagcctcccaaagtactgggattacaggcatgagccaccgtgcctgacccctaataattattttaaaatgtcaagaaactca

SEQ ID NO: 377772 - DNA, 543 bp, Homo sapiens
atccccattgtaatctgtaaaatttacagttccatttagctgtggctattcctytcttgtagtttacaatctagaggaaataaaactatttactggttcattcttgttgtcacaaaaagtgtaacagctaagagatttcttcactacaaaaatattttcaggccccagttagttcatattataacgatgtgcacagacccatgagtgaacttcagccttaccacatgctagcaatatagcctttgacaaattaagctttcagattttttttgtatgtgcaatgagagtaataatttctgtctcttggggtttttatgaggattaggtgaaggtagtaacttgtttactatagtgatactcattcactgtaaccataattacatttaaagaatgatttaatgcaaaatttaaatgcagtaatattagaaggtatatatagcttgaggtccagtattcccagagttagttagaggttattttcgagaataagctaagcagcacattatatatttattaagaattgtctgggtggactttctttta

SEQ ID NO: 377773 - DNA, 408 bp, Homo sapiens
gtgtcttggggatgattaacttggggatgatcaactccttcacacaggagttctctgaatttcttgaatttgcaagttgacctctctagcaagatttcaaaattgtcatggactatatcctcaaatatgtttccaaagtggcttgctctcctctttaaggaaactcaatctggttaagaacctttgctgtttgatctctttacaraatcccgtatttctcaactgttgtgttcatttttaaacttcttttttctttatttttcattgcttcaagtgagcaatcttccagctctgagattccttcctcagcttggtctaatgcctccaattatattttgaaattcttgtagttaattttgcatatcccgaaattcagtttggttctttcttaaaatggttaggttgtcc

SEQ ID NO: 377774 - DNA, 595 bp, Homo sapiens
cgttgtttacccttaaaggtattgtgtgtgtgtcttttttctctcacacatttcccaaacagaataagttcgtcacctctagaatggacttacaagaaatactcaggagagtcttaaagctggaagtgaaaagatgataaccaccatcrtgcaaacatgcaaaactataaaactcactagtagagctgatatacaaaggagagaggcaaatcaattaaaccttatcactacggaaaaccacctaactgcaaaaataacaataagagaggaagaaacaaagaatattaaagaacaaccagaaaacaatctaaaattacaggagtaagtcctcatctatcaagaataaccttgaaagtaaatgaattacatttctcatttaaaagacatggactggctgagtgattaaaatacaagactcaactatatgctgcctacaagaaacctaccacacctgtaaagacatgcacagactgaaagtgaagagataaaaaagatactccacgtaaacaaaaaccgaaatcaaacagaagtgtctatgcttatatcaacaaaacagatttaaagtgaaaacctataataatagacatggaggaca

SEQ ID NO: 377775 - DNA, 595 bp, Homo sapiens
cgttgtttacccttaaaggtattgtgtgtgtgtcttttttctctcacacatttcccaaacagaataagttcgtcacctctagaatggacttacaagaaatactcaggagagtcttaaagctggaagtgaaaagatgataaccaccatcatgcaaacatgcaaaactataaaactcactagtagagctgatatayaaaggagagaggcaaatcaattaaaccttatcactacggaaaaccacctaactgcaaaaataacaataagagaggaagaaacaaagaatattaaagaacaaccagaaaacaatctaaaattacaggagtaagtcctcatctatcaagaataaccttgaaagtaaatgaattacatttctcatttaaaagacatggactggctgagtgattaaaatacaagactcaactatatgctgcctacaagaaacctaccacacctgtaaagacatgcacagactgaaagtgaagagataaaaaagatactccacgtaaacaaaaaccgaaatcaaacagaagtgtctatgcttatatcaacaaaacagatttaaagtgaaaacctataataatagacatggaggaca

SEQ ID NO: 377776 - DNA, 595 bp, Homo sapiens
cgttgtttacccttaaaggtattgtgtgtgtgtcttttttctctcacacatttcccaaacagaataagttcgtcacctctagaatggacttacaagaaatactcaggagagtcttaaagctggaagtgaaaagatgataaccaccatcatgcaaacatgcaaaactataaaactcactagtagagctgatatacaaaggagagaggcaaatcaatyaaaccttatcactacggaaaaccacctaactgcaaaaataacaataagagaggaagaaacaaagaatattaaagaacaaccagaaaacaatctaaaattacaggagtaagtcctcatctatcaagaataaccttgaaagtaaatgaattacatttctcatttaaaagacatggactggctgagtgattaaaatacaagactcaactatatgctgcctacaagaaacctaccacacctgtaaagacatgcacagactgaaagtgaagagataaaaaagatactccacgtaaacaaaaaccgaaatcaaacagaagtgtctatgcttatatcaacaaaacagatttaaagtgaaaacctataataatagacatggaggaca

SEQ ID NO: 377777 - DNA, 595 bp, Homo sapiens
cgttgtttacccttaaaggtattgtgtgtgtgtcttttttctctcacacatttcccaaacagaataagttcgtcacctctagaatggacttacaagaaatactcaggagagtcttaaagctggaagtgaaaagatgataaccaccatcatgcaaacatgcaaaactataaaactcactagtagagctgatatacaaaggagagaggcaaatcaattaaaccttatcactacggaaaaccacctaactgcaaaaataacaataagagaggaagaaacaaagaatattaaagaacaaccagaaaacaatctaaaattacaggagtaagtcctcatctatcaagaataaccttgaaagtaaatgaattacatttctcatttaaaagacatggactggctgagtgattaaaatacaagactcaactatatgctgcctacaagaaacctaccacacctgtaaagacatgcacagactgaaagtgaagagataaaaaagatactccacgtaaacaaaaaccgaaatcaarcagaagtgtctatgcttatatcaacaaaacagatttaaagtgaaaacctataataatagacatggaggaca

SEQ ID NO: 377778 - DNA, 573 bp, Homo sapiens
aaacaagtttggactggaaactgttaaggttacatttttaaaaaactgtacataaacacaaacactgtattttagttgatacatttgtttttcgcagaagcaaggagtagcaattctgaaattacatgtacagtaatgcaattaatgacagggatatattctgagaagtgtgtccttaggcaatttcatcattgtgtgactatcatagattgtacttacacaaagctagatagtatagcctactacacacctaggctatatggtataccctgttgccctagctacaaacttttactgcatattactatactgaatattgtaggcaattgtaaaatagtggtaaggattatatattgaaacatagaaaagatacagcaaaagtatggtattataatcttatgggactaccatgtggyctgtcattgattgaaccatctttatgcagtgcatgactgtataacaaacaagtaactatgttgttgattatgtcagccagatttctcatagccagagaaaaaagttagatataaggaaaagaaaaggctagaatgaaccctgaggtattggattggg

SEQ ID NO: 377779 - DNA, 573 bp, Homo sapiens
gataggaagaggtcaaactatctgtttgtagatgatatgattctctatctaggaaaccttatagtttctgtccaaaagctcctacatctgataaaataacttaggaaagtttcagcatataaaatcaatgtacaaaaatcagtagcatttctatacaccaaaaacatccaaactgagagccaaatcaatgccattcacaatagccacaataagaataaaatatctaggaatacagttaaccaaggtggtgatagatatgtacaatgagaattacaaagcactgctgaaagaaattagagatgacacaaacaaatggaaraacattccatgctgatgaataggaaaaatcaatattgttaaaatggccatactgcccaaagcagtttacagacttgatgctattcctgtcaaagtaccaacatcatttttcacaattcaaaaaaaaaactattctaaaatttgtgttgaaccaaagaacctgaattgccaaagcaatccaaagcaaaaagagcaaagctggaggcatcacattacccgacttcaaactatacaagactacagtaaccaaacagc

SEQ ID NO: 377780 - DNA, 575 bp, Homo sapiens
aatgataaattactagacagaaatcacaagtatacaaaggaaggagaatcagagtagcatcagacttcttatattaaaagctagaaggcagtagaacaaatctatgggcactgaataaaatgagtatgggaggggtcatcccaacaagagagcacagttgtttagaatgtctgtaagtgtataatgttgcaagatactaatatctctggattttactcagcaagaaacccttaccaaactgattcaaaatggactgggtaaaaaattataacaactttgtgataattcttgattttaaaacaaacccatgttcttatgcacatttcatcttcataatacaatgcaaactttaaaataaatatgagatgtcaagggacatactgactacctttcagccagtttgggggaatggagtaacttaatatgtggtggtagttacaaagcatagtgaaaaagactgaattactgggacttgmataaacaaaatcaaacaatgcattagacaccagcttagcttggaaataggggccctctgaactcagcaaactatggtgacatgactggagaatgatgca

SEQ ID NO: 377781 - DNA, 556 bp, Homo sapiens
aatgaaccgattcatttctcacttggttgagtggttagaataaactctgtagtttggtgaaaaagtattttgtttaaaccctctgaattccctttgtctctgagtatctgtcttttaagaaagaaactctgaagtttagctacaaagttggacacatgattggttattaattgttcttactgaactttaatcctagcttataggtattgattgagagaaaaagaaaaaaatcctacctgcaagaaaataattacaaaagttagaagtgccagcatctccaaatgaggaggaaccagagtaaaaattctggcaccatgaaaaatctgaatgtagtgacaccaccaaaagatcatactagttctccagtggtcacgarccaaaattgaaactcagcaatgacagacaaagaattcaaaacatgaattgtgaggaagctcaacaagatccaagataaggttgaaaataaacacaaagaaacttctaaagtaatctaagaaatgaagaaacaaataaacatctttaaaaggaaattaattagagcttctggaattgaaaa

SEQ ID NO: 377782 - DNA, 598 bp, Homo sapiens
ttttccaacactatccactctctgaaactgtgttaggatgagagagttaactccattttgtgaaaccatgtttcaggttaaagtcacctttaacagtttgctgccccagcaggggaataaataaatataagtaaataagaaagaggcatcttgcagcttaaaaaaaaaaaaaaattacacattcctcgtgtatgtttttcttcatttctaatgagttgtatgtgtatttggaatgggtgaaaaatgaatcaggaagcaatggttcttgctataaaggaagaaaaacatcacttcctattgtgccagtttctaacagataattaatctatatatgttgttgccacttagtagtctgtctgaccccaggacagcaggcagagtcaatatctctctctctctctctctctctctcwcacacacacacacacacacacaccccacacaccaaaactctctctctgtgtcacatacacctgcgtgtactaaggtcttaagtgtcattagtaacaaacacagtctctgtttaaagatgataactcagttattccaagataggaagctctctcttaccctcaacacctgcataaaagtgccaggg

SEQ ID NO: 377783 - DNA, 587 bp, Homo sapiens
tgccaggctcagcactgggcactggaaacttaacaacggtataggaggcatccactaagtattttttgtcctcatttgaaccaaaattaggatgaaatggggcaaaagatgtgagttagtaactcttcattaaagactatttttagtattgttttaacttttaaataattttattttttaattgatgcataatagatgtacatattttgatgatacaagtgacaatttatacattcatgtaatttgtaaaaatcaaatcagtataactgggatatatatcactttaaatatttgtctgttctttatgctagaaacatgcaaattattctcttctacctattttgaaatatacaatagattattgtatgtagtcaytaaactgatctctcaaactctaggctttatttcttctatctaattgtatatttgtacctattaatcaactctcttcattccccctcccccacctcctgttttatcacttcaaaatatgatcataactcaaactgatatagcaaaactaacttgacaaagtaatcaaaaataagaccgattaatatataattaggaattcaatgtgtacatgt

SEQ ID NO: 377784 - DNA, 564 bp, Homo sapiens
aatgttcaatcatttaatcactaccttaacagagatgtgtaaattatacttattaatactaaagaaaagactgccttggctataacatgattttgttacatattataaataaacttttgtctgttggaattgttttgtgcaaaagtaagtgagccacatgacagcattcgtggttttaacagaaacgttttctgctggtggaagcttctgctagaatgttactcacacataaaccacaagtgcattttttgttactagggaaagtagaacagatatggtgttagactttgccttcctttaaagcccaaagaaaggaaagatttctactgccttaacagtttgaaagcaagtgaaacaagctttacttcccatagcattcttcttgtttagaacactatgcaattcaaattcactttgcagaaaataaaaccagaacatttaagagaaggagggaaaggatcytagaagaaaagactgaaggaagccatgtgtcattaattcagttataaattattagctgaaagcagcctctcagcatttgtatttgatgaacaaaaattgatt

SEQ ID NO: 377785 - DNA, 607 bp, Homo sapiens
ttttctttcaagctgtttaaaatgttttgtagctgttcttgtctaaatgaatcaaaagaaggataagcaggaactagcataaataatagctgccttaaaagggggcagcaaaattgatagctctacaaatggcagccacctgtaccaggaaaactcaaagaaagagaataagcatttgaaagaaagaataattggagttgtgacagcaaagaatagcaatcactccccagaaggtgtttaaaaagctcttctctctcctacttaatcactgttcccttaagcccataaattaaaatgcaatgtgtatgttatatgcattatgagcatgaatactcatgtaatctaaagaatcttagcccagcttgttttcatactaccagactcaattccataaataatataagaacaacaaactcttacagtgaacygttctgcattacattatctcacaattttattgaattgtattgatagtctgttaagactctcatattagtgcataaacaaagacttgatttctctaactaaaaaattatcattctttcctttagaaaaggtataatggatacatcactaaatgtgaaagaaatttataaaagaataaagt

SEQ ID NO: 377786 - DNA, 572 bp, Homo sapiens
gcgcacccttgtgaagcaaccacaaagaggcagcttcttaatcttccatcattaattcagatcaaagcctatcttgaagttttgtgggctgaacactacaggcctcactcattcaaatccatccctgtctctcagacatctttcccacaaccaccttccacttccacccctatacacagagaacagcaggawgcagtaggagtgacacaccagcttttaattctggcttcactacttactcagcatatctgagcctcagtttccacacctaaaaatacaaaaagcaatctccgacccaaccactgtgcagagccatcaaagaagcaagtcaggtaaccaatgtgacagcactttgaaacagatacgaattcagcatttgtttaaaaaaatacaaagtctgtaagttcatgaaagatgaattcaaaaccaaatacagatccttttgataaaatacaataataaggaaaaagtgtatgaagaataagattatttaagtgagtatttaactggtattatgtatttcaaaagagactaaatctcccagctcttccttttaactaagtgttttggta

SEQ ID NO: 377787 - DNA, 511 bp, Homo sapiens
aactcttcctaaaaatgtgagcaggtcacttgacactgtatctgtttcttcatttgttaaaatatgatattacctccccaaaggacccatgtaaagattaaatggaagaacatatttaaaatacctatggcagtgtttagagcggtgaaggtaattaaagttaactcccttctttttccttttttttttttattattatactttaagttttagggtacatgtgcacattgtgcaggttagttacatatgtatacacgtgccatttaaaatagaaaaataacctggatttacctgtcatggcagaattatcagggygatccaagaatttttttgcaggtaagattatgagtgactctaaaccttcactctcccactgcaaaatgaactaatggatgtcagccttcttttgatcactgtcaacgagtaatatttgttgggcagattataattacagcttcagaaaaccttaatatagtatagatatcactgtcaattagtaagaaatttatac

SEQ ID NO: 377788 - DNA, 601 bp, Homo sapiens
ggaattcacattgcatattctggataaaaaatgtttgaaataaattactatttttagggagaaataacattggcatgtcaccctaattatatcatagaatcctagtgcaggaggagatttttagcgtaaccctctacttgtataataataataattaacaaatatcagctgtgtactacatggcgaaccctgtgctgtgctggtgactttatatgtaatatcttctcagatctttacctgtgstcctgtgaatcaagtactattattatccaattgtatagaccaagccaactgagggtttggtctgcacaatgtagataataatagtacttgattcacgggaacatatttgcttaagttctcactgctagttagtgctggggctgagatttaaacacaggttctgactccaggtctgatgatctgaaccaccacagaaaccaagcaaggcccagagcctcctaagctcacgttctaattattgcactaaattgccacttacacttctggtgtatgggataactgggagagtttgctgatgatatcaaacaatgtcagtcacatattttacaaaagaaaaaaattatttgaattgaaaagt

SEQ ID NO: 377789 - DNA, 310 bp, Homo sapiens
ttgtttggaaatttataactaatattatcaacactgacagtgtgtgtgggtgtagtgtggatgtaagatgtgggctggtgggatggaagagaaaagcaataaggaawaattttagggtgttagcacactgtgaaggttggtagaggtaagaagtaaatattgggcctacacaataagatttcaatggtctggacaggccttctgactttcaacctgtttgtgaaggctgaaactcttaatacttcttcttgacagtctgttacaataggaaaccatagcctcattatttatttgtcccttagtgggaact

SEQ ID NO: 377790 - DNA, 350 bp, Homo sapiens
gttcctttatctcattacatactacatgtgttttaacgatgtttacattttaatcttccccattgaatccataagctctctggggtgaggacggtatcctcaggacttaacacgtctcatcactctcctgcttctttcyccatctacccccatcaccttggtgggaatcatccatccattcactcatgcactcactcaatatctgctaaggacctctaggtggccaaggcaatctggttaccacgggcaacatctcctatcctcatgaatcttatctttactgccccaaaatgtcttccttttagcatgtcgttgttggtaggtctaatttcaccttcctcatttatgcc

SEQ ID NO: 377791 - DNA, 570 bp, Homo sapiens
tactctcaatttaattgatactcaggatcttctgcaaaatatgtggaatcccagaatcacttttaaaatgaaagctatgggatagatagagaaattgygaggaagatcatgttcttgattggtaacacaacagtgttttcaggttacatataatatcccaacaccattactttattccattctcaggactgtcagaaaaataactaagagaagctgagatgagatctaggagaaataagtaataagattattagaaaatatagaattcactgtgctttggggcttgggttttaccttcttattacaaaggatattcgttttgagtcaagtaaaaggagaatataaaatataaacactggtatgaaaaggttagtgggaagaatattttacattctcaaaaaaggcaactggtatatggtgtgcttaagatttgtaaattcatatacaataattaatgaaacagctgacaattattgaatatctactaggtgccaggctctttacacatactctctcacttaatggtcataaatgttacatcatatacatactattgctgtgataagtcta

SEQ ID NO: 377792 - DNA, 576 bp, Homo sapiens
tcctaccaatgccctttgtctcaaggatgactggtaagaaggagagtgtcttgtcacaaaacgtgtggtgctctccagaatctattttctcctcttttttctggcatactataagactatattttctagcccccttgtatccagatggggccataattaagtcttggagaataaaatgtggtggacatgatgcaagcttcttgtaggcctggcttctaaatcctctgcattttcctgagctttctttctgcagactggatgcagsagatccagtgatggacaccaaggccatagaatatgaagaaactacaactaccaaataggtggaacctagctcccacattggtgagtaaaactatctccacactctgtcctttggcaggagtgtgaaatacttttgttgtgttaagctaatttaaattttggagtttgttatattagttaacattacttacccccacctaaaccagttagtataagtgtttatatatttgctaatacaaaaatgagtcaaaataataaaagtggcaacatctattgtctgttaattaaatgccaaagactgaagcatagaga

SEQ ID NO: 377793 - DNA, 480 bp, Homo sapiens
ccacctgctccaaccccttgtggcagctttgtttggtcttctactgctttattctgtgtttggacaaagcatggactgcccaagctgttcttgggagtgtcctagaactaggccagcagattgtcaggcatattaccaaccttgtgcacgctgaaagaggaggtctatcagatttgtaattttgtaaaaagaaattgaagcttaaaggccctccaccaagttgagcaactgtgaatggaaggataagtctaccttttcttcttctaagtcaagtacagtaaaaatgaggaaaactaaaataatataaactatattaaacaatatacatcagaacctttgcctcaagctttactgcagtataattgactactaaattgtatacatttatggtatacagcaccataaayttaatgtacgtatacattgtgcaatgaataccacaaacaagtttgttaacacattcgtcacctcacatcgtta

SEQ ID NO: 377794 - DNA, 449 bp, Homo sapiens
ttggcctgggagtttttattctaataatcaattctaaggagacaatccaaaatgcagataaaaatataagcccaaaggttttttttaataatattaataaaagcttaaaatgcaaaaaagaaataacctaatcactcaacattataacttcatacaataagtatttattgctcacctacaatgtgccagccctgctaaagggttagagagttagtgcacaataaggcagataaggagctcatgatccagaggggccagagtaaacagwaaatgaatgactatctcctagagtctcccagcagcctgcctctgcagatctgggggaaagtcctacaggcagaggaaatggcagtgcaaaggtcctgagctccaggaaggaactagattttcaagactttgcaaagaaaaaaaaaaaagaggaagaaaaagaagacagtcataaaagccca

SEQ ID NO: 377795 - DNA, 651 bp, Homo sapiens
ctgaaaaggtttgcagaggacatgagatatatggaacaccagaaaggaaggcaaagcttatggcttgtcaaccaaacttggattttcttataagcaaaaggactttccaaatgttattggaatcttagtgggtgctataatagcgaaattataaactcctgggatccctcctctaacttactgttagttttcagagtttctagaattatctataaaatattgtgcaggaattaataactcatgtcattactaatataagtaaggcctaatctatttcaactcccaatatgaacaaattttaccatattgatttttaacattgcagctatccaatgagtcttcaaaagagcatttttaaaagtgtatcccatgtaatattaatttttgcatggcattcttcagaaaaaaaatttaaagattmtgcagtcaaataagtttggggaactcggatatcccctggattctcaatgtctattgctgtattaaaggttttgagaaacctggaagtaaagaaaactatttgaaccatatataacttttgaatatttttgcacaaggtatcttttaacacaaatgctctagagaaatttgaaataagctgtcttaaaacagtgttgcctgcctctcagaactataatgaagaaaaaaaat

SEQ ID NO: 377796 - DNA, 651 bp, Homo sapiens
ctgaaaaggtttgcagaggacatgagatatatggaacaccagaaaggaaggcaaagcttatggcttgtcaaccaaacttggattttcttataagcaaaaggactttccaaatgttattggaatcttagtgggtgctataatagcgaaattataaactcctgggatccctcctctaacttactgttagttttcagagtttctagaattatctataaaatattgtgcaggaattaataactcatgtcattactaatataagtaaggcctaatctatttcaactcccaatatgaacaaattttaccatattgatttttaacattgcagctatccaatgagtcttcaaaagagcatttttaaaagtgtatcccatgtaatattaatttttgcatggcattcttcagaaaaaaaatttaaagattatgcagtcaaataagtttggggaactcsgatatcccctggattctcaatgtctattgctgtattaaaggttttgagaaacctggaagtaaagaaaactatttgaaccatatataacttttgaatatttttgcacaaggtatcttttaacacaaatgctctagagaaatttgaaataagctgtcttaaaacagtgttgcctgcctctcagaactataatgaagaaaaaaaat

SEQ ID NO: 377797 - DNA, 651 bp, Homo sapiens
ctgaaaaggtttgcagaggacatgagatatatggaacaccagaaaggaaggcaaagcttatggcttgtcaaccaaacttggattttcttataagcaaaaggactttccaaatgttattggaatcttagtgggtgctataatagcgaaattataaactcctgggatccctcctctaacttactgttagttttcagagtttctagaattatctataaaatattgtgcaggaattaataactcatgtcattactaatataagtaaggcctaatctatttcaactcccaatatgaacaaattttaccatattgatttttaacattgcagctatccaatgagtcttcaaaagagcatttttaaaagtgtatcccatgtaatattaatttttgcatggcattcttcagaaaaaaaatttaaagattatgcagtcaaataagtttggggaactcggatatcccctggattctcaatgtctattgctgtattaaaggttttgagaaacctggaagtaaagaaaactatttgaaccatatataacttttgaatatttttgcacaaggtatcttttaacacaaatgctctagagaaawttgaaataagctgtcttaaaacagtgttgcctgcctctcagaactataatgaagaaaaaaaat

SEQ ID NO: 377798 - DNA, 584 bp, Homo sapiens
atgctgtctaaaagtattaagaatcatatagcaatattaaatggaatggaggaaaacaagtgaaagctttcaaatataccattattattctaattactaaagctggatggaacagctgcattgttttctacagtttgctatctgcttgttgtcctttctaagttcagcacatcattatagttcctaaaatctttaccttcttgaagtccttaatagttccaatgacttcctttaagttaaaatgtacatgctaaaccatctgtaataaatggaaaataatactagaacttgttctaaaatgtaatgcacttttttctgataacaaaggaagaagaaaactatgtttttgaatctgcaaacatttgacaaaggctcactcaccaagggagacagtgaatgaaaagcccaaagaaggctgactaatgactcaatgttatgcatrgtaggagtgacatgcttggcctacctgctcatctacaacctgactgagtgcatcaccagtgtgaccacctggaataggaggacctcaagccaggcaaataacaatgaccatggatgaacaagagaaagtgatcaagactctg

SEQ ID NO: 377799 - DNA, 537 bp, Homo sapiens
gttgtttaaatgaaaggaatcagatgaaaggggaccacagagaagataagaaaccactgaaaagggagggttccaaggacaaaattcaagcttcacactttccccaaggcgtacctcactgcatatcttccactgaagtactcccacccctacttccaactgcttacttcctcctaacctccttttgagtgcctcttacttctgcagaccccaaaacattgcatagctgcagggtttagtcttcaggatgcttcttttctattaacacatactctctggggatctcatccactctgctgactttaaattccatacactgtttacccccagtatctaggccagtcctcccaactccacagcaccccagattcaactgcttacrtgacatttccactctgacgaatgacgggcatcttgaagctaaacatgttgtccacacacaaccctcattgctgcctctgcctgctaaactgttccttcccaccatttacccaagttgctcaggctaaaaaatctaggtgttgttcttgactcctt

SEQ ID NO: 377800 - DNA, 607 bp, Homo sapiens
tgtgtgttgtgggactggggaatggagagaaaataaacacctaaatgtgtgggtttgaggatatagagaaaatagtttccagtcctgatgaaacatgctcagttctggatccccgtctctcaccttgtacaaaaatcaactcaagaaggatcaaagacttaaatctaagacatgaaattataaattctagaagataacattggaaaaactcctctgaacatggatttaggcaaagaattcatggctatgaccccaaaagcaaatgcarcaaaaatgaaaataaataaatgggacctgattaaaaaaaagcttctgcgttgcaaaagaaacaatcagcagaataaacacacaacacacagattggaagaaaatatttgcaaactgtgcatctgacaaagaacgagtattcaaaatctacaaggatctccaacaaatcaacaagaaaatacaaataataccatcaaaaagtaggcaaaggacataaatagacatttctcaaaagaagatatacaaacagccaacaaacgtatgaagaaatgctcaacattactaatcatcaggggaatgcaaactaaaaccccagtgaggtaccaccttacacctgcaa

SEQ ID NO: 377801 - DNA, 506 bp, Homo sapiens
taagtgttgatggtcccatatggtttaaatctgtatttttgagctcccagcttattctgataatgaaccaggctggaaaccagttttatagtattttttctaataactctctggtggaagtactttccccatattcaaataatcccaagaatgttggaaaagggactatgtttctgaaaatagtaaaaataattactgggaaactttagggggaaaaatcaataagtagaaaaaatatgtgttattattactaagtttcttaacgaaggaaagacgactgattgcatagatattagcatcctgattatcctgggttttttttgtaccagtcatttgagaccagataattaaacaaacactctcaaaaagtacatctattttttccagaagcttgtaccaarcttcttatatcctgttcgtgtcagaaggaatcatggaggggcagacagaagctctaaaatggaacagtaattacagtaaaagagcataactattacttataatta

SEQ ID NO: 377802 - DNA, 570 bp, Homo sapiens
ataaatatttgaagagagagtgaataaatcaatcctatgtagttatttaaggatttttactgctaattttaaaaaataaagtatttatgtatttggattttgatcattatcccaattagtattagaaactttgaatattgcacacacatacmcacacccattccacaccactcatcttgtaacttttatccagaatatctttatttttatcttcttaactttctaaaattaagctgttttcttatcagttaatatttaattagctgggctgacattgtatcagttttcattggcattgttatttcttgcattccgggtgaagggattagcatatgaggcaataaccttgaatgcaaggagcaaggaatagagatgttaaaatgggcggctaggaacaatgagaggacactgactgatttatgtatgaagaaaataactctgtataagggtttatggaggcaaaaatcttatcttagagacatctgactgtagtaggcaataaaatgtgatgctcagatgacctttcaagaaaggactctgcccagctataagaggagtggttagttagct

SEQ ID NO: 377803 - DNA, 593 bp, Homo sapiens
tcttatcttagagacatctgactgtagtasgcaataaaatgtgatgctcagatgacctttcaagaaaggactctgcccagctataagaggagtggttagttagctgatagtcttgccaacacaatgtttactcaaactttttgaattttcccgacataataggtgagaaatggcatttcagtgcagtttcaatatgtatgttccttaccatgaatgaggttgaatatattttcatatgcttatttttacgttgcagtgatttcatttctgtaatgtatctgtccatgtcttttgactttttgcaatttggctgttagtctttccaatattgatttgtagaaattccttatatgttagggaaattaacctcttatctacaatgtaagttgtaattcattttccttctctgtcattggtcttttgactttgtttgtggtggctgtgttgtaaggattaattccagcaggcctagaattggtctgaactgttttgctgaattacctgcatatattgatctctggtgaaggtattaaatgaattgatgaatagtattgctttgtaagcatgggttccaagtgagttttggagtaatg

SEQ ID NO: 377804 - DNA, 593 bp, Homo sapiens
tcttatcttagagacatctgactgtagtaggcaataaaatgtgatgctcagatgacctttcaagaaaggactctgcccagctataagaggagtggttagttagctgatagtcttgccaacacaatgtttactcaaactttttgaattttcccgacataataggtgagaaatggcatttcagtgcagtttcaatatgtatgttccttaccatgaatgaggttgaatatattttcatatgcttatttttacgttgcagtgatttcatttctgtaatgtatctgtccatgtcttttgactttttgcaatttggctgttagtctttccartattgatttgtagaaattccttatatgttagggaaattaacctcttatctacaatgtaagttgtaattcattttccttctctgtcattggtcttttgactttgtttgtggtggctgtgttgtaaggattaattccagcaggcctagaattggtctgaactgttttgctgaattacctgcatatattgatctctggtgaaggtattaaatgaattgatgaatagtattgctttgtaagcatgggttccaagtgagttttggagtaatg

SEQ ID NO: 377805 - DNA, 631 bp, Homo sapiens
gcatgtataatgacttaacaacttatggttcttttcctttgtcttatacttccaacagggatttcactcctatattttacccttgaagctagaaatgttaatgtatattagatttattattattagttctcccacttttactaatacttctataaatactctgtcgtacacttctatttttagcctataattctcttgtgggtaatatattctgtagtttattactttctataagtaatagtgtttccatataatggctataaatttgctttcatcaagtgtcaatggagttttgaaaatstggtgatatattgcaccatttgttcacatgacccagactatgatttcatcaagagtccagacacaaggaaaatactctatattcagtgaacaaagatcacaagatctcaacctgctagctgaaaattgcaataaaaatcagtcatctactcaagtcatgagtggagatagacttatctgaggaaaactaattcttttttgagacagggtctcactctgtcacccagactggagtgcagtagcacgatcatggttcactgcaggctcaaactcttgggctcaagggatcctcccacctcagccacctgactacctgggactacccgtgtgt

SEQ ID NO: 377806 - DNA, 619 bp, Homo sapiens
ccccaggaaacgcaaaaatgaaaccaccccatagaaaggtctctacaactaaaagtatatgcaggacccccctacacacaaacacaaatatgcacatacatataagataactccctttaaagagctcacagaaattataagatatagaagatattcatgttataaaattcaggtgctgaacaaatacataggtgactttaccttcttggtgtgatagaatagcttgctgaggaacaactctccctccaagaataattagaaaactgaatatgatacctctctaaaaaaatctatttgaaggtatcagagagctaccaaagcaactaggacttgagacatcaggattacagagaagtaagccaagcaaaccacccacttttaccttcaaggcatttgcaaattctttgcatggcatcagaatccagaaagagaactacaaaagcagagcttctggcaaactcatggggatgaagagacaaaaattagaccttgcacatcctaatgcagccaataattaaatggccaagatcctgaagagaaaggaatgaagagaagaytaacacatggtggttttcagccaaggcaattgttgaatatttatgctgcataagacaaaaat

SEQ ID NO: 377807 - DNA, 513 bp, Homo sapiens
atttttaaaatttttttaataaaataaaataaaagtcaggcaaatatccaaccattctgcmacatattctgttggtgaggctgtggaaaaacaactgttctcatacattgcctatgagaattcaaaatggtacaacttttataaaggggaatttcatgatacctaagaaaattacatggactcctggaatccaacccaaaaatagagtgaaaaacatgacaaaagacatacaacctgggctattcatgacagaaatatttgtaatgggaaaagactacgtacaacccaaatgtgcatcagtaatggactggttgaataaactgtggtgtctccatacaatgaagtactctggagctataatagtgaattgtgaatattctccatggagtaatcactacaatatattaagtgaaaaaataaaaatttatatagtgtgttactgataatctaagaaataagggatgtaaagaaaaggtaaaaagaaaatatattttacatatatacacgcatata

SEQ ID NO: 377808 - DNA, 513 bp, Homo sapiens
atttttaaaatttttttaataaaataaaataaaagtcaggcaaatatccaaccattctgcaacatattctgttggtgaggctgtggaaaaacaactgttctcatacattgcctatgagaattcaaaatggtacaacttttataaaggggaatttcatgatacctaagaaaattacatggactcctggaatccaacccaaaaatagagtgaaaaacatgacaaaagacatacaacctgggctattcatgacagaaatatttgtaatgggaaaagactacgtacaacccaaatgtgcatcagtaatggactggttgaataaactgtggtgtctccatacaatgaagtactctggagctataatagtgaattgtgartattctccatggagtaatcactacaatatattaagtgaaaaaataaaaatttatatagtgtgttactgataatctaagaaataagggatgtaaagaaaaggtaaaaagaaaatatattttacatatatacacgcatata

SEQ ID NO: 377809 - DNA, 646 bp, Homo sapiens
tagcaagatcacacataagaatcaactatgtgagctttcatgcaagaaggaaaacgggaatgcaccaaaatcacaaaggacaccccagatcataggaaagagaacacaggcaaacagctgccatgacaggtatccaactgatamaagtgaatgaagccccagtatacgagagaggaagagactctccctctgtgactcacctttccactgggggtccaaagctgagagagagcactttgtttcttccaagccctgtagttaacttggggagagtcttggagatgttatgagggaaaaatagtgggaaaaactgcagacattttcccagtcccaggacagagaacaggacaccgtttttaatctgagtgcatacaaaccagccattctttggtgactaggccccatggctgcacaggcattttagtcttgagctggagatgagcacctgccctggaatagagtaggggcctctataaccagaattgtggaaagccccctcagcagtaggcactggaattgtgctctcccccatggaagacttggggcaggatatccgccacagctgtgatttctcctaggtgataagaattgcagcctgggccagtttggtgacctggaactggtctctatgtgtcattgctgggtg

SEQ ID NO: 377810 - DNA, 409 bp, Homo sapiens
aatgtgtaaaattaacacaaggtaatagccagtctcagctgtttcaaaatgtgtttggaaactaatgaaggagtggaaattaagccaaaatcatgctaaatgaggaaatttaggacatatgaatataaatatagtcctcacaacataggatggaggaaaggtcataggaggcgagggaaaagcacactcacagtgaagtgtagggaayagatgaaaggaaaagtagagggagagtaccaacatatacttgattccagtctacatacagtgaactgttctaggacttctagtatctcatttaatcttcacagtaattgatgagaaaactgagactcagatcctgggtaacttgcccgaagtctcgcctccataacgtgatgaaacaacgtgcccaacctaaagccatttg

SEQ ID NO: 377811 - DNA, 566 bp, Homo sapiens
ctgtgtatcacataaaatttcaaagaggtgactgttaccctgttcttcaaaagtttgaaaataagagttgccatgcaatctctagaactaaagctaattattttttgaatgccattaccttggtttcccttctttctacctccatccactggygtagcctaccatatttatcttttcaatattaccatttttgttatcagcctctctttccagcacacacaacttccctgtcctttgaatttccttatgcctgccaagggattccagctgaagtttctatgactggccttccttagatctcctaaagattttctatttaagaccgtttgcttaaagtctactaacaatgcatttttgagttacaatagctttattattaaaaggcatatatgcttttaggaagaaaaacacattgtcacccatatgtgtcaattaattgatcgtgaattaagtaggatgagattccaggatgtgatgactgtggagaggaggtatgttcagaaagaggaggtggcatcaaagccaaagtttgcaattttgctccactgtttcccaaagaattgtct

SEQ ID NO: 377812 - DNA, 660 bp, Homo sapiens
gtccagattctaacagaaatgggcagcctcatatgtttgaggatggggaaagagtttgagagaatcacatttgagttcagaaataatgattttgggtacagtaaggaaaagagattgaaagtgaatggaagtttagtgtgtgatgcttacatttaacccttagtgaaggctctcttctttgcaataaggatatcccagaaagactgaggcccactttggacctgactatctgaaagggaatagtcctcaggtattgaaagaacagagtgtcaatgtgccaggaggtcactggtggatyctaaaagtagcatttggcatttttgtaatatatttcataagacattgcttgccactttttttcctccttaagtgagcagctaaaaagccacgcttttgaatgatatttttatagcacagatgataatgctttctttaaattcccacctgccttattttaaaataaaaacctactgaaattcaatgactaggtctggttttatagtaagagaaaggtaggatgctgtctcagtgattgaattttctatggttgatctttttgcagatgccctgtatctggcttttaaaatttctcaggagtattttatttttaaactctaaatatagtgtcaaaaaagagtgacttacaaatggacctaacag

SEQ ID NO: 377813 - DNA, 506 bp, Homo sapiens
ggaaatcaaagtgtatgtttaccatgttagtaacaaatagaagttgcaatgagtasagggaggatgtatttttctacagagaacatattataataggacatagtgggacctcaaaatcatgctaacttgactctgggtagcagggttgatttaaactaataagaaatctaagaaaagaatcctgaaaaatattggttgaattaattttaactacaagagaagaggacaaattgagtattcatagatagcaagcattttttcatttactttgaaaaatttgaagaaatcagtgtctttatattatacattttgttttaaatgaaatgctccgggacgcttggattccaatcttgatgagacatacaggttttgtttactgtcggacaaaatgttgatgttagtggtggaaagagcaaagataccttcttggtagggcagcttaatttcatgatcatattgatagagagagcttcacatcccttgtttctattgtaaagaataattga

SEQ ID NO: 377814 - DNA, 580 bp, Homo sapiens
cttaaaatggtttgcaaagccctacacaatttggaccatattcwtcttcatctttatttccttctactttcccccatgattgccacacttcagttaggctcttctaaatcagggtctttacacatgcagtctcctgttcttaaaaagctcaccttttctttctccaattgatgtgactaacaacaccccttgtgcatcaagtgtacagtgcattgtgcaatgtctgccctcctgggaagaatgcacaaaaccaatcttaactctctgtgccgtggtgcctaggcaatgcctggcaaatggtagctgctcgataaaggcacaaataaaaggagtgatataaccagaactgtgtagaatccagaatccatttgatgtcagatgataggttgtcttggacaagtcagaaaccaaattcagcaagctattgacaaattagatgagagccaggcctgagttagataaataaggggaaaaaagatagatacagtaaaaactactgatgtccacaacaatattctagaactgaaataaaaactcaccacatgatgtctacacaaagacatgaaatgagaccaaaagt

SEQ ID NO: 377815 - DNA, 595 bp, Homo sapiens
ccaaggatttcccagagtggctcaggatcttgggtaagctccctttcagattttggtgctccacgaatttgtgttttgagattccccaagtttctttgagcaaattcctgacccaaactgggtttggaagtcatgacagaaactggactgggtccaggaatggatttgatccaggaattaatgggcttggatccaagtagaggcctcttacatctgactgggtcagaaatgaactgakagtaagcagtaatattgcaggggttataaaagttggcttttgaaaattcacagggatttttgtgtttatttcatttttcttgtgcacttaggtaggaaaaaaaaagatcattggcaaagtttatcaagagaacctgagagtaaagtcattattttaagacagagggatccttatttctggaaaactgagttccttgtggcttatacattaggcctggaggcagcaaagtcttacagaaatggcaaaatcttactaaagataacttactgtggagcattccaaataaacaacaccttgaagcgcattttaaaatgagggctctcagtaaagtccctttcagctaagaacacagtttgg

SEQ ID NO: 377816 - DNA, 595 bp, Homo sapiens
ccaaggatttcccagagtggctcaggatcttgggtaagctccctttcagattttggtgctccacgaatttgtgttttgagattccccaagtttctttgagcaaattcctgacccaaactgggtttggaagtcatgacagaaactggactgggtccaggaatggatttgatccaggaattaatgggcttggatccaagtagaggcctcttacatctgactgggtcagaaatgaactgagagtaagcagtaatattgcaggggttataaaagttggcttttgaaaattcacagggatttttgtgtttrtttcatttttcttgtgcacttaggtaggaaaaaaaaagatcattggcaaagtttatcaagagaacctgagagtaaagtcattattttaagacagagggatccttatttctggaaaactgagttccttgtggcttatacattaggcctggaggcagcaaagtcttacagaaatggcaaaatcttactaaagataacttactgtggagcattccaaataaacaacaccttgaagcgcattttaaaatgagggctctcagtaaagtccctttcagctaagaacacagtttgg

SEQ ID NO: 377817 - DNA, 581 bp, Homo sapiens
tgatgattaaagaaagtggtacacataaaagatttttaacattattcttggaagactgtaaatattagcatttattattatcaccagtcacttggattgggccttagcaacacacggtttctattggcaattacctatgcccatttaacaacctctattgataacagcaggcactgctctagacatcgtgggtataatgatgaatacaagaagttccttctctcaaattactctctgttttgcagtagaaatgggatcatgtacrataaattttaatatgacatagctgattgtgttctaaggtataaagtaagagtatggggggactgcatcatgttcttttccaccaaattatgggtttgggtgaaggaagtgtgtaaagtgggaacttgcccccactgagcaaaaaacctgtaaggttcagacttgctaggacagaagggtaaatgagtgaaagaatgccctgttcacgctgtgcatgaagtcatagcctcatcatcaaaggatattctcttttctttaaggtttggaattatatatgcgtttctcccaaacttgatacagaaagagatttataagaa

SEQ ID NO: 377818 - DNA, 581 bp, Homo sapiens
tgatgattaaagaaagtggtacacataaaagatttttaacattattcttggaagactgtaaatattagcatttattattatcaccagtcacttggattgggccttagcaacacacggtttctattggcaattacctatgcccatttaacaacctctattgataacagcaggcactgctctagacatcgtgggtataatgatgaatacaagaagttccttctctcaaattactctctgttttgcagtagaaatgggatcatgtacaataaattttaatatgacatagctgattgtgttctaaggtataaagtaagagtatggggggactgcatcatgttcttttccaccaaattatgggtttgggtgaaggaagtgtgtaaagtgggaacttgcccccactgagcaaaaaacctgtaaggttcagacttgctaggacagaagggtaaatgagtgaaagaatgccctgttcacgctgtgcatgaagtcatagcctcatcatcaaaggatattctcttttctttaaggtttggaattatatatgcrtttctcccaaacttgatacagaaagagatttataagaa

SEQ ID NO: 377819 - DNA, 608 bp, Homo sapiens
ccagattctacttatcccaaacaagtcacattcctgggtgaatgtgggttgttttccaactgtatggaaagtgacatggaaccaataatggtaccaggatgacaagactggattttgaccagtggcttatcagctaaaagttatttgtgcaataccataattgatatagtgattcctttcgtagtttttgtaaggattaaatgagatacagtaatcaaatatcaatgtaaaggggcagcataagtaaaatctaaagctctaggttgacgtggaaaggtggtgttttctgaaatagaaatcatagagaagaatcactaagtgggatcttataaccaattaactttaactgtctggtactctccaaaaagatcataactttccccagcacataacagatccagagtgatttgtgtttgcacatcccagcatttctcacacatgggcttacacaccacatatgcggccatgtcttggcttacggattgaaggagcacttgttagaatgaggagttctatttatagaggagctgctgtgagcaagacatcctactaggcactcaagtggatgttactttatgcaatttamtcatcattgcaaaatcgtgaat

SEQ ID NO: 377820 - DNA, 531 bp, Homo sapiens
ttgtgctgaaaccatgtactatcatccctcagctagtctgattatctcttgtaaaggtatttttgtgyatgaatagtttttcagattgatgttcctgttggggggtgttcactggcgagtcctggttcaacatcttcctctgcctctttcctctaaacgccttaatctcaatgatccctcactaatgccacacaagggaaagttcaaatttcctggtacacatttttttctgtaatttctatttcatcctgaatttgcctttacatcctttttaaaaactaagttctgttctatgtataaatagttttctccatcaagaataatgagtaaaatagttgtggatcaattcagggacaggatcaaatctgtgggctcactgatgtttagattaatcattttgattgtactctccaagcatcagtgtggaaatcaacttcacccataaagtgttaaggactcaacgaaatgtttataaatcacaaggcatagtgcttggagtagaataggcacccaataaatgccaaatcatta

SEQ ID NO: 377821 - DNA, 531 bp, Homo sapiens
ttgtgctgaaaccatgtactatcatccctcagctagtctgattatctcttgtaaaggtatttttgtgcatgaatagtttttcagattgatgttcctgttggggggtgttcactggcgagtcctggttcaacatcttcctctgcctctttcctctaaasgccttaatctcaatgatccctcactaatgccacacaagggaaagttcaaatttcctggtacacatttttttctgtaatttctatttcatcctgaatttgcctttacatcctttttaaaaactaagttctgttctatgtataaatagttttctccatcaagaataatgagtaaaatagttgtggatcaattcagggacaggatcaaatctgtgggctcactgatgtttagattaatcattttgattgtactctccaagcatcagtgtggaaatcaacttcacccataaagtgttaaggactcaacgaaatgtttataaatcacaaggcatagtgcttggagtagaataggcacccaataaatgccaaatcatta

SEQ ID NO: 377822 - DNA, 531 bp, Homo sapiens
ttgtgctgaaaccatgtactatcatccctcagctagtctgattatctcttgtaaaggtatttttgtgcatgaatagtttttcagattgatgttcctgttggggggtgttcactggcgagtcctggttcaacatcttcctctgcctctttcctctaaacgccttaatctcaatgatccctcactaatgccacacaagggaaagttcaaatttcctggtacacatttttttctgtaatttcwatttcatcctgaatttgcctttacatcctttttaaaaactaagttctgttctatgtataaatagttttctccatcaagaataatgagtaaaatagttgtggatcaattcagggacaggatcaaatctgtgggctcactgatgtttagattaatcattttgattgtactctccaagcatcagtgtggaaatcaacttcacccataaagtgttaaggactcaacgaaatgtttataaatcacaaggcatagtgcttggagtagaataggcacccaataaatgccaaatcatta

SEQ ID NO: 377823 - DNA, 578 bp, Homo sapiens
cagttaatgagagactaaatccagaagtatttatttttcttgtatccaggccaagtgtgggataccctgcctyttagaaaaagccttacatatgtgcccagatccacaaagttcagttgagtatgaacttgatctctacctgaaggtaattcaaaactatggagtctgcacttggcctaggggtgtaatcctagggaaggccatatgcaatactgtatttgtcagacaggaaatgggggcctggaagaatcaagcgtagcccaggtcctctctcttcttcaggtatatttcttgtcctcagtcttcaactaccaccaattttaatttagaattgggaagtttgggttttccaaagttgaatactatgctcacagtggtcatcctagattcctggccctaggaagaaagctcctttctctgcaaatctgtgttttcctccctcattgattttagagactgcaacaccttgacatctttctatcaaatcctataaagttcagacaccactggtacttggcattagtcccaagacacaacagaaaactacttaacaaaatgctaccacataacagatttct

SEQ ID NO: 377824 - DNA, 578 bp, Homo sapiens
cagttaatgagagactaaatccagaagtatttatttttcttgtatccaggccaagtgtgggataccctgcctcttagaaaaagccttacatatgtgcccagatccacaaagttcagttgagtatgaacttgatctctacctgaaggtaattcaaaactatggagtctgcacttggcctaggggtgtaatcctagggaaggccatatgcaatactgtatttgtcagacaggaaatgggggcctggaagaatcaagcgtagcccaggtcctctctcttcttcaggtatatttcttgtcctcagtcttcaactaccaccaattttaatttagaattgggaagtttgggttttccaaagttgaatactatgctcacagtggtcatcctagattcctggccctaggaagaaagctcctttctctgcaaatctgtgttttcctccctcrttgattttagagactgcaacaccttgacatctttctatcaaatcctataaagttcagacaccactggtacttggcattagtcccaagacacaacagaaaactacttaacaaaatgctaccacataacagatttct

SEQ ID NO: 377825 - DNA, 617 bp, Homo sapiens
ctgtccttcccacctcctgcaattcactctccagcgagtctccaggagtcygaaggagggagtttccacagatcattgaaagtccacttctacttctgttaattttatgtactgttctggctctcctggtggtagaccattggtatgatttgtgaatatagtgttccatgcatatgttgcatggaatgtaatttctgtgctagaagagtaagttataggtgaccggggctgactagtatatcaacttgacttttctcagaatcttttcttactcctgcatcctatttcattagaaagattacatttgattgtgtacagcaaagtagtcacaatgtgggtgtctggaaactcagatttcccaaagccaagtcttatttctgtccaataaatatcatactcacgacatcatgagagaaaataaataaagtctcccttgaaagttggcttatgctttttctactttgaggaggtggtttgggaataagaatgctggaactttctattttagacttaaaataatttattcttttttgctttaagtttggattgtttttcttttggcttagtctaatcctgatgattcacaattatagcaaaatggatttttaaattttatg

SEQ ID NO: 377826 - DNA, 599 bp, Homo sapiens
ttctcagggctgaagaatatttcatagagatgtggattcataataataaaagctastaagaaactgatatgcaaacaaaaattttcagctcctctattcattaaggaactattttggtaggctagaagattaagggtggaaatcctaaatcattgcttcagcataggctactttgaaatctcctgtactccgaagagaaatcttgatgtactttactgctgtgtggtctccaatctgtatttcttgatggtaattgttactgagctttgcacagcggctttgcggaattacatctttcttgaaaatgcatgatgtaattgatcttaggaaatcttcagttccagctcgtaaatctaggatgcctgtaatttaaattatgttaaaagcaaaagtctcgcctcccctccaaggcttttatttaattccaagtatccgcatgtttaattggaaagggattttaaagatgaatcaaatagtgtaaggcttaagagattctggcactgtaagggactgtttttacattattgcctggattcttttttttccccacaaggggttacaactggtagaccacaaatgaatcagtcattctaccatat

SEQ ID NO: 377827 - DNA, 599 bp, Homo sapiens
ttctcagggctgaagaatatttcatagagatgtggattcataataataaaagctactaagaaactgatatgcaaacaaaaattttcagctcctctattcattaaggaactattttggtaggctagaagattaagggtggaaatcctaaatcattgcttcagcataggctactttgaaatctcctgtactccgaagagaaatcttgatgtactttactgctgtgtggtctccaatctgtatttcttgatggtaattgttactgagctttgcacagcggctttgcggaattacatctttcttgaaaatgcatgatgtaattgatcttaggaaatcttcagttccagctcgtaaatctaggatgcctgtaatttaaattatgttaaaagcaaaagtctcgcctcccctccaaggcttttatttaattccaagtatccgcatgtttaattggaaagrgattttaaagatgaatcaaatagtgtaaggcttaagagattctggcactgtaagggactgtttttacattattgcctggattcttttttttccccacaaggggttacaactggtagaccacaaatgaatcagtcattctaccatat

SEQ ID NO: 377828 - DNA, 538 bp, Homo sapiens
agcagtcagtttccactaaccctttactataattttaatgaatatgtaagttaagcattaaagaactggaataactggtgtctcagttcaagggctggaatgtaaaaagaaaaaaaaatccattaagaccccatctgggttttctcagaccgtaaagtctgattgaataataaaagcattctaacacatacaccttgcaccagggcccaattaaaattaagaaattttccaagactctaaaggaagtttttcgaccttaagccctagttaaagattagctatcrattaaatgaaactccttcttgtaggtacacactcacatgtaggcatagaacttaggatatatctaagcactgaaaaaaaaaaaaagcttttagctttgaattggtctgttgagttactttgaccttttccctgcaactggttgcagaaataaactcttctttcccagtctgtctgcacatcattattggaccactagaatgagcagcctgttctgtcctggcacaaatcaatggcaaagcatttagaatattcc

SEQ ID NO: 377829 - DNA, 544 bp, Homo sapiens
aaacaaattaatcttcatttcgttgtaagtagacataaatgtaagcatccacatctactaagaggagggttatgtgtcaaggatattaactggaagaatatttgatcttttaaattgatatcaaggcagcacacacaaagtctgaagctcagtgaagaccttcataatattccaaaaagcttacatataaaaacttcctcagaaaaaatactatcaactgcaagactgttccttctatctggagaattttagtcatgtgtctgttcatgggaaaaggggaagatggaattagtyagcatgaatattaaagagaaaactgggatggaaaggggtgacagaaagtcaaccagtggcctaaagaaagaaccacagagaacaaaaagtaccatatccctcccccggccagctttcgagagcttgtcctgccttaaggatgtacccgagagatgaaaagaatggaaaagaatacgaagtttcacagcctgcaaagtggccatattggaggaggctaagcaaaaggcagttggaaaacggccatcaaaat

SEQ ID NO: 377830 - DNA, 568 bp, Homo sapiens
tattaccaaccctacatgctctttcacaatgtaactttgtcatccctgatctagagatggaatcaaattcctttcctcttgaatctgggctggccctgtggttaatctgaaggtaaatcatgttctgggacttctgagctcaggcattaaagagacctggaagcttctgcttttgtgctctaagggaaattggctattatctaagaatttgaactaatctcaaatgaccatactgcaagaagacaaacatagccttgtaaagacatcatgtggggcaaaccaaggatccaaccctcagtccctgctgagctcccagccagccgtctggagtgaggcataggagtgaggccatcttggaaacggaacttctaatcctagtagagtcatcccaattgaggccatacagagcagagttcagttgtgttcaatgagcccttgycaaattgtatcattttgagcacatcaatgttattttaagccactgagttttgcaatgtacaatttgaggttctctagcctcaacagattatgtaaatacagatgtatataaatagtggttgccccaact

SEQ ID NO: 377831 - DNA, 568 bp, Homo sapiens
tattaccaaccctacatgctctttcacaatgtaactttgtcatccctgatctagagatggaatcaaattcctttcctcttgaatctgggctggccctgtggttaatctgaaggtaaatcatgttctgggacttctgagctcaggcattaaagagacctggaagcttctgcttttgtgctctaagggaaattggctattatctaagaatttgaactaatctcaaatgaccatactgcaagaagacaaacatagccttgtaaagacatcatgtggggcaaaccaaggatccaaccctcagtccctgctgagctcccagccagccgtctggagtgaggcataggagtgaggccatcttggaaacggaacttctaatcctagtagagtcatcccaattgaggccatacagagcagagttcagttgtgttcaatgagcccttgccaaattgtatcattttgagcacatcaatgttattttaagccactgagttttgcaaygtacaatttgaggttctctagcctcaacagattatgtaaatacagatgtatataaatagtggttgccccaact

SEQ ID NO: 377832 - DNA, 604 bp, Homo sapiens
tagggcccagataagaaaacaggcaccactctagagagttcaaacaggagaaattcagtacagggatctgtagcacatgagaaagaagaaagagaaagcaaatgctaagcaacccagggtgttgataaacacttgaaagctgctaacatccctgggactgagcaataggaaggggaaaaataaccagaatccagaatctagaattgtcttatggagaccgcctggtggaagtggggaccacagagagtgaggttgaccagaaggaagtggatccacaaagaagattcagtctttttttttcttttttcttttagatggagtttcgcttttttcttgttgcccaggctggagtgcaatggcacaatcttggctcactgtaacctccgcctcccgagtttaagcctccacctccctagtagctgggattacaggcgcccaccaccacgcccagctaattttctttctttctttcttccttttttttttttttttttycctattttcagtagagacgggtattcactatattggccagcctggtctcaagcttctgacctcaggcgatccacccgcctctacctcccaaagtgctgggaattacagg

SEQ ID NO: 377833 - DNA, 612 bp, Homo sapiens
caagccagagtgacactgttgtcagggatagggtcacrggtaggtgacctcacaagtgggagccctacactgcgtaatttcctttcttgttgaggaaatttgaggaagtgtgattcctagagccaatcatttgattcattattttcccacctctttcttgtttactcatttctctgacatcttcccataaacttcatatgtcctcctgggctgtgccctgtaaaatgttctttctcaggccactaaacccccgggttatgtgttttgttaccttggattcttagggtgtgcagcctaagtccaggccaggggaggagatggtgaagcaacgttgcaaaggaacaacaccctgggaggaattagcctcttcaacactgggtgggaggggcaaggggataaccagaaaggaatgattaaaatcttagccaagaacccagaatgaaatgggaacctgctgggatcaacctcagacatctctaactccctgatcgcagtcattaaaatgtgcctcctggtggtgtaatatcgatccttatatgtctcatcctttataagcagtaatcactttacacaaaaatataggtcagtcaataagaagagcctttccaaaca

SEQ ID NO: 377834 - DNA, 612 bp, Homo sapiens
caagccagagtgacactgttgtcagggatagggtcacgggtaggtgacctcacaagtgggagccctayactgcgtaatttcctttcttgttgaggaaatttgaggaagtgtgattcctagagccaatcatttgattcattattttcccacctctttcttgtttactcatttctctgacatcttcccataaacttcatatgtcctcctgggctgtgccctgtaaaatgttctttctcaggccactaaacccccgggttatgtgttttgttaccttggattcttagggtgtgcagcctaagtccaggccaggggaggagatggtgaagcaacgttgcaaaggaacaacaccctgggaggaattagcctcttcaacactgggtgggaggggcaaggggataaccagaaaggaatgattaaaatcttagccaagaacccagaatgaaatgggaacctgctgggatcaacctcagacatctctaactccctgatcgcagtcattaaaatgtgcctcctggtggtgtaatatcgatccttatatgtctcatcctttataagcagtaatcactttacacaaaaatataggtcagtcaataagaagagcctttccaaaca

SEQ ID NO: 377835 - DNA, 612 bp, Homo sapiens
caagccagagtgacactgttgtcagggatagggtcacgggtaggtgacctcacaagtgggagccctacactgcgtaatttcctttcttgttgaggaaatttgaggaagtgtgattcctagagycaatcatttgattcattattttcccacctctttcttgtttactcatttctctgacatcttcccataaacttcatatgtcctcctgggctgtgccctgtaaaatgttctttctcaggccactaaacccccgggttatgtgttttgttaccttggattcttagggtgtgcagcctaagtccaggccaggggaggagatggtgaagcaacgttgcaaaggaacaacaccctgggaggaattagcctcttcaacactgggtgggaggggcaaggggataaccagaaaggaatgattaaaatcttagccaagaacccagaatgaaatgggaacctgctgggatcaacctcagacatctctaactccctgatcgcagtcattaaaatgtgcctcctggtggtgtaatatcgatccttatatgtctcatcctttataagcagtaatcactttacacaaaaatataggtcagtcaataagaagagcctttccaaaca

SEQ ID NO: 377836 - DNA, 612 bp, Homo sapiens
caagccagagtgacactgttgtcagggatagggtcacgggtaggtgacctcacaagtgggagccctacactgcgtaatttcctttcttgttgaggaaatttgaggaagtgtgattcctagagccaatcatttgattcattattttcccacctctttcttgtttactcatttctctgacatcttcccataaacttcatatgtcctcctgggctgtgccctgtaaaatgttctttctcaggccactaaacccccgggttatgtgttttgttaccttggattcttagggtgtgcagcctaagtccaggccaggrgaggagatggtgaagcaacgttgcaaaggaacaacaccctgggaggaattagcctcttcaacactgggtgggaggggcaaggggataaccagaaaggaatgattaaaatcttagccaagaacccagaatgaaatgggaacctgctgggatcaacctcagacatctctaactccctgatcgcagtcattaaaatgtgcctcctggtggtgtaatatcgatccttatatgtctcatcctttataagcagtaatcactttacacaaaaatataggtcagtcaataagaagagcctttccaaaca

SEQ ID NO: 377837 - DNA, 448 bp, Homo sapiens
aaagccaaaaaagcaagagggggtgaagccacagatgctcagagaacatgaggtttagcagagatcaactgtggtgacacaaaaaacaaaaaaaaatgagtgctgtatagcaacatggatcatggtggtgattttggaagagtagcattggattttaatggtgttggtctcatasaagcagtggtttttgaaaaccggagatagaagatgggtctggagtcagcccagggaagctaggaggacctcgacccctctttctggcctagaggtgtgttgggtatgaggcaaaaagaatcctcttctgagaaatgggtactcaatgggcaattaggtttcagagttacgaataaagaaatttaaaaatgacttcaaggagagttttaccaatcacagaggataaaatgaccagggcacaaggaaggatctgctaagaaggagagcagaggat

SEQ ID NO: 377838 - DNA, 580 bp, Homo sapiens
gtcttacttattagtataagattcatttcttacatcctcccagtctctcagagcccagactactaaacctgggcccacaagttatatcctgtaaaggttctgtaagtgtacagtttgtgagctaagaatgattttttacattttaaatcattctttataaaaacaaatactatgcaacagagatccacatggcctgaaaggctgaaaatatttacttctatctttcacaaaaaaagtttctttcctcctgactttgatgattaggtttactgtttattacttgatatgacacagttccctgttcagaatgtgtgctaattaactttatacgtttgtgctgattccaaagcaaagacaacaatcttaacatttgtcgattaaaggaacaaacaaacaaaaaagtcgttttttaaaatatgccttcccaaaagcaacacaactcacttctttccacataatatgggcaagwtccaatggccacacttggatgagagggctggtggatgcagtccctggctggaccactaggggtgctcttcactctggacagacggcacaagcccctgggaagcacccagcc

SEQ ID NO: 377839 - DNA, 618 bp, Homo sapiens
ccagttgtcatgtcaggactacttgtatctctcttctttataatgagtgggaatttgggactaattcgctttaacacttggtgtgttttacacattgacaaatcacaggaaaatgcttttctaaaatatttaaactttatgaacactgatttctaaataaaaaatacctgaaactttttctttaaattatttcttatattttatgtagtggcttgaaatagatcaaaggaaggatgctagatgtagatattttataaattttaacagtacaggaaattggactctttatttccatttgaatccatattttgtgaaaaccctccacctagaaagacctcccaagtttcatctgtccctctgtcttggccaacttgttctttctctgtcycttcccctgccttgagctccgaggtgcttcctggactggctgggccccttgctcctcactgcacatcttaatatttctcttcctccttgtgctctctccaaccactgcagcaaatagtgcctatgctgcctctgttttgcattctattcagcttagcttctatttatttgctacttgaactactcactaattgtgcataaagtgtacactttgcaactcaataggctatc

SEQ ID NO: 377840 - DNA, 554 bp, Homo sapiens
aggcatctggcaaaggtgtatctttcacctgaagttcccggggaaagttcaaagcaggagtaaacagagaatggagcaccaggtgggaagccgagctcagtaaggtacagaaagaagcctgatcgccaacagaagggtcaagggcagggatggasgcttatgtgcagaaccagcacctggaggtcatgagatcaagacctgggtgacgaaatgtgatgcaggttgagcccttggggtgtcacacctgatatttggctttaaaaagtctatgtgggtgtgggtgttaattacctcattagtgtcctgtgactgctatattaatcaccacaaatgtggttactgaattcaacgtaaatatatatactctcacaggtatggagaccagaagtctgcagttaaggtatgggcaggtctgtttcttctagggactatgaaggagaatctactccgtgcctccttgcaacccgtggcactctttggcttacagaagcatcactccaaattctgcctccgtcttcccatggccttcttctccagatttaggcctgtcctaa

SEQ ID NO: 377841 - DNA, 554 bp, Homo sapiens
aggcatctggcaaaggtgtatctttcacctgaagttcccggggaaagttcaaagcaggagtaaacagagaatggagcaccaggtgggaagccgagctcagtaaggtacagaaagaagcctgatcgccaacagaagggtcaagggcagggatggaggcttatgtgcagaaccagcacctggaggtcatgagatcaagacctgggtgacgaaatgtgatgcaggttgagcccttggggtgtcacacctgatatttggctttaaaaagtctatgtgggtgtgggtgttaattacctcattagtgtcctgtgactgctatattaatcaccacaaatgtggttactgaattcaacgtaaatatatatactctcacaggtatggagaccagaagtctgcagttaaggtatgggcaggtctgtttcttctagggactmtgaaggagaatctactccgtgcctccttgcaacccgtggcactctttggcttacagaagcatcactccaaattctgcctccgtcttcccatggccttcttctccagatttaggcctgtcctaa

SEQ ID NO: 377842 - DNA, 554 bp, Homo sapiens
aggcatctggcaaaggtgtatctttcacctgaagttcccggggaaagttcaaagcaggagtaaacagagaatggagcaccaggtgggaagccgagctcagtaaggtacagaaagaagcctgatcgccaacagaagggtcaagggcagggatggaggcttatgtgcagaaccagcacctggaggtcatgagatcaagacctgggtgacgaaatgtgatgcaggttgagcccttggggtgtcacacctgatatttggctttaaaaagtctatgtgggtgtgggtgttaattacctcattagtgtcctgtgactgctatattaatcaccacaaatgtggttactgaattcaacgtaaatatatatactctcacaggtatggagaccagaagtctgcagttaaggtatgggcaggtctgtttcttctagggactatgaaggagaatctactccgtgcctccttgcaacccgtggcactctttggcttacagaagcatcactccaaattctgcctccrtcttcccatggccttcttctccagatttaggcctgtcctaa

SEQ ID NO: 377843 - DNA, 488 bp, Homo sapiens
gatatgaattgaatggatttagatgtagaaataatgctaaacagcaatggaccaattcagaaatcagacctttcccttctgttaacacggyggtaatttattacataagagatgttaatcctggggaaaaattctaaatactcagggaataagtaatggctgggccgcaaatgatgaaaatgtgaatgtgttacatagattctgaattattcctggcattccctggggagagagaatagaagtaagttgcaatcagttgtgatacctctgaaaggagagagagaaggaaggaggctgggcagcagccacccccactgcagggctgctctgagaaagtttgagctttgtcaatgggagtacatgacggagatgacccaggagaggaaccctgcgtcaagcagcagcagcctgccctagtagctttgctgtgcttatgtctgggagcagcccatgggagcatggcctcagtgtgagctcagtggtgaggc

SEQ ID NO: 377844 - DNA, 271 bp, Homo sapiens
gtgggctgcacctagttacttccttcataggagttcagtatggaaagtggaaatagagtaaastttacagtagggaaactagattaacactatagtagccagatgatcaaggtcaatatcaatcaatggtagtaagtcaagttgacaggatgtaccttcgatatgatgtggtgagaatgcactttaattctgtctaatcatgagcaaaacatgagaataatcccgatggaggaacattttacaaaatacctaatcagtactcctcaaacct

SEQ ID NO: 377845 - DNA, 563 bp, Homo sapiens
accacatcacagaacaagaaagttggttgtaaacgaggtttaactttattattcaactgagaaatattttaacttactagggtaacgtagtattgaaaggaaattaaagtaaaatcattatataaggataaaagttattttgtaatatgcagaatcactccattttataaaaagtgagatacgtatctacagatttaaaaggtcaattctgtatttcaaggaaatctcagtgactcagactaggtctttttctggtatgtaaaacttcaatatttgacattttccaaataattcaatgctgaagatccacacatgaacatctagtcatccttattcaaaaagatatatygagcatctaatatgggttttagcaggctataccaagacctggtgggacagaggtatatgagatgtgggtcatattaccaaaagagatctggtggcaaaatagacatgacatgttttcatttcgtttagatctaattcatgttcttcaagagattttagaatttgaagtttactgttgcctaccatcttacatttttatgtattacattaatttt

SEQ ID NO: 377846 - DNA, 626 bp, Homo sapiens
tctgctctgtgcctcttatcttctggttcccaattccagttccctggagatgaaattgcccttaacatggaacatcacttcctggattctactggtaggagttttgtttttgtttttgtttgaaacggagtcttactctgttgcccaggctggagtgcagtggcatgatctcgactcactgcagcctctgcctcccaggttccagtgattctcctacctcagcctcctgtgtagctgggattacaggtgcacgccaccgtgcctggctaaatttttatatttttagtagagggatttcgcacgttggccaggctggtctcaaactcctgacctcaggtgrtccgcccacctccgcctcccaagatagttttaataggttatctttctggtatattagtgagtaagattataggattttggattaaagagacccaggtttgaatcttaactttcagaatgaactctttgaccgtcaataaatcatttgagcttttcaagttttagtttcttcccctgtaaaatggtgataaaaatacacatttataatgctgtttcagagcttaaaagaaaaagaaaaaatagaattaggaatttcagcctcatgacagatccataattgatgttca

SEQ ID NO: 377847 - DNA, 626 bp, Homo sapiens
tctgctctgtgcctcttatcttctggttcccaattccagttccctggagatgaaattgcccttaacatggaacatcacttcctggattctactggtaggagttttgtttttgtttttgtttgaaacggagtcttactctgttgcccaggctggagtgcagtggcatgatctcgactcactgcagcctctgcctcccaggttccagtgattctcctacctcagcctcctgtgtagctgggattacaggtgcacgccaccgtgcctggctaaatttttatatttttagtagagggatttcgcacgttggccaggctggtctcaaactcctgacctcaggtggtccgcccacctccgcctcccaagatagttttaataggttatctttctggtatattagtgagtaagattataggattttggattaaagagacccaggtttgaatcttaactttcagaaygaactctttgaccgtcaataaatcatttgagcttttcaagttttagtttcttcccctgtaaaatggtgataaaaatacacatttataatgctgtttcagagcttaaaagaaaaagaaaaaatagaattaggaatttcagcctcatgacagatccataattgatgttca

SEQ ID NO: 377848 - DNA, 383 bp, Homo sapiens
aacaaggcgccaagaagccagtttatataaattagcctacacctatattcaatgaactttcagtgctcatccaatgaacgtaaaagcaacattgttttctcacatacataagttgatcctgaagttctttgggtaaataagtgtgaaagaatatgtagggcagtgccaaaaatgaagagtaataaagttgaactaattctacttggtattgaaaacctaatagaaagcaamactaattaaaatagagtgggctgggcacagtggctcacacctgtaatcccagcacattaggaagctgaggtgagcagatctcttgagctcaggagttcaagacctgcctgtttaacatggcgaaacaccatctcttaaaaaaacagaaaaat

SEQ ID NO: 377849 - DNA, 519 bp, Homo sapiens
attggaggactcagaatgactgctgggcacaaagggcagaagacagcacctccagattttaccaagtatggaaatatgagggaaagrttcacgcaggtcttggtatccactgctgcttttccctccagagtgaacaggcaggcacagtgaaagccaacggagccattcctattattgagaagcctcgtggtgatggtgtctggttgaagctgattgatgagataataaagaaactgatctggagcacacagatggtcacacatgcacggttcctctctttgaactgacatcttggcaaaagccctctgagccccagggattgcaatgcagaatagacacaaatccacttgagtcagcagaagtctgctgtatgtgcatacgtgcttgcacatgtagagaagacacctggaaggatgtaccacagcttgtccagcccgtcatctgactcaggaggtgggcctgaggaatgggtggtggaaaaagttaattttcactattgcccttctgttcgttgaagtc

SEQ ID NO: 377850 - DNA, 608 bp, Homo sapiens
cttgcatgcctccccacgaacatccattataaatttacccrttccttagtgtatttgacaatttttgtctgagaaagaatgaagagcagcccccgtgtgtgaggtctgaacgagactggtctgtacataaatgtccaagtgggattgctaaatgtgctctccagagggtggtgcagaatctcttttccaggttttctgcaaacccatacctgctccacctggttaccaatgctctatatttgagaggattcttgttggcccatttggtgctgaggctcatgtctgacacaccatgaggcaacacagagacagcaaaaatgcaagaacagagccctaaaccataaggtcgagataatggaggttcctgggagtcagaaaactatagaggctctggacctctctaagccatcaaagttatttgtctatctcctagaagtatgtcaaaatatcagtatccaaagtcatctactgcttcagtacatccttacacaggataggcaacattaaccttacctttctcagaaatatcacagtacaaagaaatcctaaattaaaaaccatgacaaaactattgtctcctactacagagattatcagtgatgacctag

SEQ ID NO: 377851 - DNA, 608 bp, Homo sapiens
cttgcatgcctccccacgaacatccattataaatttacccattccttagtgtatttgacaatttttgtctgagaaagaatgaagagcagcccccgtgtgtgaggtctgaacragactggtctgtacataaatgtccaagtgggattgctaaatgtgctctccagagggtggtgcagaatctcttttccaggttttctgcaaacccatacctgctccacctggttaccaatgctctatatttgagaggattcttgttggcccatttggtgctgaggctcatgtctgacacaccatgaggcaacacagagacagcaaaaatgcaagaacagagccctaaaccataaggtcgagataatggaggttcctgggagtcagaaaactatagaggctctggacctctctaagccatcaaagttatttgtctatctcctagaagtatgtcaaaatatcagtatccaaagtcatctactgcttcagtacatccttacacaggataggcaacattaaccttacctttctcagaaatatcacagtacaaagaaatcctaaattaaaaaccatgacaaaactattgtctcctactacagagattatcagtgatgacctag

SEQ ID NO: 377852 - DNA, 628 bp, Homo sapiens
aaacttgtgttcactgaaattagaaatccattcttgtttttatagtaaggaaaggcattkcttgaataaaaactgagctgagtaaactttggggtatctaaaatggcaaggtttgtgtgcttttacatctcttcatatgcccagtgatatggtttgcctctgtgtccccacttaaatctcatgtggaattgtaatcctcagtgttgcaggagggacctggtgggaggtggctggaacatgggggcagatttctcccttgctattctcatgacagtgagcgagttctcaggagatctggctgtttaaaagtgtgtagcacttccccttccactgtctctccttccaatatatgaaaatgtgccattttccccatcacccttccgccatgattgtaagtttctgcggcctccctagccatgcctcctgtacagcctgtggcactgtgagtcaattaaacctcttttctttacaaattacccagtctcgtgtagttctttatggcagtatgaggatgaactaacacacccaaattttgataatctgtcacacacacagaaagtctatttgcaataacccaaattttctgaaacaaagaacaaaaacagctaccccaaaatgttgagagaca

SEQ ID NO: 377853 - DNA, 628 bp, Homo sapiens
aaacttgtgttcactgaaattagaaatccattcttgtttttatagtaaggaaaggcattgcttgaataaaaactgagctgagtaaactttggggtatctaaaatggcaaggtttgtgtgcttttacatctcttcatatgcccagtgatatggtttgcctctgtgtccccacttaaatctcatgtggaattgtaatcctcagtgttgcaggagggacctggtgggaggtggctggaacatgggggcagatttctcccttgctrttctcatgacagtgagcgagttctcaggagatctggctgtttaaaagtgtgtagcacttccccttccactgtctctccttccaatatatgaaaatgtgccattttccccatcacccttccgccatgattgtaagtttctgcggcctccctagccatgcctcctgtacagcctgtggcactgtgagtcaattaaacctcttttctttacaaattacccagtctcgtgtagttctttatggcagtatgaggatgaactaacacacccaaattttgataatctgtcacacacacagaaagtctatttgcaataacccaaattttctgaaacaaagaacaaaaacagctaccccaaaatgttgagagaca

SEQ ID NO: 377854 - DNA, 539 bp, Homo sapiens
cccatcacccttccgccatgattgtaagtttctgcggcctccctagccatgcctcctgtacagcctgtggcactgtgagtcaattaaacctcttttctttacaaattacccagtctcgtgtagttytttatggcagtatgaggatgaactaacacacccaaattttgataatctgtcacacacacagaaagtctatttgcaataacccaaattttctgaaacaaagaacaaaaacagctaccccaaaatgttgagagacagctaatcaaagtgaaaatgaacaacagaggggatattaggtatgaattaaaatatgctggctgctccgaatttgatttctgaagaactgatgagccacctgactaggaaatttcagtggattggccttgagtcactgggtcatctgtaacattcagcagaatatggggctttgaagctgtgagaaaatgagaatgagaattttgcgaagaatggaatgcctccataaggaaagaaatatgttctcgatatatatatttttttaaagagccagaggtgtg

SEQ ID NO: 377855 - DNA, 539 bp, Homo sapiens
cccatcacccttccgccatgattgtaagtttctgcggcctccctagccatgcctcctgtacagcctgtggcactgtgagtcaattaaacctcttttctttacaaattacccagtctcgtgtagttctttatggcagtatgaggatgaactaacacacccaaattttgataatctgtcacacacacagaaagtctatttgcaataacccaaaktttctgaaacaaagaacaaaaacagctaccccaaaatgttgagagacagctaatcaaagtgaaaatgaacaacagaggggatattaggtatgaattaaaatatgctggctgctccgaatttgatttctgaagaactgatgagccacctgactaggaaatttcagtggattggccttgagtcactgggtcatctgtaacattcagcagaatatggggctttgaagctgtgagaaaatgagaatgagaattttgcgaagaatggaatgcctccataaggaaagaaatatgttctcgatatatatatttttttaaagagccagaggtgtg

SEQ ID NO: 377856 - DNA, 539 bp, Homo sapiens
cccatcacccttccgccatgattgtaagtttctgcggcctccctagccatgcctcctgtacagcctgtggcactgtgagtcaattaaacctcttttctttacaaattacccagtctcgtgtagttctttatggcagtatgaggatgaactaacacacccaaattttgataatctgtcacacacacagaaagtctatttgcaataacccaaattttctgaaacaaagaacaaaaacagctaccccaaaatgttgagagacagctaatcaaagtgaaaatgaacaacagaggggatattaggtatgaattaaaatatgctggctgctccgaatttgatttytgaagaactgatgagccacctgactaggaaatttcagtggattggccttgagtcactgggtcatctgtaacattcagcagaatatggggctttgaagctgtgagaaaatgagaatgagaattttgcgaagaatggaatgcctccataaggaaagaaatatgttctcgatatatatatttttttaaagagccagaggtgtg

SEQ ID NO: 377857 - DNA, 586 bp, Homo sapiens
ttttttattaattttatggccttaaccaatatgccccattttagtagttgaaataagtctaaatttaaattcttaaggaacttgacattataaactttcattcataggraaactagaaaaggatagcaaatatatacataaatatacaaatgtaggtactcgtaatatgaatatgaagaccacatattgccatttccaaatatcagcatttttactttataatttcatttcaaaagaatgccaaagatacaaaaagaaatatcttgattttttagtgacactctgttaattctcaaaaaatgtttaattgaaattttaaataattaaatgtcatagaaaacagaaaaggtaatgtaaaataattaaagtagattaaaaagacaacaaataggaaacgaagaaaagaacaagacactaatacaatgaattatgtacttaaacacagaacttagggttgaatgtcctggaaaatatttagaacatttaattctcatagcctgctaaagtccagtgcatgtagtgggacacaaccctagaccaatgaaaaggacagacaagccccagattctacttatcccaaacaagt

SEQ ID NO: 377858 - DNA, 586 bp, Homo sapiens
ttttttattaattttatggccttaaccaatatgccccattttagtagttgaaataagtctaaatttaaattcttaaggaacttgacattataaactttcattcatagggwaactagaaaaggatagcaaatatatacataaatatacaaatgtaggtactcgtaatatgaatatgaagaccacatattgccatttccaaatatcagcatttttactttataatttcatttcaaaagaatgccaaagatacaaaaagaaatatcttgattttttagtgacactctgttaattctcaaaaaatgtttaattgaaattttaaataattaaatgtcatagaaaacagaaaaggtaatgtaaaataattaaagtagattaaaaagacaacaaataggaaacgaagaaaagaacaagacactaatacaatgaattatgtacttaaacacagaacttagggttgaatgtcctggaaaatatttagaacatttaattctcatagcctgctaaagtccagtgcatgtagtgggacacaaccctagaccaatgaaaaggacagacaagccccagattctacttatcccaaacaagt

SEQ ID NO: 377859 - DNA, 586 bp, Homo sapiens
ttttttattaattttatggccttaaccaatatgccccattttagtagttgaaataagtctaaatttaaattcttaaggaacttgacattataaactttcattcatagggaaactagaaaaggatagcaaatatatacataaatatacaaatgtaggtactcgtaatatgaatatgaagaccacatattgccatttccaaatatcagcatttttactttataatttcatttcaaaagaatgccaaagatacaaaaagaaatatcttgattttttagtgacactctgttaattctcaaaaaatgtttaattgaaattttaaataattaaatgtcatagaaaacagaaaaggtaatgtaaaataattaaagtagattaaaaagacaacaaataggaaacgaagaaaagaacaagacactaatacaatgaattatgtacttaaacacagaacttagggttgaaygtcctggaaaatatttagaacatttaattctcatagcctgctaaagtccagtgcatgtagtgggacacaaccctagaccaatgaaaaggacagacaagccccagattctacttatcccaaacaagt

SEQ ID NO: 377860 - DNA, 536 bp, Homo sapiens
agacaacaaataggaaacgaagaaaagaacaagacactaatacaatgaattatgtacttaaacacagaacttagggttgaatgtcctggaaaatatttagaacatttaattctcatagcctgctaaagtccagtgcatgtagtgggacacaaccctagaccaatgaaaaggacagacaagccccagattctacttatcccaaacaagtcacattcctgggtgaatgtgggttgttttccaactgtatggaaagtgacatggaaccaataatggtaccaggatgacaagactggattttgaccagtggcttatcagctaaaagttatttgtgcaataccataattgatatagtgattcctttygtagtttttgtaaggattaaatgagatacagtaatcaaatatcaatgtaaaggggcagcataagtaaaatctaaagctctaggttgacgtggaaaggtggtgttttctgaaatagaaatcatagagaagaatcactaagtgggatcttataaccaattaactttaactgtctgg

SEQ ID NO: 377861 - DNA, 608 bp, Homo sapiens
ccagattctacttatcccaaacaagtcacattcctgggtgaatgtgggttgttttccaactgtatggaaagtgacatggaaccaataatggtaccaggatgacaagactggattttgaccagtggcttatcagctaaaagttatttgtgcaataccataattgatatagtgattcctttcrtagtttttgtaaggattaaatgagatacagtaatcaaatatcaatgtaaaggggcagcataagtaaaatctaaagctctaggttgacgtggaaaggtggtgttttctgaaatagaaatcatagagaagaatcactaagtgggatcttataaccaattaactttaactgtctggtactctccaaaaagatcataactttccccagcacataacagatccagagtgatttgtgtttgcacatcccagcatttctcacacatgggcttacacaccacatatgcggccatgtcttggcttacggattgaaggagcacttgttagaatgaggagttctatttatagaggagctgctgtgagcaagacatcctactaggcactcaagtggatgttactttatgcaatttaatcatcattgcaaaatcgtgaat

SEQ ID NO: 377862 - DNA, 542 bp, Homo sapiens
cattgatggaagacaccctgaaagaatagtaaaagataaggatttaactaagtaatggatggcaagaaaacatttaaaagaaacaaaatgtaacaaggtcaaagacatcaaaggaatagaaagagaaataattttaaagattacatttaagtgtgatctcaaaatatacaatatcatgtacaaagtttctttatgatgttttgttgatctgagctaagtacttttggaatcttcattttgtggttaattatgctrcaagaatctctatatgagattagtgcctgattatacggtggaaagatacatttttccaaatgttgtagtactttaaaaaaattggattgtattacacatacagtaatataaaacattttatactgataattttatcttcttatctgcagtaggggtgtggcttgtcctctacttatttggcaaaatacattacctcatgtaattacaatttatttgatatctttaataaaatattttaagctagatctattggagtctatcacatatcctttcctagtataatttta

SEQ ID NO: 377863 - DNA, 542 bp, Homo sapiens
cattgatggaagacaccctgaaagaatagtaaaagataaggatttaactaagtaatggatggcaagaaaacatttaaaagaaacaaaatgtaacaaggtcaaagacatcaaaggaatagaaagagaaataattttaaagattacatttaagtgtgatctcaaaatatacaatatcatgtacaaagtttctttatgatgttttgttgatctgagctaagtacttttggaatcttcattttgtggttaattatgctacaagaatctctatatgagattagtgcctgattatayggtggaaagatacatttttccaaatgttgtagtactttaaaaaaattggattgtattacacatacagtaatataaaacattttatactgataattttatcttcttatctgcagtaggggtgtggcttgtcctctacttatttggcaaaatacattacctcatgtaattacaatttatttgatatctttaataaaatattttaagctagatctattggagtctatcacatatcctttcctagtataatttta

SEQ ID NO: 377864 - DNA, 542 bp, Homo sapiens
cattgatggaagacaccctgaaagaatagtaaaagataaggatttaactaagtaatggatggcaagaaaacatttaaaagaaacaaaatgtaacaaggtcaaagacatcaaaggaatagaaagagaaataattttaaagattacatttaagtgtgatctcaaaatatacaatatcatgtacaaagtttctttatgatgttttgttgatctgagctaagtacttttggaatcttcattttgtggttaattatgctacaagaatctctatatgagattagtgcctgattatacggtggaaagatacatttttccaaatgttgtagtactttaaaaaawttggattgtattacacatacagtaatataaaacattttatactgataattttatcttcttatctgcagtaggggtgtggcttgtcctctacttatttggcaaaatacattacctcatgtaattacaatttatttgatatctttaataaaatattttaagctagatctattggagtctatcacatatcctttcctagtataatttta

SEQ ID NO: 377865 - DNA, 569 bp, Homo sapiens
aagcagaggtaataacaaaacagaaagtacaggaagaacttggccctctacagtattatccagccactgaattaaccacctttgcaagctctgccatatttagcctttatacacacacacacacacacacacacacacacacacaatttatttttgataacacctttttcttgtttattttgtttggataagaaatttttgttaaatcagttgttagcctcttaactgatacagaaaccaaatggaatcagaagtagctaggtaaatggcaaaatcagagaaagggaatttaaatgattcaaatgcttattggcattagaaaaacgtggtcagcagccacatctcatcctttgaatgtgaactgtggaatcgcagtagttgaagctgggagtcacagtaattcttcccacagtggttctcaggctttagcatgtgccasaatcacctgaagttgagttgtgagatttcaggcttctcttctgacatggacctctcaattttctctgagtaattatcttataactactctcatttggcttgaagtagagaaaagacaagccctacccctc

SEQ ID NO: 377866 - DNA, 547 bp, Homo sapiens
ctgcagcacccaagggcaattggagtggtagcaggcatcctttattttttgcactcccagccattggcactcaggcagtcactccaccccttcacagttctatgtgtcaggcagtcctccagggytgaccttgccaatccaggctgaattgtttcaagactatgggtctgcagcaacaacagccacttcttaattatatccctcatgcttcaattgctaaatcttaagctgtacaatccaaacatggacatttcttacataaatgggacttctgcacacagcactctatccactctattggcggttctatgtagaaggtacgtttctggttaacattgaaacgtctcacattttaataatgtagtgcttacaacctaaagagttcaagagaggtcataattggaagatatgtcattctgcatttatgctattatataccaaacagtaaatttaacaagacgagcaatttattattcacattttcctgcataccccggttaatacttgcatttgtgggaaacttcaacagaatacaacagccattgag

SEQ ID NO: 377867 - DNA, 513 bp, Homo sapiens
aacgtctcacattttaataatgtagtgcttacaacctaaagagttcaagagaggtcataattggaagatatgtcattctgcatttatgctattatataccaaacagtaaatttaacaagacgagcaawttattattcacattttcctgcataccccggttaatacttgcatttgtgggaaacttcaacagaatacaacagccattgagagagtctttggaagctcatattcactggccgtttgatgcagtatcatgagtgaagatgtgaacagatttaagtaaaagttaatggaaaactgcaaaaacaagaagattgtaaatgtttttatataattgggttctaaagagccatggcattatgagtaatacccttgtttttcatagtaggagacatgaaattagccattaacaatcctttggagaatatagatcacagagggttggttcttggactgaaatagaaaagacaatgtgtagcattagaagatccttcccgtgcattcactgaacat

SEQ ID NO: 377868 - DNA, 590 bp, Homo sapiens
tcctgcataccccggttaatacttgcatttgtgggaaacttcaacagaatacaacagccattgagagagtctttggaagctcatattcactggccgtttgatgcagtatcatgagtgaagatgtgaacagatttaagtaaaagttaatggaaaactgcaaaaacaagaagattgtaaatgtttttatataattgggttctaaagagccatggcattatgagtaatacccttgtttttcatagtaggagayatgaaattagccattaacaatcctttggagaatatagatcacagagggttggttcttggactgaaatagaaaagacaatgtgtagcattagaagatccttcccgtgcattcactgaacataaaatatcacctcttcttcacttcactccaaattgtcattgataaatccatatatttcacgagtccttatattttgtaaagtattttaaatttaaacattttctataaagagggatcttatgaaatattatttgcagaatgccttgaaaaccctggagttaaatatgctgggcacctttgagaactgctcatttagaatctcttcacttatcatgcatgg

SEQ ID NO: 377869 - DNA, 590 bp, Homo sapiens
tcctgcataccccggttaatacttgcatttgtgggaaacttcaacagaatacaacagccattgagagagtctttggaagctcatattcactggccgtttgatgcagtatcatgagtgaagatgtgaacagatttaagtaaaagttaatggaaaactgcaaaaacaagaagattgtaaatgtttttatataattgggttctaaagagccatggcattatgagtaatacccttgtttttcatagtaggagacatgaaattagccattaacaatcctttggagaatatagatcacagagggttggttcttggactgaaatagaaaagacaatgtgtagcattagaagatccttcccgtgcattcactgaacataaaatatcacctcttcttcacttcactccaaattgtcattgataaatccatatatttcacgagtccttatattttgtaaagtattttaaatttaaamattttctataaagagggatcttatgaaatattatttgcagaatgccttgaaaaccctggagttaaatatgctgggcacctttgagaactgctcatttagaatctcttcacttatcatgcatgg

SEQ ID NO: 377870 - DNA, 608 bp, Homo sapiens
tccatgttattttgacctcattaygataaacttcgtgtgaatatgtgataaaacattaaagtgccgtcgatacaactaagagtcagaagtaataaatgtgttagtaagacatgtaatatttttcttccaccttcaaaactgaaacatgatttaatctggtttaggctatttttgaattccatatgttcacagaataactttactatcaccttcttaaccacctcactagttaaagaagtcagcgactggtcacttcagataactggtgtcaccaaggggtagtttcttatgtaagaaactgggtgtttttaaatggtttaaagtctggcctagtgtttacagcattaaaattgtatgcagtgtcattcattcaaagttctaacatttgaggcagcatataccaccctgttggactgtacttctgttgtgaatctgcagtagaaaatatgtttttggtatccattttaaaaggtaaaattacaaaggtcaaaaattcataccctacctgttatgaactacccaccatccttagatgatagctgagaataaacttacactgtaatctggtcaaataggatgtcaaatgaattctttaatcaggtgaaatg

SEQ ID NO: 377871 - DNA, 586 bp, Homo sapiens
acaaatatctgaaaaagcaagataaaaatataactgaaagtacataaagtctttgaaactcatttaaatttgtttcatcttctctattgtacctgcaaacaaagaaatacttgtgaacatttcatacatcttttaacttcatctgttgtggtgcactaaacctgtgactagataattcacttgttaaaacactgtaaatggagcttaggagatgaagtaaactccaaagaagaaaatgttactatgaaccttctcttgtacccatcagtaaaaaggaagaaaattattttttatgttcgcataaattatgtgtttagatgtcagaaaactatacacagcatgacttttctgctgtatgtagtaaaaataatgaagaaagcaatgacttgaaaagggaggaaacagttttctcctataaataaaaaatatagtaaatatatgcttcccctttatactgtttccttggagaatatttaataataackcaggcactccccatgatatctcactaagtcttaattttaaaatgacctatgtgatgacgtagttactaatgtcaaaaatgttctctatgaagagttcaaat

SEQ ID NO: 377872 - DNA, 541 bp, Homo sapiens
gtgggtctggaattcaaaaatgagatttgagagccaggttgtcaatgtgaccaatttaggtaaagtacaattaatgacactgttttaaaacttgggactgcaacaagataaatgatgacctcttgccttcaaatcatgcactgtctaaatgtgagctgaactttaaagggtaatgcaacgtgtgcaggtggacacagagataataaacgtgtaatctgctgcccaaattttcctccctagcttaccctcactctcctctttagtatcagctggctcttttaaaattatttcaattaagagaaaagtagtaaaagtaaaaaaaacccctcacagttccyttgaagtcttagagtgtgaaaagagataggataaaacataaaccaaaaacagatgaagcttttcaattagatgaattgcacttgtaattttttaaaaaatacttccccatagtctcaacagcaatatacaaattattttaaagaaactaaaaaataactaatgataaatgaaagaagagataattactcttcacaaaagggaa

SEQ ID NO: 377873 - DNA, 575 bp, Homo sapiens
aaaaatacttccccatagtctcaacagcaatatacaaattattttaaagaaactaaaaaataactaatgataaatgaaagaagagataattactcttcacaaaagggaatacaaagtgagtaagaagaacttggaaaaaatttacagtaaaattaaatcatttcaaaaattaatgtcacattagaaggaaaaaggagtaaaataaatttcgctgaaaattgagttaggcacagataagtaaagtcacatttaatgaaatagaaaacaacagaggaataatgcataaaagtgatacatataaaagtcaaaagaggtctattctstatagttagcatttctacaccaaagaacagtgttgaagaaaaatatttacaataatggttttcttaaataaagaatggaatatttaaatcacaatgtacaatgtgtactaggaaaattactaataattacttctcatacattttaccttgataaatattacgaacttaaagaaaacaacaacaaagatctccagttgatgtaaagagacacctaacacagagggaatcaggctgacttcagattatccagag

SEQ ID NO: 377874 - DNA, 664 bp, Homo sapiens
tcacaaaaggtaagataagggggcaagtgcagatttatagccttccaccataagcctccatattcatttcaaatttaattcgagaataattttaaagcatacgtgtataaatatctcctttatttatttatttatttatttatttatttatttatttatttatttatttgagtcagagtcttgctctgtcgcccaagctggagagcagtgatgcaatctcsgctcactgcaagctttgcctcccggactcaagtgcttttcttgtctcagcctcccaagtagctgggattacaggcactcactaccatgcctggctaattttgtatttttagtagcgatggaatttcaccatgtttgccaggctagtcttgaattcctgacctcaggtgatcggcgcgcctcagcctcccaaagtgctgggattacaggcatgagccactgtgcccagcctaaatatctcccttttatgtcagatgtataacgttcttttaaaacttttaaaagttcggcaatatgtcttattagtcttattaaatataaataaaatgagtaaggctatgattttaaattattttcagttctgaaaaaatagcactatatgctgtgaatgaaatgttaaagttttcaaatatagagaatattgtcttatcagttttctactgaa

SEQ ID NO: 377875 - DNA, 573 bp, Homo sapiens
actggtagttcaggccgatctatagaaggagttattgggtaataggatcttgttgttagtttaacagaccaagaatgttcatattatgtgagatacatgttacaatagactaagaaaaactaacaacaactaaatgtgcaagattttgacagatacacagtttgaaatttacaatgatatacacaagtttcaagtagactaagyctattgatctcatacaatagccactagctaaatgtgcctaccgagcacttaaaatgcatctactacaaagtcagatgtgttatagcaaacttacaggtaaaaaatagacattgaatttcagatatttagtaccagaaaaatgcaaatatattattaatttttattataaattaaaatactgttatatagattgagatgatataaatgagtcattaattatacctgttttctttccttttattaaatattgtacatagacaatgtaaaatcacacatatggcttacattatgtttctaccgacagtgctggactagacgattttatccatttgacaagtgaagtgatttatataggaactaagttccttg

SEQ ID NO: 377876 - DNA, 573 bp, Homo sapiens
actggtagttcaggccgatctatagaaggagttattgggtaataggatcttgttgttagtttaacagaccaagaatgttcatattatgtgagatacatgttacaatagactaagaaaaactaacaacaactaaatgtgcaagattttgacagatacacagtttgaaatttacaatgatatacacaagtttcaagtagactaagtctattgatctcatacratagccactagctaaatgtgcctaccgagcacttaaaatgcatctactacaaagtcagatgtgttatagcaaacttacaggtaaaaaatagacattgaatttcagatatttagtaccagaaaaatgcaaatatattattaatttttattataaattaaaatactgttatatagattgagatgatataaatgagtcattaattatacctgttttctttccttttattaaatattgtacatagacaatgtaaaatcacacatatggcttacattatgtttctaccgacagtgctggactagacgattttatccatttgacaagtgaagtgatttatataggaactaagttccttg

SEQ ID NO: 377877 - DNA, 664 bp, Homo sapiens
tcacaaaaggtaagataagggggcaagtgcagatttatagccttccaccataagcctccatattcatttcaaatttaattcgagaataattttaaagcatacgtgtataaatatctcctttatttatttatttatttatttatttatttatttatttatttatttatttgagtcagagtcttgctctgtcgcccaagctggagagcagtgatgcaatctccgctcactgcaagctttgcctcccggactcaagtgcttttcttgtctcagcctcccaagtagctgggattacaggcactcactaccatgcctggctaattttgtatttttagtagcgatggaatttcaccatgtttgccaggctagtcttgaattcctgacctcaggtgatcggcgcgcctcagcctcccaaagtgctgggattacaggcatgagccactgtgcccrgcctaaatatctcccttttatgtcagatgtataacgttcttttaaaacttttaaaagttcggcaatatgtcttattagtcttattaaatataaataaaatgagtaaggctatgattttaaattattttcagttctgaaaaaatagcactatatgctgtgaatgaaatgttaaagttttcaaatatagagaatattgtcttatcagttttctactgaa

SEQ ID NO: 377878 - DNA, 526 bp, Homo sapiens
tgctatatttgttcaatgaatacatagtggatgagagtgtatatatattttagtaggaaatatgtgttagttaattccccaatacctcacccgccgcacagatagagactacaacactagagaagaaatggaaggcactggcaaaaagaggactgaataaaaaagaggaccatggactgaagtatttattcccaaccttcataatcttccttcctccatggaaggaggtctctaactatggccacaggtctcactagacaggccttctcccatggcygcaactttttctaggttgaaagagaatgaacatgcattataagttgtctaggaaaaatcctggctaatgcgcctaacattcaggtaaaaagctgttaattattttgagtatcacatttcagtctcaaatgtatctctattctataacaaattatatggtctccctaagtatcccttcatagagggactttccacacctccatgtttatgtactttctcttgtcctcaatttcaaggctaaagacacaat

SEQ ID NO: 377879 - DNA, 508 bp, Homo sapiens
atctgccactacctccccttatttcttctagagtcagaagaaataaggggaggtagtrgcagatactaatttctccgcatgagcagataaaagaggtgttatcctgtttgggtgaagaagtgacttctgaaagagttgcagaaggctgcgaatatataccagcagtaactagaaatgcatatgtggagatgaaatgttagagtgctgggtcaggtaagggacagaagttaaggtcagagagggaacagtttattgacatggtggcattttgtcatgaatccgtacttaacatcatgacaaagatgcctgaacttagtacctttaaggaaatatttatttcactttgtagacgacttagagttaatgagagagcaatgctgaaatgccttggcaaaatattaaagaagaatacagaaggttcacaaagatagttctataatagattaataatataaggctagatagccaccagctgtttatgtttcccaagagaatacagaagccaatc

SEQ ID NO: 377880 - DNA, 559 bp, Homo sapiens
gagcagataaaagaggtgttatcctgtttgggtgaagaagtgacttctgaaagagttgcagaaggctgygaatatataccagcagtaactagaaatgcatatgtggagatgaaatgttagagtgctgggtcaggtaagggacagaagttaaggtcagagagggaacagtttattgacatggtggcattttgtcatgaatccgtacttaacatcatgacaaagatgcctgaacttagtacctttaaggaaatatttatttcactttgtagacgacttagagttaatgagagagcaatgctgaaatgccttggcaaaatattaaagaagaatacagaaggttcacaaagatagttctataatagattaataatataaggctagatagccaccagctgtttatgtttcccaagagaatacagaagccaatcccttccctaaaatgttgagaaagggggcaatgaaatcattgagaagctcagtggtagctgtctactgcagtccaacataaatggtaggaggtattgttgctgatctggagttcctattctgaatagggatg

SEQ ID NO: 377881 - DNA, 578 bp, Homo sapiens
ctgaatagggatgctatgattttgaaaaatgagaaggcaaatggtagcatttaatcaccagcagcaaagttttatgattgccataatgaacagcaaggcaaaaatgggaattaggaaactgatctttcgcatccctggcaatggtcatgatattcacaaagctagatgatgttaatgcttggctaacataataaaaagtaattgagatctggaaagcagaagagtgaaatcagccacagttataaaaaaccattrtccctcattcactttactaaactaagccagttctcagatccagaggttatattgaagtggagatcagggccacttgagggagaactctgcaattctataacaggagtatgaaatatatattttccctatcctttcaccaaagctcccctgacatttaccttagtaacggtacactggagtaaaaggtatatacatatttcaagggctcttagacatataatctcaactgacatttaatgccaagggtgccaaaacaccattatctcctctttgttagagtagggatattcagtcagatgataaatggaatcctgaaccatatt

SEQ ID NO: 377882 - DNA, 595 bp, Homo sapiens
  misc_feature (1)...(595): n = A,T,C or G
gtccatcaatgatagactggataaagaaaatgtggcacatatataccatggaatactgtgtagccataaaaaaggatgatttcatgtcctttgcagggacatggatgaagcygtaaaccatcattctcaacaaactatcacaagaacagaaaaccaaacactgcatgttttcactcataagtgggagctgaacaatgagaactcatggacatacagaggggaacatcacacactagggcctgtcagtgggtgaggggctcgggaagggatagcattaggagaaataccttatgtaagtgatgggttgatgtgtgcagcaaatcaccatggcatgtgtatacctaacaaaactgcatgttctgcacgtgtaccccagaacttaaagtataataaaaaaaattaaaagttttatttcagaagatagcaatgatagaaatgtggcataatacaacaaccctaaaacagtgattttaccagtgatgagaaaatctctaagaaataaatgaccgctgggcatcaaagaagtcaataggaaggctcaataagcagtcatnnnnnnnnnnnnnnnnnnnnnnnnnnnnnnnnnnnnnnnnnn

SEQ ID NO: 377883 - DNA, 462 bp, Homo sapiens
tgtggtgaactgttcactagttaacgtcctcctgggtttactatgctacaatttaaaagaaattcarttctataaactaggagaataatgtaacagggacaaaaatccatttcagttgtcagtggctacaaagtccaaatagcatcaaggtgttttttgttaagctttttttattacagaaaaatatcaagttatgtctacataagaaatatttttggaaaagtaaaataatcttgtaggcaatatatccatgatgatttaccagccatcaatctctttcctcaccatatataacaaaatctttcagagatctaattaagggaaaaatggaacaaatgatttattatttatatagttgatgctaataaattttacaagattatttccccatacaaagacagttggacagttatattccacatattaaggaattatatatatatatatatatatatatatata

SEQ ID NO: 377884 - DNA, 549 bp, Homo sapiens
atctactgttgatgaaatcatcgtgatttttatagcctagctcacttttacaagcaaagtgctgcgagggtcaaagccctgtttcatgtcatacggcaacagaacagagctgaacacccaccgtgagacaccgaggtggccagctggcatggtggcggctctaaaatattattttgcccacccacacagtgtgttttaagccggtaaataaagaacatacagtagttttagaaaattaccaactataaacaattcattagataaaatatttataattaataaaaagaamggagacaacacatgaagtttaaatataattgaaaaatgaaccctttctgaatgttatgaacaagccaggaaaaagaaaaagttctaaaatgctatacgagacaatacagtctactatttcaagtttcagccaagaaactacagatcagaactaaatttaactactagtttcagtcataatattaacatgtaacacactgtagaatatatccagtactcttcttggcattctaaaaaaacaagtactctatgaagtagaac

SEQ ID NO: 377885 - DNA, 515 bp, Homo sapiens
gtgcagaacgtgcaggtttgttacataggtaaacatctrcctttgtggtttgctgtgcctatcaacctgtcatctaggttttaagacctgcatacattaggtatttgtcctagtgctctccctccccttgcccccacctcccaacaggccccggtgtgtgatgttcccctccctgtgtccacgtgttccattattcacctcccacttacaagtaagaacatgcagtatgtggttatctgctcctgtgttcgtttgctgagaatgatggcttccagcttcatccatttccctgcaaatgacatgaactcattcttttttatggctgtatagtgtgaattgccttttataaagaacattttgattttgtttgttcttggtaaaataggtgtttttttattgtttctttgacattttgtctattctgaatggaaactcaaattgctttttaaatcttttatttcatgaactagtcattttgtttaggtttagcatatagttccttgccttttgtgggt

SEQ ID NO: 377886 - DNA, 515 bp, Homo sapiens
gtgcagaacgtgcaggtttgttacataggtaaacatctacctttgtggtttgctgtgcctatcaacctgtcatctaggttttaagacctgcatacattaggtatttgtcctagtgctctccctccccttgcccccacctcccaacaggccccggtgtgtgatgttcccctccctgtgtccacgtgttccattattcacctcccacttacaagtaagaacatgcagtatgtggttatctgctcctgtgttcgtttgctgagaatgatggcttccagcttcatccatttccctgcaaatgacatgaactcattcttttttatggctgtatagtgtgaattgccttttataaagaacattttgattttgtttgttcttggtaaaataggtgttttttwattgtttctttgacattttgtctattctgaatggaaactcaaattgctttttaaatcttttatttcatgaactagtcattttgtttaggtttagcatatagttccttgccttttgtgggt

SEQ ID NO: 377887 - DNA, 455 bp, Homo sapiens
gtaaaaacagctaatagcagcaacaaaaaaagagaagggtcatcttcacaattaaaaatatagaacccaatacttttcaaattatatgtaatgacgactttaatctagcaagaccatttcttaatagcacatatacacttaaaagaatgtaattaatattgtataaattcttatgatgaatttaattatagtctttaggatattgaaacatgaaataaagaaaaagtagaaatgctttgtctaaaattatgttaggagaaaaaatagtgttgtttaggaattacctgacttaaaggggcctatagaactccctcaggctaagttacattaaactaatgctctattatcgattatcgtcttcttaagcaagatacaaagtacaaattataggtaaagccaagtatttayaggtttaaattgacatttgtaaattaaaattacaaatttaaatttaa

SEQ ID NO: 377888 - DNA, 515 bp, Homo sapiens
ttaccctatcaattatcccctccctaggctgtatttttaggcttctctaagcacacatataccacacacctataccacatttatacaaatgttcatatgtcaaaagttgaatacccacacrtacacacaaacatgcatatatgcataaatgcacaagaacaaaagtatacgtgtatattaatatgtgtgtgcattcaatttttgacacaattgatttcagttaccttcttaaaactcacttttccttttatttccaaatcactgactttatattctctttctttttttttttttttgacagtttttgctcttgttgcccaggctgcagtgtaatggcacgcgatatcagctcactgcaacctccaccacctgggttcaagcgattccccagtctcagcctctctattagctgggattacaggtgcctgcaatcacgcccagctaatttttgtattttttttttaatagagacagggtttcaccatgttggtcaggcaagtttcgcactcctgacc

SEQ ID NO: 377889 - DNA, 599 bp, Homo sapiens
tttcaattttcctcttaatttcttcactgacccctggtcatcaggagtatattgtttatttttaggtatttgtatagtttccaagattcctcttgttattactttctagttttattccattgtggtcacagaagatgcttgaaactgtttcaattttttgaatgttttaagacttgttttgtgatccaacatatgttccatttttgagaatgatccacgtgctgagggaaataatgtgtattctgcagcttttggatggaatgatctayacatatccattagatccatttggtctatagtgcagattaagtctgatatttctttgttgattttctgtctgaaatatctgtccaatgatgaaagtgggatgttgaagtctccaactgttattgtattggggttctctctttaactctaataatattttctttatatatctgggtgctcccatattgggtgcatatatatttaaaattcttatatcctctttctgaattggcacctttattactatatagcgacctttatctcctcttataatttttttttcttgaaacctattttgtctgatataagcatggctattattcctctttttt

SEQ ID NO: 377890 - DNA, 589 bp, Homo sapiens
ttctttatccttgacctttgggagtctgattataaaatgccttgaggtagttttctttcggttaaatctgcttgttgttctataaccttcttgtacttggatattgatatttttctctagttttgtaatgttctttgttattaacactttgaataaactttctactcctatttccttgtctatatcctttttaacgccaacaactcttagatttgcccctttaaagctattttctagttcttgtaggtgtgcttcattgctttatattcttttttcttttgtcttctctgactgcatatttttaaatagcctatcttcaagctcactaattctgtcttctgtttggtccattctgctattaaatgactctgatgcattttytttagtatgccagttacatttttcagctccagaatttttgcttaattcttttaagttatttcaatctctttgttaaatgtatctgacagaattctaaactccttctctgtcttatcttgaatttctctgagtttcttcaacatagctattttgaattccctatctgaaaggtcacatatctctgtttctccaggattggtccttggtt

SEQ ID NO: 377891 - DNA, 465 bp, Homo sapiens
cagcttctctcacctccttctgcctgttttattctagccgcgctggcagctattagatggtccacacccacactgaacactgagggtgggtctgcctctcccagtccactgactcaaatgttacyctcctttggcaacaccctcattgccagacccaagaacaatacttgacattcttcaatccaaacaagttgacacttaatattaaacatcacaatagtatatatatatatatatagtatatattttatatatcatatattttacatataatatatatgatatgttatatatcatatattaaatatataatatatgatatataatatatattatatatatgtttctctctctttctctttgtctttatgccagaatcctaatctattaaacaggaatctccattaaatgcaagcaaaacaaccttcatgattgcctttggagccataatcaaagtcatcatag

SEQ ID NO: 377892 - DNA, 465 bp, Homo sapiens
cagcttctctcacctccttctgcctgttttattctagccgcgctggcagctattagatggtccacacccacactgaacactgagggtgggtctgcctctcccagtccactgactcaaatgttactctcctttggcaacaccctcattgccagacccaagaacaatacttgacattcttcaatccaaacaagttgacacttaatattaaacawcacaatagtatatatatatatatatagtatatattttatatatcatatattttacatataatatatatgatatgttatatatcatatattaaatatataatatatgatatataatatatattatatatatgtttctctctctttctctttgtctttatgccagaatcctaatctattaaacaggaatctccattaaatgcaagcaaaacaaccttcatgattgcctttggagccataatcaaagtcatcatag

SEQ ID NO: 377893 - DNA, 465 bp, Homo sapiens
cagcttctctcacctccttctgcctgttttattctagccgcgctggcagctattagatggtccacacccacactgaacactgagggtgggtctgcctctcccagtccactgactcaaatgttactctcctttggcaacaccctcattgccagacccaagaacaatacttgacattcttcaatccaaacaagttgacacttaatattaaacatcacaatagtatatatatatatatatagtatatattttatatatcatatattttayatataatatatatgatatgttatatatcatatattaaatatataatatatgatatataatatatattatatatatgtttctctctctttctctttgtctttatgccagaatcctaatctattaaacaggaatctccattaaatgcaagcaaaacaaccttcatgattgcctttggagccataatcaaagtcatcatag

SEQ ID NO: 377894 - DNA, 620 bp, Homo sapiens
agaactcatataactaaatatttaatttgcaagcattaacaaacgtttgaaaaattactgttaaagctccagggaaaaaataattgcactactacaattttctcagactttttttattggcttatatgcaagcctagaggctgatatgagatgtagctgaaagtctctacatgaatccagtttgaccacaaactaagggagaaaaataacacagctaagtaattttgatgagaaattaaatttgtacaaccaacagagaagacaagattcagaatctaaaaatactttattttacattgctgactgaagttatgttacattattgactaaaataaattttttaagtacaaaaaaaagataattttttttctcctttcatgtgatataacgtggttttgaagtctaggtacaaattataattacctagggaagtctgaaagaacttcccctatctgagtccactccagccagaacaatcagaatctcttgrtgttgggtgtcatgaactaattgattctgttttggtttgggtttgttttttgaaactctccaaaagatgcctcaggactgacagcatgaaggcggtgtcacaactttgatattagggatcttattcaatt

SEQ ID NO: 377895 - DNA, 558 bp, Homo sapiens
aatgaccatttatagaaacataattcactagtgaaaagttcaattgaaggtacagtgttaataatagttattatccaacttatcagtagttgacttctttcactaagtataatgttaacaagattcatccatattgtagtatgtattgatacttcatttctttgtattgctgaattatatttcattgtatagatacaytgcattttatttatctatgcatcagttgatggtcatttgtgttacttctattttttgactattttaagtaatactgctgtgaacattcttttgcaagctttcgtgtggacatatgttctcatttatcgttggaatatacttagaagtagtaatgctgaattagtagtaagtctatgtttaaccacttcagaaattgccagattgttttccaaagtgacaacaccactttacatcccacaggtagtacgtgagaattccagttctctgcatacatattttgttatctttttctttatagctgtcttagtgggtatgaagtggtatcttgtagtgttgagttacatttctctgattgctaat

SEQ ID NO: 377896 - DNA, 558 bp, Homo sapiens
aatgaccatttatagaaacataattcactagtgaaaagttcaattgaaggtacagtgttaataatagttattatccaacttatcagtagttgacttctttcactaagtataatgttaacaagattcatccatattgtagtatgtattgatacttcatttctttgtattgctgaattatatttcattgtatagatacattgcattttatttatctatgcatcagttgatggtcatttgtgttacttctattttttgactattttaagtaatactgctgtgaacattcttttgcaagctttcgtgtggacatatgttctcatttatckttggaatatacttagaagtagtaatgctgaattagtagtaagtctatgtttaaccacttcagaaattgccagattgttttccaaagtgacaacaccactttacatcccacaggtagtacgtgagaattccagttctctgcatacatattttgttatctttttctttatagctgtcttagtgggtatgaagtggtatcttgtagtgttgagttacatttctctgattgctaat

SEQ ID NO: 377897 - DNA, 558 bp, Homo sapiens
aatgaccatttatagaaacataattcactagtgaaaagttcaattgaaggtacagtgttaataatagttattatccaacttatcagtagttgacttctttcactaagtataatgttaacaagattcatccatattgtagtatgtattgatacttcatttctttgtattgctgaattatatttcattgtatagatacattgcattttatttatctatgcatcagttgatggtcatttgtgttacttctattttttgactattttaagtaatactgctgtgaacattcttttgcaagctttcgtgtggacatatgttctcatttatcgttggaatatacttagaagtagtaatgctgaattagtagtaagtctatgtttaaccacttsagaaattgccagattgttttccaaagtgacaacaccactttacatcccacaggtagtacgtgagaattccagttctctgcatacatattttgttatctttttctttatagctgtcttagtgggtatgaagtggtatcttgtagtgttgagttacatttctctgattgctaat

SEQ ID NO: 377898 - DNA, 601 bp, Homo sapiens
tgtactaaggatatattcttgcttaccccagacctccaccattgctacccaagagaaaaacagtttgactgtatcctgctttttgggtcactagctcctgagtcaagtatgaagtgaagtgtatccarttggcagggcacaggaaacatgtctactttctggcagcatggggagctggaaaagtgagtgtctgacattctgaactttcatagtaagaagcaatttctgctttcctccaaaattaataatatgtaggaattcttctaacaagaagagagtcctgatattgttcgactgaaagaaatgtcaatcattaactatgatggtcattactacttaaaaaaccacgtgacaatttctgtcattcttcaaatcatatacttttctgaaagtaaactcagagtcaccagcaatgacagaaattctaatcatgttactagacctggttagggctacatcatctccataaaagtaaataactccaactttatatggcagagctggtggtcctgccatactccctgctaatgtctcctgaatctgtcaagttgttccaagaaaaactttcggagggaactaggctggattcatttaatcccca

SEQ ID NO: 377899 - DNA, 550 bp, Homo sapiens
aaaaaatgggtaatttgaaaatatctagtcagagaataaaaaagaacagaaaacccaaaaagtaatgaagaaagcctatggaatttatgggacagcatcaagagaggtaacttttgaattatggaattttaccaaggaggagaaagaaagagaggtccagaaagcttactgaaagtaataatagctgaaatctttctaaatcttgagagctatattgacattcatgtacatagagcttaaacattttcaaatcgtttcaacccaaaaaagacttcactgagccacattataatcaaactgttaaacatcaaaggcaaagaagtttgaaagcagcaaaagcaaagagggtgatcatatacaagtgaactcccrtaaggatatcagtaatttctcagcagagaccttgtagaccagacaagagtgggataatataattaaaatgctgaaagagaaaacaactggcagccaagaatacttcatccagtaaaactatccttcataaataaaggcacaataaagacttttccaaacaaacaaaagctgagagagt

SEQ ID NO: 377900 - DNA, 607 bp, Homo sapiens
aaaagaacagaaaacccaaaaagtaatgaagaaagcctatggaatttatgggacagcatcaagagaggtaacttttgaattatggaattttaccaaggaggagaaagaaagagaggtccagaaagcttactgaaagtaataatagctgaaatctttctaaatcttgagagctatattgacattcatgtacatagagcttaaacattttcaaatcgtttcaacccaaaaaagacttcactgagccacattataatcaaactgttaaacatcaaaggcaaagaagtttgaaagcagcaaaagcaaagagggtgatcatatacaagtgaactcccgtaaggatatcagtaatttctcagcagagaccttgtagaccagacaagagtgggataatataattaaaatgctgaaagagaaaacaactggcagccaagaatamttcatccagtaaaactatccttcataaataaaggcacaataaagacttttccaaacaaacaaaagctgagagagttcattaccactatagctaacttacaagaaataccaaaaggaattcttcaagctgacataaaaggatactaattagtaacataaaattatatgaagg

SEQ ID NO: 377901 - DNA, 574 bp, Homo sapiens
cagcaatcccactcctggctatctacccagaggaaaagaaatcattatacgaaaaagatacttgcacatgcatgtttatagcagcacaatttgtaatwgcaaaaatatggaaccaaatgaccattcatcaatgagtggatgaagaaaatgcagtgtgtatataccatgaaatactgctcagacataaaaatgaatgaaagaatggcatttgcagcaacttggatggaatttggagaccattagtctaagagaagtaactcaggaatggaaaaccagacattgtacgttttcattcattaggttggagctaagctatgaggatgtgaaggcataaaaatgatacagtgaactttggggactcaaggataagagaatatacattgggtacagtgtatgctgcttgggtgatggatgcagcaaaatcttgaaaatcaccactaaagaacttattcatgtgaccaaatgccacctgttcccacccaaaccaactcttggaaatggaaaattttagaataatatttcgtaagtcttttgaatgttctttaccctatatttttcttgcccctacctcaat

SEQ ID NO: 377902 - DNA, 548 bp, Homo sapiens
aaacatacactgttcttttcttttttctttttctttttttttctttcttttctttttcttttttttttgagacaggattttgctctgtttcccaagctagagtgcagtagcatgatcacggctcactgcagccttaacctcctgggctcagggctcagagggtccttctgccacagcctcccaagttgctgggaccataggtgcatgccaccaggcacagctaatttttaaaattatttgtagacacgggaactccctacattgcccaggctggtctcgaacttgtgggctcaagtgatcatcccatgtcagcttcccaaagtgctgagattacagatgtgagctactgtgcttggccargtgttttctaattagcaagaagttcacatatatttcttatttatgtggttttgatactggattccagtggtgtgtgtttttactacttgattcccggtggcagtatctcaagaaggaaaagtctattatcgggagacaaaaatgaaaaacagcaggtgaattggaaatcaaatgcacatacacaatcc

SEQ ID NO: 377903 - DNA, 611 bp, Homo sapiens
tctctgggtaccttatttctctgggaggagtgatgcacccsctccctcttcatcttctgctgtgattgtaaagttcctgaggcctcaccagaagcagatgttggagccatgctagtacagcctgcagaaccatgaaccaatttaactccttttctttataaattacccagcctcaagtttttctttatagcaatggacaaatggcctaacacagaaaattgataatgaggagtggagtattgctataaagatacctgaaaatgtggaataagctttggaactgggtaatggttagaggttggaagagtttggagggctcagaagaagacaagaagatgagagaaagtttggaacttcttagagattggttaagtgattgtgaccaaaatgctgatagaaatgtggacagtgaagtccaggctgatgatgattcagatgaaaatgaaaaagttattgggaagtggagtaatggtcacctgtgttgcaacctaccaaggagcttggccacattatgttcacatcctaggaagtctatggaaggccaaacttaagagcaatgactcagtggtgtccaagggagagaacacagtcatgggttctttgtttctgtt

SEQ ID NO: 377904 - DNA, 550 bp, Homo sapiens
tatgcttcatgtagagcctgcagagccatgaggcaaaagaaaaattattttatttatgaattacccaatttcaggtatttctttacagtaatgcgaaaaacagcctgatacaaaatatgtatggaaaatatagtggagaaaaatcaatggaattcaatgctatctagatatagcattraaaagaaaatataaggtagattggactaggcatgtgtgtgttgaatggaataaggaaatctgctgtagagagaataggctagaaaaaaaagagggttcaggctaaaaacaaaactatgtttttcgatagaataagtaagttatgttgcaagtgacttttcatagcttgttttttattttcttcaaaaacaaaccatgattgtattaggttttactcgatttgctcttagcctatttagatttctgctggtttattggtttagtcaatgagcctataagtaatggttaattttagtgataaacagcatgtttgatttaggagaacaaaggccaaacagctaaatagagttcttttgattcactgatgagaggg

SEQ ID NO: 377905 - DNA, 543 bp, Homo sapiens
agggagggctttcagtgggtccctgctggtaccttagttacaaatttggagacctgagtcttgcctaagaccccatatgtttggtgccaaattattgtcaaggaaaagagtcaaactgtgtgaaatacttgaagagatttattctgagccaaatgtgagtgaccaatggcccatgacacagctctcaggagatcctgagaacatgtgctcayggtggttggggtacagcttggttttatatattttgggaagacacgagacatcagtcaatccatgtaagagggacattggtttagtctgacaaggcagaacaactggaagtgggggcttccaagtcataggcagattaaaaaatcctctgattgacaattgattgaaagagttactatcaatagaaaggaatgtctgggttacaataagggtttgtggagactatggttttattatgcaggtgaagcttccaggtagcaagcttcagagaaaatagattgtaactatttcttatgagactcaaggattctgttctattagtaattccaaaag

SEQ ID NO: 377906 - DNA, 606 bp, Homo sapiens
agtattttaggttagttttggaatgcccttgccaagagggaggatccattccgatggttgggggacttagaatttcagttttgttttagacttcccaaagaccccactctctaatataatcacattgggggttaagatttttgcatatgaattttttgaggacaaaaacattcagttcataatattgagacaacggctcttgagaataattggctactcaagatacaccatctgatctcatttatagaataaattactctttggactagttgatcttttaatctgtgagtatcaatcataaagtaatttgtaacagtgaaatcaagaaaggattaaaactcaagaacttctccctctcacacacacgcaatgttcagcttaataactgcaatcctgaaaactactatttctaatttgaaaatattgttggagaggaaaatattgttatcaatcaagtagtaacataaatatctttgggaaattccctgaaataaactakaagccatcattctctgtaaatctttcttttctcagaatgatttttccctcaattgaaatctaaacttgtgttagtgaataccataaatttaaagaatacacagttca

SEQ ID NO: 377907 - DNA, 579 bp, Homo sapiens
gcttgggcaaaggtcagaaatggccaataagtcatttttaaactgtgttactttctacaagctacagccagtgcattttcccatgacctagaagtctaaggagttgatgttatgaaatatggctgggtaaactgaaagaacccaactctagggtgctggcattaactgtgatgttttgcaagttttctcacattcytatgttttcgtttttttatttgcacagtcagacaatatctacctcatatagttgttttgaaaatttgatgaagtgatttatgagagtttagggtagaagctgacacacagtaagtactgagggaattattgtttttattgatgatgttaataaagacatgctgtgctatcactgcaaatatcagcacagcttttacttctgcatgacattgaggaggccacaaaaactgactgaactcaaagtctggctacatggtggccccaaaataaggcatgactgttattaaagtaacaaggaaaatcataagtcaaataaggagttacattatcaatatgcaattctgctaatgtttcttctcaaaactatatttattaatgtaatag

SEQ ID NO: 377908 - DNA, 621 bp, Homo sapiens
taactgtgatgttttgcaagttttctcacattcctatgttttcgtttttttatttgcacagtcagacaatatctacctcatatagttgttttgaaaatttgatgaagtgatttatgagagtttagggtagaagctgacacacagtaagtactgagggaattattgtttttattgatgatgttaataaagacatgctgtgctatcactgcaaatatcagcacagcttttacttctgcatgrcattgaggaggccacaaaaactgactgaactcaaagtctggctacatggtggccccaaaataaggcatgactgttattaaagtaacaaggaaaatcataagtcaaataaggagttacattatcaatatgcaattctgctaatgtttcttctcaaaactatatttattaatgtaataggtttaggtaccaatttgaaattatcattttcatattttactgaatattaaatgtcttttgaaatacaaaggaatggattttcagaattgcagctctgaaaatttcacattcagagaaatttcacattcagagaaaggctaattcaattctcttgatttttcagattaataaacctataagcatttaatatgccactttaaacac

SEQ ID NO: 377909 - DNA, 575 bp, Homo sapiens
ccctaaataatcattggtttcttgtccaaatttgttcagagagatttgattgtatacagtaaaatttaascatggaatgagaagcattgtatcaaacttaagaaaaaaccaacaaataatctattgatgtatttggatctatagcctcaagtcaccttttttcttcttgaaaagatatggggatgacagcatagtaaagtaaataaggttaagataattaacaattgatagcctcacctaaatgaatgtattaatagaagcatctagtcagtcaaagataattaaatatcttgaggtttaaacctaaccactctgagaaaggaatttttctatttaaatttcaaatggaaacacataaatggacagagaaagcaagaatgaaaaaccaggaagacctaggggtcttagaagtacattaaaaagcaagaatgaaaaaccaggaagacctaggggtcttagaagtacattaacaactttcttgctaatcttggattgccacagttttggctgacagtagaaggtgacataaatcttattcaatgagacaccataattttttacattaaagtaacaaa

SEQ ID NO: 377910 - DNA, 533 bp, Homo sapiens
agttgcaggcaagaagccagccaaaacccaccagaactgagatgagattgatgacctctattcatcctcattgctcattatatgctaattataatgcattagcatgctaaaaaaaaggtggtaggagccctcagttctgggaattgcccacctctttcctgraaaactcatgaataatccgcagtttgtttagcatataatcaggaaataactataagtatccttagtccagcagcccaagctgctgctgtgtctctggagtagccattcttttattcctttacttcttaataaacctgctttcactttattctatggactcactccaagttctttcttgaatgagttccaataaccttcttttggggtctggattgagacccctttctggtaacagggatgcctaatttttcatcctttctatcataagttttaactaataaaggataaacaaaagttcaaataagaaatcaagctataatagcaactgtgttttcttataaaactggagtggagaaaatggcaggaactct

SEQ ID NO: 377911 - DNA, 568 bp, Homo sapiens
tactcaccagtggccaacatagaagactgagagagccttggaccttgagagagaaagagaagatgaagagtgagaagaagagacaagagaaaaaataaaaagaaagctggaaaggctaagaaaaggaggaaaaattttcaaattcaatgatgaggataaagagactagaatttcattcaatacagttccttatgagattagtgacagtttcttcatgaaaatagaaaataggatttttcaacatgaaagtttcaacattcartctactttattcttgaagagggaagggaagacattgacctagaaaagtattcagtgagaatttagtgatatcacttgtgggagagaggcttatatggcaatactactgtatacattaatgggacctgatcacatttttatttttgcatctagatctaaagagagttgttttcacaaaggcagaaatttagaatttcagcagccagccagccctccctttgagacatcaaacagggtgttgaatgccctttgaaagaggcagagagtgaaaatctgaaaacctaatttgaagaagggagtaataact

SEQ ID NO: 377912 - DNA, 531 bp, Homo sapiens
gtttgagcttcagggcactgaagaagtgagccacatgttcatctcatgccctgcaaagggcataagggaacttttcatgtttcagtaggatccactacctgcagactcttatcttagttcctgtgtaacagagtaccccatttttctgagatggtttgttttgttgtgggaagacagggaccctgaatggagggaccggctgaagccatggcagaagaatgtggattgtgaagatttcatggacatttattagttccccaaattaatacttctttaatttcttatgcctgtctttactgcaatctctaaacataaattgtgaagatttcatggacacttatcacttccccaatcaatacccttgtgatttcctatgcctgtctttactttaatctcttaatcctgtcatcttgtgagccaaggaggatgtatgtcgcctcaggaccctgtgatgattgcrttaactgcacaaattgtagagcatgtgtgtttgaacaatatgaaatctgggcatcttgaaaaaagaacagg

SEQ ID NO: 377913 - DNA, 569 bp, Homo sapiens
aagaagattccaaggatagaggggaaaaggctcaattgtatatgctcacgttcttctctcaatatcaccctcaggaaagtcgttcatttttccaagaggtagcagataaagggaagagaaatcacctcaaaaagtggttggaccagggttctagtgaatttgttttccacatgttgctacaatagtcaacatcctggggaaaatgtgcagcttatgatatcagcaatgttcctatgtgtctttgtccattcaggctgctggaacaaaataccaaaagctgaatggtttatgaagcacaaacatttatttctcacaattctggaggctgggaagttcaagggcaagacgctggcagattctatgtctggtgagggtaagctcttcatagakggccccttcttgctgtgccctccatagtggaaggagcagagccgctttttgggcctcttttataagaaactagtcatatctatgagaaattcaccttcataacctaatactttctatgccttatctctactatagcattggggattaggtttcaacatatgaattttagggggatgcag

SEQ ID NO: 377914 - DNA, 541 bp, Homo sapiens
aaaaacaatgtgaaggatttaaagctggagaatttaatactagcaaaggatggtctgataattttagaaaaagatgtggttttaaaatgtcaacataggaggagaagccccttttgctaaccaagagacagcagatgagttttcagatgccattaggaaaataattgaggagaaagattatctgcctcaacaggwttttattacacacaaaagtaccctattttgggaaaaaaaaaaaaaaacacaacaaacttccacaaaggacatttattaagataagaattgaacaacaggatttaaggcagaaagggataggctaactatactgtcttgtgcaaatgcagttgtgtttatgaccaggactgcccttatctataatgctgccaaaccctgagcttcaaaaggaaaagataaacaccaacatccagtcttttagttttcaaaaaaaaaaaaaaaaaaaagcctggaaaataaaaatccttttctggattggttccatcaatgctttgtccctgaagtcaggaactaccttgcctgtaag

SEQ ID NO: 377915 - DNA, 561 bp, Homo sapiens
cagtcattaccccattaatttattttgaagttgaatccaatgaaattctaatgatctgactgtgcttataaaccttgacaattcttcctgcctcaggcccagtttaagctcttattaattggtcctgactttcatgtcactatttttgcagttctgatttttatgactttaatgttttttttttcaagtacagcttttkggaattcagatgcatttgtattaagatactctcatatctttaaagagtctcatgaacttgaatataattccagaatgtctttacaaatacatctctctggagatatgccctactgtaaactctttctggatgggtctgtgaaaagagtaaagaagtagttaccagcttctgtaacagtcacgttttttatgttttcccaacacttgctcacaaattttgttatggctttccctagtcccacttgtccagcagagatagaaagatacatgcacaattttaaagttgcaaaacagcaaaggccatgaaaatcacattcaaatgttagttttagagcttgtcctgtcttagtgcataagtgctgc

SEQ ID NO: 377916 - DNA, 597 bp, Homo sapiens
agtggataatttgtcccatcaaattgacatgatctagtaggtctacagagaagagaaaagtagtatggaaaatttcaccaattccatcttactaccaacttgtgtaaaggaaagggaaagcagaggttaacattaggcgggaagcatttgctgcgggacatttctttgaaacctaaaacactttatcaaggaacttgtcatctcagtggaggacaatccaattgttattctcctgatttcttgctggagtagaaaaacatcaccctggagaatggaaatgcagaaagggaaagagaccacgtccattaggaaaatgttcatttatccttgggaatatttagctcaggttggaagcaccacatgccccaaatagagaaacttgcataaggctcaatgtaacataaacatgaatgtattaggctaattttgaagtggctgccctacctcacattctsttcttagaaaatctgtccagacctaagcatctgttgagtatccacttttatgctagccatacctaattgaatgaatggcaggcagttgactgatagtcagtacaaatgatggctgtgcagtaactaatcagattctgtttcc

SEQ ID NO: 377917 - DNA, 618 bp, Homo sapiens
atctattatctcacagttctgggggctacaagttgaaattaaagtgtaggcaggaacacaccctttacagagtccctgggggagaactcattcctgcctctttagcttctggcggatgcccatttttttttggtttgctgccatatcactctgttgtctgacttcatcttcacatcaccttctctgtgtatgttaattctcctctccatctctcttataaggatacttgtactggcattcaggacctggataattcaggataagcccctcatctcaagattcttaatcacatcttttgctgtataacaaaagtataacattcactcatttgccatataatatttacaggtccttggaattaggaagtgartatatctttaagaagccatttttatttcagcctatcactgtttgtgtgtgtgtgtgtgtgtgtgtgtgtgcgcatgtgtgtgtatacactcttggaacctaagatgtcctacctatacagttggatgactatatttctcttcacatttttatatatgattaactatatttcataaaagataaaaacttgtattgatcctggtatgtaaattaacatggaaaaaataaaatcagatgtatttcttcact

SEQ ID NO: 377918 - DNA, 613 bp, Homo sapiens
actgcatttgcatgtggtgttcgagactcatcacccgatctccaagccaaataacagacttttgtaaatcattaatttgatttgtcaatttttgatagatgccttgttgagacttccacatttgggtggaattggcttgccaatcattaacaaaatgagctgtttgaawggattggtgtaatgccattctggcagtggtggccattgcagtgacagtaattaggcccatgataacagcaattaaagtgaaaacaaatctcttagatctttttagaattcactgtagcactttattaattaaatgtattgagggggaggattcccaaggtctgggtaaagttaccagaatccagattccttctcgagcttgagccaacattacacttttcctggagtcaaaaggggagttaatacaagtgtataaatgacaattaatgcattggacagtttgattgttcatccaaattttgatatttcccactaacagcatgtaagggggcttaacactactctgtataggaacagtcaggttggaggaaagtaaagcagaatgtctggatctacattgatactgagagagagtgggacggtagtggggacaacagacagaata

SEQ ID NO: 377919 - DNA, 589 bp, Homo sapiens
taagagttatgtggaatattaatttcagccccccattgtgccagtaaatctctaccccaaatattaataggaattgtcatgatatagggctgaattgtacccttttgaccatcaaggccagtgcaaggcaagataaatgtgctcccataaacttcctcggcctttccaacacctactagtcccatgttagtgggatgtttaagccaagaggaaggccataaactagaggaaataacagaaacatcagcaccagtatctactaggccctcaaactttcttccttgaatgtgtatggtgcaggtgggcctttgtttagaaattacattaatccaataagcggccttttcacctctggagcccatcccagggccacgtgtcttatctcctttgtttaaaatgatattaggtagtaaaagcaattgagcgattgactcaccagccagaatggaaacaggaaccttggcagatgtgattaatttaatctcatcaacrgaatcagaattaatgagaccagtatgaatggtgattcctttagcagagctagatgccctacctaacaccaggcccactgaaccttgaggtaaagggc

SEQ ID NO: 377920 - DNA, 376 bp, Homo sapiens
caaatgagggaactgaggtccaaagaagtaaattaagattaagctgaagtattacattatgccaatctgaaggtttgtacctacatattttaaattcagtrcttagtatccaaaaaaattagtttttaccccaaacatcacattttgtttgggtgttctttatatagaaagaatgatggaattgaattttaaagcagaaggaaaatcattaatatgtctgggagtagatagatgaagtaaggtgtcactcagatttctgaaccttatacctaatgatacatgttttcttggaaactgccttaagacacgatacttttttttaatcaaatttaaggtatctccaaaccaattatggagatacaaaaattagaaaaaa

SEQ ID NO: 377921 - DNA, 597 bp, Homo sapiens
tactaagattatgagtataactaacaaattttataagagattgagggccttgaataaaaggcaagactaaagtacatcttctttttagaagaaattaaacccataattaaaatrtaaacagccagttgtttatattatcagaaaactgaaatcagatttgtgaagaaaaacaatataaaaagtatgatttatctgacattataattttccatatttgctagaaaactattctgaattttctaattcgagtttgaggtagacaaaatttaaatcaaattggctaaggcagaagagaactttattgggttacttaattgagaaattcctgtgtcaggattggctttaactgtgtatttagattcaaatctgtcatggcacagtttctccccatttctcacctaattattaattctgtatgttgcctttactcctaccttatgattatgttttccaaatttgattaaaattatgaacttacagatcaaaaacgctacaatcaccaagcagaagacttcacatgcatgcgtgcacaaaaacacacccacacacatacacacacacagcatatgataatcaaattactaaaaaccgtaagtg

SEQ ID NO: 377922 - DNA, 597 bp, Homo sapiens
tactaagattatgagtataactaacaaattttataagagattgagggccttgaataaaaggcaagactaaagtacatcttctttttagaagaaattaaacccataattaaaatgtaaacagccagttgtttatattatcagaaaactgaaatcagatttgtgaagaaaaacaatataaaaagtatgatttatctgacattataattttccatatttgctagaaaactattctgaattttctaattcgagtttgaggtagacaaaatttaaatcaaattggctaaggcagaagagaactttattgggttacttaattgagaaattcctgtgtcaggattggctttaactgtgtatttagattcaaatctgtcatggcacagtttctccccatttctcacctaattattaattctgtatgttgcctttactcctaccttatgattatgttttccaaatttgattaaaattatgaacttacagatcaaaaacgctacaawcaccaagcagaagacttcacatgcatgcgtgcacaaaaacacacccacacacatacacacacacagcatatgataatcaaattactaaaaaccgtaagtg

SEQ ID NO: 377923 - DNA, 634 bp, Homo sapiens
gtatctaaatgacaacaagatgagaggggaaaaaaggaaaagttatgtcgaatacataatgaagagcaataggacatatttaaaccaaatatatcaataattatgttaaaactaaatggtcaaatcaaatggttaagtccgctgggcatggtggcttatgcctgtaatcccagaactttgggaggccaaggtgagcggatcatgaagtcaagagatcgagaccatctggccaacatggtgaaacctcgtctctactaaaaatacaaaaattagctgggcatggtggcacatgcctgtagtcccagctacttgggaggctgaggcaggagaatcgcttgatccccgggaggcagaggttgcggtgtgccaagttcgcaccactgcagtccastctgggggaaaagagcgagactccgtctcaaaaaaacaaaataaaacaaaacaaacaaacgaaaacaaatggttaagtcaaatgatccactttgtcagaggattaaaaagttaataacactaaactctaggctgtctacaagcaaactgtttcaaatatagagacatggtaggttaaaattaagaggataagaaacctgtttcaaatatagagacgtggtaggttaaaattaagaggatataa

SEQ ID NO: 377924 - DNA, 634 bp, Homo sapiens
gtatctaaatgacaacaagatgagaggggaaaaaaggaaaagttatgtcgaatacataatgaagagcaataggacatatttaaaccaaatatatcaataattatgttaaaactaaatggtcaaatcaaatggttaagtccgctgggcatggtggcttatgcctgtaatcccagaactttgggaggccaaggtgagcggatcatgaagtcaagagatcgagaccatctggccaacatggtgaaacctcgtctctactaaaaatacaaaaattagctgggcatggtggcacatgcctgtagtcccagctacttgggaggctgaggcaggagaatcgcttgatccccgggaggcagaggttgcggtgtgccaagttcgcaccactgcagtccactctgggggaaaagagcgagactccgtctcaaaaaaacaaaataaaacaaaacaaacaaacgaaaacaaatggttaagtcaaatgatccactttgtcagaggattaaaaagwtaataacactaaactctaggctgtctacaagcaaactgtttcaaatatagagacatggtaggttaaaattaagaggataagaaacctgtttcaaatatagagacgtggtaggttaaaattaagaggatataa

SEQ ID NO: 377925 - DNA, 558 bp, Homo sapiens
atccaccaaatagaaatgtaaatcattgttatggattgaattgcatccccctaggattcatatgtttaagtcctaaccccccgcaagactgtatttgaagacagggactttaaggtggtaaaaaggttaaattaggttataaggatgggactcttatgcaatagaactggtgttgtctaagaaaagaaagagacatcagagagctccctcatttcccatgcttgcatggaaaggctgtgtgagaacacagcaagaaggtgatcatcttcaagccaagaaaagatttctcaccagaagcccactctgatggcactgtgatcttggacataaacactccagaactaagataaaataaattgtttaagcagtttagtctttgatattctgatgccagcctgagctgactaatacagattttggyaccaggaagtaggatggtgttgtaacaaatacctacaaatgtggaagtggcgttgcaactgagtgatgagtagagactgcaagaattttgaggtgcatgttagaaaaagcttagattgccttgaagggactcttcaa

SEQ ID NO: 377926 - DNA, 551 bp, Homo sapiens
ttactggttatagtaaaatttgtgatgagatgaattaaagaaggaattgttaagtaaaaaggaaccagatcagaagatttggaaaactctcagcaatatggattggaaaaaagaaaggaagaagaaagtgtgagagaacatcaagggttgtgcctggataattattccaggaagaaattaccatgaatttaattagctacctctgcaaaagccaggactgaacagtagtgttacctggctgtgaacatgccttatccttcaaaaagtaagaaataaagtgactctcaggacaattcagacattggtcgggctgccactgccgccacaggttcatgacataktctcagtggtcaagtctgccaacccaccagtttcagaaacctgaccacctccttggtttcagagggtgcggccaattcttcagtcaatccagttgcaccagcccagatccttaggagcaatgtttctgcctgcagtcaggaaggtaggaccactgtgtagtgacaaggtggaattactgccctagtgggcccagaaagtgggacctttgg

SEQ ID NO: 377927 - DNA, 404 bp, Homo sapiens
tagtgttacctggctgtgaacatgccttatccttcaaaaagtaagaaataaagtgactctcaggacaattcagacattggtcgggctgccactgccgccacaggttcatgacatagtctcagtggtcaagtctgccaacccaccagtttcagaaacctgaccacctccttggtttcagagggtrcggccaattcttcagtcaatccagttgcaccagcccagatccttaggagcaatgtttctgcctgcagtcaggaaggtaggaccactgtgtagtgacaaggtggaattactgccctagtgggcccagaaagtgggacctttgggaccagatagtagaacattgggacctttggtcccaatgggaccagatggtagaacatcctgccaaagaaaatttttct

SEQ ID NO: 377928 - DNA, 560 bp, Homo sapiens
tgcctcattgctcattagcataagacacacccactagtgccatgacagtttataaatgccatggcaatgacctggaagtcaccaaccctttctgtggcaacaacccataatttacygcctatttcctagaaagttataaatacccacccctaaatttgcattgacatgcctcttagtttgcatgcaattgaaagtgggtttacctgagtataaatataattgtgaagagcccatatgttgctgactctgggcacacaggctatgtgttagccctgttcataaggaacagtatttttcaataaaagattgctgtctaacagcactagctcacctttgaattctttcctgggtgaagccaagaaccctcatgggctaagcctcaatttcggggttcacctgtactccttcagtactggtgcaaaaacagacatatatagaacaatggaatagaaaggaaaatcccgaaataaaaccagacacctacctatcttatcttcaacaacgccaccaaaaacaagcaacggggaatggactctctattcaataaatgatgttgggat

SEQ ID NO: 377929 - DNA, 587 bp, Homo sapiens
gctaaaatcatcacacaccaaacttcaaactctactataagactacagaaaccaaaacagcatgatatgaggtaggagactggcaggacttgttttctggtcacaacactgctgagcgaaacaggatataatccagacaggataaagtgaagaaaccagcacaaataagcagatatcaatgaaggcaattcatagctgcctcattgctcattagcataagacacacccactagtgccatgacagtttataaatgccatggcaatgacctggaagtcaccaaccctttctgtggcaacaacccataatttactgcctatttcctagaaagttataaatacccacccctaaatttgcattgacatgcctcttagyttgcatgcaattgaaagtgggtttacctgagtataaatataattgtgaagagcccatatgttgctgactctgggcacacaggctatgtgttagccctgttcataaggaacagtatttttcaataaaagattgctgtctaacagcactagctcacctttgaattctttcctgggtgaagccaagaaccctcatgggctaagcctcaatttcgggg

SEQ ID NO: 377930 - DNA, 560 bp, Homo sapiens
tgcctcattgctcattagcataagacacacccactagtgccatgacagtttataaatgccatggcaatgacctggaagtcaccaaccctttctgtggcaacaacccataatttactgcctatttcctagaaagttataaatacccacccctaaatttgcattgacatgcctcttagtttgcatgcaattgaaagtgggtttacctgagtrtaaatataattgtgaagagcccatatgttgctgactctgggcacacaggctatgtgttagccctgttcataaggaacagtatttttcaataaaagattgctgtctaacagcactagctcacctttgaattctttcctgggtgaagccaagaaccctcatgggctaagcctcaatttcggggttcacctgtactccttcagtactggtgcaaaaacagacatatatagaacaatggaatagaaaggaaaatcccgaaataaaaccagacacctacctatcttatcttcaacaacgccaccaaaaacaagcaacggggaatggactctctattcaataaatgatgttgggat

SEQ ID NO: 377931 - DNA, 560 bp, Homo sapiens
tgcctcattgctcattagcataagacacacccactagtgccatgacagtttataaatgccatggcaatgacctggaagtcaccaaccctttctgtggcaacaacccataatttactgcctatttcctagaaagttataaatacccacccctaaatttgcattgacatgcctcttagtttgcatgcaattgaaagtgggtttacctgagtataaatataattgtgaagagcccatatgttgctgactctgggcacacaggctatgtgttagccctgttcataaggaacagtatttttcaataaaagattgctgtctaacwgcactagctcacctttgaattctttcctgggtgaagccaagaaccctcatgggctaagcctcaatttcggggttcacctgtactccttcagtactggtgcaaaaacagacatatatagaacaatggaatagaaaggaaaatcccgaaataaaaccagacacctacctatcttatcttcaacaacgccaccaaaaacaagcaacggggaatggactctctattcaataaatgatgttgggat

SEQ ID NO: 377932 - DNA, 582 bp, Homo sapiens
acacatccaacaaaggtctaatattcagaatctataaggagcttaaatcaataagcaaaaaaacaaataactccattaaaaagtgagcaaaggacatgaacagatacttcgcmaaagaagacatataagtggccaacaaacacatgaataaatgttcatcaccaattatcagagaaatgcaaatcaaaccatagtgaaattctgcctcacactggtcacaatggctataactgaaaagtcaaataataatagatgttgacgagactgcagagaaatgggaatgcttacacactgttggtgggaatgtaaattagttcagccactgtggaaaagcagtttggagatttctcaaagaacttagaactaccatttgacctagtaatcctattactgtgtatatacccaacagaaaataaattgttctaccaaaaagactcatgcatgcatatgttaatcacagggttactcacaatagcaaagacatggaatcaacctaggtgcccatcaatggtggattagattaataaagtatggtacatttgcaccatggaatactatgcagctataaaaaaacaaaatcgt

SEQ ID NO: 377933 - DNA, 565 bp, Homo sapiens
tttttgccattataaataaagctactatgaatatacaagtacaaatctttgtgtgtagagatgctcttatttctctcaggtaaaaagctagaaattaaattactgggttttatgggaaatggatgtttaactttttaagtaactgccaactgctttccaaattcctattttgaatttgcatgagtgatatgtgagcactccagttgctccatatgaaagctaacacttcatattgtcactcattttaatgttagacattcttgtawgtatgtagtgttatcttcctgtaaccaatgactaataatgttcattatattttcatgtgtttgtttgttatttgggatctttatgtaacatattggttcaagtcttttgttcatcttcgtgctgtttgtcttagaaatggtttgtaagtattctatacaaattctgggtacaagcaagtgcgtatgagatatacgtttttcaaatatcttctctcagcattctttctttttttttctttcttttttcttttttttatttcttggtatgtatttcaaagggcaaaaatttctttttcact

SEQ ID NO: 377934 - DNA, 486 bp, Homo sapiens
ctttgaccagagctgtttctagttggccatcttggcccaaagagtgaaggattctacagcagggaatcacataatgaaagtgtgcattttgggaggtatggaaaaatgaagaggtaggctcacagttgatagtttatttaagaatcaataataatttatgtgaaaacaacaatgacagtgacagcagaaaaaaagtaaagttgagagccaataagktcaaattcaatgatacttttcaaactgtatattgctaccaattagtgagtggtaaaactagttttgtgggccttacctagtattttctgtttgtctgcatttgtgttgttcattttatgatctttttccatatctatatgtagtaataaaatatttgatatttatgcttttactttatcagacataaaaataaatattcttttataaaaccttgttccatttatatgcatatgtatggagtgtctctgtgtgtatgtgtgtgtgtgtgta

SEQ ID NO: 377935 - DNA, 551 bp, Homo sapiens
agaactcaaacaaatttacaagaaaaaaraaaacaaccccatcaaaaaagtgggtgaagtatatgaacagacatttctcaaaagaagacatttatgcagccaacagacagatgaaaaaatgttcatcgtcactggccatcagagaaatgcaaatcaaaaccacaatgagataccatctcacaccagttagaatggcaatcattaaaaagtcaggaaacaacaggtgctggagaggatgtggagaaataggaacacttttacactgttgatgggacactatttttttaacaataagactttttgcctgggaaatggcttgagatctcagcccaaagagatttttataaaatgcttcttcaaaaaaattagaaaataaaattattattttcttaggcctttagaaatttacttacctatgtgctgtgtctgacatttaggtagcaaaacaatgttgcaaattacagcagagcatctcagattttctctgttgacagaaatatgatatatggttttaaattaaggttcaatatcatgtgtgccttgacatctgg

SEQ ID NO: 377936 - DNA, 551 bp, Homo sapiens
agaactcaaacaaatttacaagaaaaaagaaaacaaccccatcaaaaaagtgggtgaagtatatgaacagacatttctcaaaagaagacatttatgcagccaacagacagatgaaaaaatgttcatcrtcactggccatcagagaaatgcaaatcaaaaccacaatgagataccatctcacaccagttagaatggcaatcattaaaaagtcaggaaacaacaggtgctggagaggatgtggagaaataggaacacttttacactgttgatgggacactatttttttaacaataagactttttgcctgggaaatggcttgagatctcagcccaaagagatttttataaaatgcttcttcaaaaaaattagaaaataaaattattattttcttaggcctttagaaatttacttacctatgtgctgtgtctgacatttaggtagcaaaacaatgttgcaaattacagcagagcatctcagattttctctgttgacagaaatatgatatatggttttaaattaaggttcaatatcatgtgtgccttgacatctgg

SEQ ID NO: 377937 - DNA, 551 bp, Homo sapiens
agaactcaaacaaatttacaagaaaaaagaaaacaaccccatcaaaaaagtgggtgaagtatatgaacagacatttctcaaaagaagacatttatgcagccaacagacagatgaaaaaatgttcatcgtcactggccatcagagaaatgcaaatcaaaaccacaatgagataccatctcacaccagttagaatggcamtcattaaaaagtcaggaaacaacaggtgctggagaggatgtggagaaataggaacacttttacactgttgatgggacactatttttttaacaataagactttttgcctgggaaatggcttgagatctcagcccaaagagatttttataaaatgcttcttcaaaaaaattagaaaataaaattattattttcttaggcctttagaaatttacttacctatgtgctgtgtctgacatttaggtagcaaaacaatgttgcaaattacagcagagcatctcagattttctctgttgacagaaatatgatatatggttttaaattaaggttcaatatcatgtgtgccttgacatctgg

SEQ ID NO: 377938 - DNA, 588 bp, Homo sapiens
caaacaaatttacaagaaaaaagaaaacaaccccatcaaaaaagtgggtgaagtatatgaacagacatttctcaaaagaagacatttatgcagccaacagacagatgaaaaaatgttcatcgtcactggccatcagagaaatgcaaatcaaaaccacaatgagataccatctcacaccagttagaatggcaatcattaaaaagtcaggaaacaacaggtgctggagaggatgtggagaaataggaacacttttacactgttgatgggacactatttttttaacaataagactttttgcctgggaaatggcttgagatctcagcccaaagagatttttataaaatgcttcttcaaaaaaattagaaaataaaattattattttcttaggcctttagaaatttacttacctatgtgctgtgtctgacatttaggtagcaaaacaatgttgcaaattacagcagagcrtctcagattttctctgttgacagaaatatgatatatggttttaaattaaggttcaatatcatgtgtgccttgacatctgggaaaaactgggatgatccaatggtctcaagttcccctctctac

SEQ ID NO: 377939 - DNA, 518 bp, Homo sapiens
ttctacctcacatgctatattctcttcccccaggctgtcagcatatgtgactaataaactgcagtttgcctcatctgttcaatgttagatgttgtgtgtttataaytgtagggtagaaatccctttcttatcaatggagtgaaaaggaagtgatcaaaatcggaagtataggtggtaagtttttaaaattgtcttctctttgctcatgtgatggaaaaatgcatttgtatttatcctgtttccatcttctttcactctccttttgtacttttatatttttggcctcagaaattcctcagggaagaaaacagaaattgttggaagtaaaactacttcccaaagttttgtgaaagcttgagccatacagtagaagagaatgagctagaataaagaggatggaattatttgacacagcagggattaaaaaagagatattttcttcagagcctatggctttgaagttcacttaggaactccaaaacttagcctgattgtcaaatattcaaaaatatttgaaa

SEQ ID NO: 377940 - DNA, 518 bp, Homo sapiens
ttctacctcacatgctatattctcttcccccaggctgtcagcatatgtgactaataaactgcagtttgcctcatctgttcaatgttagatgttgtgtgtttataactgtagggtagaaatccctttcttatcaatggagtgaaaaggaagtgatcaaaatmggaagtataggtggtaagtttttaaaattgtcttctctttgctcatgtgatggaaaaatgcatttgtatttatcctgtttccatcttctttcactctccttttgtacttttatatttttggcctcagaaattcctcagggaagaaaacagaaattgttggaagtaaaactacttcccaaagttttgtgaaagcttgagccatacagtagaagagaatgagctagaataaagaggatggaattatttgacacagcagggattaaaaaagagatattttcttcagagcctatggctttgaagttcacttaggaactccaaaacttagcctgattgtcaaatattcaaaaatatttgaaa

SEQ ID NO: 377941 - DNA, 457 bp, Homo sapiens
ggaatttcattaatatatgagtttatggtttacaacttcaacaattgcaagaattaattcatgtacttgaactggccaatgacaagcaaccaattaccatttttgtctcctgtggcaatcttttcacatctgagtgaaaattaggaattgcaactgagcaattaacttctctattataaaaagagaaaactgcattgatattttargtttcagtgtcattatgaaatgtatcacagaatgaggtcaaagtattaatgtccatttgataaattccctttccattttttactatataatttgcaatatttgtaataaaaatagtactttctatcatttcccattccttcaccccctcatgcaaagtaatattttttagacttcctaaagcctttctacattgaggcgtgtcaaactgtaattcttacaagtgtgaataaaatgtgacaagtaagaggat

SEQ ID NO: 377942 - DNA, 522 bp, Homo sapiens
aattggaaagctgaagcaagacggcagaatagacggctccaccaattgccccccaccactgcaaggacaccaatttgacacctatttacacacacaagaaaaatctyttttttttttttttttttttttttgagacagagtctagctctgtcaccaggaggctggagtgcagtggcgcgatctcggctcactgcaacctttgcctcctggattcagcaattctcttgcctcagcctcctgattagctgggattacaggcacgtgccaccacgtccagctaattttggtatttttaggaaagacgggctttcaccatattggccagggtggtctcgatctcttgacctcatgatcagcccatcttggccccccaaagtgctgggatgaccggcgtgagccaccacgcccggccaagaaaaaatctttataagaaccaacatcaggtgagcatccacagtatctggttttgacttcatatggctgaaagtgggaccaaagagatagaaaaaaccagtcctgaat

SEQ ID NO: 377943 - DNA, 522 bp, Homo sapiens
aattggaaagctgaagcaagacggcagaatagacggctccaccaattgccccccaccactgcaaggacaccaatttgacacctatttacacacacaagaaaaatcttttttttttttttttttttttttttgagacagagtctagctctgtcaccaggaggctggagtgcagtggcgcgatctcggctcactgcaacctttgcctcctggattcarcaattctcttgcctcagcctcctgattagctgggattacaggcacgtgccaccacgtccagctaattttggtatttttaggaaagacgggctttcaccatattggccagggtggtctcgatctcttgacctcatgatcagcccatcttggccccccaaagtgctgggatgaccggcgtgagccaccacgcccggccaagaaaaaatctttataagaaccaacatcaggtgagcatccacagtatctggttttgacttcatatggctgaaagtgggaccaaagagatagaaaaaaccagtcctgaat

SEQ ID NO: 377944 - DNA, 463 bp, Homo sapiens
gtctgggaagtcaaggccacagtgagctgtgattatgcttgcactccagcctgggggacagagcaaggccctgtctcaaacaaacaaacaaacaaatgctaaaattaaaataactgaccgtaaaaagtgttggtgatgcggagcaaccacaaaatgctgggggtataaaatagtacaaccattttggaaaagatctgacagtttcttatcaaatgaaacccttaactaaatacttaatcctctgacagaacagttttactgttaggtatttacccaggagaaattaaatatcttcacaaaaagacatgtaagaatgttcaattttaatcayaataactctaaactggaaacagcccaggtatccccatcaatatgagaataatcaaactatggtatatccatacgacaaatcactattcaacaataaaatggaatgagctactgatacaggcaacaatatgaa

SEQ ID NO: 377945 - DNA, 650 bp, Homo sapiens
ctgttctggtggtagtgaataagtcttaggagatctgatggttttataaatgggagttcccctgcacaagctctcttgcctgccaccrtgtaagatgtgcatttacttctttgccttccgccatgattgtggggcctccacagccatgtggaactgtgagtccattaaacctctttcctttataaattacccaggcttgagtatgtctttattagcagtgtgagaacagactaatacagggttccttgtgtcctaaaagtaaaaatttgattcaaaatcctgttatatacctccaaaatgctcccaagagtgattagaatcaatcttgtaacttcccttgccctaggaaacacttcctatatctggagctggatcctggagtacaagaccttcttaagccaagagcagtcaaaagaagggccacctttcatctgccatgactagtgcattttaaaggcactcgatgatgcaaaaccatctgtacaaagcagatctattgaacagtctgaatttgtctggacacaagtgaaactatgattttttcccaatcattctctttgaccattttatgttgattcctgttgcatattttggaaggattctgtacttttccattgtttatttaaaaagtccagtttgctttaaaattt

SEQ ID NO: 377946 - DNA, 650 bp, Homo sapiens
ctgttctggtggtagtgaataagtcttaggagatctgatggttttataaatgggagttcccctgcacaagctctcttgcctgccaccgtgtaagatgtgcatttacttctttgccttccgccatgattgtggggcctccacagccatgtggaactgtgagtccattaaacctctttcctttataaattacccaggcttgagtatgtctttattagcagtgtgagaacagactaatacagggttccttgtgtcctaaaagtaaaaatttgattcaaaatcctgttatatacctccaaaatgctcccaagagtgattagaatcaatcttgtaacttcccttgccctaggaaacacttcctatatctggagctggatcctggagtacaagaccttcttaagccaagagcagtcaaaagaagggccacctttcatctgccatgactagtgcattytaaaggcactcgatgatgcaaaaccatctgtacaaagcagatctattgaacagtctgaatttgtctggacacaagtgaaactatgattttttcccaatcattctctttgaccattttatgttgattcctgttgcatattttggaaggattctgtacttttccattgtttatttaaaaagtccagtttgctttaaaattt

SEQ ID NO: 377947 - DNA, 560 bp, Homo sapiens
tattaatttaatgtaataaatacaggactattacggttatctacgtttgcttgagtaaattttggtagtttgtatcttttgaaatatttttctatttcacctaagttgtcaagtgtctggtcatggagttatttatttgtccttattttgttagtatctgtagggtttgtagtgatatatcctcttttattcttgatatagataacgtatatcttctttgttccatggttatctatggctagaagtttattgattttgttgatgttttcaaagaactacgtttttgttttattattattttccattgctttcctttattcaatttcattgatgtctgctaattttttattttctcttttttgctggctttatgtttaatttattctcctttttctagttttttaaatggcyatgtaagattattgatttgaggcttctttcctaatacaagcatttaatgctattaatttccctgtaaatacagctttagcagcataccacagtttttcttaggttgtatttttattttcatcatgttctacatattttataactcccct

SEQ ID NO: 377948 - DNA, 596 bp, Homo sapiens
tctacgtttgcttgagtaaattttggtagtttgtatcttttgaaatatttttctatttcacctaagttgtcaagtgtctggtcatggagttatttatttgtccttattttgttagtatctgtagggtttgtagtgatatatcctcttttattcttgatatagataacgtatatcttctttgttccatggttatctatggctagaagtttattgattttgttgatgttttcaaagaactacgtttttgttttattattattttccattgctttcctttattcaatttcattgatgtctgctaattttttattttctcttttttgctggctttatgtttaatttattctcctttttctagttttttaaatggctatgtaagattattgattygaggcttctttcctaatacaagcatttaatgctattaatttccctgtaaatacagctttagcagcataccacagtttttcttaggttgtatttttattttcatcatgttctacatattttataactccccttgaaaactttacgtttgactcattatctatttagaaatgtgtggtttaatttccaaataatcagggaatttccag

SEQ ID NO: 377949 - DNA, 529 bp, Homo sapiens
ataatgaaagttaagaaattaattttactgaggaatgagaaaattcacaagggcaaggtcagcaatatagaaatgcatgttgtactttagtctttcattttcccactgaaaggcaggccagagccagtgaggcaggtgtggagatgtgtccctcagacctcacctcaagggagacctgccataaagagtacarctagtgatgggtttctctttggaggcctctgagttctaccacagtaaggtcgtgctcttcctgaacagctcccaaccaatgaatgagcatcatattggtactaggtcctggccatttttgcccaatgtagaaatcctatatgagctggctctctccattggactggcaaaaactatcccagaactacgtcagagcccaaggttcttcctcccaaatctgccttccttttctcttgacataggtcttagatccacactgtggtctgaagtcttttcctgcttcccctgattactctccccttatctttcacagacattaccaccagtaaatttcttg

SEQ ID NO: 377950 - DNA, 630 bp, Homo sapiens
gtccacctctgcccttaccccaaagtctaagcacaatgctgaaaacataagacagacagaaacatggcagcctttctgatggaagtcaaagggataggatataaggtccratctggcgcataaggcatagaatgtggccagagatttatttggtccaacacttctgcttgtagatgaggaaactgaggtgcaataacttaagatagtataactagttgtgctctatcagaaatagtacctgggtctccagacctttaagccaatgctctttcctgaatgccttattccttcacggccatttaacatttttttgactcactttctccaagcccttttgtgtagccctgaccacagaaaaatctaaatgaggtggcccttattttccctttactcccaacaaatgtatgacacagaaagtaggtacaatatgaattatcaaagagtactatgatcggtctgtggcctattccttttatttttaccatataacttaccgtcttctgtctcacagtcccactattatccacatgtgttgctttcttcagagatggtagaggcaagatttataaagttgatgaggagcattgaaatcttcagtttcaataagcaataattggtagtgacacgcaa

SEQ ID NO: 377951 - DNA, 630 bp, Homo sapiens
gtccacctctgcccttaccccaaagtctaagcacaatgctgaaaacataagacagacagaaacatggcagcctttctgatggaagtcaaagggataggatataaggtccaatctggcgcataaggcatagaatgtggccagagatttatttggtccaacacttctgcttgtagatgaggaaactgaggtgcaataacttaagatagtataactagttgtgctctatcagaaatagtacctgggtctccagacctttaagccaatgctctttcctgaatgccttattccttcacggccatttaacatttttttgactcactttctccaagcccttttgtgtagccctgaccacagaaaawtctaaatgaggtggcccttattttccctttactcccaacaaatgtatgacacagaaagtaggtacaatatgaattatcaaagagtactatgatcggtctgtggcctattccttttatttttaccatataacttaccgtcttctgtctcacagtcccactattatccacatgtgttgctttcttcagagatggtagaggcaagatttataaagttgatgaggagcattgaaatcttcagtttcaataagcaataattggtagtgacacgcaa

SEQ ID NO: 377952 - DNA, 583 bp, Homo sapiens
tccagtgctcagtgttacaagattggtgttgcttcaaggcctttttagaagatgtmgttaggaaaaatgttgtaaatgagaaaaataaaagttaacattacagtattttaatctctttgattttatacctttctcgtttctttcacactaacaatcctggtagccaacaacattaacataatgacttatttcatttcccatcctatatacacagaatagtttcaaaacaactatgccaatatggttaataacagcagtcctgcagaattctttgcagctctttttgtccatagaatagatcccattaaggatgtacagactagaaagtctaatctaatgtcatgtgaaacatttatgttcatctgtgattatatcaggggttgacaattttttttctgtaaaaacccagatgccaaatattgtaggctttgcaggtcatcagtctctgtggcaactactgagctctgcaattgttgcagagaagcagccatagataataaggaaaccaaggggtatgactgggttccagtaaaactttgtttacaaaaatgggcatcagatctgtttggtcctacagactgta

SEQ ID NO: 377953 - DNA, 578 bp, Homo sapiens
acaaggcttaaagcttgattaatgcttagtggtgaatttcttctgaaattatgattttcactctgccaaatagctctgcagattttcaagatctgtgattacaccaactgagggtctttcactctgggaaatgagtcctatccccacttgccttctcccacatctggtctgtgactatatgccagtgctctgaaaactgatcaacagtgttctttcttcctttacagttttgtttttgcggtggattagattatattactccctccctgttagaggtgtatacgtccatactttaacatgtgactttgcagtgcttcttgctgtaggaggggtatacctcccttgtcccctgacctggggcttagataggtaacttactttggcyagtggaatactagcaagcatgacatagctgaggtttgcttgtgtggctgagcttgttctcttgcttgtcatcaccacgagaagaatttgtccctagtagtctctggaccagaggtagagcagatttgaacccaacccacacctaaagcagaaccaccaaactgacttgcatacatttgagtaagaaaaataaa

SEQ ID NO: 377954 - DNA, 604 bp, Homo sapiens
ctaaaacacattacataagaaatgagaattataaaacatttaaaaatataattttctcttttttaaaagatgaaaatgttaaatctttttacgatatgatatacattgatttttcttttaaactgcatatacattgtggcataatctaaatagaagaatcatggtaaatgtttccaaagtcttagtactacttctaatttctgaattttttttttcagcttttattttagattcaagggttacatgtgcaggcttgttacccgggtatattgcttgatgatgaggtttgggatatgaataatcctattacccaggtrctgagtacaatacccaataggtagtttttcaactcttttctcccatttttcctcctcccatctagtagtccccagtctctgttgttgccatatttatgttcatgagtacccaccgtttagctcccacttgtaagtgagaacatgcttatatttggtctttggttttctttttctgttagtttgctttggataatgggctccagctccacccacgttgctgcaaaggacatgatctcattcttttttatggctacatagtatttaatggtgtatatgtacattttctt

SEQ ID NO: 377955 - DNA, 596 bp, Homo sapiens
gctaaaacacattacataagaaatgagaattataaaacatttaaaaatataattttctcttttttaaaagatgaaaatgttaaatctttttacgatatgatatacattgatttttcttttaaactgcatatacattgtggcataatctaaatagaagaatcatggtaaatgtttccaaagtcttagtactacttctaatttctgaattttttttttcagcttttattttagattcaagggttacatgtgcaggcttgttacccgggtatattgcttgatgatgaggtttgggatatgaataatcctattacccaggtactgagtacaatacccaataggtagtttttcaactcttttctcccatttttcctcctcccatctagtagtccccagtctctgttgttgccatatttatgttcatgagtayccaccgtttagctcccacttgtaagtgagaacatgcttatatttggtctttggttttctttttctgttagtttgctttggataatgggctccagctccacccacgttgctgcaaaggacatgatctcattcttttttatggctacatagtatttaatggtgtatatgta

SEQ ID NO: 377956 - DNA, 604 bp, Homo sapiens
ctaaaacacattacataagaaatgagaattataaaacatttaaaaatataattttctcttttttaaaagatgaaaatgttaaatctttttacgatatgatatacattgatttttcttttaaactgcatatacattgtggcataatctaaatagaagaatcatggtaaatgtttccaaagtcttagtactacttctaatttctgaattttttttttcagcttttattttagattcaagggttacatgtgcaggcttgttacccgggtatattgcttgatgatgaggtttgggatatgaataatcctattacccaggtactgagtacaatacccaataggtagtttttcaactcttttctcccatttttcctcctcccatctagtagtccccagtctctgttgttgccatatttatgttcatgagtacccaccrtttagctcccacttgtaagtgagaacatgcttatatttggtctttggttttctttttctgttagtttgctttggataatgggctccagctccacccacgttgctgcaaaggacatgatctcattcttttttatggctacatagtatttaatggtgtatatgtacattttctt

SEQ ID NO: 377957 - DNA, 604 bp, Homo sapiens
agaacaaaggaaggtgatctcacctcactacacagggagatggaaatagaattggctatctgcttaggataaggaagatagagttttgatgagtagctaattctcttttgtagatgaggacactgaatctyagagatattcaataacttgctcacattcccacagtgagtgaggggtagacctgagaatggaattccattaactccaaaacatttgctttaccagttatacaagaagggaggtgtggctgacagagatgcacttacagctgagtaggggctgctccctttatacgggccggccacacactctcagttcaagatggtctttctcattctctgttgtctgacactcctcccacttacacatttacatggttttttggtactctaggtattttcctaggtgaccctagcaccatgaggtgttgcctcaaatcctaagtgcagtcgctccatcatgctaaaaatctaatagcaatggggtactgtgtaataatgaaccagtaatatcacatgggactatcatggattatgtcaaggaatttacaagttaatactagaagtagatatgtaagaaaacaattttatcacagaaataagta

SEQ ID NO: 377958 - DNA, 572 bp, Homo sapiens
tgaaggctgcagtgaaccatgatcatgcctctgtactctagcctgggtgacagagtgaaacactgtcttaaaatatatataacaaataaaaaaaaattaaaaataaaacaaacgaggaaaacatctttttaccttggtcagagagggggcaaaggtgatatccacttgggacacatgggtactatcttactggttgtttatggctagtgtctgttctgatgggtgagtctgcctgccatgtttagaacgtcattgcttgggaagtcctcgccctcttcacatctgggaaaccttgtggtgtttccttttattccatgcctgaattcagtgtggcccttgttggcaaatacttctactgccatcaggtacttaagagcaagaactctatgtgtcctygcccactcagctctgttcgtaaatgagcacgtgaaggtcagtggaaagactagagagaaagaggctaggaagggaattaaggtgggtctcaaagacctgggatctaggcttgctctgacactgactctctgtgagacgctgtacaagtcactgaccttgtttatgtcttagtgtcc

SEQ ID NO: 377959 - DNA, 572 bp, Homo sapiens
tgaaggctgcagtgaaccatgatcatgcctctgtactctagcctgggtgacagagtgaaacactgtcttaaaatatatataacaaataaaaaaaaattaaaaataaaacaaacgaggaaaacatctttttaccttggtcagagagggggcaaaggtgatatccacttgggacacatgggtactatcttactggttgtttatggctagtgtctgttctgatgggtgagtctgcctgccatgtttagaacgtcattgcttgggaagtcctcgccctcttcacatctgggaaaccttgtggtgtttccttttattccatgcctgaattcagtgtggcccttgttggcaaatacttctactgccatcaggtacttaagagcaagaactctatgtgtcctcgcccactcagctctgttcgtaaatgagcacktgaaggtcagtggaaagactagagagaaagaggctaggaagggaattaaggtgggtctcaaagacctgggatctaggcttgctctgacactgactctctgtgagacgctgtacaagtcactgaccttgtttatgtcttagtgtcc

SEQ ID NO: 377960 - DNA, 570 bp, Homo sapiens
ccctggtacaagatggttgtaaayagcaactgtggcagatgacttcttaatgggggttgagggagtacagagaagcgacagattctaccgttctatggagtagggcaaggagaaaagtgaggtgcgcagaggggctaagtggactgccatgacaaaggcctgggccagagaggagatgggagaggagagaagggaggtgacatagattgagttagaaaaaggattttttgaatcttacactggaaaaggagaggcactttagggcatcatccatgcatgtatgaaatatcaacagcaagagaaatgagaaagaaaatttgaaagaggtttctggagtgttagaaatatactctcctttggtgttttcatgaaagactgtaaattaagagttacattgattttcaattattttggtcactggagtacgacagatactagaggttggtttgctcaacacttcagctgccatctctattacagaaaggttaaccatataatttatcatctaaacagggacactggaggctaaaagggtaccttattaatgattatgcaggtactaacagtgtt

SEQ ID NO: 377961 - DNA, 532 bp, Homo sapiens
caggccctatctttgtgctgagtaggctttctataaattaggagggtgaagtaggtgtggttccctagaaacacagactaagacaggcatttagctgcatgttggggtgtgctctctggagagaaacaataaggaaatcaaaataaagaagaaaagaatctaggcagatgtggtatcacctggagtttagcttttgctgatcccatgggatgctttggggtatgaattgtacccaagagttgagcccaccttgaggcaagmggtctaggattttgtaccctcaagtcagccagtcagtggctgtgaggtgtcctcagttgggtggcaaaggtgttatctctcgtgtggcctgtcttttttctgaggccagttcttcagagaaggagacatccatgagccattagcagccatcatttaccaaagctgggagacaggtgtgctggcctaataaaggggatctgggagatactccaatagagtcccctacaaagaatgccctcatttgatgtcaactatgggcctcttttgcttc

SEQ ID NO: 377962 - DNA, 532 bp, Homo sapiens
caggccctatctttgtgctgagtaggctttctataaattaggagggtgaagtaggtgtggttccctagaaacacagactaagacaggcatttagctgcatgttggggtgtgctctctggagagaaacaataaggaaatcaaaataaagaagaaaagaatctaggcagatgtggtatcacctggagtttagcttttgctgatcccatgggatgctttggggtatgaattgtacccaagagttgagcccaccttgaggcaagcggtctaggmttttgtaccctcaagtcagccagtcagtggctgtgaggtgtcctcagttgggtggcaaaggtgttatctctcgtgtggcctgtcttttttctgaggccagttcttcagagaaggagacatccatgagccattagcagccatcatttaccaaagctgggagacaggtgtgctggcctaataaaggggatctgggagatactccaatagagtcccctacaaagaatgccctcatttgatgtcaactatgggcctcttttgcttc

SEQ ID NO: 377963 - DNA, 532 bp, Homo sapiens
caggccctatctttgtgctgagtaggctttctataaattaggagggtgaagtaggtgtggttccctagaaacacagactaagacaggcatttagctgcatgttggggtgtgctctctggagagaaacaataaggaaatcaaaataaagaagaaaagaatctaggcagatgtggtatcacctggagtttagcttttgctgatcccatgggatgctttggggtatgaattgtacccaagagttgagcccaccttgaggcaagcggtctaggattttgtaccctcaagtcagccagtcagtggctgtgaggtgtcctcagttgggtggcaaaggtgttatctctcgtgtggcctgtcttttttctgargccagttcttcagagaaggagacatccatgagccattagcagccatcatttaccaaagctgggagacaggtgtgctggcctaataaaggggatctgggagatactccaatagagtcccctacaaagaatgccctcatttgatgtcaactatgggcctcttttgcttc

SEQ ID NO: 377964 - DNA, 532 bp, Homo sapiens
caggccctatctttgtgctgagtaggctttctataaattaggagggtgaagtaggtgtggttccctagaaacacagactaagacaggcatttagctgcatgttggggtgtgctctctggagagaaacaataaggaaatcaaaataaagaagaaaagaatctaggcagatgtggtatcacctggagtttagcttttgctgatcccatgggatgctttggggtatgaattgtacccaagagttgagcccaccttgaggcaagcggtctaggattttgtaccctcaagtcagccagtcagtggctgtgaggtgtcctcagttgggtggcaaaggtgttatctctcgtgtggcctgtcttttttctgaggccagttcttcagagaaggagrcatccatgagccattagcagccatcatttaccaaagctgggagacaggtgtgctggcctaataaaggggatctgggagatactccaatagagtcccctacaaagaatgccctcatttgatgtcaactatgggcctcttttgcttc

SEQ ID NO: 377965 - DNA, 581 bp, Homo sapiens
tatctcactacaacgttgacaatgtaatgacagtgtccctgactgcctggtggttccgcatrcagagtctgaccctcatgccacatgaatctcctgcccttacttctaacacagcatgcagcaaaagcagcagggagccatgggctcctgcctaggagagtatggtgagcaagctgggacactggagtttttgctgcatcctcagtggtcacgagcattgccatattgcctgtaggcagtcccagctgggaaggctcaaggacctgagtgctttttccctgccgaggaaggttcctgactttcttgcctcccttgctttcttacaaagtgcctgattccctgaggtaatctgaatacatctttttctcactacccgaagagcttaatgaagacagaaaaaaatagaagagtctctgctgtcattgcgtgggtgaagtctgctccctaattcaagaacaagaatcagaaatcagaatcaggaacactgaatcagaaagtccaatgtgagtcacagtaggttaaatagaatcttggggtagagggttggcattagtccctttatgcctaatgttccattattg

SEQ ID NO: 377966 - DNA, 581 bp, Homo sapiens
tatctcactacaacgttgacaatgtaatgacagtgtccctgactgcctggtggttccgcatgcagagtctgaccctcatgccacatgaatctcctgcccttacttctaacacagcatgcagcaaaagcagcagggagccatgggctcctgcctaggagagtatggtgagcragctgggacactggagtttttgctgcatcctcagtggtcacgagcattgccatattgcctgtaggcagtcccagctgggaaggctcaaggacctgagtgctttttccctgccgaggaaggttcctgactttcttgcctcccttgctttcttacaaagtgcctgattccctgaggtaatctgaatacatctttttctcactacccgaagagcttaatgaagacagaaaaaaatagaagagtctctgctgtcattgcgtgggtgaagtctgctccctaattcaagaacaagaatcagaaatcagaatcaggaacactgaatcagaaagtccaatgtgagtcacagtaggttaaatagaatcttggggtagagggttggcattagtccctttatgcctaatgttccattattg

SEQ ID NO: 377967 - DNA, 591 bp, Homo sapiens
gattgcaaaaattcaaaaaattgcaacctcaggcataaatgggttaaaatctactgtgtcaatagaggtaaaagcaaaatggaaaaccatagtgggcagctattggagcacagctgcaggttcactctatttcagagtgtttcttaatttaacaatggaaaaaagggattcagtggggttaaatgatctttaaggtctcattcacttactgaacaaatatttagtgatcagkatcaggcaaaaactggacactgtgctaggtaccatatatacaacagacacagtatgagtagctcatgccctcagggtattccaggtttaaaggggagatactggtgagcaaacagatggtcctgattcaatgagaccagtgccatgaagagagaggcatggagagcacacaggcatgcggaccaagctagcttggcacagtcagggggagcatcctgaaggataagacacaaagcaaacagtgaatgctggtgtcctgttccattgttttgctgattccactgcccagggctctcatagggatttctgtgccaggagctcactgcttcctgggagtggaagaacagccaggaatcccgg

SEQ ID NO: 377968 - DNA, 591 bp, Homo sapiens
gattgcaaaaattcaaaaaattgcaacctcaggcataaatgggttaaaatctactgtgtcaatagaggtaaaagcaaaatggaaaaccatagtgggcagctattggagcacagctgcaggttcactctatttcagagtgtttcttaatttaacaatggaaaaaagggattcagtggggttaaatgatctttaaggtctcattcacttactgaacaaatatttagtgatcagtatcaggcaaaaactggacactgtgctaggtaccatatatacaacagacacagtatgagyagctcatgccctcagggtattccaggtttaaaggggagatactggtgagcaaacagatggtcctgattcaatgagaccagtgccatgaagagagaggcatggagagcacacaggcatgcggaccaagctagcttggcacagtcagggggagcatcctgaaggataagacacaaagcaaacagtgaatgctggtgtcctgttccattgttttgctgattccactgcccagggctctcatagggatttctgtgccaggagctcactgcttcctgggagtggaagaacagccaggaatcccgg

SEQ ID NO: 377969 - DNA, 591 bp, Homo sapiens
gattgcaaaaattcaaaaaattgcaacctcaggcataaatgggttaaaatctactgtgtcaatagaggtaaaagcaaaatggaaaaccatagtgggcagctattggagcacagctgcaggttcactctatttcagagtgtttcttaatttaacaatggaaaaaagggattcagtggggttaaatgatctttaaggtctcattcacttactgaacaaatatttagtgatcagtatcaggcaaaaactggacactgtgctaggtaccatatatacaacagacacagtatgagtagctcatgccctcagggtattccaggtttaaaggggagatactggtgagcaaacagatggtcctgattcaatgagaccagtgccatgaagagagaggcatggagagcacacaggcatgcrgaccaagctagcttggcacagtcagggggagcatcctgaaggataagacacaaagcaaacagtgaatgctggtgtcctgttccattgttttgctgattccactgcccagggctctcatagggatttctgtgccaggagctcactgcttcctgggagtggaagaacagccaggaatcccgg

SEQ ID NO: 377970 - DNA, 514 bp, Homo sapiens
gtgtgtgtgtgtatacatattctgttctggagaacactgactaatacagatagctaagaaaataactctattggaaaattagaaaatgtgctactttgaggaactaaattatccttgcaaaactgttcattatcttaattaaaataatagacataatttctatttttagaaataaggattctctagacttggacaaaaaatggaaaattcatttattcattccatatgcactacatatatatatatatatatatatatatatatatatatatatatatatasacagagagagagagagagagagccttctctcttccacacattgtgctaagttttaggaacaaataagaaataatttctaattcataccctcaacaagcttatgatctgaatatggaaatgggcatgcatcagagtatggtaaatgctagccaaaactgagagagttttgtcttccaaagatggctctaataatatttccaatcccacattctcttcttgaacctgcaattcc

SEQ ID NO: 377971 - DNA, 514 bp, Homo sapiens
gtgtgtgtgtgtatacatattctgttctggagaacactgactaatacagatagctaagaaaataactctattggaaaattagaaaatgtgctactttgaggaactaaattatccttgcaaaactgttcattatcttaattaaaataatagacataatttctatttttagaaataaggattctctagacttggacaaaaaatggaaaattcatttattcattccatatgcactacatatatatatatatatatatatatatatatatatatatatatatatacacagagagagagagagagagagccttctctcttccasacattgtgctaagttttaggaacaaataagaaataatttctaattcataccctcaacaagcttatgatctgaatatggaaatgggcatgcatcagagtatggtaaatgctagccaaaactgagagagttttgtcttccaaagatggctctaataatatttccaatcccacattctcttcttgaacctgcaattcc

SEQ ID NO: 377972 - DNA, 560 bp, Homo sapiens
  misc_feature (1)...(560): n = A,T,C or G
agaatgtaaaaacaaaattccacctaagcccttcacagtcaactgctggaaaccaaagatagagaaaatcttgtaagcagccagagacaaaagacagattacatacagaggaaaaggggaagagaagactaactataggcttttcatcagaaaaactgaaggccagaagataatgaattggcaacttcaaagtggcaaaaggaaaatgactatcttagaactgtgtacccagtttggctcccagacttcaccattagctaataaggggtgrtacttttattgtgtactcaatgccaggattgcaagatcctgaatgagcttttgctatgcataaccaaagctcagtcagatattcacctggatcaagggcccaccccctccttcagcagcattaagctcagtagaactcccaaaaggaacatcttccatgcaccaccatggctcttagccttgggtgtcattagaatcactttgcacctcaagccccacactttgacgtcctgatttaagtgttctgggttggagtcttggcttttttttttttttaatttacnnnnnnn

SEQ ID NO: 377973 - DNA, 532 bp, Homo sapiens
taactatgcttatttatatttctgaatgtattagattcctatgttaataattgcataggttttttattttatttcccaaattcaattatttaacaaatatttattggacttttcagtgcactgacattggtgacacaaaaataagtaaaacagttcctcccttcacagatctcacagtccagagcgtgggttggaaaattttttctgtaagtattttagtcttggtagtcatattatctctatcataactactcaactcwaccactgtaggaagaaaacagccatagacattatgtaaacaaataggtgtggctgtgttccaataaaactttatttacaaaaataggtcatgggcaggatttggcccatagcctatagttgctctagtcctgattctagagggattctcaaagcagaaaaatccaacactgaggcaatatgttttgttgttgttgttgttactgttgtttagttttaagtatattttataatatattttctgatcataaaagtaaatccatagcagaaaatt

SEQ ID NO: 377974 - DNA, 532 bp, Homo sapiens
taactatgcttatttatatttctgaatgtattagattcctatgttaataattgcataggttttttattttatttcccaaattcaattatttaacaaatatttattggacttttcagtgcactgacattggtgacacaaaaataagtaaaacagttcctcccttcacagatctcacagtccagagcgtgggttggaaaattttttctgtaagtattttagtcttggtagtcatattatctctatcataactactcaactctaccactgtaggaagaaaacagccatagacattatgtaaacaaataggtgtggctgtgttccaataaaactttatttacaaaaataggtcatgggcaggatttggcccatagcctatagttgctctagtcytgattctagagggattctcaaagcagaaaaatccaacactgaggcaatatgttttgttgttgttgttgttactgttgtttagttttaagtatattttataatatattttctgatcataaaagtaaatccatagcagaaaatt

SEQ ID NO: 377975 - DNA, 509 bp, Homo sapiens
ggggacttgccatcaaactcactttgaaattattgttttagctcaccgcaacaaatatctataagttctgctacaggcttaatatattaaaaccctatatcttatttgaatcacaatccacaaactagtccacaaaactacgcttctctatctcagaactataccatcttagaaaatgtggtctccaactctgcaacaacagacaaagaaagggcagtaggatcytgtaaaatattttttttaagtagacctggaaatgttttaaatcacatttgctctaatccattggtttggcaaagtcatacagcctcaacttagctaaaaggtagatgtgtctttgaagagtggagtaagatggaaaacacagcctgggtaagtatatgaagagggaaaataaggttgtcataaaagggatgactaatgaccagtgatgatgagctttttttcatgtttgttggccacataaatgtcttcttttgagaagtgtctgttcatgtccttcacccact

SEQ ID NO: 377976 - DNA, 615 bp, Homo sapiens
ttaaaatttgaatatgaattttgttttcaagagtattttcttaaatattaaaattattaaaattaaatggcaaacataaaaattatcttaatgtatatcaaactctatatcagaaattctaatctgtctgaaaagttgtttctcttaaatttaatcattatgataaatacttccattaaaatgaaactgtcttcactaaatgcacaattctagtatttaatatccatatgggtktcgagatattcagtaccatgttttcagtcacataaaatctgaacttttatatgaaagtaacataaaatattttatgttcccaacagtcctcagcatccatgttcaatttgtttaattagatctaatcattcgaacctccaaaatgaactagagcacaaagagatgcaagtaaattgagcccagaatgatctccaattactaaaaattcagctgctttcctgctattaaagagaatactttgggaagttaaataatgtttctttccttgtacttaaatatatcagccacaagagtccttcccttgctctgaatcagcatctctgtgaaaaactggcagcagcatctatcctcaaacctcatggcattcctcctcagtcaccg

SEQ ID NO: 377977 - DNA, 620 bp, Homo sapiens
gtgtccccagttgcttagtatctggcattccctgcaactcctgtaaacagctggtcctcaaatgtagactgtagtgcaatgaagttactgtacagggtttgttctattgaaacaaaacaaaaccaaaaaaaaaaaaaaccctttatgttatgggctgaattgcatctccttcctctgccacaaattcactggtagaagtcttaacccccagaacctcaaaagtgattatatttggagacaggttctttgcagaggtaattaagttaaactgaggtcattagagtaaggcctaatccaatatgactggcatccacgtaagaagagaatttttttctattttaatatttagtgatgttttgttattattttaaaatgttttctcaattgcagtttttctttccttatttttaaatttgtgtacatttaaggtgtacaggagaagttttgttatatggatatactgctctgtagtgaagctctgtgtgaaaccatcacctacataatgtacatagtatccattaagagaagaggaaatttggacatagaaatgaacacagaaaagaygatgtgaagatatagggagacagcagccatttataagccaaggaaagagttagaac

SEQ ID NO: 377978 - DNA, 583 bp, Homo sapiens
gctgaggcaggagagtcgcttgaacccgggaggcagaggttgcagtgagccaagatcgtgccactgcactcaagcctggcaacagagcgaaactccgtcaaaaattaaataaataaayaaacaaacaaacaaacaaacacttggttagactgtcaggttttgtggaccaggagctgggaccaagtaaaatgtcaatagtttgtctctattcagtggtatctgaggctctagctaggaatactctaaaggttgggggagtggccaggaaactttaggggacagggagtatctcaaactggggggggggaaaggcttgcttggtagaatctggtcttttgaagtcagaaagccagagtttgatctcaaattcacaattcattttcttgtgtaaccttctgcagttcacaaagtgtctcagcttcatttcatcactataaaaagactgtgctaacacttacctttcagtaacatccataagaatttaaaactatgaacaaaattctctaatacggtgtctggtaaagagtagattgttttctctaacagctttattgaggtataattgacataaaagaaacggcac

SEQ ID NO: 377979 - DNA, 610 bp, Homo sapiens
tctcaacttcccccatcatagtggtgcgtcttttacaattcatgaacctgcatcggcacatcattatctcccaargtccatagttcatattagggctcactcttggtgttgtacattctacgcctttggacagatttatgacatgcattctccatcatagtatcatgcagagtagttttaccaaccttaaagtcctctgggctctgcttattcatcatttcctttccccaggaaatggactttttgactacactgcatcttcccttctatccattcacgtctccatttatttaggtcttctattatttcattaagcaatgctttgtacttttcagcttagatctgctgcacatcttaggaaaatgaaatatctctaagcattttcattatggtgactctattgttaatggtatcatctccttgaattttaatgtcttactgttcttcgctagcatataaaaaattggcttgtgaacatttgaacatttatattttattctgaaacagtgctaaaattatctattatttctggtagcttttttttttttgcagatttcttcagattttctgcacagaagttcaagtcatctgtaaataagacagttttact

SEQ ID NO: 377980 - DNA, 601 bp, Homo sapiens
tctgggtatctttcatttcttttattggtttcttgtactgggtagaagctacagtttgaatacaagtgacgagagtaaagatccttgtcatattcctgatcataaagacagtttttcactatcaaatataataaaattgtaagttttacatagatttgctttatcagattgaggaagtgatcttctagtcctggttttataaggacttasttctcctctagttctatcttgatgaaattttattgagaagtgatttcaatgttgtcaattcctttttctgtatctattgataaagtcatgaagtttttattcttgtagttaatattgtatattacattttatactgttcaattgttaatgcagccttacatacttgagataaaattcatgttacgattttaaataatgtatggttggattccatttgataaaattttgttaagaatgtttgcatttatattcatgattgatgtcagtttgtagttttctttctgttaaaatgtgtttgttgtgttgtagtatccgaattgtggtaccagaattggcactgtagactgaagtagtaaagaccagattttttggttttcttttcttttctttt

SEQ ID NO: 377981 - DNA, 601 bp, Homo sapiens
tctgggtatctttcatttcttttattggtttcttgtactgggtagaagctacagtttgaatacaagtgacgagagtaaagatccttgtcatattcctgatcataaagacagtttttcactatcaaatataataaaattgtaagttttacatagatttgctttatcagattgaggaagtgatcttctagtcctggttttataaggacttagttctcctctagttctatcttgatgaaattttattgagaagtgatttcaatgttgtcaattcctttttctgtatctattgataaagtcatgaagtttttattcttgtagttaatattgtatattacattttatactgttyaattgttaatgcagccttacatacttgagataaaattcatgttacgattttaaataatgtatggttggattccatttgataaaattttgttaagaatgtttgcatttatattcatgattgatgtcagtttgtagttttctttctgttaaaatgtgtttgttgtgttgtagtatccgaattgtggtaccagaattggcactgtagactgaagtagtaaagaccagattttttggttttcttttcttttctttt

SEQ ID NO: 377982 - DNA, 538 bp, Homo sapiens
cttgggtagttttgatggaattgggtcattgcctttaaggattatgctttctaaactggaaacgatatatattcaaagaagctgcaaatatctaggattttgggggggtgggcggagaagcattttttcagtgaaattgattctgtgataaatattttttctttcttctcaggatttcttatctaaatccatacattataaactgagctcctcaaagcttgaaaacttgacgagatcctaagaaaatgaatggacttgaaagaaaccatctcttttaaggcaggcttggactaggtggtagcaatgaatytgtaacatccaaatttaaatgctttctagaaaatgtaggacctaatttttatctttcttgtaaacttgaggtgctgtttaagaatctcattgccaacaggatcaaaagaatttctcacccttgtgtatattttactttcctttcaactatttatttttcttaagaaaatgtcttagctttcttcagtgaatatattcttgtctggctttcttgaacagcacactaaga

SEQ ID NO: 377983 - DNA, 608 bp, Homo sapiens
gggtttgataccagcctgggcaacttggccagacctgtctcgacaaacactaaaaataatcaattagccgggcatggtggcatgcacctgtggtccccactacactgaagactgaggtgggaggatcacttgagcccaggaggtcaaggctacagtgacctgtatttgcaccactgcactccagagcctgggtaacacagcaagacactgaaaaaaaaaagttacaaaaatgattgaataatgtgcttttaaaaattaaaatagaacctttgarcctttatctctactatcttaaaatcctaggtaccttgatcatctgcatgccctgataattcagctcatctatcatgacagatttacagtttacagagttacagctttgtgggactattgcaactagaatttcagtttgtggcccagaagtgaagaaaggaagagatattaatcatctcctacctttgtctgctccaacatcataagataaaaatattttaaatcacagccaaacagtttttctatgaatgaaaactaagcagatgacaatatttttctatgcaaatgtttggcaaactactaccgtaagagagccagggagcagagtttattgc

SEQ ID NO: 377984 - DNA, 582 bp, Homo sapiens
tataaagagatctaactcttgagaacagataatgaaagaaggatcgtattaaatcctgtacaatggtgcaaaaatcaaagctttataaaagtttccttactcaagaaaatatatgatgctttcacaaaagaacaaaaatattagatcgaaatcacaaaaagaaaagctgtcgttataaaaagagtctttaatttaaaccatattaataaatkcaccatgaactcccaaaaacggaaaggtgtcagtcacttgaagcctgttcttcttttcatattttaggctcctgggccagtgttcaagtggttgtgaaattttagttgttgatgacagttattgctcaccttcctaaaactggcctttaaaatgacttttgtgctttaatgcagatggaaaaatccttcattctggtgatcagtttcacagcctcagaaacagtgcagtcaatcacatgtagtgcctgatggatgtgtcaggcaataagcatagctatagctgtttcaaggccactgacttgaaatctgcaatttcacctgattcctttaagcctatggcttttgaggtaaaccaagggtcagccaaaaa

SEQ ID NO: 377985 - DNA, 554 bp, Homo sapiens
ctctcattaaagcaacagtaattggtttatattggcctctcctaatcagttgtttgaatgtctttttttttttttttttttgaaacagagtcttgctctttcgcccaggctggagtgcagtggcgctctctgctcacggcaactttcgcctcctggattcaagcgattctcctgcctcagcttctggaatagcttggattacaggcacgcaccaccacacctggctaatttttgtatttttaatacagacggggttttgccrtgttgcccaggctggtctcgaattcctgagctcaaagcgatccgcccgccttgggcttcgaaagtgctgggattaccagcgtgagccaccgcgcccggccaaatgtctttctattcaattatctacctacttctgaactaaccccatgaattacattactttttctaacaagtttagtaaatggaagcttggggaaaattgcatgcccaaatgtatagtgcaatttggaatgattttgctattcgtgtattcaatattcaagctacttttctttttggctttctagattttc

SEQ ID NO: 377986 - DNA, 490 bp, Homo sapiens
tcttcatgaataacaataaaaaattatcaatgtatatgattaaattattctatttgttgaactgattatttttgtattctctaaatcctgtgtattatttgttttgttaaattatatgatattattcaagaaatattaaaattatagactaatttattaacaaatagaagtgacatactttttaaaagcttccaaattggaataagtatattgaaatgttcatcttctggaatkacttacttattcatatatttttagaggaatattcacatgttagaggaatattcacatatttaaaagagataatcccggttcttttaacgtaaatcaatcaaaagtactaaataaatatattttaatggaatctgtatgtgtgcaaatgaaactacaatgaaatatttctacatgcagtgccaagagccaacgtttctttgtatgtcttgaactctgtatattcattctacaatcaaaccacattagaaatagcata

SEQ ID NO: 377987 - DNA, 490 bp, Homo sapiens
tcttcatgaataacaataaaaaattatcaatgtatatgattaaattattctatttgttgaactgattatttttgtattctctaaatcctgtgtattatttgttttgttaaattatatgatattattcaagaaatattaaaattatagactaatttattaacaaatagaagtgacatactttttaaaagcttccaaattggaataagtatattgaaatgttcatcttctggaattamttacttattcatatatttttagaggaatattcacatgttagaggaatattcacatatttaaaagagataatcccggttcttttaacgtaaatcaatcaaaagtactaaataaatatattttaatggaatctgtatgtgtgcaaatgaaactacaatgaaatatttctacatgcagtgccaagagccaacgtttctttgtatgtcttgaactctgtatattcattctacaatcaaaccacattagaaatagcata

SEQ ID NO: 377988 - DNA, 490 bp, Homo sapiens
tcttcatgaataacaataaaaaattatcaatgtatatgattaaattattctatttgttgaactgattatttttgtattctctaaatcctgtgtattatttgttttgttaaattatatgatattattcaagaaatattaaaattatagactaatttattaacaaatagaagtgacatactttttaaaagcttccaaattggaataagtatattgaaatgttcatcttctggaattacttacttattcatatatttttagaggaatattcacatgttagaggaatattcacatatttaaaagagataatcccggttyttttaacgtaaatcaatcaaaagtactaaataaatatattttaatggaatctgtatgtgtgcaaatgaaactacaatgaaatatttctacatgcagtgccaagagccaacgtttctttgtatgtcttgaactctgtatattcattctacaatcaaaccacattagaaatagcata

SEQ ID NO: 377989 - DNA, 554 bp, Homo sapiens
tccttttttagtaatataaacaagacgatgtaaaacttacattttgtttctcatggtatgctatgactatctcctcagactatgttaattagataatttctcactcccaacagtggaacgatgtaaacataaaaaaaattaaactcatatgtgttactgtagtgattttatatctatatatctctcttttaatgtgaaactttcgtatcattggttttatatatatgtatgtgtacatatacataaatatgtgtgtatatatacatatatgtgtattcaacacaaaaataagcagttctaaggactcaaaattaactaatatttatagagtgtgaggtaacatctcatacatgatatcccctttttattgatatgaatgctgtatttcagagtagttaagcaactttctctaggttatgtgagttcaaagtgatgaagcaaatattcaatctagataggaccctgaggttcatattttttccaccaaacaggctgttaaactacatgycaaatcctgatctttcaccatttcatagaaagttgaaataaaacta

SEQ ID NO: 377990 - DNA, 550 bp, Homo sapiens
atactaagtctaaattagttaaaggcctatagggacaatagaaaatttaccagctgtgcatcaytaccagcaaggacactaatttcatatatgaagacaaacacaagtgttgtgataaagctacataatgattctgagattacatgaataatggaactctaaaattaacctgagagtcactggttggcagaagctgcctcgtcctgtcagtcaatcttaaatcaattaatagattctgaataaactgcctccacagagagaattcattcattttaacacgtcaatctcattgaatatttttcactacacactaaaaatgactttatgcagacacacatttaatttggaccacttgaagattgtttctccttcttataccttaaagtactgaccgtaaaaaattttgaaataaaattaaattttattccttaaatatttgaagttttgagcaagtgagaaagtgacaggattgaaaagagagaatagaatttatgattaaaatggggaggggtacgattcaattggcacccagtctgtaatgtgaaagttg

SEQ ID NO: 377991 - DNA, 554 bp, Homo sapiens
ctttgactatttatgttgtcctgttttcctttccttatatccaaaacactctctctcttctgcactcatttttgttctctgccagctagagttctgcagccaaatgcactctagtaaaaagcacttcaatatacattcactatgatagaaattttgatacatagtaagatacaattcaaatattttctatgctattaatacctcattttggctatttcttatatccaatgttgctattttcttattttgataagcsttaaaatcacgaagacccaattttcatgagagattcactggaagccaatattaacattattatcccaatcatctccaccacccttaacttctggtagcgtttatagacaatctgttaacttgcattttcatctttaaaggactgacattttgacagatactactttaatgaatgaattatttgacactgaatctcagagggattaaggatgtgtctaacaagacttctggcatgaaacttatactttcccataccttgatgccatctgacgaaaaagaaaaataattaagaaactgtg

SEQ ID NO: 377992 - DNA, 550 bp, Homo sapiens
atactaagtctaaattagttaaaggcctatagggacaatagaaaatttaccagctgtgcatcactaccagcaaggacactaatttcatatatgaagacaaacacaagtgttgtgataaagctacataatgattctgagattacatgaataatggaactctaaaattaacctgagagtcactggttggcagaagctgcctcgtcctgtcagtcaatcttaaatcaattaatagattctgaataaactgcctccacagagagaattcattcattttaacacgtcaatctcattgaatatttttcactrcacactaaaaatgactttatgcagacacacatttaatttggaccacttgaagattgtttctccttcttataccttaaagtactgaccgtaaaaaattttgaaataaaattaaattttattccttaaatatttgaagttttgagcaagtgagaaagtgacaggattgaaaagagagaatagaatttatgattaaaatggggaggggtacgattcaattggcacccagtctgtaatgtgaaagttg

SEQ ID NO: 377993 - DNA, 550 bp, Homo sapiens
atactaagtctaaattagttaaaggcctatagggacaatagaaaatttaccagctgtgcatcactaccagcaaggacactaatttcatatatgaagacaaacacaagtgttgtgataaagctacataatgattctgagattacatgaataatggaactctaaaattaacctgagagtcactggttggcagaagctgcctcgtcctgtcagtcaatcttaaatcaattaatagattctgaataaactgcctccacagagagaattcattcattttaacacgtcaatctcattgaatatttttcactacacactaaaaatgactttatgcagacacacatttaatttggaccacttgaagattgtttctccttcttataccttaaagtactgaccgtaaaaaattttgaaataaaattaaattttattccttaaatatttgaagttttgagcaagtgagaaagtgacaggattgaaaagagagaatagaatttatgattaaaatggggaggggtaygattcaattggcacccagtctgtaatgtgaaagttg

SEQ ID NO: 377994 - DNA, 608 bp, Homo sapiens
ttttgccaactggccagttttcccatgagaaaaaaagaaacttaggccacatatgtgcaccaagtcatacctacaggtggctgagatggggttaggtttgtcattttccagttcatgcctttttccactcaatctttacatagcaccatggccttcatgctcccactccctggcctcttcctactccaggcacccactcyggggcaatgcaaagttgtggcctagtctgggtgctactgcaacccagctgggtgtgcacacacttgggagtaacactaacacacaagcctcctgatgctttgggcccctccagactttggacactgctaagcacaagaaggagatggaaggggtgctgagggctgtttggcacaggactggaggtgcccctcagcacaaacagcctgggtgccatggatggtatgttgatggcaggaggcagacagtctcctgggtggaaaggggcaggtccccggtgaaaccccaccttcaagccagggatggacagaagcctcaggatcagacttccagttctgggtggagtctgtgacccagagtgagaacttatggtgcttttgcccatgcctgcccatgaccacccataaacc

SEQ ID NO: 377995 - DNA, 466 bp, Homo sapiens
attgcactccagcctgggcaacagagtgagactccatctcaaaaaaaaaaaaaattgtgatgtgcatattgagaaataaattgtgttatatatgatcctgtaaaatatctttaattttacaatacagtaacaaactgcaaactattgtagaatagaaatatatctgacaaaaccatctgctcctcagcaaagaggaaggttcgacatggttttgatcagaggtatcattaatgaaagaacaatcacctgaaagattaataacatctgaaagggaagaatttccttttatctccttttgctttcctatcctttaatgtagatgttaatgagtattgaaatcgacaaaagggaaaaaataataataaggcacaggagaaaggggcacattggattttcatccttgaataatctgacttggwtggcgtgaccttccccatttgagcacctctgaaaatagtctgtgacg

SEQ ID NO: 377996 - DNA, 466 bp, Homo sapiens
acagtttacatggtagaacatggactataacccatgctcagagttaaaaggctagcctcctaatcacaacacaaggaaatgggacagaaccaagatgactattcatgaagatagctaccacagactatttgggaaaactactcttgaaactacatggtctaaatcgcattaaaaaaaaaaaaagtagttgacctaaagctattgaagttagggtttggagaattaagatagaatagaaaccagtaaatcttcttagcattcttatccttctttcattctcattttctctcttacctttctacacatacaaaaatgaatgaaccaaacctataaatcccataaaagctatccttaatctgtccctcttttactgtgcttatatataaaaaaagaggccartagctttcagtgatatatgatatgaactaaaggagagaactctgcacaattttcaggatttggcttg

SEQ ID NO: 377997 - DNA, 516 bp, Homo sapiens
ctgagtatctctatgtccccaggggctctaagactccctcaaacattgtcagtcaaagaaccccaccccacccacgccggtgcatgcaytctggattctttattggtgaaaatctaaatttgttaagtatgttgactttgctcttgctcattcccttgtaattaacttctcttttattcttcagtgtatgttcctccgttcacccacaattttcccatttcagttaaactgaccttgcttcaagtaacactgtgagtgttgaactctgcaggctgcaagtactctattaccaaggcttttcttagatttgcctattttcacattacatttcattttataaggccatgaataaagcaattaattgacaaaatttgaattaagcttttaatgattacttcctccaggaattttaatttaattacctcctccatttccacatgtagctatactactttaaccccaagtagtgaaaaatatggaactctccagggtgataatagagaagccctggaaaag

SEQ ID NO: 377998 - DNA, 516 bp, Homo sapiens
ctgagtatctctatgtccccaggggctctaagactccctcaaacattgtcagtcaaagaaccccaccccacccacgccggtgcatgcattctggattctttattggtgaaaatctaaatttgttaagtatgttgacttygctcttgctcattcccttgtaattaacttctcttttattcttcagtgtatgttcctccgttcacccacaattttcccatttcagttaaactgaccttgcttcaagtaacactgtgagtgttgaactctgcaggctgcaagtactctattaccaaggcttttcttagatttgcctattttcacattacatttcattttataaggccatgaataaagcaattaattgacaaaatttgaattaagcttttaatgattacttcctccaggaattttaatttaattacctcctccatttccacatgtagctatactactttaaccccaagtagtgaaaaatatggaactctccagggtgataatagagaagccctggaaaag

SEQ ID NO: 377999 - DNA, 615 bp, Homo sapiens
tcaaggtgcctcttcaaacacaatgtaaactcagtcgcatttacctaaatcccacaacatgcttcttaataaaaatgtccccaatagttattttaaaaggagtcaactgataataaagacattggttatggaaaaagttagccagataagctaactttggtttatattggatgtgatatgaattaatgtgggaatgactcctcagatacattgcagaatttgtgacacaagaagtttgggactaaagcaaataaacaaactgttaaataatagtaaggctgtcattttttctcatgttcttctaatcccatattatgtttgagttctgagraaatgtcgagtatgcaaacaattgcgacctcatggtacaagtctggcatggagtcacaaagaaacactagaaatgccagtccaatcctatgaataatttaaaaagcaattaatttatttattcttaagttcactgcagaaatgaaacattttcacccatgtagaaagaacttcgatacttcttgaaatttgcattttctattctgtatataatatatgcatatatatgttctttgaacatgtctatgatctatgtctctatataaatgtacctatattatacac

SEQ ID NO: 378000 - DNA, 615 bp, Homo sapiens
tcaaggtgcctcttcaaacacaatgtaaactcagtcgcatttacctaaatcccacaacatgcttcttaataaaaatgtccccaatagttattttaaaaggagtcaactgataataaagacattggttatggaaaaagttagccagataagctaactttggtttatattggatgtgatatgaattaatgtgggaatgactcctcagatacattgcagaatttgtgacacaagaagtttgggactaaagcaaataaacaaactgttaaataatagtaaggctgtcattttttctcatgttcttctaatcccatattatgtttgagttctgagaaaatgtcgagtatgcaaacaattgcgacctcatggtacaagtctggcatggagtcacaaagaaacactagaaatgccagtccaatcctatgaataatttaraaagcaattaatttatttattcttaagttcactgcagaaatgaaacattttcacccatgtagaaagaacttcgatacttcttgaaatttgcattttctattctgtatataatatatgcatatatatgttctttgaacatgtctatgatctatgtctctatataaatgtacctatattatacac

SEQ ID NO: 378001 - DNA, 568 bp, Homo sapiens
gttacacctgctgtttagccactgtgattgtaaaatgtcattgattgtaaaataatcatgcacatgtaattacatgagaaaagaaactcttaaacaatgtactgtaatttttattgaacttcactacgtacctgaagctgaggtaggtgctagaatttatcaaaagaatatgctgccaccaagacttgtgtagtcaagtattaagtgtaagtcctctatgagaagatagaaaatgtggtatagttttcttaaaatgtgctcaaggaatacaaagaggatagccctttaaggtggcaagacygacaaacacttagaacagtagtagattttgggtaagtggagatcatgagagaaaaggtattttaattcaaaagcagaacctgagcaaatattggaaaaaacaagccaccaggaggatactcaagaaatggtggttgggtgatatggcttaaggttagcctgtgagaagaaataattacaggtgaattaggaatggactttgaaaacggaagattcttgaatgcatggttagagaacaagatgagccttgaattgttctggagttgct

SEQ ID NO: 378002 - DNA, 629 bp, Homo sapiens
tatttgaagggccattatgtgaaagaaggataaagtttattttgggtttccacagggaacagctaccaccaaagcttagaattttaaggaggcatacttttggatcagtataagaggaacatttataaaaaattgaacggcaaaaaaaaaaaaacattaaattcgtggaaaaacagggaattttcctgtcattaaaaaaatgtcaaacacaggtggaatgatgatttgctagggatgatgtttaaggggatcgatagatcaaatgaagacacagccttatagtttttaaagtccatttcaactcagaaataatattgtgctatcatccctttggattttccattctttgctcagttcaggcatatcttcaacataattcatcatgttcctttttaagttcactttccagatgacttcccagctgccagtacaactctctctccatagatcaccacgcacatttgaaacttcagcaccatctctgcctcattttcctcctttgcttctcaggtgtaaccagtcttccagtccagtccattgtctyttggtaaagcttctttcattattcctttatccttcccatgataaatctggcaattaagaactttatccaaaacctaggcatgaat

SEQ ID NO: 378003 - DNA, 610 bp, Homo sapiens
cgcccggccaaaagtctttctttaaacacgatttcaggttgattctaaggaacatcagatttaagaaacaatgctcttcattatcactaaattctaaaactatgttctaaaacataaaactcataactaattacaacgtaatcaccccctccaaccccaccaccaatacaagacaaagtccacactgactttaatgggtctcagattaagatgaacctcatattctactcaccaattcaatatgaaatctgcacttttgagtcaatttacctcattttattccatcaacacatcaggcttgcattgttttgttggttgacaagctcacttctaggccaataattgtctttttgtttagaataaatctgaacaaaagagaacataagaatggatgtcgtctgtttgtccttttatagctggaatatattcttccctcaaggagggacgaaatgaaataaatagcatcgtaagtcataatcatcagtgagcaattaacagtttccatttgcccttttccrcatagctccaatgatcaacttatttgtgccaggcaggacataatcccaaactgaactttctgttatgctgtattaatgcagaaaaagaaaac

SEQ ID NO: 378004 - DNA, 595 bp, Homo sapiens
tattttaactaaattttatagtcatatgttctgcagatatgtcatgatccatttcatgttaacatttaggttgagtttcatgttttgcctgtggatatccaattagttaagcactgtttattgatttattcatacattgaatagcttttaaacttttgtcaaaattcatttggccatacttgcgtgggtctatttctaggttctctgtgatttttgttttacatgcacatttgacattattacatattcccagtggaataatcagttatgattattttatgtctatccttgtctctagtaatttgctataaagtaaactttgaccacaatttgattgccatcccccttaaacttaccttgtgaatgcttctgtctctactgtatactttcaatctcatacactttaatatacttttatccaaagtaaatcacawcctagtcgatattaatacaaatatatgaaatattttcttgtataatgcatggctactaattacttggcaagattccccaggaattaaggaaataagcgtatgtatatgtaaaactcaagtgattaaagaatctttatcttctcagcatcatccctgcattg

SEQ ID NO: 378005 - DNA, 514 bp, Homo sapiens
ccaaccacactgttctctttcaaatggagaatttaaggctttgagtcctattaagcctccagcatcttaaagagacatttcccatcctccatcatcattttagtggaacgggtttttacagggaatacaatctgatcagcatgttaggacagagtttcttcatgtatatgccatgatattgcctacgctgtgttttaaaaacactttcaaaagaagagtgttctttttwaaaaaaaaatcattggcatataaatcaagcattctatttctttaacttttgaatttttattaatgaacagatatagcatgcttatattatgtaaatttctaacatgtgtaatttttatgtttttttaagagatgggaacttgctaatgttgcctgggctgaaatgcaaaggctattctcaagtgtgatcattggtgcggtacagcctccaactcctgggctcaagcaatcctcctgcatatctgagaccataggcatgccccaacatgcccagctttatttttac

SEQ ID NO: 378006 - DNA, 514 bp, Homo sapiens
ccaaccacactgttctctttcaaatggagaatttaaggctttgagtcctattaagcctccagcatcttaaagagacatttcccatcctccatcatcattttagtggaacgggtttttacagggaatacaatctgatcagcatgttaggacagagtttcttcatgtatatgccatgatattgcctacgctgtgttttaaaaacactttcaaaagaagagtgttcttttttaaaaaaaaatcattggcatataaatcaagcattctatttctttaacttttgaattttyattaatgaacagatatagcatgcttatattatgtaaatttctaacatgtgtaatttttatgtttttttaagagatgggaacttgctaatgttgcctgggctgaaatgcaaaggctattctcaagtgtgatcattggtgcggtacagcctccaactcctgggctcaagcaatcctcctgcatatctgagaccataggcatgccccaacatgcccagctttatttttac

SEQ ID NO: 378007 - DNA, 597 bp, Homo sapiens
agtcacttcaggaaacttaaaatcatggtgaaagttgaaggggaagcaggcatgccctacctggctggagaaggaggaagagagcaaagggggaggtgccacactcctttaaacaaccagctctcatgaaagctcactcgctatcatgagaacagtgaggggaaaatctacccactagatccatttacctcccatcaggcccctccttcaacactgcagattacaattcaacatgagatttgggtgggtacacaaatccaaaccacatcaatgactttgtgggcaggatcctttggatgaagtaaatgtaatgttgtttccgcctctaaaaggrtaactggaattgatgtcatgtgcatatacttccccagcacatcaataccagaaggattctccagacctggaaagcacagaaaaaaagtgatacataactcatttctgtaaatcccacttccgcttgcaatcaatatttggtcatgatttagcatgagtgcctctaccctctgaggtttaaagctctcactacatacatgacttcttgctggttggcaagtcagtattttttcagtctcaatagcccttactgcaatgttattc

SEQ ID NO: 378008 - DNA, 571 bp, Homo sapiens
tcatgaaaactccatataaatttttttgaatctataaatatcaacgttatttgtagttaaaattagataagttgagaagtgataagtattggatgtttcatcatttagaactagaactttgaaaggtagaaaattttgtgatgaatttcaaaataaccaaataatataataaatagtgtttaacacagttattatgcagatgtagatgaacacgtaaaatgtaaaaaagtgaacacttgctgactgacaactttgaatgatttcctctcatttttaagttgatgtccaaaaytcttgacaagaaatttcttgacctgtccagagcctctctgttcaactctcaagcttttctgacatcttcttaccatctgaaaccattctaattctcccttatctcactcaaagagccattctctgcctcagaacctttgcccatttaatttcctctgcctggaatgacaattcactctcttttgattcacaattcagcttccacctctccctccctccccagcttctggactttcccactttcctgcctgccctggcctgactcctgtgttgtgacctc

SEQ ID NO: 378009 - DNA, 613 bp, Homo sapiens
tcaagatgaaataaatgtataagatgatggattagtgcaattctgggataacggctatgttgctgacttgacagagccaggaggtcagataggagcatgaagatggtgagctcttcaaagaatatcactgaaaatagacaaaattaataattatgagggatttttaatgtactgactgtattttcgtcaatgcattgggaaccatttaatggtaagtacatagaaatatggacaaaccaagaaaagagtcaactgttaacaccaggtagaaaaaaaaagttatatgaagagagataaaaatgcagattactatatgtcacaaatttaaaatatgttwacatagtcaaaatagtataaaattataacacaaccattatggaaaacctgaagaatattgtattagtccattttcatgctgccaataaacatatatccgagactgggcaatttacaaataaaagaggtttaatggataactcacaattccacctgcctgaggaagcaccacaatcatggtggaaggcaaggagaagcaagtcacatcttatgtggatggtggcaggcaaagagagagagtttgttctgggaaactccaccttataaagccatcaga

SEQ ID NO: 378010 - DNA, 599 bp, Homo sapiens
gggcaaggtttattttaaggctgaaggattatttgatgtttttatcttgtacctgtattaccatgatcaaaacaaattttaaaaactaaagtttattaaagatatacaatgccaaataatctttaaaatatggataaatgctctaaattgagatggctgatgaggtcaatgacaatatcctatgaatattttgcttagaaattttttttgaaataatctaaaaaaatgtggttttgtcttagaatattttacatttttaaaatctccatactttctgatttttaatgccctgttttctttagccttctaagggaaatrtatatattttttgttggatcaatctagaattttccctttaaatccataatttggtgataagcaagtaagaacaatattgaagacagtgaagtaaacaaactttttaatcataaaatatattaacactggagagaaagtaggaggaaagagaacaatctttctgaatgaatttttgaaaatatgaaggaaaagtttggaacgatttttgggagtgaaagaatacacacatacacacatacagatggtgtgaagacagagtgggggcaaaaggggagatctac

SEQ ID NO: 378011 - DNA, 599 bp, Homo sapiens
gggcaaggtttattttaaggctgaaggattatttgatgtttttatcttgtacctgtattaccatgatcaaaacaaattttaaaaactaaagtttattaaagatatacaatgccaaataatctttaaaatatggataaatgctctaaattgagatggctgatgaggtcaatgacaatatcctatgaatattttgcttagaaattttttttgaaataatctaaaaaaatgtggttttgtcttagaatattttacatttttaaaatctccatactttctgatttttaatgccctgttttctttagccttctaagggaaatgtatatattttttgttggatcaatctwgaattttccctttaaatccataatttggtgataagcaagtaagaacaatattgaagacagtgaagtaaacaaactttttaatcataaaatatattaacactggagagaaagtaggaggaaagagaacaatctttctgaatgaatttttgaaaatatgaaggaaaagtttggaacgatttttgggagtgaaagaatacacacatacacacatacagatggtgtgaagacagagtgggggcaaaaggggagatctac

SEQ ID NO: 378012 - DNA, 187 bp, Homo sapiens
taatttggtgataagcaagtaagaacaatattgaagacagygaagtaaacaaactttttaatcataaaatatattaacactggagagaaagtaggaggaaagagaacaatctttctgaatgaatttttgaaaatatgaaggaaaagtttggaacgatttttgggagtgaaagaatacacacatacac

SEQ ID NO: 378013 - DNA, 592 bp, Homo sapiens
taactggaggaaatatttacgatatagcaggacacaaaagacaccaaggtaagttagtatagtagaagtaaattcatcagtatgtgcaagagaaacatatagtttaatcagatttgaatgagagtgacaaagacactttcatgaagacataatcaggaaaaaagtatgtagaaacaaggaatggattttattattgaattaaaaaaaaagtgaggacagccaagaacttagcagtgattataacgagtaaacattttagttgccttgacaacagaaccactgcttgatgctagtaatattatggtaatagaaacctaggtaaatgaagtaagtagcaaagaagaaatggttagtccttgcttggggagtggtcgtggagaaatttggaaggattttctgctaaaaatcgtgtaggaagaatgtgactactaaagaataaacttgagactggctgtgtaggaagaatgtgactactaaaraataaacttcagactagttattacagaaagaaaaagacctcccatcctcccacccactcaaggacaactcaccttttcattctgggtcagtgctaagtaatacatcatgcact

SEQ ID NO: 378014 - DNA, 612 bp, Homo sapiens
cacaacctgctgagaattgttctgttgtaaagcttggggcaaactaattccactatgacttatgttgctgctattttgactcacatcacaatatgtaagcacttgagtttttcatcctctactatattctaagtgttttactactttgcacttcctttctcctagtcaatccactctctgttcccaactttctcaaaatttctactgtgcaattctagaagcccaaagtatggctgaaacataaattctgttttgcaagatacaaagtaaaaatattttgcaactactcaggtatcacattatcagatcaaaatttgcccaggacaaaattgaatagataatgaagacattattcaatattgttaaaatgggagagagggcagaactcattccaaactcaactacactaaaacagaaggaaagggtatttgaacagttagggtgagctagtggaaaagtactgaagaacattaaaagggaggttgatcaatgagatgtgttgagcatgttgagttactccccagtatgtaaatgtttttctttgtaattaagtcwtctgtgtttgctaatatgcacccgtggaagttaggtgcctaccctctcacagtgact

SEQ ID NO: 378015 - DNA, 440 bp, Homo sapiens
gatgaaactgatgaagaatgtaatcctgtaacaccagtgccattgaaccaacacttcacaatataggaatgtgtacacacacacaaatacacacatgtgtgcacacaaaaacatacacacacacctcagagatattaacaatattttttaatgtcttggtgttcaggtttatatcaatgtgaattctcagtatgcatcagcataaaaatgaaaaaaacaaaatagattcaacatgttatctatacttttcattaaaaagttataatttaactacttttgttaaatgagaattaactgttaacaaagaagtatttcatagtataaaatatttcatccttggatttcagatccaattcagytgaattcctcctatagcctaggccaagtttctttctttcttttttttgagacagagtctcaatctgtcgcccaggctgtaa

SEQ ID NO: 378016 - DNA, 453 bp, Homo sapiens
aatagctaaagaactccagagctttaagctctagaaaaatggaatggacagattagagatgaatttgtatctgccaaagtagtgatatattcagatatcagccaaataagtgtacaaatttaagatacaagttttcttttcaaattttccagtttaattttgtcactagtaattcaatttgactttcactagggtaaaaaactstgattaattgacatatttcaaaattactacttgattctctaattatttaataaaagcattctgtcttaagaattcaaatcaaggatgtaagagaaaaactcacataagcctgttttctgttgccgagtaatatgtgaactgtagtccaaagcaaagtaagatgtatggaagaagggagattggcaagtgacattttcctccatgaattttgcattctcacttcactccttgttaccccctgagctagaa

SEQ ID NO: 378017 - DNA, 453 bp, Homo sapiens
aatagctaaagaactccagagctttaagctctagaaaaatggaatggacagattagagatgaatttgtatctgccaaagtagtgatatattcagatatcagccaaataagtgtacaaatttaagatacaagttttcttttcaaattttccagtttaattttgtcactagtaattcaatttgactttcactagggtaaaaaactgtgattaattgacatayttcaaaattactacttgattctctaattatttaataaaagcattctgtcttaagaattcaaatcaaggatgtaagagaaaaactcacataagcctgttttctgttgccgagtaatatgtgaactgtagtccaaagcaaagtaagatgtatggaagaagggagattggcaagtgacattttcctccatgaattttgcattctcacttcactccttgttaccccctgagctagaa

SEQ ID NO: 378018 - DNA, 419 bp, Homo sapiens
agtagttataatgattataaatttaaggatgaggcaatrtatagtccatatatcatattttatataatcaaatatacaaatttgtatagatcaaatacatacatatttatctataaaggaaactaggaacaaatttatctgctttgggttcaaagctatttcttgagagagtgatcacaaatagtcataacaaatgtgtttcttaacatctctatcaagggtgattttgtggtcagctagacatcatgggtcatttcttctgtgatatataggaataagtcaaattcaaagttgctttctataaaatatagtaggttagatcgccagcctcccttaaaatgaaatgtagtgttcaagaaatagtatatgagattaacctcctgcattgctaatagtataacttcgacaacataacctag

SEQ ID NO: 378019 - DNA, 532 bp, Homo sapiens
tttttagcatacagatatttcacctccttggtggaatttattcctaagtatgttattctttttagactgtaaatgggattgatttctttctttatttttattgtagtttcctgttagagtatggaaatacagctgattttctatattgattttgtatcctgatacattacttatgcccactttcatcactcctattcaacctagaactggaagtccttgtcagaggaatgagtgaagagaaaaaatggcatccaaattgagaaagagaaggtaaaattatccttatttgctgataatatgctcttacatctagaaaaccctaatcaacctaagtatgcatcaagagaggactggataaagagatayagtcaatatatacacagaatgctactcagccacacacacacacaaaaaatgaaatcttgtatcttgcagcaacatggatgaaactagaggccattatcctaagtaaaataactcataaacagaaagtcaaatgctgcatgctctcacttataaatgggagctaaat

SEQ ID NO: 378020 - DNA, 581 bp, Homo sapiens
cataaaccaaaagtttgtactagaactcctgtcattttagctgtaccttatatattttgtttatttaaaaccctatggaaagccatttctctttttacccccataaagctaaagatatattccattaaactatgccctttcacaaggcttgtctttttagtgataatttgtagtattaatatgcacytaaatcaaaatattcaatagaactttactgtatcagagaaattatctttattgaaaagaaataaaacataaaaaataaaatttttggtttttataaggtcacaaaatttcaagttgtaaaagataaaattctccattttttaaagttagcacttcagagtcataatgtaagctgtatccattaaaggttaatcaaaattttaagttaaattaaaaaacataaatgaggtatcacctcatttcattcatctcaccttgaatattaatacccttcattaaatcagaaaagtgtttagtcagaaaatttattttatcagtggctttgcttccacactaaaattaaatttcttttggtatggcattgaagatgtgattaccaacttcattgatctact

SEQ ID NO: 378021 - DNA, 656 bp, Homo sapiens
tcttcaaatccaggctctgtgttttggtagtttgtgctgttggcaagtatcttaacttctctatttctgtttccatatgtaaaacgttaaaatactagaaatttcctcatagatgttgtgtgaatttaatgaaatattttcataaagagttagatgtgtgcatttatataaatgcttaacaaaccaattatatcaataaatatttatggtatcttgtatcttaatcttgctttatttttctttttctcaatcaagatatcaaatcaggtttattatctaactgttttagatttctttatttatatgttgtgacagatacatttattcatttgtttttgtccatcttttccaagataatacaaattctcaaagggaaagaatttaaaatttaaattgttttatacatgtgttcaacatttgcatttccaaatacaggaaacttcagtgtcttttgcacattattaaaattagggtcttgatgttttatgtattaataaataaattataaaatttcatatttaraggttttaactcattgtactataatgttgaaaaggcttttcccttttttcttttaacattattttaagtttttaattaatagatttttaaaatagttttcagtttacaaaagaatcgagtgagaagaacagttc

SEQ ID NO: 378022 - DNA, 553 bp, Homo sapiens
tgttttcttttgtcttctctgyccatttattctcaaaatagtctgtcttcaggctcagtaattctttctttcagttgatctattctactgttgagtgactctgatgcattcttcagtttgtcaattgcacttttttggctccagaatttctgcttgattgttcaaaattactttaatattcttattaaatttatctgatagaattctcaattcctttttggttttatcttgtatttcactaggcttcctcaaaaaagataaactgaattatctatctgaaaggtcgcatatctctgtcactctaggattggtcactggtgctttatttggttcgtttggtgaggtcatgctttcatggatggtattgatgcttgtggatgttcatcaatgtccaggtattgaagagctagatatttattctaatctttgcggtctggtcttatttgttcctgtccttcttgagaaagctttccaagtattcaaagggaattgagtgttatgatctgtctttggtcactgcagctgtatctgcattagatggcaccccaagaca

SEQ ID NO: 378023 - DNA, 448 bp, Homo sapiens
tccagcccagcctgagcaacatagtaaggctctgtctctacaaaataaatgaataaataaagtamccggcatggtggcatgcacttgaagtcctagctactcaggagaatgaggtgggaggattgcatgagcccaggtgtttgaggctgcagtaagcaatgatcacaccactgcactccagcctgggtgacagagcaagaccctgtctctagagaaaaaaaaaaaatattcacagaggttaattgagcaaagaatactttgcaaattggggaggactccggacaagaatatgtttctagtgacttcaacaccagggctgtaacatggtcggacataaaaagttaactgacatacagaaaacaaaagtgaggtacagaaacatctagtttggttagagctgggtgttggcttatttagagaggatttgcttatttaaagaggattaaca

SEQ ID NO: 378024 - DNA, 530 bp, Homo sapiens
gagggtagagagcctgaaggtaggggatttctgctggatgagtgattagtttttgttatgatcagttcctgctctgctacaaagtcagaggcagaatataatctatatttttggttgcctactcaacatccattttcccttgagtctttcttaatatcttggacaagcacccactgttcttccactcatctctatgccttagggaaagctgactccattctctggccccaaccctaatccttatttttcctacatatattatctcaactgtcaagccttatgctgtgtgttggccctgtcacttagctgataatgatggaccgcaggcattctgaatctagagtccatgctctttaccactatgctattactgccactatcataagagaccacccacatatgtaccatatggcagtaggaaaaacttaggagacattggaaatattcacatacccccaattattataacatgagcaaaaataaaacaaytatttttaaatttattttattagaaactacagctcagtgct

SEQ ID NO: 378025 - DNA, 570 bp, Homo sapiens
  misc_feature (1)...(570): n = A,T,C or G
gttttccacatttcctataactagtctaaaaatataatatgttccaaagccttctaaagtcaatatgctaagtgtctttctttgttctttcatttaaattctagctagaaagtctttttagtaaacttgctataactgcaattttaggtgtgaaatattaatgcaactgaaaatgaaacacatattgtttattaataaacctgcatgtgtaggccacatttgcataacttgatttaaaataaagaactgtcgtctaattggtattcttaatgaacaatanaaccaatgcaggagtcaaaaaagggatgtgtgtggagggttgggtggatataaaagctaggtaaaaatagatatgaacccttcagatcctttaataatgcataattgcttttttaaaattgcatattaratctatagagataagccattagtgattttgtgtttgtgtgtgtagtttgtacatgtcacactcagcatgtccaaacctttgtttccttttatttttttttctttatttttacaatattgctctttatttctgcagaagcttgagatttggggaatggtggt

SEQ ID NO: 378026 - DNA, 610 bp, Homo sapiens
tatccctttactattctaaaaaaacagtgtttccaaattgctgaagaaaaagaagggtttaattctggtgatgaatgcacacttcttaaagtggttcctcagatagcttccttctagtttttatcctgtgatattcgctttttcaccattggcctcaatgagctccataatgtcctttcacagaatgggcaagaacaatgtttccaaactgctgcatcaaaagaatggtttaacgctgtgagatgaatgcacacatcacaaagaagtttctcagaaagcttctttctagtttttatctgaagacattttctttttcagcataggcctcaatttgctccaaaatatctcttcccaggttatccaaaaacagtgtttgcaaactgatgaatgaaaagaaagttttaactctgtgagatgaatgcacacatcacaaaccggtttctaagatagctatcctccagtttatatcttgagatatygacttttccgccattgtcctcaatgagctcctgaataccacttcagagattctacaaaaaaagtgtttctaaactgctgaatgaaaagttatgtttcactctgtgatatcaatgcacacatcacaaagcag

SEQ ID NO: 378027 - DNA, 598 bp, Homo sapiens
actttctcagaaagcttctttctggtttttatctgagcttattttttttcaccataggcctcaatgtgccccsaaatatcccttctcagattctaaaaaagagtgtttcaacactgctgaaagaaatgaaagatttaactctgtgagatgaatgaacagaacacaacgtggtttctcagatagcttccttctagtttttacactgggatattctcttttgcaccattggtctcaatgagttcccaaatgtgcattcacagaatgggcaaaaacagggtttccaaactgctgaatcacaagaaagatttaactatatgagatccatgcacacatcacaaagcagtttctcagaatgcttctttctattttttatctgtagctattttctttttcaccataggcttcactgtgatcccaaatatcccttcacagattctataaaaacagcgtttccaatctgctgaatgaaaagaaagatttaactctgcaggatcaatgcacacatcacagagtggagtttcagatagcttccttccagtttttatcctggggcattcgctttttcaccataggcttcaatgagctcaaaaatgtccat

SEQ ID NO: 378028 - DNA, 598 bp, Homo sapiens
actttctcagaaagcttctttctggtttttatctgagcttattttttttcaccataggcctcaatgtgccccgaaatatcccttctcagattctaaaaaagagtgtttcaacactgctgaaagaaatgaaagatttaactctgtgagatgaatgaacagaacacaacgtggtttctcagatagcttccttctagtttttacactgggatattcycttttgcaccattggtctcaatgagttcccaaatgtgcattcacagaatgggcaaaaacagggtttccaaactgctgaatcacaagaaagatttaactatatgagatccatgcacacatcacaaagcagtttctcagaatgcttctttctattttttatctgtagctattttctttttcaccataggcttcactgtgatcccaaatatcccttcacagattctataaaaacagcgtttccaatctgctgaatgaaaagaaagatttaactctgcaggatcaatgcacacatcacagagtggagtttcagatagcttccttccagtttttatcctggggcattcgctttttcaccataggcttcaatgagctcaaaaatgtccat

SEQ ID NO: 378029 - DNA, 598 bp, Homo sapiens
actttctcagaaagcttctttctggtttttatctgagcttattttttttcaccataggcctcaatgtgccccgaaatatcccttctcagattctaaaaaagagtgtttcaacactgctgaaagaaatgaaagatttaactctgtgagatgaatgaacagaacacaacgtggtttctcagatagcttccttctagtttttacactgggatattctcttttgcaccattggtctcaatgagttcccaaatgtgcattcacagaatgggcaaaaacagggtttccaaactgctgaatcacaagaaagatttaactatatgagatccatgcacacatcacaaagcagtttctcagaatgcttctttctattttttatctgtagctattttctttttcaccataggcttcactgtgatcccaaatatcccttcacagattctataaaaacagcgtttccaatctgctgaatgaaaagaaagatttaactctscaggatcaatgcacacatcacagagtggagtttcagatagcttccttccagtttttatcctggggcattcgctttttcaccataggcttcaatgagctcaaaaatgtccat

SEQ ID NO: 378030 - DNA, 598 bp, Homo sapiens
actttctcagaaagcttctttctggtttttatctgagcttattttttttcaccataggcctcaatgtgccccgaaatatcccttctcagattctaaaaaagagtgtttcaacactgctgaaagaaatgaaagatttaactctgtgagatgaatgaacagaacacaacgtggtttctcagatagcttccttctagtttttacactgggatattctcttttgcaccattggtctcaatgagttcccaaatgtgcattcacagaatgggcaaaaacagggtttccaaactgctgaatcacaagaaagatttaactatatgagatccatgcacacatcacaaagcagtttctcagaatgcttctttctattttttatctgtagctattttctttttcaccataggcttcactgtgatcccaaatatcccttcacagattctataaaaacagcgtttccaatctgctgaatgaaaagaaagatttaactctgcaggatcaatgcacacatcacagagtggagtytcagatagcttccttccagtttttatcctggggcattcgctttttcaccataggcttcaatgagctcaaaaatgtccat

SEQ ID NO: 378031 - DNA, 598 bp, Homo sapiens
gcagttcctcagaaatcttccttctaatttttatctgaggatatttttcttttcaccataagcctcaatgtgctcccaagtatcccttcacaaattcttcacaaacagtgtttccaaactgctaatggaaaagaatacttaaactctgcaatatgaatgcacacatcccaaagcagtttctcatagcttccttctgggtttttacttttggatattctcttttctgyaattggtctcaatgagctcccaaaatccattcgcagaatggacaaaaacagtgtttccaaactgctgaatgaaaagaaatgtttacctctgcgagatgaatgcacacatcagaaagcagtttctcagatagcttccttctagtttttatcctgggatatacactttttcacctttggcctaaatgatctcccacatctccattcactgaatggaaaaaaaaacagtgtttgcaaactgctgaatcaaaagaaagtttaaactctgcgagatcattgcacacatcacaaagcagtatctcagaaagctttattgtagttttcttctgaagatattttgtttttcaccttagacctcaatgccctcccaaata

SEQ ID NO: 378032 - DNA, 598 bp, Homo sapiens
gcagttcctcagaaatcttccttctaatttttatctgaggatatttttcttttcaccataagcctcaatgtgctcccaagtatcccttcacaaattcttcacaaacagtgtttccaaactgctaatggaaaagaatacttaaactctgcaatatgaatgcacacatcccaaagcagtttctcatagcttccttctgggtttttacttttggatattctcttttctgcaattggtctcaatgagctcccaaaatccattygcagaatggacaaaaacagtgtttccaaactgctgaatgaaaagaaatgtttacctctgcgagatgaatgcacacatcagaaagcagtttctcagatagcttccttctagtttttatcctgggatatacactttttcacctttggcctaaatgatctcccacatctccattcactgaatggaaaaaaaaacagtgtttgcaaactgctgaatcaaaagaaagtttaaactctgcgagatcattgcacacatcacaaagcagtatctcagaaagctttattgtagttttcttctgaagatattttgtttttcaccttagacctcaatgccctcccaaata

SEQ ID NO: 378033 - DNA, 598 bp, Homo sapiens
gcagttcctcagaaatcttccttctaatttttatctgaggatatttttcttttcaccataagcctcaatgtgctcccaagtatcccttcacaaattcttcacaaacagtgtttccaaactgctaatggaaaagaatacttaaactctgcaatatgaatgcacacatcccaaagcagtttctcatagcttccttctgggtttttacttttggatattctcttttctgcaattggtctcaatgagctcccaaaatccattcgcagaatggacaaaaacagtgtttccaaactgctgaatgaaaagaaatgtttacctctgcgagatgaatgcacacatcagaaagcagtttctcagatagcttccttctagtttttatcctgggatatacactttttcacctttggcctaaatgatctcccacatctccattcactgaatggaaaaaaaaacagtgtttgcaaactgctgaatcaaaagaaagtttaaactctgygagatcattgcacacatcacaaagcagtatctcagaaagctttattgtagttttcttctgaagatattttgtttttcaccttagacctcaatgccctcccaaata

SEQ ID NO: 378034 - DNA, 598 bp, Homo sapiens
gcagttcctcagaaatcttccttctaatttttatctgaggatatttttcttttcaccataagcctcaatgtgctcccaagtatcccttcacaaattcttcacaaacagtgtttccaaactgctaatggaaaagaatacttaaactctgcaatatgaatgcacacatcccaaagcagtttctcatagcttccttctgggtttttacttttggatattctcttttctgcaattggtctcaatgagctcccaaaatccattcgcagaatggacaaaaacagtgtttccaaactgctgaatgaaaagaaatgtttacctctgcgagatgaatgcacacatcagaaagcagtttctcagatagcttccttctagtttttatcctgggatatacactttttcacctttggcctaaatgatctcccacatctccattcactgaatggaaaaaaaaacagtgtttgcaaactgctgaatcaaaagaaagtttaaactctgcgagatcattgcacacatcacaaagcagtatctcagaaagytttattgtagttttcttctgaagatattttgtttttcaccttagacctcaatgccctcccaaata

SEQ ID NO: 378035 - DNA, 564 bp, Homo sapiens
ggcctagatgagctgccaaatgtccatttgcagaatggacaaaaacagtgtttccaaactgctgaatcaaaagaatggtttaactctgtgagatgcatgcacaaatcacaaagcagtttctcacaaagattctttctaatttttatctgaagatatttcctttttcatcattggcctcaatccratccaaaagattgcttcttaaattctacaaaaacagcatttccacactgctgaatccaaaaaaaaaaaaagaaccctgtgtgatgaatgcacacatcacaaggcagtttctcagatagtttccttctagtttttatcctggtatattagctttctcatctttggcctcaatgggctcccaaatctcctttcacaaaattgacaaatccatctttacaaactgctgaatgaaaagaaagatttaactctatgagatgaatgcacatatcactaagctgtttctcacgtagcttccttctagtttttatcctgggatattcgctttctcaccactggcctagatgagctcccaaatgtccattcacagaaaggacaaaaaca

SEQ ID NO: 378036 - DNA, 564 bp, Homo sapiens
ggcctagatgagctgccaaatgtccatttgcagaatggacaaaaacagtgtttccaaactgctgaatcaaaagaatggtttaactctgtgagatgcatgcacaaatcacaaagcagtttctcacaaagattctttctaatttttatctgaagatatttcctttttcatcattggcctcaatccaatccaaaagattgcttcttaaattctacaaaaacagcatttccacactgctgaatccaaaaaaaaaaaaagaaccctgtgtgatgaatgcacrcatcacaaggcagtttctcagatagtttccttctagtttttatcctggtatattagctttctcatctttggcctcaatgggctcccaaatctcctttcacaaaattgacaaatccatctttacaaactgctgaatgaaaagaaagatttaactctatgagatgaatgcacatatcactaagctgtttctcacgtagcttccttctagtttttatcctgggatattcgctttctcaccactggcctagatgagctcccaaatgtccattcacagaaaggacaaaaaca

SEQ ID NO: 378037 - DNA, 457 bp, Homo sapiens
gtttaactcttggagatgaatgaaagcatcacaaagcagtttctcagaatgtttctttctagtttttatatctgaagatattttccttttcactataggccacaatgtgctcccaaatatcccatcacagattctaacaaaagagtgctttaaaactgctcaataaaaggaaagatttaattctctgagatgaaggcacacatcacaaattggttcctcatatagcttycttttggatttgccctgggattatcgcactttcatcattgacctcaaagagctcccaaatgtccattcacagaaaggactaaaacagtgtttccaaactgctgaatcgaagaaacttttaaatctgcgtgatgaatgcacccatcacaaagtgatttctcatacagcttccttctagtttttatccttggatattcacttcaccattggtctcaaggagctcccaagt

SEQ ID NO: 378038 - DNA, 457 bp, Homo sapiens
gtttaactcttggagatgaatgaaagcatcacaaagcagtttctcagaatgtttctttctagtttttatatctgaagatattttccttttcactataggccacaatgtgctcccaaatatcccatcacagattctaacaaaagagtgctttaaaactgctcaataaaaggaaagatttaattctctgagatgaaggcacacatcacaaattggttcctcatatagctttcttttggatttgccctgggattatcgcactttcatcattgacctcaaagagctcccaaatgtccattcacagaaaggactaaaacagtgtttccaaactgctgaatcraagaaacttttaaatctgcgtgatgaatgcacccatcacaaagtgatttctcatacagcttccttctagtttttatccttggatattcacttcaccattggtctcaaggagctcccaagt

SEQ ID NO: 378039 - DNA, 457 bp, Homo sapiens
gtttaactcttggagatgaatgaaagcatcacaaagcagtttctcagaatgtttctttctagtttttatatctgaagatattttccttttcactataggccacaatgtgctcccaaatatcccatcacagattctaacaaaagagtgctttaaaactgctcaataaaaggaaagatttaattctctgagatgaaggcacacatcacaaattggttcctcatatagctttcttttggatttgccctgggattatcgcactttcatcattgacctcaaagagctcccaaatgtccattcacagaaaggactaaaacagtgtttccaaactgctgaatcgaakaaacttttaaatctgcgtgatgaatgcacccatcacaaagtgatttctcatacagcttccttctagtttttatccttggatattcacttcaccattggtctcaaggagctcccaagt

SEQ ID NO: 378040 - DNA, 475 bp, Homo sapiens
cattggcagaatggacaaaaacagtgtttccaaactcctgaatgaaaagacaggtttaactctgtgagatgaatgygcacatcacaaagcatttctcagatagcttccttctagtttttatcctgggatatttgctttctctccattggcttcaatgagttttcaaatgtctattcacagaatggacaaaaacagtttttgaaaactgctatatcaaaagaaaggtttaactgtggaatgaatgcacacatcacaaatcagtttctcagaaagcttccacctagtttttatctgaaggtattttatttttcactgtctcaatgtactgtgaaacaacccttcagatattctacaaaaacagtgtttcagaactgctgaatgaaaagtacgttataactctgagagttgaatgcacaccaaacaaggcggtttttcagatagcttccttctagtttttatcctgagatattcactt

SEQ ID NO: 378041 - DNA, 475 bp, Homo sapiens
cattggcagaatggacaaaaacagtgtttccaaactcctgaatgaaaagacaggtttaactctgtgagatgaatgcgcacatcacaaagcatttctcagatagcttccttctagtttttatcctgggatatttgctttctctccattggcttcaatgagttttcaaatgtctattcacagaatggacaaaaacagtttttgaaaactgctatatcaaaagaaaggtttaactgtggaatgaatgcacacatcacaaatcagtttctcagaaagcttccacctagtttttatctgaaggtattttatttttcacygtctcaatgtactgtgaaacaacccttcagatattctacaaaaacagtgtttcagaactgctgaatgaaaagtacgttataactctgagagttgaatgcacaccaaacaaggcggtttttcagatagcttccttctagtttttatcctgagatattcactt

SEQ ID NO: 378042 - DNA, 475 bp, Homo sapiens
cattggcagaatggacaaaaacagtgtttccaaactcctgaatgaaaagacaggtttaactctgtgagatgaatgcgcacatcacaaagcatttctcagatagcttccttctagtttttatcctgggatatttgctttctctccattggcttcaatgagttttcaaatgtctattcacagaatggacaaaaacagtttttgaaaactgctatatcaaaagaaaggtttaactgtggaatgaatgcacacatcacaaatcagtttctcagaaagcttccacctagtttttatctgaaggtattttatttttcactgtctcaatgyactgtgaaacaacccttcagatattctacaaaaacagtgtttcagaactgctgaatgaaaagtacgttataactctgagagttgaatgcacaccaaacaaggcggtttttcagatagcttccttctagtttttatcctgagatattcactt

SEQ ID NO: 378043 - DNA, 569 bp, Homo sapiens
ttgcttttactccattggtcttactgagttcctaaaygtccattcacagaatggacaaaaatagtgtttccaaactacttaatgaaaagaaaggtttaactcggtgagatgaatgcacacatcacaaaggggtgtctcaggtagcttctttttagttgttatctgaagatacttgctttttcactataggctgctatgttctcccaaatacacttttgcagtttctacaaaaacagggtttccaaactcctgaatgaaaagaattgtttagctctgtgagatgaatgcacatatcagaaagcagtttctcagaaagcttctttctagtttttatctgaatatattttctttttcaccatagtacttaaagtgctcccaaatatccctttgcagattttacaaaaaccgtgtttcctaattgctgaatgcaaagaaaggcttatctctgccaggtgaatgcatacatcacaaggcagtttctcagatcatttccttctcgtttttatcctgggatatacacttttttaccattggcctcaatgagctgctaaatgtccattcagagagtg

SEQ ID NO: 378044 - DNA, 569 bp, Homo sapiens
ttgcttttactccattggtcttactgagttcctaaatgtccattcacagaatggacaaaaatagtgtttccaaactacttaatgaaaagaaaggtttaactcggtgagatgaatgcacacatcacaaaggggtgtctcaggtagcttctttttagttgttatctgaagatacttgctttttcactataggctgctatgttctcccaaatacacttttgcagtttctacaaaaacagggtttccaaactcctgaatgaaaagaaytgtttagctctgtgagatgaatgcacatatcagaaagcagtttctcagaaagcttctttctagtttttatctgaatatattttctttttcaccatagtacttaaagtgctcccaaatatccctttgcagattttacaaaaaccgtgtttcctaattgctgaatgcaaagaaaggcttatctctgccaggtgaatgcatacatcacaaggcagtttctcagatcatttccttctcgtttttatcctgggatatacacttttttaccattggcctcaatgagctgctaaatgtccattcagagagtg

SEQ ID NO: 378045 - DNA, 569 bp, Homo sapiens
ttgcttttactccattggtcttactgagttcctaaatgtccattcacagaatggacaaaaatagtgtttccaaactacttaatgaaaagaaaggtttaactcggtgagatgaatgcacacatcacaaaggggtgtctcaggtagcttctttttagttgttatctgaagatacttgctttttcactataggctgctatgttctcccaaatacacttttgcagtttctacaaaaacagggtttccaaactcctgaatgaaaagaattgtttagctctgtgagatgaatgcacmtatcagaaagcagtttctcagaaagcttctttctagtttttatctgaatatattttctttttcaccatagtacttaaagtgctcccaaatatccctttgcagattttacaaaaaccgtgtttcctaattgctgaatgcaaagaaaggcttatctctgccaggtgaatgcatacatcacaaggcagtttctcagatcatttccttctcgtttttatcctgggatatacacttttttaccattggcctcaatgagctgctaaatgtccattcagagagtg

SEQ ID NO: 378046 - DNA, 569 bp, Homo sapiens
ttgcttttactccattggtcttactgagttcctaaatgtccattcacagaatggacaaaaatagtgtttccaaactacttaatgaaaagaaaggtttaactcggtgagatgaatgcacacatcacaaaggggtgtctcaggtagcttctttttagttgttatctgaagatacttgctttttcactataggctgctatgttctcccaaatacacttttgcagtttctacaaaaacagggtttccaaactcctgaatgaaaagaattgtttagctctgtgagatgaatgcacatatcagaaagcagtttctcagaaagcttctttctagtttttatctgaatatattttctttttcaccatagtacttaaagtgctcccaaatatccctttgcagattttacaaaaaccgtgtttcctaattgctgaatgcaaagaaaggcttatctctgccaggtgaatgcatacatcacaaggcagtttctcagatcatttccttctmgtttttatcctgggatatacacttttttaccattggcctcaatgagctgctaaatgtccattcagagagtg

SEQ ID NO: 378047 - DNA, 363 bp, Homo sapiens
aaatgtttaaggggaaattatcaaacatcaatagrcaatttagtagagaaagggaaagtataattcagagggatactctgcatcaagtatattttttgacattccttatttgccaaatcaggaagcagagactttaatcaaagccattgacctgtatcaatcactgctgtgctcagttttaaatacagagtaggcattggaggctagttttagaaaaatagagttaagtattaaatttcatggatcttaccaaagtttaatattttgaaaaaaatgtctaatactatacttctataaaatagattttgtatttacttggtcttcacttggaaaatatcgaacaaaaaatcccaaaacaattcc

SEQ ID NO: 378048 - DNA, 363 bp, Homo sapiens
aaatgtttaaggggaaattatcaaacatcaataggcaatttagtagagaaagggaaagtataattcagagggatactctgcatcaagtatattttttgacattccttatttgccaaatcaggaagcagagactttaatcaaagccattgacctgtatcaatcactgctgtgctcagttttaaatacagagtaggcattggaggctagttttagaaaaatagagttaagtaytaaatttcatggatcttaccaaagtttaatattttgaaaaaaatgtctaatactatacttctataaaatagattttgtatttacttggtcttcacttggaaaatatcgaacaaaaaatcccaaaacaattcc

SEQ ID NO: 378049 - DNA, 363 bp, Homo sapiens
aaatgtttaaggggaaattatcaaacatcaataggcaatttagtagagaaagggaaagtataattcagagggatactctgcatcaagtatattttttgacattccttatttgccaaatcaggaagcagagactttaatcaaagccattgacctgtatcaatcactgctgtgctcagttttaaatacagagtaggcattggaggctagttttagaaaaatagagttaagtattaaatttcatggatcttaccaaagtttaatattttgaaaaaaatgtctaatactatacttctataaaatagattttgtatttacytggtcttcacttggaaaatatcgaacaaaaaatcccaaaacaattcc

SEQ ID NO: 378050 - DNA, 484 bp, Homo sapiens
taaaagcataatattactgtattaaattatgtgaataaacaatataaaatatatattgtgtgacattgataacaaagtgagaaggaggtgtaaagaagtagagtttttgtatgttattaaagttaagttgttgtcaatttaaaatagattattataactataagatgttttcatgtaattctacagtaaccacaaagaaaagacctacagaagatacacaaataaaaatgagaaaggaaccaaagcacgtccctaccaaaaaaagaaatcggtgaaacataaagggaggcagaaagagaggaaaagtggaaaaaaatacctgcaagacatgtataaaacartgaacaaaatgacaatagtaagcccctccctatcagtaactactttaaatgcaaataggctaattttccaatcaaaagacaaagaattggccgaatggattaaaaaaatctaaatatatactatatgcaagagacttatgtta

SEQ ID NO: 378051 - DNA, 571 bp, Homo sapiens
gaagtcatagccctcagaaatgggactagggcctttataaaagaggcttaagggagtttgttttcccttttgaacatgtgaggacacagagaaggtgctatgtatagtgaatgtagtgacctcaccggtcactgagtctgttgtagcctaaatcttggacttttcacactccagaatgcaagaaataaatttctgttgtttataaattaccagcctaaggtattttgttatagcagcagaaatggactaagatagacttgaatagacattttttccaaaaaaaaaaaaaaatacaaatggccaactagcatatcaacccaacactacgtggaagctgccaagccttggggattgaactctgaagcaatagcctgagctgtacgttggctccttttagccatggctgggacacagggcaccaagtcccaagactgcacagagcagcaaagttctgggcctggcccacataaccattttttccctcctaggcctccaaccctgtgacaggaggggctgtcgtgaagaactctgacatgmcctggagaaaatttccccattatcttgtcaatta

SEQ ID NO: 378052 - DNA, 549 bp, Homo sapiens
gctgagggtcctgactgttagaaggaaaactaaaaaacagaaaggaatagtgtcaacattaacaaaagatcatctacaccaaaaccccatctgtaggtcaacaatatcaaagaccaaaggtagataaaaccaaaaggatggggataaaccagagcagaaaagctgaaaattctaaaaatcagagcacctcttcgcctccaaaggatcaccactccttgtcagcaatggaacaaagctggacagagaatgactttgaygagttgacagaagtaggcttcagaaagttggtaataacaaacttctccgagctaaaggaggatgttggaacccattgcaaggaagttaaaaaccttgaaaaagattagacgaatggcttacaagaataaacagtgtagagaagaccttaagtgacccaatggagctgaaaaccatggcacaagaactttatgactcatgcacaagcttcaatagccgattcaatcaagtggaagaaagggtatcagtgattgaagtcaaataaatgaaataaagtgagaagacaaggttaga

SEQ ID NO: 378053 - DNA, 549 bp, Homo sapiens
gctgagggtcctgactgttagaaggaaaactaaaaaacagaaaggaatagtgtcaacattaacaaaagatcatctacaccaaaaccccatctgtaggtcaacaatatcaaagaccaaaggtagataaaaccaaaaggatggggataaaccagagcagaaaagctgaaaattctaaaaatcagagcacctcttcgcctccaaaggatcaccactccttgtcagcaatggaacaaagctggacagagaatgactttgatgagttgacagaagtaggcttcagaargttggtaataacaaacttctccgagctaaaggaggatgttggaacccattgcaaggaagttaaaaaccttgaaaaagattagacgaatggcttacaagaataaacagtgtagagaagaccttaagtgacccaatggagctgaaaaccatggcacaagaactttatgactcatgcacaagcttcaatagccgattcaatcaagtggaagaaagggtatcagtgattgaagtcaaataaatgaaataaagtgagaagacaaggttaga

SEQ ID NO: 378054 - DNA, 555 bp, Homo sapiens
ggcaaaatgccaccattctctttgctaaagcatagcaggagtgacctttacttcagttcccaacaagttgttcatctccatctctgacctcctcagcctggacttcactgtccaagtcactatcagcagtttggtcaaagccattcaacaagtctctaggcagttccaaactttcccacatcttctggtcttcttctgagtcctctcaactgttccaaactctgcacattacacagttccaaagtcacttccacattctcaggtatcttatagcaatactccattacctcagtatcaaaatctgtactagtcatggttctctagagggatagaactagtaggagatatatakatatatatatatatatatatatatatatatatatatatatatatatatatatatatatatgaaagggagtttattaaggagaattgaatcacaccatcacaaagtgaagtcctacaacaggccgtctgcaagttgaggagcaaggaatctagtattggcttagtccgagtcccaacacctcaaaagtagggaaaccgacaggc

SEQ ID NO: 378055 - DNA, 557 bp, Homo sapiens
tttgttcttagatactttatgtttttaattgatgttgtggattaaattctctttgatcacttattcctggggaagccagctgccatgtcctgaggcagccctgtggagaaaaccccattggaaaaaactgaagcctgcaatggctacatgagtaaacttggaagcagatcttctccaccccaccctacctcatgggaaawcttaagtcaaggcatacagctaagccatgcccagattcctgacccacagaagcataagacaataaatatttgttgttttaagctgctatgtttggggatgacttgttaagcaaaatgagaaaaataatacaacaggtgattacaatgtgcagcagagttcaggaaccactgaactagaccagtatgtggtcttagagaagtctagtctcttcttgagcccacagggaaatctgtagcataaactgtgccatagagttgtacagccggaagcaaatctcacatcagtccgtcattggcagatgctgcctggagggaaagtagaggggtgcacaacctctctagtattcccaggtaggt

SEQ ID NO: 378056 - DNA, 598 bp, Homo sapiens
aaataccaatattaactgtgaatgtaaacagtataaatgccctgcttaaaactcacagaatggcaagttggataaagaagcaaagcccaactgtatctgttgtcaagagacccagctcatatgcaacaatacccmttggcttgaagtaaaaggatggaaaaaaatctaccaagcaaatgcaaaacaaaaaagggtaagcattgttattctaattcagacaaaatagactttaaaccaacaacaatcaaaaagacaaagaagggcactatgtaatgataaagggttcaattcaacaagaagacttaactgtctgaaagataaatgtgctcaaaactggagcattcacatttgtaaaacaagttcatagagacctatagagagacttagataaccacagaataatagtgggagacttcaacatctcactgatggtactagacagatcatagagacagaaaatgcacaaagatattcaggacttgaagtcaacatttggctaaatggacctaacagccatctacagaacactccacccaacaacaacagaatatatcttcttctcatctgtacatggcatatattgtaaaattgatcacac

SEQ ID NO: 378057 - DNA, 598 bp, Homo sapiens
aaataccaatattaactgtgaatgtaaacagtataaatgccctgcttaaaactcacagaatggcaagttggataaagaagcaaagcccaactgtatctgttgtcaagagacccagctcatatgcaacaatacccattggcttgaagtaaaaggatggaaaaaaatctaccaagcaaatgcaaaacaaaaaagggtaagcattgttattctaatwcagacaaaatagactttaaaccaacaacaatcaaaaagacaaagaagggcactatgtaatgataaagggttcaattcaacaagaagacttaactgtctgaaagataaatgtgctcaaaactggagcattcacatttgtaaaacaagttcatagagacctatagagagacttagataaccacagaataatagtgggagacttcaacatctcactgatggtactagacagatcatagagacagaaaatgcacaaagatattcaggacttgaagtcaacatttggctaaatggacctaacagccatctacagaacactccacccaacaacaacagaatatatcttcttctcatctgtacatggcatatattgtaaaattgatcacac

SEQ ID NO: 378058 - DNA, 598 bp, Homo sapiens
aaataccaatattaactgtgaatgtaaacagtataaatgccctgcttaaaactcacagaatggcaagttggataaagaagcaaagcccaactgtatctgttgtcaagagacccagctcatatgcaacaatacccattggcttgaagtaaaaggatggaaaaaaatctaccaagcaaatgcaaaacaaaaaagggtaagcattgttattctaattcagacaaaatagactttaaaccaacaacaatcaaaragacaaagaagggcactatgtaatgataaagggttcaattcaacaagaagacttaactgtctgaaagataaatgtgctcaaaactggagcattcacatttgtaaaacaagttcatagagacctatagagagacttagataaccacagaataatagtgggagacttcaacatctcactgatggtactagacagatcatagagacagaaaatgcacaaagatattcaggacttgaagtcaacatttggctaaatggacctaacagccatctacagaacactccacccaacaacaacagaatatatcttcttctcatctgtacatggcatatattgtaaaattgatcacac

SEQ ID NO: 378059 - DNA, 598 bp, Homo sapiens
aaataccaatattaactgtgaatgtaaacagtataaatgccctgcttaaaactcacagaatggcaagttggataaagaagcaaagcccaactgtatctgttgtcaagagacccagctcatatgcaacaatacccattggcttgaagtaaaaggatggaaaaaaatctaccaagcaaatgcaaaacaaaaaagggtaagcattgttattctaattcagacaaaatagactttaaaccaacaacaatcaaaaagacaaagaagggyactatgtaatgataaagggttcaattcaacaagaagacttaactgtctgaaagataaatgtgctcaaaactggagcattcacatttgtaaaacaagttcatagagacctatagagagacttagataaccacagaataatagtgggagacttcaacatctcactgatggtactagacagatcatagagacagaaaatgcacaaagatattcaggacttgaagtcaacatttggctaaatggacctaacagccatctacagaacactccacccaacaacaacagaatatatcttcttctcatctgtacatggcatatattgtaaaattgatcacac

SEQ ID NO: 378060 - DNA, 557 bp, Homo sapiens
tttgttcttagatactttatgtttttaattgatgttgtggattaaattctctttgatcacttattcctggggaagccagctgccatgtcctgaggcagccctgtggagaaaaccccattggaaaaaactgaagcctgcaatggctacatgagtaaacttggaagcagatcttctccaccccaccctacctcatgggaaaacttaagtcaaggcatacagctaagccatgcccagattcctgacccacagaagcataagacaataaatatttgttgttttaagctgctatgtttggggatgacttgttaagcaaaatgagaaaaataatacaacaggtgattacaatgtgcagcagagttcaggaaccactgaactagaccagtatgtggtcttagagaagtctagtctcttcttgagcccacagggaaatctgtagcataaactgtgccatagagttgtacagccggaagcaaatctcacatcagtccgtcattggcagatgctgyctggagggaaagtagaggggtgcacaacctctctagtattcccaggtaggt

SEQ ID NO: 378061 - DNA, 557 bp, Homo sapiens
tttgttcttagatactttatgtttttaattgatgttgtggattaaattctctttgatcacttattcctggggaagccagctgccatgtcctgaggcagccctgtggagaaaaccccattggaaaaaactgaagcctgcaatggctacatgagtaaacttggaagcagatcttctccaccccaccctacctcatgggaaaacttaagtcaaggcatacagctaagccatgcccagattcctgacccacagaagcataagacaataaatatttgttgttttaagctgctatgtttggggatgacttgttaagcaaaatgagaaaaataatacaacaggtgattacaatgtgcagcagagttcaggaaccactgaactagaccagtatgtggtcttagagaagtctagtctcttcttgagcccacagggaaatctgtagcataaactgtgccatagagttgtacagccggaagcaaatctcacatcagtccgtcattggcagatgctgcctggagggaaagtagaggggtgcrcaacctctctagtattcccaggtaggt

SEQ ID NO: 378062 - DNA, 587 bp, Homo sapiens
tttacaaactatgcacccagcaaagtactaatatccagaatctataaggaactcaaaaacagacatagaccagtggaacaagttacagaacgcagaaataaagccacacacctatagccatctactcttcaacaaacttgacaaaaacaagcaatggggaagggaatccctacttggaaattgtggtgggataactggctagccgtatgcagaaaattgaaactggactccatacktttcactgtttacaaaaatcaactcaaggtagattaaagacttaagtgtaaaacccaaaactataaaaaccctggaagatagcctaagaaataccattctggatacaggccattctggacatatcctaggaaatttcaattctggaaaacactttatgacaaagatgccaaaagcaattgcaacaaaaacaaaaattgacaaatgggacctaattaaactaaagggcttctgcacagcaaaagatatcatcaacaaacaacctatggaatggaagaaaatatttgcaaaccatgcattcgacaaaagtctgatatccagaatccaaaaagaacttagaaaaatcaacaagc

SEQ ID NO: 378063 - DNA, 524 bp, Homo sapiens
gtgggagctaaacactgagtacacatggacagaaagaagggaacaatcgtcactaggtgaatttgagggtggagggtggaaggagggggagaatagaaaaactacctattgggtattatacttacaacctgggtgacaaaataatctgcataccaaayccctgtgacatgcaatttatccatataacaagcctgctcatgtaccccttgagccaaaataaaaattggagaagaaaaaaactcctaagagttgtcactttgggtagagttacaggcattatgatttgaaggcatagtttaaggtcattcctcctttatttataaagttctaatttttaaaataaaagtgcatttgagtatttaatcataaacattaatttaaaaattcactggattttgtagtaactatgtaatggatgaactttgctatgagtgtcattggaatggataagcagagacaaaagttgatgaattaagaaatgaaaaggagttaggatctagagacagtagttatagacttatttt

SEQ ID NO: 378064 - DNA, 524 bp, Homo sapiens
gtgggagctaaacactgagtacacatggacagaaagaagggaacaatcgtcactaggtgaatttgagggtggagggtggaaggagggggagaatagaaaaactacctattgggtattatacttacaacctgggtgacaaaataatctgcataccaaatccctgtgacatgcaatttatccatataacaagcctgctcatgtaccccttgagccaaaataaaaattggagaagaaaaaaactcctaagagttgtcactttgggtagagttacrggcattatgatttgaaggcatagtttaaggtcattcctcctttatttataaagttctaatttttaaaataaaagtgcatttgagtatttaatcataaacattaatttaaaaattcactggattttgtagtaactatgtaatggatgaactttgctatgagtgtcattggaatggataagcagagacaaaagttgatgaattaagaaatgaaaaggagttaggatctagagacagtagttatagacttatttt

SEQ ID NO: 378065 - DNA, 524 bp, Homo sapiens
gtgggagctaaacactgagtacacatggacagaaagaagggaacaatcgtcactaggtgaatttgagggtggagggtggaaggagggggagaatagaaaaactacctattgggtattatacttacaacctgggtgacaaaataatctgcataccaaatccctgtgacatgcaatttatccatataacaagcctgctcatgtaccccttgagccaaaataaaaattggagaagaaaaaaactcctaagagttgtcactttgggtagagttacaggcattatgatttgaaggcatagtttaaggtcattcctcctttatttataaagttctaatttttaaaataaaagtgcatttgagtatttaatcataaacattaatttaaaaattcactggattttgtagtaactatgtaatggatgaactttgctatgagtgtcattggaatggataagcagagacaaaagttgmtgaattaagaaatgaaaaggagttaggatctagagacagtagttatagacttatttt

SEQ ID NO: 378066 - DNA, 423 bp, Homo sapiens
agatgggatttatgatccctagcatgtaatattttaagaaatgctttaaaagattagattttacaataatgcaaagataatcaggaacataatcctgtagagaaaacgtcataaaaaattactgaaatccttaatctccctaaaaaaagaaaaagaattgtataargtttttcttataaaacgtttgttttgttttttttttgagacggagtctcactctgtcccccaggctggattgcagtggcactatctcagctcactgcaacctctgtcactcaggttcaagcgattctcttgcctcagcctcccgagtagctgggattaccaggtaaatgccaccatgcacggctaatttttgtagattacaggcatgagccatcatgcccggcctttttttctttatcttaggtttgtttacagact

SEQ ID NO: 378067 - DNA, 649 bp, Homo sapiens
gagggaggagaatgagcttggtgggccagatcatagaaaggtctccccccactttggcaaagtaaggcaccatgggaaggttttaggcaggaagtaatataatgagtcttgcgatttttatatgagggtcttggtgaattagttagggataaaactggagacagagaccaaattgaaggctccgtcacagtccacgcaaaagttggaaacaaatagcctaagctagagcaaaagagaaagtttggagaggaggaaaatgattcaataaatacttagaaggtgctgyaagaaaactgtggatacagaagggacagcagggataagatgtagagattatctctactgacagtgtactgaatatatatttatttttggggacagggtctcattctgttgcccaaggtgagtgcagtgatgcaaacatggctcactgtaggcttaacctcctgaggtcaagtgatcctcttgccttagcctcctgagtagctgagacccagaaaaatttttaatattttgtaaagacaaggtctgctatgttgcccaggctggttttgaactcctgggatcaggtgatcctcctgccttggcctcccaaactgctgggattatgggcatgagtcaccatgcctggcccactgtactgaatatt

SEQ ID NO: 378068 - DNA, 649 bp, Homo sapiens
gagggaggagaatgagcttggtgggccagatcatagaaaggtctccccccactttggcaaagtaaggcaccatgggaaggttttaggcaggaagtaatataatgagtcttgcgatttttatatgagggtcttggtgaattagttagggataaaactggagacagagaccaaattgaaggctccgtcacagtccacgcaaaagttggaaacaaatagcctaagctagagcaaaagagaaagtttggagaggaggaaaatgattcaataaatacttagaaggtgctgcaagaaaactgtggatacagaagggacmgcagggataagatgtagagattatctctactgacagtgtactgaatatatatttatttttggggacagggtctcattctgttgcccaaggtgagtgcagtgatgcaaacatggctcactgtaggcttaacctcctgaggtcaagtgatcctcttgccttagcctcctgagtagctgagacccagaaaaatttttaatattttgtaaagacaaggtctgctatgttgcccaggctggttttgaactcctgggatcaggtgatcctcctgccttggcctcccaaactgctgggattatgggcatgagtcaccatgcctggcccactgtactgaatatt

SEQ ID NO: 378069 - DNA, 649 bp, Homo sapiens
gagggaggagaatgagcttggtgggccagatcatagaaaggtctccccccactttggcaaagtaaggcaccatgggaaggttttaggcaggaagtaatataatgagtcttgcgatttttatatgagggtcttggtgaattagttagggataaaactggagacagagaccaaattgaaggctccgtcacagtccacgcaaaagttggaaacaaatagcctaagctagagcaaaagagaaagtttggagaggaggaaaatgattcaataaatacttagaaggtgctgcaagaaaactgtggatacagaagggacagcagggataagatgtagagattatctctactgacagtgtactgaatatatatttatttttggggacagggtctcattctgttgcccaaggtgagtgcagtgatgcaaacatggctcactgtaggcttaacctcctgagstcaagtgatcctcttgccttagcctcctgagtagctgagacccagaaaaatttttaatattttgtaaagacaaggtctgctatgttgcccaggctggttttgaactcctgggatcaggtgatcctcctgccttggcctcccaaactgctgggattatgggcatgagtcaccatgcctggcccactgtactgaatatt

SEQ ID NO: 378070 - DNA, 649 bp, Homo sapiens
gagggaggagaatgagcttggtgggccagatcatagaaaggtctccccccactttggcaaagtaaggcaccatgggaaggttttaggcaggaagtaatataatgagtcttgcgatttttatatgagggtcttggtgaattagttagggataaaactggagacagagaccaaattgaaggctccgtcacagtccacgcaaaagttggaaacaaatagcctaagctagagcaaaagagaaagtttggagaggaggaaaatgattcaataaatacttagaaggtgctgcaagaaaactgtggatacagaagggacagcagggataagatgtagagattatctctactgacagtgtactgaatatatatttatttttggggacagggtctcattctgttgcccaaggtgagtgcagtgatgcaaacatggctcactgtaggcttaacctcctgaggtcaagtgatcctcttgccttagcctcctgagtagctgagacccagaaaaatttttaatattttgtaaagacaaggtctgctatgttgcccaggctggttttgaactcctgggatcaggtgatcctcctgccttggcctcccaaactgctgggattatgggcatgagycaccatgcctggcccactgtactgaatatt

SEQ ID NO: 378071 - DNA, 452 bp, Homo sapiens
ccaaatagcaatctaggcaaagctgaagagagaacacagcaaagtagtagatatgaggaaattatttaagagcatagcacacacacaaaaaaaygaggtggaaaatgagagatttagattatggaaaagatctaaaacacaactaatggtagtttcagaaacatccattgaaagaatgaagaagatataatatttgagaagaaaactggcttcaaattttacagaattgattagggtttttattgatttggacacaggaagtcaaatgagttctaatcatgattaagtaaaaatagatacttagataaaatgttgagaaactatagactaccaaaggcaaaaataaaatcttaaataatctagacagagaaagagagattaatcataattgaataaacaatagagcagattctcaattcttagcaacaatagaagttggaagataattaaat

SEQ ID NO: 378072 - DNA, 324 bp, Homo sapiens
atcgtgactggtctaagttttactttctaaaaattatattaaaatttatatttctctattatctaatcataaattatatcaaatatkctgttttgaattttatttttccctttaaacgtaaagacacacattcagttcattgtgctagataaattaccagtgtgatcacaaattaagaaatgcaattcaaagaattttgcatacaaggagtcctgaaagtgttaataatttttgatgcaaagataattttatgaaagtaatagaagactaaaaaaaggtacaaaacaattattatgtaagtatcttcctttttctgaatcaccc

SEQ ID NO: 378073 - DNA, 324 bp, Homo sapiens
atcgtgactggtctaagttttactttctaaaaattatattaaaatttatatttctctattatctaatcataaattatatcaaatatgctgttttgaattttatttttccctttaaacrtaaagacacacattcagttcattgtgctagataaattaccagtgtgatcacaaattaagaaatgcaattcaaagaattttgcatacaaggagtcctgaaagtgttaataatttttgatgcaaagataattttatgaaagtaatagaagactaaaaaaaggtacaaaacaattattatgtaagtatcttcctttttctgaatcaccc

SEQ ID NO: 378074 - DNA, 324 bp, Homo sapiens
atcgtgactggtctaagttttactttctaaaaattatattaaaatttatatttctctattatctaatcataaattatatcaaatatgctgttttgaattttatttttccctttaaacgtaaagacacacattcagttcattgtgctagataaattaccagtgtgatcacaaattaagaaatgcaattcaaagaattttgcatacaaggagtcctgaaagtgttaataatttttgatgcaaagataattttatgaaagtaatagaagactaaaaaaasgtacaaaacaattattatgtaagtatcttcctttttctgaatcaccc

SEQ ID NO: 378075 - DNA, 237 bp, Homo sapiens
caatcacatcctgattgtaggtgatactgtgtatttcattcaacaactgctaagggagagggaggtaggaatccctcttgagcagtcactggagaccacaaaagccattaaggagaaatactgttacwtttgccctgatatagtcaaggaatttgctaagtatgatgtggatccctggaagtggatcaaacagtacacaggtatcaatgtgatcaaccaggagaagttcataataga

SEQ ID NO: 378076 - DNA, 405 bp, Homo sapiens
cctttctcaggatctgggatgttaattcagaaactcttgactgctggaggctgtgattgacccactgagagcttttaggcatgtggatgtgagtcagccaggattgatggagcattgactgctaattggactcctctgggaaggtagaggggggcaacacataatgccttcgctgtgggagcttcatcaaggggatgattcttggaaggacatcttttcctccctctttccacaggggcatgctagccctgtcattctaggagtttattatccttcagacacagctacttatgtttttaattccctcacagratgaagacatgaagagaaagtttcaagatcttctgtctgaggaaaatgaatccacagctctatctcaggttctagcccaggtattcgtattcc

SEQ ID NO: 378077 - DNA, 652 bp, Homo sapiens
ttgtccttttaaattgagcaatcaaaatttagtaagggactacttaaacatcccttggctgccaaacacattcctgtctacttccgttgtgtaacagcattgaattgcagagataagaagcagaaatttcccaagtgaatycctgggggtgacggtaaatagtgctactctttctttaatccatggtcctctttctattagcgacatgggaccatataatggttactgatctaggatatatgcttgtatcccatccctgcagcttcaaagggctactggagtctgttccatcactccatcagtttgacagcttctagttgttgtgatttcgtgatttgtattaggatcactgaaatgcattttcatgtgtccaccactgcaactgcagtgctacaaagtacattccctttatacagtgctataaagtacaatgcaaggatgtgtaggattccatattggaggattaaacattctgtcaatccttggatagtggtgctggttgaggccatgtaagtaggaaagataaatccatactcagaataagtatcagttccagccaagatgaatcattacccttcctgtgatggaaagaatccagtgcattcagcttgccaccatgtggctacttagtgtccttgagggatgatgctat

SEQ ID NO: 378078 - DNA, 652 bp, Homo sapiens
ttgtccttttaaattgagcaatcaaaatttagtaagggactacttaaacatcccttggctgccaaacacattcctgtctacttccgttgtgtaacagcattgaattgcagagataagaagcagaaatttcccaagtgaatccctgggggtgacggtaaatagtgctactctttcttyaatccatggtcctctttctattagcgacatgggaccatataatggttactgatctaggatatatgcttgtatcccatccctgcagcttcaaagggctactggagtctgttccatcactccatcagtttgacagcttctagttgttgtgatttcgtgatttgtattaggatcactgaaatgcattttcatgtgtccaccactgcaactgcagtgctacaaagtacattccctttatacagtgctataaagtacaatgcaaggatgtgtaggattccatattggaggattaaacattctgtcaatccttggatagtggtgctggttgaggccatgtaagtaggaaagataaatccatactcagaataagtatcagttccagccaagatgaatcattacccttcctgtgatggaaagaatccagtgcattcagcttgccaccatgtggctacttagtgtccttgagggatgatgctat

SEQ ID NO: 378079 - DNA, 652 bp, Homo sapiens
ttgtccttttaaattgagcaatcaaaatttagtaagggactacttaaacatcccttggctgccaaacacattcctgtctacttccgttgtgtaacagcattgaattgcagagataagaagcagaaatttcccaagtgaatccctgggggtgacggtaaatagtgctactctttctttaatccatggtcctctttctattagcgacatgggaccatataatggttactgatctaggatatatgcttgtatcccatccctgcagcttcaaagggctactggagtctgttccatcactccatcagtttgacagcttctagttgttgtgatttcgtgatttgtattaggatcactgaaatgcattttcatgtgtccaccactgcaactgcagtgctacaaagtacattccctttatacagtgctataaagtacaatgcaaggatgtgtaggattccatattggaggattaaacattctgtcaayccttggatagtggtgctggttgaggccatgtaagtaggaaagataaatccatactcagaataagtatcagttccagccaagatgaatcattacccttcctgtgatggaaagaatccagtgcattcagcttgccaccatgtggctacttagtgtccttgagggatgatgctat

SEQ ID NO: 378080 - DNA, 531 bp, Homo sapiens
tgccaacagtatacaaaggctcccttttctccacatcctcgccaacacatgttatcttttgtctttttcatagtagccattctaaaagggatgtctcattgtggttttgatttgtgtttcyctgatgactggtgatgttggttattttttcatattcctgttggccatttgtatgtcttctttggaaaaatgtttattcagatactttgcctccctttcattaatcaggttatatgttttcatgctattgagttgtatgaatgctttatatattctggatattaatcctttatcagatgtatggcttgcaaatattttctccctttttgtaggctatctctttactctattgattgctccctttgcttgcacagctttttagtttgatataatcccgcttgtctatttttgcttttgttgcctgtgctttgggggtcatatccagaaaatcattgcccagaccagtctcatggagcttttcctgaatgttttcttctagtagatttatggtttcaggttttatatttaagt

SEQ ID NO: 378081 - DNA, 531 bp, Homo sapiens
tgccaacagtatacaaaggctcccttttctccacatcctcgccaacacatgttatcttttgtctttttcatagtagccattctaaaagggatgtctcattgtggttttgatttgtgtttctctgatgactggtgatgttggttattttttcatattcctgttggccatttgtatgtcttctttggaaaaatgtttattcagatactttgcctccctttcattaatcaggttatatgttttcatgctattgagttgtatgaatgctttatatattctggatattaatcctttatcagatgtatggyttgcaaatattttctccctttttgtaggctatctctttactctattgattgctccctttgcttgcacagctttttagtttgatataatcccgcttgtctatttttgcttttgttgcctgtgctttgggggtcatatccagaaaatcattgcccagaccagtctcatggagcttttcctgaatgttttcttctagtagatttatggtttcaggttttatatttaagt

SEQ ID NO: 378082 - DNA, 617 bp, Homo sapiens
aatttactagttccaacagttttttttggtggactctttagggttttctacatttaagatcatgttgtctgcagagacaatttcacttcttcctttctgactttaatgcctttatttcttcttcttggctaattgctagaacttgaatagaagtggtgaaaatgggcatccatcttgtttctgatcttagagaaaaagctttcaactttttaccattgagtatgatgttagctgtgggcctatcatatatgcctttattgtgttatatggatattgatacctaatttgttgaaagtttttattacagaaagatgttgaattttgtcaaatgctttctctgcatccatggagatattcatatagtttttgtccttcattctgttaatgtgtatatcacatttattgattcrtatatgttgaaccgtcgttgggaggatttaatctactgctatctttccatagctgaagtaggttgctatcattttttacttacatccgcatcctgagttgatcttccaatgaacaagcttagctttttccctcctttagcaatattggaactcccacataggcagagttgccagctgagggagagaatctattgtcacaatttggat

SEQ ID NO: 378083 - DNA, 617 bp, Homo sapiens
aatttactagttccaacagttttttttggtggactctttagggttttctacatttaagatcatgttgtctgcagagacaatttcacttcttcctttctgactttaatgcctttatttcttcttcttggctaattgctagaacttgaatagaagtggtgaaaatgggcatccatcttgtttctgatcttagagaaaaagctttcaactttttaccattgagtatgatgttagctgtgggcctatcatatatgcctttattgtgttatatggatattgatacctaatttgttgaaagtttttattacagaaagatgttgaattttgtcaaatgctttctctgcatccatggagatattcatatagtttttgtccttcattctgttaatgtgtatatcacatttattgattcatatatgttgaaccgtcsttgggaggatttaatctactgctatctttccatagctgaagtaggttgctatcattttttacttacatccgcatcctgagttgatcttccaatgaacaagcttagctttttccctcctttagcaatattggaactcccacataggcagagttgccagctgagggagagaatctattgtcacaatttggat

SEQ ID NO: 378084 - DNA, 338 bp, Homo sapiens
ctttattgtgttatatggatattgatacctaatttgttgaaagtttttattacagaaagatgttgaattttgtcaaatgctttctctgcatccatggagatattcatatagtttttgtccttcattctgttaatgtgtatatcacatttattgattcatatatgttgaaccgtcgttgggaggatttaatctactgctatctttccatagctgaagtaggttgctatcatwttttacttacatccgcatcctgagttgatcttccaatgaacaagcttagctttttccctcctttagcaatattggaactcccacataggcagagttgccagctgagg

SEQ ID NO: 378085 - DNA, 338 bp, Homo sapiens
ctttattgtgttatatggatattgatacctaatttgttgaaagtttttattacagaaagatgttgaattttgtcaaatgctttctctgcatccatggagatattcatatagtttttgtccttcattctgttaatgtgtatatcacatttattgattcatatatgttgaaccgtcgttgggaggatttaatctactgctatctttccatagctgaagtaggttgctatcattttttacttacatccgcatcctgagttgatcttccaatgaacaagcttagctttttycctcctttagcaatattggaactcccacataggcagagttgccagctgagg

SEQ ID NO: 378086 - DNA, 555 bp, Homo sapiens
  misc_feature (1)...(555): n = A,T,C or G
tttgttgtcagataatccatctctacctaggtgcagtagcatgctaggagctattaaagtacacaattatgctatatatttatacaatatacaattacttgcagagagmatgaccatgctagtgaaccccacaagactatgtgtgaatcgtctattagggtttgctataaactctacatggtgctttttccaactgcatatacttctaataccatagagcctactagagtgtatggctcaaacagtagggctgcttgccctgtatcctggacctgctgcagaggccttttctgccctaagcttttgtcaaaggtggaagccttctgtgtcactcagcaaatgtgtcagaacagtattccttagtatagggggaccaatgggccccctaaaatcttctgcgactgatgtcacaggtccttaaatcttcagatgattttctctctcagggatgcatgtgtctcactaggccatccaacatgctatttcttacccagtctattttaactggtnnnnnnnnnnnnnnnnnnnnnnnnnnnnnnnnnnnnnnnnnnnnnn

SEQ ID NO: 378087 - DNA, 555 bp, Homo sapiens
  misc_feature (1)...(555): n = A,T,C or G
tttgttgtcagataatccatctctacctaggtgcagtagcatgctaggagctattaaagtacacaattatgctatatatttatacaatatacaattacttgcagagagcatgaccatgcyagtgaaccccacaagactatgtgtgaatcgtctattagggtttgctataaactctacatggtgctttttccaactgcatatacttctaataccatagagcctactagagtgtatggctcaaacagtagggctgcttgccctgtatcctggacctgctgcagaggccttttctgccctaagcttttgtcaaaggtggaagccttctgtgtcactcagcaaatgtgtcagaacagtattccttagtatagggggaccaatgggccccctaaaatcttctgcgactgatgtcacaggtccttaaatcttcagatgattttctctctcagggatgcatgtgtctcactaggccatccaacatgctatttcttacccagtctattttaactggtnnnnnnnnnnnnnnnnnnnnnnnnnnnnnnnnnnnnnnnnnnnnnn

SEQ ID NO: 378088 - DNA, 599 bp, Homo sapiens
agtcatttgtacaaggtcactagcctggttgaagcaaaaatagaattcaaacccagtttgctagattccaagcctgctgtcagttctgctataacccagtgccccctgaataaggacaacaatgagaagaagggcaacaaatcctagagaaccagaagaaaacttaatattttattwtgtcttcttgtagtcaaaatccactggtacacgataaaggcaactaagcaaaaccagtttcgttagaactcctggtgttatgagggcaacactcaaaagagatatttgaatagaggaacactgagaggacaagagtgcaaaatcagccgaaaaatgtttgcatgctgatttgtcactattgtactcttcctccacatatatttgctaggaagaacatggaactgatgagtaacttatgaaaattactgagtactttttttttctaatagtctagtactagattttgtttattttaacagagccatttacattatatattaactcagtttaatattgttctttatgccccatttttacccctaaatgtaggctgagttaggtcctctggctctagaacagcacagtctccgcaccccacttgg

SEQ ID NO: 378089 - DNA, 599 bp, Homo sapiens
agtcatttgtacaaggtcactagcctggttgaagcaaaaatagaattcaaacccagtttgctagattccaagcctgctgtcagttctgctataacccagtgccccctgaataaggacaacaatgagaagaagggcaacaaatcctagagaaccagaagaaaacttaatattttattttgtcttcttgtagtcaaaatccactggtacacgataaaggcaactaagcaaaaccagtttcgttagaactcctggtgttatgagggcaacactcaaaagagatatttgaatagaggaacactgagaggacaagagtgcaaaatcagccsaaaaatgtttgcatgctgatttgtcactattgtactcttcctccacatatatttgctaggaagaacatggaactgatgagtaacttatgaaaattactgagtactttttttttctaatagtctagtactagattttgtttattttaacagagccatttacattatatattaactcagtttaatattgttctttatgccccatttttacccctaaatgtaggctgagttaggtcctctggctctagaacagcacagtctccgcaccccacttgg

SEQ ID NO: 378090 - DNA, 438 bp, Homo sapiens
cttgatcttttcaaatttgcacacaagttccatctgccattctactttttttctgagcttgaccaacatcaatttrttttccattgagcttctttctgttcatctcatctgcgcatctttatgcctttcaaagctgacaaatccaaaacctttgggttttccactttcattaaccactactatcacacttaagacagatcccaacttgccaaagagatctttaaggcacctaccatccatgtcttctccaaaaatcttcctgtaaacattggtgaactttttaactctgagttctgcttctcattgtttacaagacttaatccaacaaagactttgctatcatttagaagcatccatttcatttttgaatagatctttcagctgcttctgtgtctcaaaatgtacaatgccatcacccttgaaactgttttcaccaca

SEQ ID NO: 378091 - DNA, 438 bp, Homo sapiens
cttgatcttttcaaatttgcacacaagttccatctgccattctactttttttctgagcttgaccaacatcaatttgytttccattgagcttctttctgttcatctcatctgcgcatctttatgcctttcaaagctgacaaatccaaaacctttgggttttccactttcattaaccactactatcacacttaagacagatcccaacttgccaaagagatctttaaggcacctaccatccatgtcttctccaaaaatcttcctgtaaacattggtgaactttttaactctgagttctgcttctcattgtttacaagacttaatccaacaaagactttgctatcatttagaagcatccatttcatttttgaatagatctttcagctgcttctgtgtctcaaaatgtacaatgccatcacccttgaaactgttttcaccaca

SEQ ID NO: 378092 - DNA, 580 bp, Homo sapiens
gaaatcttatatttatttccttagataactcagggaagatattcagggctgtycctggtttaaaaaagaaagagcacacagtgtaaaggaagagcaatatgaaaatatgacactgtatcaacatgtgtttctgaagaaggtccttgtagccattcaaagatatattgtaaataaaaataaatgcatttataattttcttaaatatttttgaatttcatattttttgtgctctatttattcttaccaacaatatttgattcaagcgatgaaacagatacttctgctccaactaaaccaaaaagaagtggttgaaaaatatcccatacatttgtaataatcttttggactttcatctatagaaaagagaaatacatttataattattttggcacataaatatatttcagaaagttaagttctccctcacctttttttttttcactttttaagtattttagagatggggtcttgttctgttgcccaggctggagtgtagtggcataatcttagctcactgtagccttgaactcctgggctcaagtgatcctctcgcagtctcccaagtagaactacaggtgtg

SEQ ID NO: 378093 - DNA, 580 bp, Homo sapiens
gtagagtattagaacagagaatggggasagtcttcccagagtcccagaagtacggggctgaggctggattgcccaaggagttcctggaccagtaatccccagagaaacagcatttagctcaagtaacagcctttagctcaagctacgagttctgtcccccatctccacagaaaacggattgatacagtttggctttatgtccctacccaaatctcatctcaaattgtattatcctggtggtgagaaagggaactgttgagaggtgattgtctcatgggggcagttccccccaggctattctcatgatagtgagttctcatgagatctgacagtttcataaaaggctcttcgcccttcacttccttcacaagctctctcacctgctgccattaagacacgccttcttccccttccaccatgattgtaagtttcctgaggcctccccagccatgtggagctgtgagtcaattaaacctcctttctttataaattacccagtcttgggcagttctttatagcagtgtgagaacagactaatacacagaccaaaagaaaattaatagaaaggggcatggctgtg

SEQ ID NO: 378094 - DNA, 580 bp, Homo sapiens
gtagagtattagaacagagaatggggacagtcttccyagagtcccagaagtacggggctgaggctggattgcccaaggagttcctggaccagtaatccccagagaaacagcatttagctcaagtaacagcctttagctcaagctacgagttctgtcccccatctccacagaaaacggattgatacagtttggctttatgtccctacccaaatctcatctcaaattgtattatcctggtggtgagaaagggaactgttgagaggtgattgtctcatgggggcagttccccccaggctattctcatgatagtgagttctcatgagatctgacagtttcataaaaggctcttcgcccttcacttccttcacaagctctctcacctgctgccattaagacacgccttcttccccttccaccatgattgtaagtttcctgaggcctccccagccatgtggagctgtgagtcaattaaacctcctttctttataaattacccagtcttgggcagttctttatagcagtgtgagaacagactaatacacagaccaaaagaaaattaatagaaaggggcatggctgtg

SEQ ID NO: 378095 - DNA, 568 bp, Homo sapiens
actgttctcttcagagctgtcagacagggatgtttaagtctgcagaagtttctgctgccttttactcagctataccctgccccgagaggtggagtctacagaggctgccaggcctcattgagctgcagtgagctccacctagttcaggcttcccagctgctttgtttacctactcaagcctcagcaatggtggacgtccctcccccagcccaggctgccaccttgcagttcgatctcggactgctgcactagcagtaagcaaggctgtgtgggcatgggacctaccaagccatacatgggatataatctcctgtgtgccgtttgctaagaccactggaaaagcacagtattagggtgggagtgtccagattttccaggtaccgtctgtcacggcttcccttggctaggaagggaaatccccgaccacttgtgctgcttcccagatgaggcaacgccctgccctgctttggctcaccctctgtgggcygcacccactgtccgacccgtctcagtgagatgaaccaggtacctcagttggaaatacagaaatcacctgtcttctatgtca

SEQ ID NO: 378096 - DNA, 599 bp, Homo sapiens
tacacatcacaaagttatttatcaggtagtttccttctagtttatatcctgggatattcgcttttccaccacgggcttcaatgagcttgcaaatttccattcccagaatggacaaaaacagtgtttccaaactgctgtatgaaaaggaaaggtaaagtctgtaagatgaatgcacacgtcacaaagcagtttctcagaaagcttctttctagtttttatgtgaagatgatttctgtttcaccataggcctcaaagtgctcccaaatatccatttgcagataactgctgatttaaaagaaagatttaactttgcaagatgattgcasacatcacaaagcagtttctcagatagattttttttagtttttatccagggatattcactttttcacaattggtctcaatgagattccaaatgtacattcacagaatggacaaaaacagtgtttccaaactactctatcaaaagagaggtttagctgtgagaggaatgtacacctgtcaaagcagtttctcagaaagcttctttctagtttttatctgtattttctttttcaccatagtctcaaaattctcccaaatatgccttcacatattct

SEQ ID NO: 378097 - DNA, 566 bp, Homo sapiens
agatgaatgcacacatcacaaagcagtttctcagcttctttcaagttttaatctgaatatattttctttttcaccatagacctcaatgcactacctaatattacttggcagattccagaaaaacgtatttcaaaactgacaaatgaaaagaaaggttttactctatgagataaaagcagacaacacagagcagtttctcagatagcttcctcctaatttttatcctgttatgttcactttttcacctttggcctcaaagacctcccaaatgtcygtagtcagaatggacaacaacagtgtttacaaactgctgaaggtaaagaaaggtgtaactctgtgagatgaatgcacatataacaaagcaatttctcagaaaccatctttctagtttttatttgaagatattttctttttcaccctaagcctcaatgaactccctaatattccttggcagtttccacaaaaacagtgtttccaaactgatgaatgaaaagaaaggtttaattccgtgagataaatgcagacatcacataacggtttcacaatagcttcgtagtagtttttat

SEQ ID NO: 378098 - DNA, 473 bp, Homo sapiens
atgaaagcaaagttttaactctgacagatgaatgcactcatagcaaagcggttttgcagatagcttccttctagtatttatcctgggatttttttttttttgcctttgcccttaatgagctctcaaatgtccattcgcagaatggacataaacagtgctctcaaactgctgaatctaaataaagttttaacatttcsagatgaatgcacacatcacaaagcagtttctcagaaagattctttctagtttttatctaaagatattttctttttcacagtagatctcagtgcacttccaaatagcccttcagagaatctacaaaatcagagtttccaaactgctgaatgaaaagaaatgtttaaatttgtgtgatgaatgcacacatcacaaaaccatttctcagatagtttcattctaatttttacactgggatattctctttttcaccattggcctcaatgagctccaaaatg

SEQ ID NO: 378099 - DNA, 284 bp, Homo sapiens
ttccattcttaatgaaacaccctaatatcttaataattgggtaaaatctaaatatcagagataattttatcttgaagattgttaaattataatggygattcactaccttgtcacgtctctgagtcaaaaattaggtctttgtttaggaatcaatggtactctgcaacttggaaataggaagattttagaagactcaaacattgactttcttgtgggcaaaaaaaagacgtattgagataagacaagtctttccttgcaaggatacctctaatgctcatacacca

SEQ ID NO: 378100 - DNA, 284 bp, Homo sapiens
ttccattcttaatgaaacaccctaatatcttaataattgggtaaaatctaaatatcagagataattttatcttgaagattgttaaattataatggcgattcactaccttgycacgtctctgagtcaaaaattaggtctttgtttaggaatcaatggtactctgcaacttggaaataggaagattttagaagactcaaacattgactttcttgtgggcaaaaaaaagacgtattgagataagacaagtctttccttgcaaggatacctctaatgctcatacacca

SEQ ID NO: 378101 - DNA, 208 bp, Homo sapiens
aagtctttccttgcaaggatacctctaatgctcatacaccacctcccctaacrttaatatagcttccaggtcactaaccagtgtcagagagcagcccatgcaactagaaattcaaaagacgtcaaacacagggtcaagcctagaataagaagtcttagctaattaagtatgcttttttccccaaattcatattaacaaaaacttggat

SEQ ID NO: 378102 - DNA, 532 bp, Homo sapiens
aataattgggtaaaatctaaatatcagagataattttatcttgaagattgttaaattataatggcgattcactaccttgtcacgtctctgagtcaaaaattaggtctttgtttaggaatcaatggtactctgcaacttggaaataggaagattttagaagactcaaacattgactttcttgtgggcaaaaaaaagacgtattgagataagacaagtctttccttgcaaggatacctctaatgctcatacaccacctcccctaacattaatayagcttccaggtcactaaccagtgtcagagagcagcccatgcaactagaaattcaaaagacgtcaaacacagggtcaagcctagaataagaagtcttagctaattaagtatgcttttttccccaaattcatattaacaaaaacttggatatgtcagagaatgcattctaagttcactcaacctaggagggagaagcataattttaaattaagagctgaagcattcttgtcctaacagaaagcaaggaaaatgaaatatcac

SEQ ID NO: 378103 - DNA, 208 bp, Homo sapiens
aagtctttccttgcaaggatacctctaatgctcatacaccacctcccctaacattaatatagcttccaggtcactaaccagtgtcagagagcagcccatgcaactasaaattcaaaagacgtcaaacacagggtcaagcctagaataagaagtcttagctaattaagtatgcttttttccccaaattcatattaacaaaaacttggat

SEQ ID NO: 378104 - DNA, 208 bp, Homo sapiens
aagtctttccttgcaaggatacctctaatgctcatacaccacctcccctaacattaatatagcttccaggtcactaaccagtgtcagagagcagcccatgcaactagaaattcaawagacgtcaaacacagggtcaagcctagaataagaagtcttagctaattaagtatgcttttttccccaaattcatattaacaaaaacttggat

SEQ ID NO: 378105 - DNA, 389 bp, Homo sapiens
agcaaaacaggggtggaccttaaagacctgccttttcctcatcccccagccaatcagttttcaaatcttgcattttattctgaaagggccttatacccctggtctcttgtttctagacttggcacatatttaaagttgctacctctatctactgaattgtctctcttcaaacagtatctatgcctgccaaatgtgaacatacaaacaacaaatcagaatgtgccattctgatttaaactgcttattagttaawaccctcaagataacatctgggttgttagctgcaatgagtcaagcctacttacatctttttttgtctttggctgcacatttcctatcacatcacactccagcaacgccaagctgtgccggccttctaccccatctcc

SEQ ID NO: 378106 - DNA, 389 bp, Homo sapiens
agcaaaacaggggtggaccttaaagacctgccttttcctcatcccccagccaatcagttttcaaatcttgcattttattctgaaagggccttatacccctggtctcttgtttctagacttggcacatatttaaagttgctacctctatctactgaattgtctctcttcaaacagtatctatgcctgccaaatgtgaacatacaaacaacaaatcagaatgtgccattctgatttaaactgcttattagttaataccctcaagataacatctgggttgttagctgcaatgagtcaagcctacttacatctttttttgtctttggctgcacatttcctatcacatcacactccagcaamgccaagctgtgccggccttctaccccatctcc

SEQ ID NO: 378107 - DNA, 278 bp, Homo sapiens
ccggggttattcctttttcaccactgtcctcaacgagctcccaaatgtacattagcagaatggacaaaaacagtgtttccggactgcttaatccaaagagaggtttaactctctgtaatcaatgcacacatcacagagcagtttgtaggattgcttccttctagtttttattctgggatgtttcctttttcacctttggcctcagkgagactacaaatgtttattttcagaatggacaaaaagtgtttccaaactagtgaatcaaaagaaaggttgaa

SEQ ID NO: 378108 - DNA, 406 bp, Homo sapiens
agcttccttctagttttaatcctggaatatttgctttttctcaattggcctcaatgagstcccaaatgtccatttgcagaatagacaaaaacagtgtttgcaaactgctgaatcaaaagaaaggcttaactctatgagataaatgccaacctaaaaaaccagtttctcagaaagcttttctctagtttttgtctgaagatatttttttttcaccagagccttcgatgcagtacaacatatccctttgtagattctacaaaaatagtgtttccaaactgctgaatgtataggaaagttaattctgtgagataaatgcacgcgtcacaaagtggtttcttctatagcttccttctagtttttatcctggaaaattcacctttttgccattggcctcaataagctccca

SEQ ID NO: 378109 - DNA, 406 bp, Homo sapiens
agcttccttctagttttaatcctggaatatttgctttttctcaattggcctcaatgagctcccaaatgtccatttgcagaatagacaaaaacagtgtttgcaaactgctgaatcaaaagaaaggcttaactctatgagataaatgycaacctaaaaaaccagtttctcagaaagcttttctctagtttttgtctgaagatatttttttttcaccagagccttcgatgcagtacaacatatccctttgtagattctacaaaaatagtgtttccaaactgctgaatgtataggaaagttaattctgtgagataaatgcacgcgtcacaaagtggtttcttctatagcttccttctagtttttatcctggaaaattcacctttttgccattggcctcaataagctccca

SEQ ID NO: 378110 - DNA, 406 bp, Homo sapiens
agcttccttctagttttaatcctggaatatttgctttttctcaattggcctcaatgagctcccaaatgtccatttgcagaatagacaaaaacagtgtttgcaaactgctgaatcaaaagaaaggcttaactctatgagataaatgccaacctaaaaaaccagtttctcagaaagcttttctctagtttttgtctgaagatatttttttttcaccagagccttcgatgcagtacaacatatccctttgtagattctacaaaaatagtgtttccaaactgctgaatgtataggaaagttaattctgtgagatraatgcacgcgtcacaaagtggtttcttctatagcttccttctagtttttatcctggaaaattcacctttttgccattggcctcaataagctccca

SEQ ID NO: 378111 - DNA, 406 bp, Homo sapiens
agcttccttctagttttaatcctggaatatttgctttttctcaattggcctcaatgagctcccaaatgtccatttgcagaatagacaaaaacagtgtttgcaaactgctgaatcaaaagaaaggcttaactctatgagataaatgccaacctaaaaaaccagtttctcagaaagcttttctctagtttttgtctgaagatatttttttttcaccagagccttcgatgcagtacaacatatccctttgtagattctacaaaaatagtgtttccaaactgctgaatgtataggaaagttaattctgtgagataaatgcacgcrtcacaaagtggtttcttctatagcttccttctagtttttatcctggaaaattcacctttttgccattggcctcaataagctccca

SEQ ID NO: 378112 - DNA, 599 bp, Homo sapiens
ggcctcaatgagctccaaaatgtccrtttgcagaatggacagaaacagtgtttccaaagtgctgaatcaaaagaaaagtttaattccgtgagatgaatgcaaacatcacaaagcagtttcttatagagcttctttctagtttttacctgaatatactttctttttcacaattagcttcaatgtgctcccaaatataacctcaaagattctccaaacacagtgtttccacactgctgaatgataaaatggttaactctgtgagatgaaagcacacatcacaaagctgtttcaccaaaacttctttctagtttttacctgaagatattttcttttccactgtaggcctgaatgtgctccctaagatccctttgcagattctccaaaaaccgtgcttccaaactgctgaatgaaataaaggattaattttgccagatgaatgcgtacatcacaaagggttttctcagatattttcctactagtttttatcctgtgatattcatttgttctccattggcctcaatgacataccaagtgtccattcagagaattgacaatcacagtgtttccaaacagctgaatcaaaaagaaagatttatctc

SEQ ID NO: 378113 - DNA, 526 bp, Homo sapiens
gtccgtttgcagaatggacagaaacagtgtttccaaagtgctgaatcaaaagaaaagtttaattcygtgagatgaatgcaaacatcacaaagcagtttcttatagagcttctttctagtttttacctgaatatactttctttttcacaattagcttcaatgtgctcccaaatataacctcaaagattctccaaacacagtgtttccacactgctgaatgataaaatggttaactctgtgagatgaaagcacacatcacaaagctgtttcaccaaaacttctttctagtttttacctgaagatattttcttttccactgtaggcctgaatgtgctccctaagatccctttgcagattctccaaaaaccgtgcttccaaactgctgaatgaaataaaggattaattttgccagatgaatgcgtacatcacaaagggttttctcagatattttcctactagtttttatcctgtgatattcatttgttctccattggcctcaatgacataccaagtgtccattcagagaa

SEQ ID NO: 378114 - DNA, 599 bp, Homo sapiens
ggcctcaatgagctccaaaatgtccgtttgcagaatggacagaaacagtgtttccaaagtgctgaatcaaaagaaaagtttaattccgtgagatgaatgcaracatcacaaagcagtttcttatagagcttctttctagtttttacctgaatatactttctttttcacaattagcttcaatgtgctcccaaatataacctcaaagattctccaaacacagtgtttccacactgctgaatgataaaatggttaactctgtgagatgaaagcacacatcacaaagctgtttcaccaaaacttctttctagtttttacctgaagatattttcttttccactgtaggcctgaatgtgctccctaagatccctttgcagattctccaaaaaccgtgcttccaaactgctgaatgaaataaaggattaattttgccagatgaatgcgtacatcacaaagggttttctcagatattttcctactagtttttatcctgtgatattcatttgttctccattggcctcaatgacataccaagtgtccattcagagaattgacaatcacagtgtttccaaacagctgaatcaaaaagaaagatttatctc

SEQ ID NO: 378115 - DNA, 636 bp, Homo sapiens
actgctttattgtagttttaatcttgggatatttgctgtttcaacattggcctcaataagcttccaaatgtccattcacagaatggacaaaaacagtgtttcaaaactgctgaatcaaataaatatttaactctgtggaatgaatgcacacatcagaaagcagtttatctgaaaacttcttctagtttttatctgaatttactttctttttcaccatagacttcaagacactccaaaatatcccttcacagattctacaaaagcagtgtttccatattgttgaatgaaaaaaagatttaattctggtagatgaatgcacactttgtaaagcagtttctcagataggttcttctaggttttttcctgggatattccttccagtttttatctgaagatattttcyttttcaatgtaggcctcaatgcactcccaaatatacctttgaagattctacaaaaacagtgcttccaaactgctgaatgaaaaggcaagtttaattctgcaagatgagtgcacacatcacaaagccgtgtttcagatagcttcatactagcttttataatgggatattcacttttctgcaattggcctcaatgagtttctaagtgtccacttgcagaatggacaaaaacagag

SEQ ID NO: 378116 - DNA, 636 bp, Homo sapiens
actgctttattgtagttttaatcttgggatatttgctgtttcaacattggcctcaataagcttccaaatgtccattcacagaatggacaaaaacagtgtttcaaaactgctgaatcaaataaatatttaactctgtggaatgaatgcacacatcagaaagcagtttatctgaaaacttcttctagtttttatctgaatttactttctttttcaccatagacttcaagacactccaaaatatcccttcacagattctacaaaagcagtgtttccatattgttgaatgaaaaaaagatttaattctggtagatgaatgcacactttgtaaagcagtttctcagataggttcttctaggttttttcctgggatattccttccagtttttatctgaagatattttctttttcaatgtaggcctcaatgcactcccaaatatacctttgaagattctacaaaaacagtgcttccaaactgctgaatgaaaaggcaagtttaattctgcaagatgagtgcacacatcacaaagcmgtgtttcagatagcttcatactagcttttataatgggatattcacttttctgcaattggcctcaatgagtttctaagtgtccacttgcagaatggacaaaaacagag

SEQ ID NO: 378117 - DNA, 636 bp, Homo sapiens
actgctttattgtagttttaatcttgggatatttgctgtttcaacattggcctcaataagcttccaaatgtccattcacagaatggacaaaaacagtgtttcaaaactgctgaatcaaataaatatttaactctgtggaatgaatgcacacatcagaaagcagtttatctgaaaacttcttctagtttttatctgaatttactttctttttcaccatagacttcaagacactccaaaatatcccttcacagattctacaaaagcagtgtttccatattgttgaatgaaaaaaagatttaattctggtagatgaatgcacactttgtaaagcagtttctcagataggttcttctaggttttttcctgggatattccttccagtttttatctgaagatattttctttttcaatgtaggcctcaatgcactcccaaatatacctttgaagattctacaaaaacagtgcttccaaactgctgaatgaaaaggcaagtttaattctgcaagatgagtgcacacatcacaaagccgtrtttcagatagcttcatactagcttttataatgggatattcacttttctgcaattggcctcaatgagtttctaagtgtccacttgcagaatggacaaaaacagag

SEQ ID NO: 378118 - DNA, 587 bp, Homo sapiens
ttccaaatatccttacacagattctacaaaaacagtgtttccaaactgctaaatgtaaagaaatgtttaacactgacttatgaatgcacacatcatgaagcagtttctcagatagcttccttccagttttcatcctgggatatttgcttttttcaccattggcctcaatgagctcccaaaagtgcattcacagaatggacaaacacagtgtctccaactgctgaatcaaaagaaaagtttaactgtgggaggcagtttgcacacaacgcaaactggtttctcagtttgcttccttctagtttttactgtgggatactcacttttttgctattggcctcaatgtgctcccaaatgtccattggcagaatggacaaaaacagtgtttccaaactgctgaatctaaagaaaggttttacactgtgagatgaatgcacacctcacaaagcagtttctcagaaaacttctttctagttttcaactgaacgtattttctttttcaccatagacctcaaygcactccaaaataccccttcccagattgtacaaaaacagtgtttccaaagtgatgtatcaaaagaaaggtttaa

SEQ ID NO: 378119 - DNA, 561 bp, Homo sapiens
aatgcacatatcacaaggtggtttctagatagcttccttctagtttttatcctgggatattttctttttcaccattggcatcaaaaagctcccaaatatccattcacagaaggaacaaaaacagtatttccaaactgctgaatcaaaagaaatttttatttctgagagttgaatgcacacatgacaaagcagtttctcagaaatcttctttattgtttttatgtgaagatattttatttttcaccataggactcaatgctctcccaratagccctttgcagatccagaaaagcattgtttccaaattgttgaatgaaaataatggtttaattctgtgagatgaatgaaccaatcacaaagtggtttctcagatagcttccttctagttttcattctgggatgttcacttttttcaacgtaggcttcaatgcaaccccaaatatccctgtgcagattccaccattctcgtgcagaaaccatcattctcagccaactatcacaaggacagaaaaccaaacactgcatgttctcactcataggtgcgaattgaaccatgagaac

SEQ ID NO: 378120 - DNA, 561 bp, Homo sapiens
aatgcacatatcacaaggtggtttctagatagcttccttctagtttttatcctgggatattttctttttcaccattggcatcaaaaagctcccaaatatccattcacagaaggaacaaaaacagtatttccaaactgctgaatcaaaagaaatttttatttctgagagttgaatgcacacatgacaaagcagtttctcagaaatcttctttattgtttttatgtgaagatattttatttttcaccataggactcaatgctctcccaaatagccctttgcagatccagaaaagcattgtttccaaattgttgaatgaaaataatggtttaattctgtgagatgaatgaaccaatcacaaagtggtttctcagatagcttccttctagttttcattctgggatgttcacttttttcaacgtaggcttcaatgcaaccccaaatayccctgtgcagattccaccattctcgtgcagaaaccatcattctcagccaactatcacaaggacagaaaaccaaacactgcatgttctcactcataggtgcgaattgaaccatgagaac

SEQ ID NO: 378121 - DNA, 590 bp, Homo sapiens
tttttaatctgaatttattttctttttcaccataggcttgaatgtgctcccaaatgtccctttgcagttactacaaaaacagtgtttccaaacagctgaatgaaaatgaaagtttaactctgtgagatgaatccaaacattgcaatgtggtttctcagatagcttccttcwattttttatttagggatatttgcttttttgtcattagcctcaataagctccaaaaagtccattcaaagaatatgcaaaaatagtgtttctaaactgctgagtgagaatggtttaactctgtgagatgaatgcacacatcacagaggagtttctcaggaagtttagttccagtttttacctgaagatattttctttttcaccataggcctcaatgtgctcccaaatatcccttcacagattctagataaacagtgtttccataatgctgaatgaaaagaaaggtttaactctgtgagatgaaggcacacatcaaaaatcagtttctcagaaagcttctttctagtttttacataaaggtattttctttttcatcataggctcccaaatatacctgtgcaagttttacaaaaacagtgttt

SEQ ID NO: 378122 - DNA, 590 bp, Homo sapiens
tttttaatctgaatttattttctttttcaccataggcttgaatgtgctcccaaatgtccctttgcagttactacaaaaacagtgtttccaaacagctgaatgaaaatgaaagtttaactctgtgagatgaatccaaacattgcaatgtggtttctcagatagcttccttcaaktttttatttagggatatttgcttttttgtcattagcctcaataagctccaaaaagtccattcaaagaatatgcaaaaatagtgtttctaaactgctgagtgagaatggtttaactctgtgagatgaatgcacacatcacagaggagtttctcaggaagtttagttccagtttttacctgaagatattttctttttcaccataggcctcaatgtgctcccaaatatcccttcacagattctagataaacagtgtttccataatgctgaatgaaaagaaaggtttaactctgtgagatgaaggcacacatcaaaaatcagtttctcagaaagcttctttctagtttttacataaaggtattttctttttcatcataggctcccaaatatacctgtgcaagttttacaaaaacagtgttt

SEQ ID NO: 378123 - DNA, 590 bp, Homo sapiens
tttttaatctgaatttattttctttttcaccataggcttgaatgtgctcccaaatgtccctttgcagttactacaaaaacagtgtttccaaacagctgaatgaaaatgaaagtttaactctgtgagatgaatccaaacattgcaatgtggtttctcagatagcttccttcaattttttatttagggatatttgcttttttgtcattagcctcaataagctccaaaaagtccattcaaagaatakgcaaaaatagtgtttctaaactgctgagtgagaatggtttaactctgtgagatgaatgcacacatcacagaggagtttctcaggaagtttagttccagtttttacctgaagatattttctttttcaccataggcctcaatgtgctcccaaatatcccttcacagattctagataaacagtgtttccataatgctgaatgaaaagaaaggtttaactctgtgagatgaaggcacacatcaaaaatcagtttctcagaaagcttctttctagtttttacataaaggtattttctttttcatcataggctcccaaatatacctgtgcaagttttacaaaaacagtgttt

SEQ ID NO: 378124 - DNA, 590 bp, Homo sapiens
tttttaatctgaatttattttctttttcaccataggcttgaatgtgctcccaaatgtccctttgcagttactacaaaaacagtgtttccaaacagctgaatgaaaatgaaagtttaactctgtgagatgaatccaaacattgcaatgtggtttctcagatagcttccttcaattttttatttagggatatttgcttttttgtcattagcctcaataagctccaaaaagtccattcaaagaatatgcaaaaatagtgtttctaaactgctgagtgagaatggtttaactctgtgagatgaatgcacacatcacagaggagtttctcaggaagtttagttccagtttttacctgaagatattttctttttcaccataggcctcaatgtgctcccaaatatcccttcacagattctagataaacagtgtttccataatgctgaatgaaaagaaaggtttaactctrtgagatgaaggcacacatcaaaaatcagtttctcagaaagcttctttctagtttttacataaaggtattttctttttcatcataggctcccaaatatacctgtgcaagttttacaaaaacagtgttt

SEQ ID NO: 378125 - DNA, 477 bp, Homo sapiens
aacagtgtttccaaactgctgaatgaaaagaaaagtttaactctttgaggttaatgcacacaacacaaagtgggtttttagacagcttcattctaatttttttcctgagatattcagtttttcaccactggcttcaatgagattcaaaatgtccattcacagaatggacaaaaacagaatttttaaacygctgaactgaaagaaagtgaaactctatgagatgaatgcacacatcaccaagcagtttctcataaagcttctttctaatttttatctgaagatattttccttttcaccataggcctcaatgtgctcccaaatatccctttcctgattcttcaaaaatagggtttttaaaatgctgaatgaaaagaaaggtttatctctgcaaaatgaaggcacacatcacaatgccttttctctgatatcttctttcttgtttttatccaggggtattcacttttctgctattggcct

SEQ ID NO: 378126 - DNA, 570 bp, Homo sapiens
tttattttgagactacattattaggtatccacaattttataaaaattaagaaaaaattagaaaagtttagaaaaaaattagaaaaatatagaaaatgatgtgacagaagcacacatgggctttatctggatgatctcttgtcaggtttgtatcctggggaaggccttcacagcaagagatggaccagaggtttgagacaagggggccaccactcagaaggggaggagggcaaaggaactcctgagggaggaaagtatcagagaggaggctttcatgtctcagtgatatcactcagcagcatggcatggagtctgtagttcacagagttccaaagagcagaagcagyttggggtctttacagcctagagtttatctgtggcaagcagattttggatgtagtttcccagggcatgtaaatcaggcaggctctaaatgcctacaaatctgcatgtctgggctatgtttaacacaattggatgtttaaaaatttgagtttggtgccagttggtttttgagctaatgggtttcagcttgctgtgaagaaataacctaggcgccaatacacagagg

SEQ ID NO: 378127 - DNA, 570 bp, Homo sapiens
tttattttgagactacattattaggtatccacaattttataaaaattaagaaaaaattagaaaagtttagaaaaaaattagaaaaatatagaaaatgatgtgacagaagcacacatgggctttatctggatgatctcttgtcaggtttgtatcctggggaaggccttcacagcaagagatggaccagaggtttgagacaagggggccaccactcagaaggggaggagggcaaaggaactcctgagggaggaaagtatcagagaggaggctttcatgtctcagtgatatcactcagcagcatggcatggagtctgtagttcacagagttccaaagagcagaagcagcttggggtctttacagcctagagtttatctgtggcaagcagattttggaygtagtttcccagggcatgtaaatcaggcaggctctaaatgcctacaaatctgcatgtctgggctatgtttaacacaattggatgtttaaaaatttgagtttggtgccagttggtttttgagctaatgggtttcagcttgctgtgaagaaataacctaggcgccaatacacagagg

SEQ ID NO: 378128 - DNA, 232 bp, Homo sapiens
gaactgtacactttttatatgaaaatgatgcttgctacaacatgacttwactaaactggatttctgcaaaagataaaacaccaggcatggttgctcacacctgcaatcccagcactttgggagtgctgaggcagggaggatcacttgagtccaggacttcgagaccagcctgggtaacatagtgagactctgtctcttaggaaagtaaaaaattagccgggcatgatgaagc

SEQ ID NO: 378129 - DNA, 232 bp, Homo sapiens
gaactgtacactttttatatgaaaatgatgcttgctacaacatgacttaactaaaytggatttctgcaaaagataaaacaccaggcatggttgctcacacctgcaatcccagcactttgggagtgctgaggcagggaggatcacttgagtccaggacttcgagaccagcctgggtaacatagtgagactctgtctcttaggaaagtaaaaaattagccgggcatgatgaagc

SEQ ID NO: 378130 - DNA, 614 bp, Homo sapiens
agtttacttgctgaacataatcaaatatagcaactttccagtaaaagactattaggacaaactatgttaacacaacctcagatgatgcagcatagttaaaacaaaacaaaacagctttgggcatattctatactccaacctctgtggtgcaaagggactatatggccaactaggtgttgaggcagtcacagaactgctgcacatgtggtttttaaacaagatttttaattccccctaaagtggaagaagtcatctaacaaaatttattatgacttaaattgctacttctttatttagtttttctcaaactttaamaaaataaattatgtagtaaattatagtcattaagcttgaaaaatgtttcaattgaatgggaaaacttcctgtgataaagcctccaatcatcaaggaataagtcaatatattttacacataaattttccaacatgttaagcactaagcttttaactaaatagctaaggggaaattgttgccactgaatgcaacacatatactgcctttttaaataacacctactacttatcttgattccaattcatcactaaacatcacttgtataatttgatcacagtgatgtcctcagagacggttgt

SEQ ID NO: 378131 - DNA, 558 bp, Homo sapiens
gctgtcagctgtcacattttatagttcaccccttctgcaagaccctttcgatacttgtgatttgttaggaagcagaaatcagataacctaacttgttagaattctatgtgaagtaagaataagtagactctgggtagctgctgcctctaccattaaaaatttttaaaaaggaagacttttcaattaccacttaatttgaacttgacttacctagactactattagtcgatattagtttaacagagggaaaattgttaataatgtagatctaatatgtaaacacatatatcattcccttgttctggatctatcaatgatttcatactttgactatatctaaattatctgcttttcctggccttcaargtggtctttaattcagtcctgctttccatgggttaaatttcctacaatgctgagatgtttatattggtttcctcctgtcctatgaactttgtactgatttctgccccaataaatttgattatatgaagaaaaaaatactttttttttaagatagggtttcactcctgttgcccaggctggagtgcagtggca

SEQ ID NO: 378132 - DNA, 546 bp, Homo sapiens
ggggtgagggcatgagccattttgagtgaggtgtgggtagggaaattacaatatatctttttcaatgagttgttgaactatccctctgcacataatcttcgaaatagccctggataacatattaatagcttggatcattttaaatgctgttaaataatgtcaagagatggggaggaaaggtggattaatgagtacgatatagtcctcattattatgtatttcagtccaagtcgggcaggtatagaggatatggaatgtcccctcctgctccatcccatgctaaaagcgtcccagtgctcacctttctctaaccctgaaatcggagatgttacctgccaagctaattgagtaagcgtccaagagaacttgaatctaaaaaccccatggggtcctgatagagaatgaaatatttcccaaatgtttcctaggtacaaatgagacacttcatgctagtgcaaaaccatggaraaagtcaggacaatagaattataatattcataggtacttgcttaactaagtgcataaacttgaaagaaaagaaggata

SEQ ID NO: 378133 - DNA, 565 bp, Homo sapiens
aaaattggcaatggagcgaattctagaactcttcttcaaggatarcatccctttgctgtgcatgaattctaaaggctaaaactcatcccaacaaaatcactacagtgtaagttccatgaaagcaggaacctcacagccttcttcaagatggtatccttatgagctgggcatgatgatgtgcacctgtagtcccaactactcaggaggcagaaacaggaggatcacttgagcccaggagtttgagaccggcctgagcaacagagcaagacccagtttctgaaaaaacaaacacacaaaacaggatgacacccttgatgatcagagacatgcctgataaaagtagtgcttaataaatatttattgaatgggtgaatttgggaatgctacatgcctaattttcattttatttagtatcatataaatcatgaacgaacgtaatatttgatttgcattacaaatggcataacccaattcacgtaggaattgggtggtaaataaaaatgaccagaaacaagtcaacacagactttactcttcttcttctttttcccaatccactgagcaca

SEQ ID NO: 378134 - DNA, 549 bp, Homo sapiens
aacaaatttgtgtctcaatgacacctgctggaagtttagtgggaaaaataattgtgtgtgagtgaggaggaagagcacagtaaagcttgtgtaaaattagagtctcagtaaaaacaaatgcatgttaaaaccaagaggygaagtacgtatcaaagagtttccatacttctgtgtaatactatgacaagccagtcaaagcgctataaaagtaagtcttttaaggtaaaaagccaacagaaacaaaatgaaagtagcaggcatttcatctcactctaaaaattacaattgtaacacatttgatgtttttaatgatttgatgatgaaaattttgcatgatgataattttaatgcgaatgataaagttcaggtgcaaataataagacaaatttccatgagatatcatacccatgagtatggttcaggacagattctgaattctggattgcacaacagaagccttctgaacttgtattgtctcaatttcatcctagggaggtcagattaggttgtgagaggaaaaaggaaatatattttccattgccagcaggg

SEQ ID NO: 378135 - DNA, 549 bp, Homo sapiens
aacaaatttgtgtctcaatgacacctgctggaagtttagtgggaaaaataattgtgtgtgagtgaggaggaagagcacagtaaagcttgtgtaaaattagagtctcagtaaaaacaaatgcatgttaaaaccaagaggcgaagtacgtatcaaagagtttccatacttctgtgtaatactatgacaagccagtcaaagcgctataaaagtaagtcttttaaggtaaaaagccaacagaaacaaaatgaaagtagcaggcatttcatctcactctaaaaattacaattgtaacacatttgatgtttttaatgatttgatgatgaaaattttgcatgatgataattttaatgcgaatgataaagttcaggtgcaaataataagacaaatttccatgagatatcatacccatgagtatggttcaggacagattctgaaytctggattgcacaacagaagccttctgaacttgtattgtctcaatttcatcctagggaggtcagattaggttgtgagaggaaaaaggaaatatattttccattgccagcaggg

SEQ ID NO: 378136 - DNA, 577 bp, Homo sapiens
gactcagtggattccctcatcttgtgtaacccttggttttgtccagcacatgagtcctggcctctcacttctcctctcattccctgtggtttcagtgggctttgccgttgttattattcatacctaggatgtcccaactagytgtgcagtacagggtggctgtttttgttttcttctgtatgcaaaaattgatttcagaggcttcaaacacatagatatcctacagcaaacaagagaaaacagcaaataaacacagtctgcagagagtggtggtggtggtggtggttttgtaaattaccgaaaagccgcaggttataggaatcaccctcattttccatgcccatggcatgaaaatcccccatgatgatgtatttatttcatgttctcgttgtcttaggttttcggtggctgtagttgggggtaaggtgccgcagtgtctcttgttaaactggccttacaggaccccatacttcagggtgagggctgactgcaaggacactcaccatgcgaagttagaacgtgatgaaatcagacacgaactaaatatctgtagaggactagaatcaaaattagtgtg

SEQ ID NO: 378137 - DNA, 522 bp, Homo sapiens
ttgagggtttcaaagactgattgcttaacctttgctaatgtttcctcctgaccactgtgattcttgcaaagctcccttcgcaaagctgagctgagacctgggtgttggcggaaggtcagtgggacctcttctgtgggcagcaggaaccctgatactccctatccttcacaaccaccactgtcactcacctctacctgtcaatcattgctgactgataattgtctcacaatgtattaaatccatgattatttatggaaaaaacaacaaatgtttatagtgtcattcacagtaggctgcctttacaattcaacctgaggcagtccagtggtcatagcatttkgtctttccacacctgtaccagaggtggcagctacacagagattttcagtgtcctcaattctatccctcctgcctatggatgatgtgaaggtcatgaacattcggctctggaacagcagagaataatgctaggcagggatccttccagtggccacagcaggagcacactcagacagaaactgc

SEQ ID NO: 378138 - DNA, 576 bp, Homo sapiens
ctagcttcataaaatgaaataagagtgctcccatctcctctatttcttggatgaaattatgtagaattgaaattaagttctcctgtgaaaccatattagtctggggatttctcttctgagagttttaaaatttatttttcctaataattataggactattcaaataatttcatattgggtgagttgaggtagttgggtttttttaaggaacttatccatgtcacctaagtgggtgaatgtgtgtgtgtagagttgctctttagagtcagctattatgtttttgatgtctgcatgatctctagtgatgtctcttatttcctccttgatgttcataatttgtgtcttctttctttgtttctttgtcaatattgtcaagaagagtgccaattctttgatttttttcaaataaccagtgattttctcttattgtttttgtgtctttggtttcactgwtttctgctcttgtctttattactccttttcttctaatttgcacttgttttactcttcattttctaggctcttgaagtggaaacttaggctatttgattttttccctctgtctttaatgtaagc

SEQ ID NO: 378139 - DNA, 604 bp, Homo sapiens
atctgctgggacctaacttgtgaatgctgagcatgagaaaatgcagccgttcagctcggctacctctctaattagattagcactgcccccacccatgctggcatcctcagtctaggcaggagaatcgctgttcccttccgcagatacctaatatttgtaatgatgaaatgactggagcaattaggggaagttaaaaatgaattatgggaccatactctattaaccagatgctgctttaaagggactgggcttgtgttatctgtctagttaagtacagtactgagactggctatcaataagtacaaccgatcacatcagcatataccacatatgaaactattttacaatcagctgagggttgccatgtcaaccaacacaggggattcagagagcaacctggtgatctgtcaaccacgtagacagagtgcaagttaccacaggcagggcagaagctacacagaagatrgggaatgccccagtgccaatggcccattggattcactgagaggcttggggacaaccgtcgactatgtagtaccatgtgaccattttcagttgcaccttatagacttcagcataaataaccatctaggaaagttggaag

SEQ ID NO: 378140 - DNA, 594 bp, Homo sapiens
attttctttgttgaaggcaaggagtgtgaacacgcaaatgggagtgggtgtacatggtaggatccttggatttaaaatatcccttttatgtcagaaattcactgagtctttctgaaaacacatcagccaggcctgtgtagtgatctctaccatctggtggcagcattgcaccggtgtagaccgctggaacggcaccttcctttggagacggcagaaattaaagtccgtgtggttttctcaggaagcatcattgtacatacacgatggctcccagaaaattgcacagttacgtctatgacatattccataacacttatttaatcatcaaaacaggacttaatgtaggggtctaatttctgttagcctaagtaggcagcaggtaagttatgctattcaataaaaatcacaattttatgaaattctatttatactcatatcttaattttcrtatttcaaatatccagtaagtgttcagccaggataaaaatccagcatttgttatatcattatcgctgagtaactaagctaacataacccacatttgttttcaatcatatcagagttgcgttcttgaaatcctcaacctaattttta

SEQ ID NO: 378141 - DNA, 546 bp, Homo sapiens
gcactattttattgcatagaatatcacattatttcatgctttttggtcactgaaatacaatagtttacaataccatctttgcgtgtctacgtagagaattatgtaatcccatacatctctttgtttacatctgtttttgtattttccctactagataatgaagtcagtggaacagagattttgttatgttaatctttgtatacttagtarctaattcagtgcttgaaacaaattttaagaggaaatttgttacataaatattttttaaactaacatatttgaataattataaaaggaataaatattcataatagacaatggagttagttaaaagttaacatttgaattacctgaaactcacaactaaaaaataaacactaaaaactgtatggtgtaattttatctcattgtttttgatatctatactaataactaatacagttagagatcaatgaaaaaagagagaagagatgccatgtatccagttatactttgagaatgcacttgtcagagaccaaattccaaagtccccaggccagggtccct

SEQ ID NO: 378142 - DNA, 374 bp, Homo sapiens
gggacactattcctttcaatgaggcaggaatcttgggtcagtgttcttggcagtgactatggaaccactgtcttggtcaacgacacacagacgagggagacaaggcggctgcaggactgggtgtggggaygtcagcatctcatgacctcacatttcaccccaaaagcttccttggttaggcaggtcctagacaaagtggagataaggcatgggcagtgtaaacatatgagaataattacttaatttgtataaatcaaagcaaatttgactctgagccactactcagcaagaccaaggagtagcccagccactgactgtgggtccaacctcagggggctcatgtatttcagggaactgcaaaggggccatagttt

SEQ ID NO: 378143 - DNA, 374 bp, Homo sapiens
gggacactattcctttcaatgaggcaggaatcttgggtcagtgttcttggcagtgactatggaaccactgtcttggtcaacgacacacagacgagggagacaaggcggctgcaggactgggtgtggggatgtcagyatctcatgacctcacatttcaccccaaaagcttccttggttaggcaggtcctagacaaagtggagataaggcatgggcagtgtaaacatatgagaataattacttaatttgtataaatcaaagcaaatttgactctgagccactactcagcaagaccaaggagtagcccagccactgactgtgggtccaacctcagggggctcatgtatttcagggaactgcaaaggggccatagttt

SEQ ID NO: 378144 - DNA, 374 bp, Homo sapiens
gggacactattcctttcaatgaggcaggaatcttgggtcagtgttcttggcagtgactatggaaccactgtcttggtcaacgacacacagacgagggagacaaggcggctgcaggactgggtgtggggatgtcagcatctcatgacctcacatttcaccccaaaagcttccttggttaggcaggtcctagacaaagtggagataaggcatgggcagtgtaaacatatgagaataattayttaatttgtataaatcaaagcaaatttgactctgagccactactcagcaagaccaaggagtagcccagccactgactgtgggtccaacctcagggggctcatgtatttcagggaactgcaaaggggccatagttt

SEQ ID NO: 378145 - DNA, 331 bp, Homo sapiens
tctaggttcatgagacacacttgtctatgtttttgttttgcatttcctatctatctatctatcatctatctatctatctatctatctatctatctatctatctatctatctatcatctatcatctatctatatttggatattaattcacctttatatgtttagtaaaaatctctggtgaaaccatayagacatgaatacttcttttcaggaggtctttagttacaaatcaatttacttcatggttacagaactatttctgtatttgtttctctttgagtgagttttgatagtttctggtttgtaaagtattggtcattttctcctaagttt

SEQ ID NO: 378146 - DNA, 545 bp, Homo sapiens
gaaatgacattatttgtaaaggaaggccatcttaataaacatgagtttctcatcagaaactcatggaagccagaagcatcacaacattttacaggtactgaaagaaaataatttttttttttgagatgaagttttactcttgtttcccaagctggagtgcaacggagcaatctcggctcactgaaacctccgcctcccaggttcaagtgattctcctgcctcagcctcccaagtagctgggattacaggtgcatgcaaccatgcccagctgatttgtgtgtgtgtgtttttagtagaaacggggtttcgccatgttagacagactggtcttgaactcccagtctcaggtgatctgcccaccttgggcccccagagtgctgagatttcaggaataagtcactgtgcccggccaagaacagaattttatagctaataaaactatccttcaggaatgaaggaaaaggtaaaatattgccagttgaagacaaattaagctaacctgtcrctagaaaactttacacttaatagctaaaggcaaacaaata

SEQ ID NO: 378147 - DNA, 413 bp, Homo sapiens
acccacacacagtcagctcacctgtgagtgtgtgatatggatgagaacccagcggcacccaggggaatactcagccaagtgcagcccccaccaacccagtccacagcagaaaatgagttcagtggggtcccatcctcgtggagytacatttacatggaaaacgtcagtcagttgacaacataatttcttttttttttaactaaggtttttatttaatgcaagatatatagtgaagtgatcttctttatatatatgtatatgtatatatatatatatatacatatacatatatatataattatactttaagttccagggtacatgtgcacaatgtgcaggtttgttacatatgtatacatgtgccatgtaaaccatcattctcagcaaactatcgcaaggacaaaaaaccaaaa

SEQ ID NO: 378148 - DNA, 611 bp, Homo sapiens
aatctaacagtatgtatttttcttctacatgaggactttcacttacactaacatttctgtgattcatccattttgttggatgttatcagtggcttatttttttttttagtttccaaatagtattctttttttaaacatttgttttcatttcccttggctcaatactcagaggtggaattgccactttcattttcatttttgttcattcttatgtattatttgaatatttgcagaaaggtagttaatgacttaattaccaatttaataaaagtaaatgtacataaatcaacttggatagcaaaagaagataaagctttgtaagttcaagtrgaacccagccttcccctaggtaattatttggtggacatttaacacttggttttatctaagatcacaccgaagcagtggaaccagaatttgaacctgggccatctggttccggaattcaggccaggattatctgcttctttattattgtttacttgaatgtatttagggaaatctaaaaagttcaagaaaatatttgctataattagtgccgcacctctgagtcccagagccaatatagcacacctttccaagattacagggtgtgaacacccatcatacac

SEQ ID NO: 378149 - DNA, 581 bp, Homo sapiens
acacacatgtgactaccatcaactgcaaagtggtcatcaacactgtaagtaaaatctaaagtttaagaacagaaaaagtacaacacattttcatggataagatagataaagggttactatttacatagttttaaaaagctactaccaatcattaagataaaaaagttaaatagcaaagtgattaaaagacatgaacaggcaatccacagagaagtgacacaaacaacytttgtcacaggcagaaaacctcaattcaataagcaaatggcagctacccccatgcattttctctacttaccagtaacacaggctggggtttaaacaaatcaccataccaatgttgacaaggttttaattcaatggacactcaccttgaaactgccagggtggtggtgggttactaaacattcagaatttccaagagggcagtttgggctgtgtcttaaaaccctttgaagtgttcacaatgtattttccctgaggaacaactcagataaacaatgcaaaaatgcatatgcaaaacctttaatgagtgcatttaaaacagaaaaagttgtaaacaatatctatgctgttgccaa

SEQ ID NO: 378150 - DNA, 554 bp, Homo sapiens
caaaccatgggactttgcacagccaaaagctcgtatttacagattagtaactagactgattarggtatagaaataatgtctaactgacaaagtcttagtgcttatagggtaactgcatttagaaggatcaagacttctctgcaaagtttatgaatttctaatgtaagaacctttatagtgaggctcgttcagaaaatggaaaaatacaatacacaatgggcatttgcaggatgacccagaattaaaacagagaccaaaggtgtgggagctgggggttgggagatacatgaaagaccgggacagagttaaatgccttcgttactgttggctgctaggcacagacatccctaagtagagggtgttagcagccacatcataacctcactgtacaattgtaatctgagatgtattcatgtttattgagcccaattttatctaacagtttttttttaatagtaaactagagtgggttcatttattttcatactcttctagagtgtgtgctattttttcaactctgtgcaacgctaggaacgggaaaatgaaaatgacta

SEQ ID NO: 378151 - DNA, 554 bp, Homo sapiens
caaaccatgggactttgcacagccaaaagctcgtatttacagattagtaactagactgattaaggtatagaaataatgtctaactgacaaagtcttagtgcttatagggtaactgcatttagaaggatcaagacttctctgcaaagtttatgaatttctaatgtaagaacctttatagtgaggctcgttcagaaaatggaaaaatacaatacacaatgggcatttgcaggatgacccagaattaaaacagagaccaaaggtgtgggagctgggggttgggagatacatgaaagaccrggacagagttaaatgccttcgttactgttggctgctaggcacagacatccctaagtagagggtgttagcagccacatcataacctcactgtacaattgtaatctgagatgtattcatgtttattgagcccaattttatctaacagtttttttttaatagtaaactagagtgggttcatttattttcatactcttctagagtgtgtgctattttttcaactctgtgcaacgctaggaacgggaaaatgaaaatgacta

SEQ ID NO: 378152 - DNA, 598 bp, Homo sapiens
ccaattcttacttctttcggtgttttttaaaattttcgacctggaattgagttttgataaaagttttttaatgtttaaaataaggtgtaaagtttttctccttacayctcttatataacagatataataaacataatgtaataaaatgtaattatatattttgtgaatgagtttcctaatattaaacctatgttgtattccaggaatgaatcctatttgcatatggtgtatttttttttattctttgcaggtttagaaattattgttatactatcctcatgaaagtatttgtaaagcttttctttatatgtatgttctgtagtgagttttgtgccatagaatcatctattaacaatgtcatgaaggttggaacagttcccccgtggaactatctgagcactccttctctattccttctgcaattcctctatttaagttttctttctctaatggtcagttttggtaatcaggctttttctgtacaaaattctccactttgtccagtgtttaaagtttatttgcaagagagattttcaagtaatcttattattttttctgttatatttctcctccttggacattcttagtaattaaacgt

SEQ ID NO: 378153 - DNA, 458 bp, Homo sapiens
atatttgttccttgcagaataacttctgtgtgctgagaaccagctggggttctctaattcttaagttgcgttcttaaaacttttagacgtgaagaatctataaaacttgaagtcttgtttgagatttatattattttaattccaaataaaagaaagtcaattttatatgcctgattctcaaggaggagatgtattaatatttggcttaaaaatcaagctgcagggggagcaaaatgtaaccratctcagacacatctggaactaagaaattaaataccagcaaaactttctttctgcctctcatctttgatttttttttaattccaatttttctattctccttccttttagaccagtaccagagctgtgctgatttatgtcatctctaagtcctaattaaaaaaaaattccagggaaagaattttgatatggttggagtcagggttggtggtacaaat

SEQ ID NO: 378154 - DNA, 458 bp, Homo sapiens
atatttgttccttgcagaataacttctgtgtgctgagaaccagctggggttctctaattcttaagttgcgttcttaaaacttttagacgtgaagaatctataaaacttgaagtcttgtttgagatttatattattttaattccaaataaaagaaagtcaattttatatgcctgattctcaaggaggagatgtattaatatttggcttaaaaatcaagctgcagggggagcaaaatgtaaccaatctcagacacatctggaactaagaaattaaataccagcaaaactttctttctgcctctcatctttgatttttttttaattccaatttttytattctccttccttttagaccagtaccagagctgtgctgatttatgtcatctctaagtcctaattaaaaaaaaattccagggaaagaattttgatatggttggagtcagggttggtggtacaaat

SEQ ID NO: 378155 - DNA, 356 bp, Homo sapiens
ccactttgaatcagctggacccagtgcaacaagaaataaaaagacatctgtgtccttttgctactgatatatgagaaattaataacccttttttatagcactgaacaaattccaaaatcatcataggtatgtaactttcatattctctagtacatatggttagtagagcagggatttatttttcttttatacagatgggaacactgaggctcagagaagacacatgattttccaggtggcagatgttattgttagatcctttcaggaattaatccmcagtggtgaatggaaaagaaatttctatttaacttaaaattaatgggtaagaatgtcattctatgtatttcttctgaagc

SEQ ID NO: 378156 - DNA, 603 bp, Homo sapiens
attggtgataaagcactctaaatagtactgtggtttgttgtttacaattgtcattaaacgaaatgttaaatttctgttggatgttagtaagaataaaggaatatatttttttcctactcatgttcacagactcctgaaagagtttttgggggtatgctggaaaagaaataactttggatcaatccactgaacaaaacatagtaaggtctatgatggagcactagccagcctgaggatatcccaagactcaccacagagacaatgtgtgagctaggtcttacaagacaagcaagaatttgccagatgaataaggagaaaaatgaacgtttcaagagaaggaacaatgtgaacaatagcagaagggtgtggaaacttgtggaactgcaacacagagacaaytatttgtatttcattaatcctgatgcacaaagtaaagggaggagttgggggagatgagtctgcagagaaggacacgaatgtgcattggagaacgctgtacgcattgctgaggagcttggattttattcagtgagcaacggggagcctctgaagaactataatgagggaagttacatggtctgaattgtgttttctgttgagtgc

SEQ ID NO: 378157 - DNA, 603 bp, Homo sapiens
attggtgataaagcactctaaatagtactgtggtttgttgtttacaattgtcattaaacgaaatgttaaatttctgttggatgttagtaagaataaaggaatatatttttttcctactcatgttcacagactcctgaaagagtttttgggggtatgctggaaaagaaataactttggatcaatccactgaacaaaacatagtaaggtctatgatggagcactagccagcctgaggatatcccaagactcaccacagagacaatgtgtgagctaggtcttacaagacaagcaagaatttgccagatgaataaggagaaaaatgaacgtttcaagagaaggaacaatgtgaacaatagcagaagggtgtggaaacttgtggaactgcaacacagagacaactatttgtatttcattaatcctgatgcacaaagtaaagggaggagttgggggagatgagtctgcagagaaggacacgaatgtgcattggagaacgctgtacgcattgctgaggagcttggattttattcagtgagcaamggggagcctctgaagaactataatgagggaagttacatggtctgaattgtgttttctgttgagtgc

SEQ ID NO: 378158 - DNA, 416 bp, Homo sapiens
tgagtctaattgcattctatgtagagttatagcttctgtgtgggctaatcccacaatgttgttctaagaggtattcatggcacagccaaaggcccaagcccttctgccaattttttatttaacttaattctctatattaagtcacttcctgctaatttagttgagcctaaagatgatttggacctacaaaagagtcagagaaatgcaacttatggctagtcaggctctgtagaacactgaagcatrtgagaagggatatgagattcctgttggaagccaatctggcatagccattacaaacatttatggaggatgtttaactgttttctcattgtgaaattaatatggacttattactgaaaatggttaactgagaaaaatataaagaaaaaaatgaaatctctaagtatactgag

SEQ ID NO: 378159 - DNA, 610 bp, Homo sapiens
aaatagtaaaaataattaagagaattaaaagaaaagcatgaattaataataatataggtagtatgaaaatatggctctgtggaaattactcaatttggaggaaatccggattggatacaatttaaggtactattcatagccaaaattctatgtattttcagctattgctttggaaaataatatatatcatagaactctggaccttggggaaatgggtggagacacagagrgagaaggttattttcattactattgctgtgaagcaaatcaccttaaaattagtggctcaaaacaaccattatattatgctgattgataatgttggtcaagaattcagggagggaacaacagaaatggctcatctctattttaggttacttgaggcctcaactgggaagacttgaagggcctgggctgggaggatttaaagatcaggctgatgaccaggctacctacatgttggcttaactgtgtgacacagcttcctaacagtgtggcaacctcagggcagttgagcttcttacagatctgttcagtgctccaagaacaaggtggaagtagactcattgtttcagactaagtttaaaagtcatacagcattgcttctaat

SEQ ID NO: 378160 - DNA, 610 bp, Homo sapiens
aaatagtaaaaataattaagagaattaaaagaaaagcatgaattaataataatataggtagtatgaaaatatggctctgtggaaattactcaatttggaggaaatccggattggatacaatttaaggtactattcatagccaaaattctatgtattttcagctattgctttggaaaataatatatatcatagaactctggaccttggggaaatgggtggagacacagagagagaaggttattttcattactattgctgtgaagcaaatcaccttaaaattagtggctcaaaacaaccattatattatgctgattgataatgttggtcaagaattcagggagggaacaacagaaatggctcatctctattttaggttacttgaggcctcaactgggaagacttgaagggcctgggctrggaggatttaaagatcaggctgatgaccaggctacctacatgttggcttaactgtgtgacacagcttcctaacagtgtggcaacctcagggcagttgagcttcttacagatctgttcagtgctccaagaacaaggtggaagtagactcattgtttcagactaagtttaaaagtcatacagcattgcttctaat

SEQ ID NO: 378161 - DNA, 610 bp, Homo sapiens
aaatagtaaaaataattaagagaattaaaagaaaagcatgaattaataataatataggtagtatgaaaatatggctctgtggaaattactcaatttggaggaaatccggattggatacaatttaaggtactattcatagccaaaattctatgtattttcagctattgctttggaaaataatatatatcatagaactctggaccttggggaaatgggtggagacacagagagagaaggttattttcattactattgctgtgaagcaaatcaccttaaaattagtggctcaaaacaaccattatattatgctgattgataatgttggtcaagaattcagggagggaacaacagaaatggctcatctctattttaggttacttgaggcctcaactgggaagacttgaagggcctgggctgggaggatttaaagatcaggctgatgaccaggctacctacatkttggcttaactgtgtgacacagcttcctaacagtgtggcaacctcagggcagttgagcttcttacagatctgttcagtgctccaagaacaaggtggaagtagactcattgtttcagactaagtttaaaagtcatacagcattgcttctaat

SEQ ID NO: 378162 - DNA, 493 bp, Homo sapiens
gcagttgagcttcttacagatctgttcagtgctccaagaacaaggtggaagtagactcattgtttcagactaagtttaaaagtcatacagcattgcttctaatgtattcyattgattacaagagtcgcaagtccactcagaaacacagaccttatcattgaatgggaggagtatcagagaatttgcaactgctgtgtctcagaaaacattacaactaagtactttgacctaaaggagactggtggaggtctcagaagcaagaagctcactctgatttttcctgtctttctgtgtgaaggatggttgtaaaggaattgatatggttaggcttcctgtccccactcaaatctcatcttgaattgtcatccccataattcccataatccccatgtgttaagggagagaccaggtggaggtaattgaatcatggaggtgttttcccccatgctattctcgtgatagtgagtgagttctcacaaaatctgatggtttt

SEQ ID NO: 378163 - DNA, 493 bp, Homo sapiens
gcagttgagcttcttacagatctgttcagtgctccaagaacaaggtggaagtagactcattgtttcagactaagtttaaaagtcatacagcattgcttctaatgtattctattgattacaagagtckcaagtccactcagaaacacagaccttatcattgaatgggaggagtatcagagaatttgcaactgctgtgtctcagaaaacattacaactaagtactttgacctaaaggagactggtggaggtctcagaagcaagaagctcactctgatttttcctgtctttctgtgtgaaggatggttgtaaaggaattgatatggttaggcttcctgtccccactcaaatctcatcttgaattgtcatccccataattcccataatccccatgtgttaagggagagaccaggtggaggtaattgaatcatggaggtgttttcccccatgctattctcgtgatagtgagtgagttctcacaaaatctgatggtttt

SEQ ID NO: 378164 - DNA, 524 bp, Homo sapiens
catttctttctacaaaattgtccattctttacaccaccaaagcataaaaatacacggttttccctgagtatttgagtcattcctgaaagcttctgtttcatgtaaaactttgttaaataattttttgtagttctcttactaatctgtcttttgttataggagtattagctataaccctcatgaagggcaatagaaaggggtaccttttcgctcctacacagctatttttttttaaataaccttaaaggatgaaagtgagctacatggtcatgcttttaaattctatttcccacacttttacaaatttattcaactyggttatgaaattttctcactagtattttccatgcatgtgagtttaacagtgtccctccttaaatcaatattgcaagaataagtacttggaacaaagtcacctgacaagggtacaacagaagtatcaattaaacacttctaccacatttactgggttgcttatccaactccacaccctaaattcttttgatcagaaacagttgcctgca

SEQ ID NO: 378165 - DNA, 646 bp, Homo sapiens
tagttgttattcgtaaagtcctttgcaatcttggaatctctattagccaaaacaatttggctacccctttccatttaatctacattgtattcaaaatttcacttagagcatatttcagttttctgtttaccagagttaccagaygtaattcagagcaacaacaaccaaatagccatcattttttctacactgaattaaatccataacctaaaattttattttctttaacttttcttggcaaggtgatactttgcaaagtgctaccaagtacagaaaactaataaaagatctaagtagcagtatatattttaatacatacatataatgaatcgatatcaattatatatattaaaatacatattatacacatatatatgtacattgaaaaattaatacaagaaagtctgttgcctaaaggagagatggtttgggatttttaaaaacaaaattataaaaagtcaagttcaaaacactcatcataaccaaatccaatttcctaatctttagattgacattcccaaattgctgcaaagatttgtaaaaacaatgttcccattttgtcaatataaactgcaagaaaaagaatatattagaaggccctagaatgagttaatatctctggataaccaagtctcacactgattct

SEQ ID NO: 378166 - DNA, 596 bp, Homo sapiens
atttctaggcctcaacttccctctaacattcttacagatctctaaagatgtgtttctcattgtctgtcttgtagctcagccaagttatgatgggcacaaaggtagacaaacagttactgagttaggctatttaatggctttcacttaagatttcttggataagggatccttgcctagaaggagtttaatattttggccctgagccagaaagagtgctgagatgaactcttaatatcattttagcattttaagttagtaaattattgttcctttaaaaagtkttgtatcctagggaaaaaaaaaaatgattcctgatagagtatgctcatattaagaaccttccaaagacaagctgctgtcactgggctgtattcttgccacctcatggctggctctgctgatcagattcacagttcttctattgactggtgtaatgtgtccttatagtttctataatagtttctgaatcttagagctcatgaacagcaaacagaagtttacacaatgacaatatacaatatctatttctcacttcctctgaagatatcagtaggcaggaaatgcagaatgcatttattcagtcagttttaatttac

SEQ ID NO: 378167 - DNA, 559 bp, Homo sapiens
cagtgatagacaaaacaaggcaaaataaaacaaaataatactatatgtgatctctgaccctctggggcttacattctagtggaagaggcatgttcatcaaaatttataaaaaatttacaaaattatgactctgaaatgtgctataaaggagaaattgagagcctgtaatgggggaagggggaaggagaactggatctagagagggagatcagggaaaacatctttaataaartgcataatggatatagacttccaactaactttctatttatgaaacatgaaacaaatatgtatgtcctgttccaaaaatttggaacccaaatagtaaaacagctcttttttttttaaataaaactgttttgtgttgcatatacttaaaaaaaaattatcaaaaaatctaggttatctagatttttgtgttgcatatacttgcaatattattagaaaatctaggctatctcttgtattaatttcttgttgctactatagtgaattacaacaaagccacttagtggattaataaagcaatacaactttattatcctgaagttctggaggc

SEQ ID NO: 378168 - DNA, 563 bp, Homo sapiens
ggtcaaactttaaaacaaactgcgacattaagggatcttatatttagttgttattcgtaaagtcctttgcaatcttggaatctctattagccaaaacaatttggctacccctttccatttaatctacattgtattcaaaatttcacttagagcatatttcagttttctgtttaccagagttaccagatgtaattcagagcaacaacaaccaaatagccatcattttttctacactgaattaaatccataacctaaaattttattttctttaacttttcttggcaaggtgatactttgcaaagtgctaccaagtacagaaaactaataaaagatctaagtagcagtatatattttaatacatacatataatgaatcgatatcaattatatatattaaaatacatattatacacatatatatgtacattgaaaaattaatacaagaaagtctgttgcytaaaggagagatggtttgggatttttaaaaacaaaattataaaaagtcaagttcaaaacactcatcataaccaaatccaatttcctaatctttagattgacattccc

SEQ ID NO: 378169 - DNA, 515 bp, Homo sapiens
tctttttaaaaatataactttattaagatacattttatataccaatgaaatgtacccatttgaaagttatagtaatcaaccttgtaaccaccaccacagttgcagtatagaatatttccatgctccaaaaatttctctcatgcccctgtcaattaatcccccgtctacttaaccccattctcttgtccacaggcaaccactaatctgctttgtatcacatttgattacccagtctagaatttcatatacgtgagatcacaggatatatattctttgttktctgccttctgttcctaaacataatgcttctgataattattttgcttagctttgttttgttgtgtttttcagtagtttgttcattttttattgctgaatagttttccattttactgatacaccgctgtttgtttatccattcacatgttgatgtatatttagttttcagttttgggctattaggaacaaagctgctgtgaacatttgcataatagtctatatgtgggcacatgttt

SEQ ID NO: 378170 - DNA, 553 bp, Homo sapiens
agaatttcatatacgtgagatcacaggatatatattctttgttgtctgccttctgttcctaaacataatgcttctgataattattttgcttagctttgttttgttgtgtttttcagtagtttgttcattttttattgctgaatagttttccattttactgatacaccgctgtttgtttatccattcacatgttgatgtatatttagttttcagttttgggctattaggaacaaagctgctgtgaacatttgcataatagtctatatgtgggcacatgttttcattttkttagataaatatccaggagagaaattgctagaccataggttaagtgtatgttcacttttaaagcaatttccaattttccaaacaaatggcataactagcttatgacttccccaatttgcaggtgctgcagagatggcttagtgttttactttcaagtgtggagttgctttgccactattattcttaatttgaggattttagatgatactctgaaataacggaaacatttctatttaactaacatataaaatgcttagtttaactt

SEQ ID NO: 378171 - DNA, 544 bp, Homo sapiens
taacacatgcccatacaaacgcttgtatacagatatctaattcagtgaactttgcaaagaaaattggttaacatgttaatttaaacaaacaaatgaaacacacttcattttaacctcagattatgccctacattctagaagtgtaaaagaatcaggggtcaaaaaattaagctatttttaaccgaatctgacctcaggatgggaaagagagtgaaaaattaaaaagcaatggaagtaagcacaaataacaaggtgaattacaatagatcagactacaagcaaccgtaaaattttgcgtgaaagactgtaagaaatagtagaaagctattaataaggattgtggtaaatgtggatgcrctaaaatggcagggtatcatattaattttataaaaacaagttgcatgtaggccaattctgtagtttaaaaatgaaatatatgcatacatacctgtgttattggtgatgtatatcatctatatcctgggcttttatatgttaacgcaatcatagcagctgaaaatttatctactttatatatttatat

SEQ ID NO: 378172 - DNA, 551 bp, Homo sapiens
tgggaaaatttaaatttcaaagtcatccacaagaacttggagaataaccttgatggaaaatttctagcaggactaccgagatctttaatgccaaaaatcaaaagaaacagatgaacagtcccttgaagaatttattcctctcctgatggtaactttgttaaacactgactcttatactggaaatgatgaaacaaatgttatttctgcctgtgagaagttacagtggagggaagagtctacaaacagacatactcatacactgcagcagtctatatatgcaaggccagtaaaaactctgggcctttttctcactgggagctttgggttcaaaccccagatcctccatttactaagaaataagtgacaccttgaggaagacactttatcttttagaatatctggttacttatcttcaaaatggaaatgataatatgtctaagacaagactgtygagagaattaaatatgagagagcccaacttgcaaacacataatacttatttttgtttactttctatctgaattaaagcattctgcaaagggccaagttta

SEQ ID NO: 378173 - DNA, 618 bp, Homo sapiens
gttgattcctagaaacagggccagagaacgtgtaaaagaaggagaaaaaaggagtgtgctattgagttggcaaacaacatgggcaacttcatctaaacagaccttctgaggagcttccaaaacaactttcagaatttcccaccagatcatctcsaaaaagaaacatttatcaactccagtacccactgaaggttgccctagggtgtactaactcctctgtacttatacgtatgccaaaaagagaaaccctcagctgaaaagcaaaagatgtgctatacacacttaagagtgagctgctaggagagcaagatgagttaaatttcatatggaactaggcaaaagccacagtggacatcagagatgaagctgaggggatggaggtaagagggatacagcaggaatctggtaccttgaccttcaagatttattttaataaattgtctaagctcattcaacttatttgcagcacatgttaagaattattaccccctcatcagagcacatcctttagttgatgtatgtgtatttaacctattattttagaatttggcataattattggctgtgtcctcatctgaatatatagaatttctcacaacatcctactttacatagtag

SEQ ID NO: 378174 - DNA, 558 bp, Homo sapiens
agatgtgtcagcttcttgaatcaaaatctacatgtattttgttcgctatgtataaagtatccccatggcctcaactaaaatgccttctgggactcggcagggaatgtgaataagtgacattataggagtgcagacccagtgggaattggacagtatatgccctatttaaaggcacccaattattattatttcaaaatactatgtggctaaataaagtaatgataataacaaaaacaataaactgttattgatgttatctaatagttggtagaaataaacactttattattagtattatcattattatcatcattatcattatattttcatcttatgtactctactatttgatttatgaaatttaaatattatcctttggctcccacatgttatctattcagcaaccaatacatttattcaattttcctctttcttcttttttatgtttatttctactagatcaggtcacayaaccttatgtactcttgttcctcccttgtcttcagctttgttgtattgctagatcttaaaaaaatgtctagccaatgtttactttac

SEQ ID NO: 378175 - DNA, 623 bp, Homo sapiens
aaaccccttgtggcctttggaacaccaagctctgtgctaaagggtggaaggctaccctgatgcaccataatcaaagcccrgggcataaaacccctcatggcttggatagaatccagggcttgtggcctctggaatgtgcctagacttgctggctccttgctccttgctctcccaggatcgattgtatcttgagttaaaataacctgctgcccattatctcaagtagcagagcaaatactaaaccatcacagcagtaaatcgtgtgcttaatacaacgctccctttggacccccactttctcaccacctgtttctttgttggattaccaataaatagtgtgggctcccagagctcggggccttcacagcctccatacactcatgatggccccctggacccacttttctctctcaaactgtctttttctcattcttttgactccactggacttcgtcactcccacggcttggtgttgggtctgatcaccccaacatgaattatttcctaatttgcccactaaatcagatctccctgacacccaggcttgtgtgtgcagccttccctggtttcctctgaccttcatcttcatccttcaacaagaaactactcacggacaggttctc

SEQ ID NO: 378176 - DNA, 518 bp, Homo sapiens
ggaagttcatctcctgggctgtgtgcagatatggatatagccgaagataaattagtttatatgtcttctcaattttgcgtttagaaagtctagactcttcaagtctatataaaaaaaattatctgcacatttatgtgaaaaaaaactcatttttttttaatgtttgcctagcatgagcctttgaagatattatctggacacagatcttcctcaagctttcagatactattgttatttgatgtttgtctcatattgaccaaactggtcctaaagactgcttattaggtagatttgtaacaacttttgtttgttacaaaccaccctaaaactgaataaytagagacaataacaataatgtattttgctcacaaaactgtaacttgggtaggtttgggtggagaaggctcatttctattttatgtggcattagctgggatctcttaactagaagctggggaatttatttctaatataaatgacaaattgttgctggctgtgagctggaaactcagcagagc

SEQ ID NO: 378177 - DNA, 518 bp, Homo sapiens
ggaagttcatctcctgggctgtgtgcagatatggatatagccgaagataaattagtttatatgtcttctcaattttgcgtttagaaagtctagactcttcaagtctatataaaaaaaattatctgcacatttatgtgaaaaaaaactcatttttttttaatgtttgcctagcatgagcctttgaagatattatctggacacagatcttcctcaagctttcagatactattgttatttgatgtttgtctcatattgaccaaactggtcctaaagactgcttattaggtagatttgtaacaacttttgtttgttacaaaccaccctaaaactgaataactagagacaataacaataatrtattttgctcacaaaactgtaacttgggtaggtttgggtggagaaggctcatttctattttatgtggcattagctgggatctcttaactagaagctggggaatttatttctaatataaatgacaaattgttgctggctgtgagctggaaactcagcagagc

SEQ ID NO: 378178 - DNA, 662 bp, Homo sapiens
aaccttggtaggaccctctgtagaggcaagagaaaaccattcctgtgcaggaaacttctgtagaggcagtatactggtctgttttcacactgctataaagatattacccgagactggctaatttataaagtaaagagatttaattgacttacagttctgcacggctgaggaggcctcaggaaacttacaatcatggctgaaggggaaacaggcacatcttacatggtggcaggcaaaggaggaactgtcaaacacttataaagccatcaggtctcttgaraactcattatcatgagagcagcatgggggaattcacctccttgatccaatcacctcccaccaggtccctcccttgacacctggggattagggcattacagtttgagatgcgatttaggtggggacacagagccaaaccatatcagtcagtagagtgtagagcttaaaagctcagttggatcctagcttcagtacttaaaagcaaactgaggtaaactgtctctcagtttcctcctctgcaaaatcaaaggtagaaaaagtaccatattatagtatccctttattataggtatgtagtaaaaattgggaaagatgtctgcctaataatctgtactactgaagtgtttactattattttattgctttcttccaagattgatatg

SEQ ID NO: 378179 - DNA, 577 bp, Homo sapiens
acttagtatacccattacctcatgctttatcattgatttgtggtaagaatattcaaagcctctcttctagttgttttgtaatatacaataacttgctgttayccaccatcctgctgtgtaatagaacaccagaatttattccacctatttaactgtaactttgcatccgttgacataaatgtctccattgtcccttcctcagtctctggtaaccactgttctaactctgctttgatgatatcaactcttttgtcattgtcgttgttgtttgtttgtttgttatattccacgtgagtgagatcatgtggtatttgtctttctgtgtctggtttatttcacttaacatgatgtcctgaaggtccatccaaaaatgacaggattttattatttatttattgccgaatagtattccattaggtatatacactacaatttcatctagtgttgaacacttagtttgaagggttgatttaatatcttggctgttgtaaatagtgttgcaataaacatgggagtgcagatctcttcaacatactgatttcatttcctttggatgtatacacaatattgttgaatc

SEQ ID NO: 378180 - DNA, 554 bp, Homo sapiens
cttgctgttatccaccatcctgctgtgtaatagaacaccagaatttattccacctatttaactgtaactttgcatccgttgacataaatgtctccattgtcccttcctcagtctctggtaaccactgttctaactctgctttgatgatatcaactcttttgtcattgtcgttgttgtttgtttgtttgttatattccacgtgagtgagatcatgtggtatttgtctttctgtgtctggtttatttcacttaacatgatgtcctgaaggtccatccaaaaatgacaggattttattatttayttattgccgaatagtattccattaggtatatacactacaatttcatctagtgttgaacacttagtttgaagggttgatttaatatcttggctgttgtaaatagtgttgcaataaacatgggagtgcagatctcttcaacatactgatttcatttcctttggatgtatacacaatattgttgaatcatattagttctaatttcaattttttgtggaatccccattctgttttccatagtggctatattaattta

SEQ ID NO: 378181 - DNA, 660 bp, Homo sapiens
ctaaaaaggaaatcaagaaagcaatcccacttacatagctacaaagaatgtaaaacacctagggaccaatttagtcaaagaaatgaaatatatatacaagggaaactataaaacactgataaaagtaattgaagacgacacaaaaaataaaaagatattccatcctcctggattggaagaattaatattgtaaaaatgacagtactacccaaagcaacttacagattcaatgcaatccctatcaaaacaccaacaacattctctacagaaataataacaaccctgatatttatatgaaaccacaaaagaccccaaatagccaaagcaatcctgtgcaaaaagaacaaagctggaagcatcatacaatcagacttcaaaatgtactacaaagctataattagcaaatcaggatggtactggcataaaaagagacaacacatagaccaacgaaagagaayggaaaatccagatataaatccacacatttacatcccaaatcatttttaacaagggtgataagaacattggggaaaggacacattcttcagtaaatggtgctgggaaaactggagaactgtatttagaagaatggaactagacctctatctcttccataaacaaaagtcaaatcaaaatgaattaaagacttaaatataaagc

SEQ ID NO: 378182 - DNA, 620 bp, Homo sapiens
aacagcatgctctaacaggttttgagcagggagagtaaaaagaagattaaacatataattcttagctttctccaaatttctgtgtagcatattaaactaaatatttaaagaaggtatctccaacattatcattaaacataataactgagaggaatgatgacacctgttcactttttaagactaaaatcttctgatattagcttgatttagaatgtttattcattctgtgaggcttcttctcaaagagaaagtgtggaggttattytgagaaacaaaattaatggcaaaaaataccctagaaactgcacgtagcaacaaggagaaaaatggtttctgaataatgctgagaatatacagagagataaaagcagagatcatgcacaaaacacatttgaacaatgctaatatcacagtgagattataaacatgagaaactaaaatgaagtggttaaaaaaattaaattcaatttagagtaagatagatataagtagagaaaaaaaacagctattcttcattcccaatattggtatgctttctagttcctcaaaaggaaggagggatttctgataaaattgttcaaagatctaagccatccagtaagttacattttactcataag

SEQ ID NO: 378183 - DNA, 568 bp, Homo sapiens
ttatttctatccatgtggccggggcttatgaccttgctaagctgtttcctttcttctctgcmtgcagtggggataaataagttgagccagggaccattataaataaaccagatttcttactttcttctaaatataataaaatatttaaggaagatccctgttccctgaaatggttttgatttctttggatacaagcatttcaatatcctcatttttttttcatttttgctattttatggcattccatttataaacattcctttgagttggatttaaatcatgctgttgaatcccctaaatttctatgtgacataaaggattaacaaataatgcatttgtgtcacatcaaaattacattcagtttgtgggaaagtaatttgaaataaattctgtaccatagtggatctactcaaagcacacagaaatattcaaaatgaaattccatgtatattttagatattttcttctagagacggatttttaaaagcctaaatttatgacccaaactactaaaatcaattcctcatcttaaacacaaaactaaactacatttcccagctttccttgc

SEQ ID NO: 378184 - DNA, 682 bp, Homo sapiens
atggagatcacccacatagcaaacttggaaaccttgtgttgagcatggcagaataacactgtggaataagctagacttattgtactatgacttgaagaagaattacctagtaattggaactatcattttggacttcatatgtyataccaatagatataatttttgtaactaccatgttttgaaggtttatcatcacattttaatgaaggcaatgtaaaataaaagtaaaataaatctaaatatgtcttaataaattacctgcaatgttaaaaacataatgtatcttaagggaaagagataaactaaatgccacttcagttgttgtccttttgggagatcattctcaatggcatttgttcacaaatgcctgtctctgtatcatccctctgggacttggaaaacaacaggggaccactgagtatataaagctcatgctgcctgctgtgctatgcataatacagtccattacctctagtgtcttctgacatgtataaaactgtaagaggctaacatgctagcttgcatataggataaaatctcaaattactcacagttcttgacagttttctccagatatttaaaaaatcaagttaggtcccatgtttccatgtcaaagtagatgaaatgttgctttttgttttcttggccttttttgaccactgtcctcgttgttcgccccacc

SEQ ID NO: 378185 - DNA, 682 bp, Homo sapiens
atggagatcacccacatagcaaacttggaaaccttgtgttgagcatggcagaataacactgtggaataagctagacttattgtactatgacttgaagaagaattacctagtaattggaactatcattttggacttcatatgtcataccaatagatataatttttgtaactaccatgttttgaaggtttatcatcacattttaatgaaggcaatgtaaaataaaagtaaaataaayctaaatatgtcttaataaattacctgcaatgttaaaaacataatgtatcttaagggaaagagataaactaaatgccacttcagttgttgtccttttgggagatcattctcaatggcatttgttcacaaatgcctgtctctgtatcatccctctgggacttggaaaacaacaggggaccactgagtatataaagctcatgctgcctgctgtgctatgcataatacagtccattacctctagtgtcttctgacatgtataaaactgtaagaggctaacatgctagcttgcatataggataaaatctcaaattactcacagttcttgacagttttctccagatatttaaaaaatcaagttaggtcccatgtttccatgtcaaagtagatgaaatgttgctttttgttttcttggccttttttgaccactgtcctcgttgttcgccccacc

SEQ ID NO: 378186 - DNA, 682 bp, Homo sapiens
atggagatcacccacatagcaaacttggaaaccttgtgttgagcatggcagaataacactgtggaataagctagacttattgtactatgacttgaagaagaattacctagtaattggaactatcattttggacttcatatgtcataccaatagatataatttttgtaactaccatgttttgaaggtttatcatcacattttaatgaaggcaatgtaaaataaaagtaaaataaatctaaatatgtcttaataaattacctgcaatgttaaaaacataatgtatcttaagggaaagagataaactaaatgccacttcagttgttgtccttttgggagatcattctcaatggcatttgttcacaaatgcctgtctctgtatcatccctctgggacttggaaaacaacaggggaccactgagwatataaagctcatgctgcctgctgtgctatgcataatacagtccattacctctagtgtcttctgacatgtataaaactgtaagaggctaacatgctagcttgcatataggataaaatctcaaattactcacagttcttgacagttttctccagatatttaaaaaatcaagttaggtcccatgtttccatgtcaaagtagatgaaatgttgctttttgttttcttggccttttttgaccactgtcctcgttgttcgccccacc

SEQ ID NO: 378187 - DNA, 438 bp, Homo sapiens
ggatattatgagattctcttttaccaaatttgtgcttccatagtttagcaaattacattagacttggatctttttctcatctttatccaatcaccctctcacttatgtcctagaatctccacaatcctacaggttcacatatcactcctgatgttacttttcttctctgaatcacccagggtaggcttgagcatgaaatgatggtataatcagaaggtatttgggaccccctcttaaacattgaaccccacatcaataacttcccgaatcggatatggagaaaacctaggaaattggttaaaacaattacctctttagtcttacctgcattgacccscttaaaaaataggatttcttcttctttatctattaatatgtactccctggtctccctgtctcctgtagacttgatattcaagaaacttttagcagtcttta

SEQ ID NO: 378188 - DNA, 538 bp, Homo sapiens
atctttattctaattatagtcaaaatcacttgaagccaaattgttgaggatacaataatgataatttactattattaataatgattattgttggtgattttcagccaaatgatttcaaattggctaatagaaatttcttactgattaaaattcaaattactgagcctatatgattcaggtgcccaaaatgtagttcaatccaccagtttatataaattggaaatttccgatttccatttaatctaaattaatcatgatatacagagatccacctaactgttatagtgaagatgayagcacatttaaaaatgttttcatactttctaattgatggagaatggcatactaacagttatttttaaaaaatgaacaacactttaagaattgtgttcaagctttgggagtagaacccatttgaggatcatcctagcactactcagagcactaccttttgaggtaaataagaccgaacatgaacattacattctgagcactagataattttgcacagctgattaaattatctcgttttgctcta

SEQ ID NO: 378189 - DNA, 597 bp, Homo sapiens
gtacagactatatcaggcatagtttgtcctgaaggtcccactttgtccatgctaatccagtttgtctctgcttccatctgtatccaggtttccttttagactgccggtctggctgacctacagtatctacaggttcctcatcagatgcagagtaactgactgctctactagctcctctaattgtgagatgcctatgatgaatccttattctgtatctcccttagcagttttgcttctctgatcaaactcargcccatataagttataagaggaagagggtacatcactaaaaattaagagaccctcaactatgggtagaaggattaaagggaatccccaaagaaaccataagagtgccctgcgctcaggcagtcagctttctcctttagccaagcccagaaaacagtttgattggcataatccgtaaccacaggaatctaggctttccacctacaacagagcctgactggagaaaaaggcgtacctgtcattttgcctgaaattggatactttgatttttaatatacaggcgtgggcatccattgcaccgaaataagactgatttgtgacttaaggtgatagcagcttgaattagct

SEQ ID NO: 378190 - DNA, 597 bp, Homo sapiens
gtacagactatatcaggcatagtttgtcctgaaggtcccactttgtccatgctaatccagtttgtctctgcttccatctgtatccaggtttccttttagactgccggtctggctgacctacagtatctacaggttcctcatcagatgcagagtaactgactgctctactagctcctctaattgtgagatgcctatgatgaatccttattctgtatctcccttagcagttttgcttctctgatcaaactcaagcccatataagttataagaggaagagggtacatcactaaaaattaagagaccctcaactatgggtagaaggattaaagggaatccccaaagaaaccataagagtgccctgcgctcaggcagtcagctttctcctttagccaagcccagaaaacagtttgattggcataatccgtaaccacaggaatctaggctttccacctacaacagagcctgactggagaaaaaggcgtacctgtcattttgcctgaaattggatactttgatttttaatatacaggygtgggcatccattgcaccgaaataagactgatttgtgacttaaggtgatagcagcttgaattagct

SEQ ID NO: 378191 - DNA, 573 bp, Homo sapiens
gagaacatgtaccaaaaactgatttgagttttatagttgatcctgagttatcccgtcaaacaacaatgtayagctactagacgacaacaacaataaagtcatgtcatcaacatgttgcaggatatgtatcttttgcttttccatagtaatagtacatattcattcagttcatgtaagagctgtggttattaatccaaagttaaagagaaagaatgtcaaaaattatgatttttgagaaactgggttttggtgtgtttttcaacgtcatatcaccagcagtttcataggtaataaaattatgtatctttatattacattaatctacattgtttacattataattaaacagaatttaatacactgcttgaaaattaagtttatacatgcaatgttataatggtataaatcacttgaagtctataattttagacaaaagttagtataatctattttgctattgttcaaccatcctattcttagtggatgtttatattttgtcatgtgtcagcagaaaaaaatggcagaaattttcctatgattgactatgagaagtaatactagcaaagtgcaata

SEQ ID NO: 378192 - DNA, 598 bp, Homo sapiens
ttttcatctttttggacttcatttttgagttcctaaaatattcttataatatttataatctttatgcatatattcacacacatatatgaataatatgtatttcatttgaatttgtatcattgaataacaaattaaattacttagtacttaaagaaataagtattatttctgtatcatttgtctctaaaacctttagtgcttttcattaaattaatgcatacatattctaagattctgttgttaacctatttatgagacctagtagtagagcatggcaggaaataaatacatcaataaggactcttaaggttaggtgttccatctgttactactaatatcctgtctttcctcggaatggagttgatgcctagcacacatacgttcatataaaaatcgagattagaaagacttagttgaattataatgkcaaatacagccacgtactgcataatgacatttcagtcaaaaagacagaccacatatatgacaggggtcccttaatattacaatggagctgaaaattcctatcgcgtagtgattttatagctgtcataacgtcatagtgcaattcattactcacgtatttgtgacgatgctg

SEQ ID NO: 378193 - DNA, 550 bp, Homo sapiens
gcacttacacagaacatgctcatgcaacaaagaagttgatgccattaccactattaaaggaaatatgaatttcaggcacagttacaatgtcaattacaggcatggttagaaacggaatttaaatagaaaactggggatggatataaataaatggccattcattctttgtgtaattttctacacaaaaacaataacagactctatatgaaaactattgtgctgaactatagatctattttttttctccttatatgttaaaacatccacatggttttctatcctaggctttgaaacagtgaccactgggaaatgtgatatcttagctgacaaattattaacatagaggatcttaccgtgttgttgtgaatgaaataatattacatattgtataactttatagcagtaacattatacatataacaaaaggttcacttgtagaaaacagggatatagcgatttttcagatatagtgaagcagaaattttttcaatgyactggaatatgcacatttgaattctgtctgagtgagccttcacatatagtcaagttt

SEQ ID NO: 378194 - DNA, 639 bp, Homo sapiens
cacttattgaatcgtaaaaacttctgtctctgagtgataattctgataccccagataataaatgccccatgtcttggtaagtcttggctacctccattagaactttgactagtgtaggctaaagtcccagtagttgcctttggaacagtttcacacatcttactcccgttatgatcatagtcaagttagaaactaaaggtcttctatacatgaactactgctaagtcagatattccttatccagttatatttttgtcttgaatgtaaacctttatattgatctatagtcaattgtttttgttcgtttcaaytaatttttctaagcaattgaaaattttctgtatttgaattctgtcatcttgcatatgtattatatattcatgtattagttttctattgtggctataacaaattcttatacacttaatggcttaaaataagtattatatgtattatatgttcctgtattagttttctattgtggctataacaaattcttatacacttaatggcttaaaataagtattatatgtattatatattcctgtattagttttctattgtggctataacaaattcttatacacttaatggcttaaaataagtattatatgaattatatattcctgtattagtttt

SEQ ID NO: 378195 - DNA, 601 bp, Homo sapiens
taactgaggtaaaatcaaggtgtctttagggctgtgttctttcctagagtttctagaggagaacctttatttgcattttccagaaagaaaatggcttctagaagccatccacattcctttattcgtacactctttcatcttcaaagccagcaacattgcatctcccagacttttctgctgtctcatctctctgaccatagctggaaaaggctctgttgttatcaactcaactgattaaaatgaatccagtaggatttaycttataaaatttccctaaccttaacgtccttaaacataatctttttctcatgtaacataacatatccagggttccagaatttaaaatggagatattttggagaacccattattctatgtaatacaattccttattaattcacaattatgaatgaatgaatttaattatataagccagataataatcaatttctgaggcaatatcatgtgtctatataagtgctagacaagtttctagaattacagtcatcagttgaaatcggctcccattataggcgtgtagcagcgacagctacaactctattaaaaaactgttacagtggcataatgaaaatgtataacg

SEQ ID NO: 378196 - DNA, 515 bp, Homo sapiens
taaaaatgacacgaatcaatttactccctctcaggaacatgaaaaactaagaaaacatgctatttggtgatgaagaacagacccccaaatcatattatgaaaggcagatatagggacataataaggtataaaagaatgttaacagagagaatgcaaaaagaagtggtagtagaagaaaacgtggctctgagatgtggagaaaatggctcaaattcttgatctgctagaacctattttcattcacttgagaattatctatttactgtttcaacatataggagatccttgagatctttgtattttttcaacccttctacttttatctaagatagtttgaatggattactcttgcaagcaaacaaaagccttgaatagaaccaaaaaactttacttaatgacattttctcttayttcaaaaatttgtcttcatttttgtttagtttaagaatgttgcacaattattcacccagctttgccctctcaacctgccatggtggcagaccaaaggacaggga

SEQ ID NO: 378197 - DNA, 592 bp, Homo sapiens
aaatttattttacagttttagtacccaaatagtattgaatttctaggaaatctaaaatcatgaaaaaataagcaaatgaaagttaacctttcttcctgaatagtttggtggtwtttaagcacacaaaagaacttcagcaatgtctatgaaaagatatctttgaaataatggagctggcttacgagggatatctattcctacaaagtagagattaacatatttaattaaaatagtccagagaacacagtctaacatttgtcctaaaataagatgaacattttcacaattattatgcactcaccactttctccctactgacttgccttatttttccttctctgatctcaaaactccaatcatgcaggcatatatcaaatgctatgtattaaccttttataaattcacactattggttctattgaattaaaacatttatatacatatatatatattcatacctatctgtatatccatctagaaattttttaaagcaggtgaattaattcaattacatttaatcattgctaacatcagcatgacatattcaaaggcatatcactttttaaattaatactgaaatttcattgcataa

SEQ ID NO: 378198 - DNA, 563 bp, Homo sapiens
atctgcccagcttctagggaggcctcaggaaacttatcatcatggtggaaaagaagggggccactttatatggtgggagaaggaggaagagggggtgaggtgcctcacatttttagacaaycaaatctcacaagaactcactcactgtcatgagtacagtactaagggggatggtgctaaaccattcatgggaaatccattcccatgattcaatcacctcccaccaggccccacttccaacactgaggattacaatttgacttgagatttggtagggacacagatccaaagcatatcattctgccactgccccatacaatcacacctttccaatagttctccaaagtcttaattcattccagcattaattcaaaattccaaagtccaaagtcttatctgagacaaggcaaatcccttccatgtatgagcctgttaaataaaaacaagttacttacttccaatatacaatggaggtataggcatttggtaaatactccagttacaaaaggaaaaattggccagaacaaaggacctatgggcctcatgcaagtctgaaacccaca

SEQ ID NO: 378199 - DNA, 563 bp, Homo sapiens
atctgcccagcttctagggaggcctcaggaaacttatcatcatggtggaaaagaagggggccactttatatggtgggagaaggaggaagagggggtgaggtgcctcacatttttagacaaccaaatctcacaagaactcactcactgtcatgagtacagtactaagggggatggtgctaaaccattcatgggaaatccattcccatgattcaatcacctcccaccaggccccacttccaacactgaggattacaatttgacttgagatttggtagggacacagatccaaagcatatcattctgccactgccccatacaatcacacctttccaatagttctccaaagtcttaattcattccagcattaattcaaaattccaaagtcsaaagtcttatctgagacaaggcaaatcccttccatgtatgagcctgttaaataaaaacaagttacttacttccaatatacaatggaggtataggcatttggtaaatactccagttacaaaaggaaaaattggccagaacaaaggacctatgggcctcatgcaagtctgaaacccaca

SEQ ID NO: 378200 - DNA, 563 bp, Homo sapiens
atctgcccagcttctagggaggcctcaggaaacttatcatcatggtggaaaagaagggggccactttatatggtgggagaaggaggaagagggggtgaggtgcctcacatttttagacaaccaaatctcacaagaactcactcactgtcatgagtacagtactaagggggatggtgctaaaccattcatgggaaatccattcccatgattcaatcacctcccaccaggccccacttccaacactgaggattacaatttgacttgagatttggtagggacacagatccaaagcatatcattctgccactgccccatacaatcacacctttccaatagttctccaaagtcttaattcattccagcattaattcaaaattccaaagtccaaagtcytatctgagacaaggcaaatcccttccatgtatgagcctgttaaataaaaacaagttacttacttccaatatacaatggaggtataggcatttggtaaatactccagttacaaaaggaaaaattggccagaacaaaggacctatgggcctcatgcaagtctgaaacccaca

SEQ ID NO: 378201 - DNA, 610 bp, Homo sapiens
ttaataatggggataatatctcctgcaaagttttacagtattacatttgaaagcagaagactttctgtggaaagcattttcctcatatagaagcagcacaaatgttactgggtatacatcatttatatattttaaaaggtactagtaytatgtagacatggaactctataagatcacttagtaggttagagacttttatataatttttgagagattttttggaaatttaaagtaatttactcttttcctaaaaagaaattgtaatttcttttaaaacatccagaaaattaatatgctaaaatgaaaagataagattacccatacatctccattctgagaatccaccttaactttgtgtttacacttagcagaattgtttaatgtatctgtatgcatacatttttaattttaataaaattaaagtaatacttcatatgctattttaatttatctcagtgatataatgttaatacattaaagcattttcatgatagtattttccatgtcagtgtaaagttccatcctaataacttaatctttcaaacctcagtgttatgacttgaagattattcatatattttccactatcacaaataatattacattaaaa

SEQ ID NO: 378202 - DNA, 584 bp, Homo sapiens
ccagtgagagtcctcagcagggaaatattaaatctaaagtataaatcctcattttctctttgtaatataatatgtgtacccttactggagctgtggttatgtcttctagcttgctctcagttgtgctacaataaattaagagaagggttctgtgttttcctttggttgaaatattggcagaggagcattactctgctgagttctgcatcttgggcaagtactatagtttaactccatagctgccctttcctccagtcaatttgcccagcagtgattaatatctaagacccttccaaaagagaaagtgacccaggaggtagaaagaaactatttaggcagaaagtgagggcaaagastcctcagcagaacttcccttctaacaaaaagcggcccaagaaatcacttattttctaacagaaagcagcctggaagatcaagctgcaaacaaagataaggaggtctgtaacaaagagctgttctctttctttctcctattatatttctgctctaaacctcacccttggtgtgtccgcatccttgatttccttgacggtgagaccaagaactctgggtgtcactccaaa

SEQ ID NO: 378203 - DNA, 470 bp, Homo sapiens
aatattggcagaggagcattactctgctgagttctgcatcttgggcaagtactatagtttaactccatagctgccctttcctccagtcaatttgcccagcagtgattaatatctaagacccttccaaaagagaaagtgacccaggaggtagaaagaaactatttaggcagaaagtgagggcaaagagtcctcagcagaacttcccttctaacaaaaagcggcccaagaaatcacttattttctaacagaaagcagcctggaagatcaagctgcaaacaargataaggaggtctgtaacaaagagctgttctctttctttctcctattatatttctgctctaaacctcacccttggtgtgtccgcatccttgatttccttgacggtgagaccaagaactctgggtgtcactccaaacaatgaggctgcttcaaaaggactcttacaaacaagggttgaggccgggcgtggt

SEQ ID NO: 378204 - DNA, 584 bp, Homo sapiens
ccagtgagagtcctcagcagggaaatattaaatctaaagtataaatcctcattttctctttgtaatataatatgtgtacccttactggagctgtggttatgtcttctagcttgctctcagttgtgctacaataaattaagagaagggttctgtgttttcctttggttgaaatattggcagaggagcattactctgctgagttctgcatcttgggcaagtactatagtttaactccatagctgccctttcctccagtcaatttgcccagcagtgattaatatctaagacccttccaaaagagaaagtgacccaggaggtagaaagaaactatttaggcagaaagtgagggcaaagagtcctcagcagaacttcccttctaacaaaaagcggcccaagaaatcacttattttctaacagaaagcagcctggaagatcaagctgcaaacaaagataaggaggtctgtaacaaagagctgttctctttctttctcctattawatttctgctctaaacctcacccttggtgtgtccgcatccttgatttccttgacggtgagaccaagaactctgggtgtcactccaaa

SEQ ID NO: 378205 - DNA, 541 bp, Homo sapiens
acccaaatctgatcttgaattctcatgtgttgtggaagggacccagtgggagataactgagtcaggggggatgtatttcccattccgttcacttgatagtgaataagtctcatgagatctgatggtttaataaagaggagtttccctgcgtgagctttctctctctttgcctgctgccatccatgtgagacgtgacttcttcctccctgccttctgccatgattgtgaggcctccccagccatgtggaactctaagtctattaacctctttcttttgtaaattgcccaatctcgagtatgtctttatcagcagcctgagaacagtctaatacartctcttaatgagtttaccctttaccacgctaatttaccttagttttctcacttgtaaaataggaaattataacagaactcataaacattaaattggctgaaatattcaagaaggcagatggacacataggaaagtcttggtaaagagcaagtgttataacttttattttactatgtagcacacccttttatccaaagtgttttgctg

SEQ ID NO: 378206 - DNA, 541 bp, Homo sapiens
acccaaatctgatcttgaattctcatgtgttgtggaagggacccagtgggagataactgagtcaggggggatgtatttcccattccgttcacttgatagtgaataagtctcatgagatctgatggtttaataaagaggagtttccctgcgtgagctttctctctctttgcctgctgccatccatgtgagacgtgacttcttcctccctgccttctgccatgattgtgaggcctccccagccatgtggaactctaagtctattaacctctttcttttgtaaattgcccaatctcgagtatgtctttatcagcagcctgagaacagtctaatacagtctcttaatgagtttaccctttaccamgctaatttaccttagttttctcacttgtaaaataggaaattataacagaactcataaacattaaattggctgaaatattcaagaaggcagatggacacataggaaagtcttggtaaagagcaagtgttataacttttattttactatgtagcacacccttttatccaaagtgttttgctg

SEQ ID NO: 378207 - DNA, 568 bp, Homo sapiens
ctattgttagcttacatttacctttcaccactacattaaaaacaactctttgaaaaaagaaaaagaaccacttgtacaaagactgaattatactgtcattaggcttcagttcaaggagaacatgttatgttaaatgaatgtagagtggtaaatgccacygctaacataaatgtaataattactataataaaaaatatacaatttacattgtgcttcacatagaaaatgtaagtctaatcataaggaaaagagatggaaaattagaggcaaatagagatgaatacatctagtttaagaaagtataattatcaaaccaaaccgagcattaatttttgtacttatttattaaagttgtcattagaagagagaaaactagagttagctaatctattcagcatcaaacaggacctcaacattaaatattccaccctacaataacatctttttaaaaattctacacaacaaagataccgttttgctcattaaataaatgacagttggaacaagaaatggctaaagatgcaaggccttataactttaaatccaaggaaatcataaaaaatatcag

SEQ ID NO: 378208 - DNA, 568 bp, Homo sapiens
ctattgttagcttacatttacctttcaccactacattaaaaacaactctttgaaaaaagaaaaagaaccacttgtacaaagactgaattatactgtcattaggcttcagttcaaggagaacatgttatgttaaatgaatgtagagtggtaaatgccactgctaacataaatgtaataattactataataaaaaatatacaatttacattgtgcttcacatagaaaatgtaagtctaatcataaggaaaagagatggaaaattagaggcaaatagagatgaatacatctagtttaagaaagtataattatcaaaccaaaccgagcattaatttttgtacttatttattaaagttgtcattagaagagagaaaactagagttagctaatctattcagcatcaaacaggacctcaacattaaatattccaccctacaataacatctttttaaaaattctacacarcaaagataccgttttgctcattaaataaatgacagttggaacaagaaatggctaaagatgcaaggccttataactttaaatccaaggaaatcataaaaaatatcag

SEQ ID NO: 378209 - DNA, 601 bp, Homo sapiens
gagccaccgcgcccagcctcctgcaagtacaactttaaactttgatagtaaagagttcaagaaggacattgcaagagaaaaaggtatttctttctggtcatgaggtcctttcttttacttcttttttctcctattgcattcgctatagaagcatggggctggggggaggaatatcaagtgatattctgccccagctgggtacccagagtgtgcagtccctcagtgagactgagtccctaaccccagcagattggtgaccaactcatggtggcccattcatgcagacagtatacaacacagactttgtgctatcctgcccaagaacagggtgtgattccttctacacattactctaccagcccctatacacctgcactctgggaagttattttctgcttgacaatccctgccacagtttcctgcayacctgtacccctcatagctgtgccagtctcagccaacttgttctcctgaaacctatttcttacttgccagtttgttcaagtagttcgcctttttgactagccttagtctcatataccatcagaggtatttactgtttaatccatgactgaaaaaacacaggcctgggacaacccag

SEQ ID NO: 378210 - DNA, 596 bp, Homo sapiens
tgctataaatttcataggaacagaaagattcttttacttccatttatttgtgaaaaacagtatttacctatttcctttaactgtgaataatactctcccatttcctctgtgaaatgaaagctacagatagtaaattgcatattcactttggctaatggtctaactctgttcatactgtgttgctttttctcttagtaatgctatcttacatccctatgctaatatttagtttgagagtgagttttaaaaagaattacctgggagttataaatcttaagaatctatgagaaaataattcacyaatgaatttacttattattatggaagtacttggtttttctccatgttcatattaaataagaaaatatcataaaaatcttagataccctcaaatgcatcaatatataaatctgagagttcagtttagagttaaaattatctgtagaaaataatgcaggggctcacaaatttcttctaattgtgatctcatatttattgttattgcctttatttttttcctaacattgaaaaatgtgatctattcatctacccagccatcttagcagattttctattatatatattacaaaggcatt

SEQ ID NO: 378211 - DNA, 477 bp, Homo sapiens
taatttaacttaaatagtaaagatcataarcattagtcaacagataataggaccataacccaagtcttctgaattttgtccagttccttatagcatactatttactttaaatgtttcaactatagatttaatagtaaagagctacactaaattaaatttaataattaaaatgcttaccttttaaatgtgtttattaacatttgattatagaaactacacctttttatgtttttattagctctctaaagtactggcttaacaaaatgttatgaagacaaatggattaataggattaatgaataaattaggatctaatgacattccaatgttaatatttgaaactacaaaataacctggataggcaaatgtgacaaatgatacttttggtaatgactgaaacatgtagaatttatctccagtgtccatgctattctaagaggtggcatcttcgcagcaagttttatatataagttgctg

SEQ ID NO: 378212 - DNA, 624 bp, Homo sapiens
agaggcgacataggccgaggaaacctagtcactacacataaaagaagcaaaataaatcatatggaaattggcattttgggaacttagatattctgttgaaaggaaaataaggtcctttctcctcatatttaattactttcttattgtaaattttaaatataaaattgaaatacactaattaagtcatttttaggaaaatcaagaaattcctgtgatatgagaacaaatccaacaaatctcaaaagattttattcccacagcagaatgtaagctctatgagcagaaatttttatctattttattcatgattgtgtcctaagtgtctaaaacaatgcctgacataaatatttgttcatgttgtgtaataaattggtactaaaaatatttgtgtgggttaccatttttatgagaaaacaaatcttcattcataacaarttataacccaaattttatgtgtgtgtatatataaacggacatatagacatatggatataccctaaataaggatataataaatccttatttataataaatacattataacctaaatgaaggtatagtaacattaacatttatagctactgttaaaagtcagaaagttaaactaagtcaacaagaatgaaa

SEQ ID NO: 378213 - DNA, 624 bp, Homo sapiens
agaggcgacataggccgaggaaacctagtcactacacataaaagaagcaaaataaatcatatggaaattggcattttgggaacttagatattctgttgaaaggaaaataaggtcctttctcctcatatttaattactttcttattgtaaattttaaatataaaattgaaatacactaattaagtcatttttaggaaaatcaagaaattcctgtgatatgagaacaaatccaacaaatctcaaaagattttattcccacagcagaatgtaagctctatgagcagaaatttttatctattttattcatgattgtgtcctaagtgtctaaaacaatgcctgacataaatatttgttcatgttgtgtaataaattggtactaaaaatatttgtgtgggttaccatttttatgagaaaacaaatcttcattcataacaaattataacccaaattttatgtgtgtgtatatataaacggacatatagacatatggatataccctaaataaggatataataaatccttatttataataaatacattataacytaaatgaaggtatagtaacattaacatttatagctactgttaaaagtcagaaagttaaactaagtcaacaagaatgaaa

SEQ ID NO: 378214 - DNA, 565 bp, Homo sapiens
gaataattgaaatttatttatgtctgtgtaatattgatgtgrtcatgatacatgtatctggtggtaggctgcagggagcatcttaccttttattttgtgccctagttagttacaggccagaggaggatctcactgtgaaaacatggtagcctaaccaaggtatatttccatatcctaaggaaatctctagtctttcctctcagtcagaacattaagtataggccaagctttcagggatgtccaagggagagaatatagtcatgggttcttagtttctctttctgattgggccagtaaagccccttcctcttccctcttttctacttatcactagagacagaaactaaaaaccccggcttcaggctgctaaaagccttaaacaaaacaaaacagaacaacaacaaaataaggtgtattggacaagcttgctagatgttctattgtaagctgagctggatgttgcagttttgaataatccttcaaatcaggtctagttccaaagccttctattacccggtaggcttctggccaatctacataaattcttgattgccagtgttgcaca

SEQ ID NO: 378215 - DNA, 565 bp, Homo sapiens
gaataattgaaatttatttatgtctgtgtaatattgatgtggtcatgatacatgtatctggtggtaggctgcagggagcatcttaccttttattttgtgccctagttagttacaggccagaggaggatctcactgtgaaaacatggtagcctaaccaaggtatatttccatatcctaaggaaatctctagtctttcctctcagtcagaacattaagtataggccaagctttcagggatgtccaagggagagaatatagtcatgggttcttagtttctctttctgattgggccagtaaagccccttcctcttccctcttttctacttatcactagagacagaaactaaaaaccccggcttcaggctgctaaaagccttaaacaaaacaaaacagaacaacaacaaaataaggtgtattggacaagcttgctagatgttctattgtmagctgagctggatgttgcagttttgaataatccttcaaatcaggtctagttccaaagccttctattacccggtaggcttctggccaatctacataaattcttgattgccagtgttgcaca

SEQ ID NO: 378216 - DNA, 598 bp, Homo sapiens
gatatgtatgtttattaaaaatgctgcaggaatgaccaaccaagtggctcatagtccaactctgctgaatacaattttactagaactaaagtaataactgcaaagatgtagatgtatattaacatcgcatattataatcttaccaaaatagttaacacttaaaagtcagtataagcaactccagattagttgaaacagttatttctcaaactgcactggataatactgtagtatattagaggcacttgagtgcttaaagattatgctttcatgacttatgagatgyacaactatgtggagacaccaaaggtggaatgtgaaatttcaaagtagaaataaaatatcaatacttttgttgtccaactcaattcatcactaatattatcttgaaatgcttgctagacttagttctttttggcccacactcaaaatattgctgtattttaaaagatcttttccataacactggtctgaagaagtattttttcattcccattctagttcattattgatgagttccaatcaataggtctgagtcatctattttgctatgtaaaattgtcttctttcaagtcagaattttctggaatttttttcc

SEQ ID NO: 378217 - DNA, 621 bp, Homo sapiens
cagacagagaatatgaacctttttactctgccttctaataaaaagttacacagggaaagaaaacgttatgtacacagtgaaatttggtcagaggaacttctattttcttcttctcttctacctatattgacataaatagagattataccaaacaattaatgatctttttttttttttttttttttgagacwgagtctcactctgtcacccaggctggagtgcagaggtataatcttggctcacccaacttcagcctcctggattcaagcaattctcctgcctcagcctcctgagtagctgggactgcaggcacacgcaaccacacctagctaatttttgtatttttagtagagatggggtttcaccatattggtcaggctggtctcgaactcctgacctcaggtgatcgacccgcctctgcctcccaagtgctgggattacaggcgtgagccacagcgcccggcctaatgatcataaatttatgctaaacattttgcgtttatgtcagtttccccctaattagaagtactaaaatatctaaataatgaaaataataataaacctcttcaattttactcaatctaaaatataagttttaataaggaaattaaaggaaaaaac

SEQ ID NO: 378218 - DNA, 621 bp, Homo sapiens
cagacagagaatatgaacctttttactctgccttctaataaaaagttacacagggaaagaaaacgttatgtacacagtgaaatttggtcagaggaacttctattttcttcttctcttctacctatattgacataaatagagattataccaaacaattaatgatctttttttttttttttttttttgagacagagtctcactctgtcacccaggctggagtgcagaggtataatcttggctcacccaacttcagcctcctggattcaagcaattctcctgyctcagcctcctgagtagctgggactgcaggcacacgcaaccacacctagctaatttttgtatttttagtagagatggggtttcaccatattggtcaggctggtctcgaactcctgacctcaggtgatcgacccgcctctgcctcccaagtgctgggattacaggcgtgagccacagcgcccggcctaatgatcataaatttatgctaaacattttgcgtttatgtcagtttccccctaattagaagtactaaaatatctaaataatgaaaataataataaacctcttcaattttactcaatctaaaatataagttttaataaggaaattaaaggaaaaaac

SEQ ID NO: 378219 - DNA, 463 bp, Homo sapiens
tatctcacatcctttttctgttccagaaactctaccaggataccacagggcagctagtcaccatatctccttaggcttctcttggctgtgataatttctcagactttgcttgttttgatgaccttgtgagttttgaggagtactggtcagagattttgtataatgtcttgctattgggatttatctgatgtttttctcatggtaagtctggggttatgggttcaggagaggaaacatacatacataaagtaccattttcttcacatcayattaagggtactgtcaacatgacttactaaactgttaatataaaacttgaccacttggctgaggcggtttgttcagtttgtcctctgtaaagttcactgtaaagtttctccatgtaaatgttcccccatttcatactatagtttttggtaggaagtcactacgtgcagccaacacttaaagagtgaggagttac

SEQ ID NO: 378220 - DNA, 617 bp, Homo sapiens
ttacattcatattgataatttagcatttaatgttcattaggttgtttagtaaaaaaacataaaatttactttttaaaaaaattaaggacagtgattattattctaaactgcctcagaaaatggaaagttgatttgtagtagcacagaagaggggagggaatatgctatatgacacataaagattctctttgtcagttagctatgagatgcaaaatagcatctacttactaaggaacttttgtactttgtagaatatctttgatatttagttgacccttggttctcaraaaataagtggcttgtaatttgaccttttgctctatcatgttttcttttttataatctgcttgactttgatgagtgtttttccaatgtttcatttgtttttgcaagggtattttgccatcctttccttccatgatgtgattcttcacgccaagaagaaaaagatgtgtctgtagctaaaattacctcatccttggtgtttttcagcctaggatcactatatgtagctaatgccgttacattacaactaagacaagttccaatacttttttttttctcctcgatctgcagagattcaccaacaatagcaaattacacactggcttggaaag

SEQ ID NO: 378221 - DNA, 552 bp, Homo sapiens
gagagtagtgcatagaatacagtatcatttgtttaaatcatggggaaaagatcacatatttgaatttatacatgcacaaagtatctccgaaggaatataagacagttctacaataatagttggagtcttcaataccctactttcatactgtacagaaattctagacagaagatcaataaggaaatagagaacccaaactttataaaacaactaaatctaataaaattatacagaacactccactyaacatcagcagaatatatattcttctcaaatgcacacagaacgttctccaggacagaccataagttaggcataggtaattcttagtaaatttaaaagatcaaagtcatataaaatatttctctgactacaacagaatgaaattaagaatcagtaacacaagaaaaatggaacattcacaaatatgtggctattaaacaacatgctcttaaataagcaataggtcaaggaagaaatcaagaattaatgagaaaacattgagatgaatgaaaatgaaaacaacataccaaaactaatgagatacagcaa

SEQ ID NO: 378222 - DNA, 608 bp, Homo sapiens
atgtattgcttttgcactggtggaaagtcaaaagaatcrtaagttaaaccattgttaagctggggactgtctgcaaacacttaaaatgcttaagacagtaaattctgtattttgcatatatatatatatatatttttttttttaaccacagttacaaaaaaacaggtgagtagaaaactgcatggatctggaaactgtttggcttgaattaaacatgagtctctagccaggacatgaagttcgagtaaaacccttacctcactctctagcctcttctgagacctggctcccaggcagtcctcctgccacactaacctcccttctttctcacttcctcaaatccattatgctggctcttgaccaagatttacataatgctgttggcctgcaatacctttccataccaatccatccctatccatttctttgtctcctgtacctgctcagagattatctcaaacctcttagccttcccctaactacccagcacagattagaattttctgaagatatattcttggtctgtatttttccttcacatcacttaccaatgctgatgacttcatattttcattataacttggttaatatatatctaccatatttta

SEQ ID NO: 378223 - DNA, 608 bp, Homo sapiens
cacataaaatgttaaaaatgtgaatattataataaagtaagtaatccagataaatgcaactggaattcagagaagagtttaccctcagctgagtagtcataaaatgtgtgctgtgagaggtgagatttggctgggccttgaaggatacaaaggacattaaaacaattattttaaaagaaatccttcctcctggtaaaacagtcaactagatagaaggacagaaagggaaagaaaacccctgaggctccttgtcctagtctctaggagcagccactgttaacaattcatcaagtagatggagcttgagtacatgcaaataaacaaagaggaaaaatagctggaacagcagagccctgacaaacaggagtggtcatggtggaggctgatgcaagagattattaggaaatgagggtaagcaatgatgagaaccaaytgtgtcttcacacactcgtcccactgacacatctgaaggccaaccacgttctaggcatactcgggtctggagtaggcaggggaatactagcgaatgggattgttgctcttttggggggctccaggacaaagtttgaggagtttcatgatgacctcaagagcattttagaaaagta

SEQ ID NO: 378224 - DNA, 556 bp, Homo sapiens
agttcagaagcagatagtagaacagaatacactacatgtctggccagaaacaaaactagtataaaaaattcatgaaaatacctagaaggctgtgattccacatcagtaaagatgttagattccagtctcccctgtgagagccaacccacatctaygtacctacatagagatcagcctcaagcaagaaaggcagttgtagctgcttctctgcctcccacaacactttccacctcatccctgtgatatgatttattctttgagtccttggtgaacttttgctttcttccacttacaaaccacataggggccactgtctctggtctcccttgagcttctggtctcctagagggagacaggcatatacgcagaaaatgaaaaacaaaactaagttataattacgtatcagactcaatggagacacaaaaaggagaactcaatgtaagaggtgaggggtaggaaagaagtttatgctaagccttaaagggtcagaataaagtaagacaattaatctactaatatgttaattttgaataagaaggaggaggaagaagaggga

SEQ ID NO: 378225 - DNA, 556 bp, Homo sapiens
agttcagaagcagatagtagaacagaatacactacatgtctggccagaaacaaaactagtataaaaaattcatgaaaatacctagaaggctgtgattccacatcagtaaagatgttagattccagtctcccctgtgagagccaacccacatctatgtacctacatagagatcagcctcaagcaagaaaggcagttgtagctgcttctctgcctcccacaacactttccacctcatccctgtgatmtgatttattctttgagtccttggtgaacttttgctttcttccacttacaaaccacataggggccactgtctctggtctcccttgagcttctggtctcctagagggagacaggcatatacgcagaaaatgaaaaacaaaactaagttataattacgtatcagactcaatggagacacaaaaaggagaactcaatgtaagaggtgaggggtaggaaagaagtttatgctaagccttaaagggtcagaataaagtaagacaattaatctactaatatgttaattttgaataagaaggaggaggaagaagaggga

SEQ ID NO: 378226 - DNA, 556 bp, Homo sapiens
agttcagaagcagatagtagaacagaatacactacatgtctggccagaaacaaaactagtataaaaaattcatgaaaatacctagaaggctgtgattccacatcagtaaagatgttagattccagtctcccctgtgagagccaacccacatctatgtacctacatagagatcagcctcaagcaagaaaggcagttgtagctgcttctctgcctcccacaacactttccacctcatccctgtgatatgatttattctttgagtccttggtgaacttttgctttcttccacttacaaaccacataggggccactgtctctggtctcccttgagcttctggtctcctagagggagacaggcatatacgcagaaaatgaaaaacaaaactargttataattacgtatcagactcaatggagacacaaaaaggagaactcaatgtaagaggtgaggggtaggaaagaagtttatgctaagccttaaagggtcagaataaagtaagacaattaatctactaatatgttaattttgaataagaaggaggaggaagaagaggga

SEQ ID NO: 378227 - DNA, 475 bp, Homo sapiens
tgataagtgaatatgaaaatgaacagtttggttgctggcaaatcctagggagagggaggaaggtggtttgcatcttcataacatattcagaacactgatatctagttcacaattagatatccagtgggacaatcacatcccagctatgctggttgtctatccaagaaaaagtccaaggatctgagccaaatatctgtggatatagatccacagggcttccttttgcatgagctggttttcctaagtgggatgttacttgytgcccagtaatcattaactcctataggagggagaaaataataaagcaaccaggaaaaatcttaagtcaataatggatgaagataaccctgtttctcatttatacaacagctatctgtcccctaccatttactagagagaaggatgggaaatggttgggtcaacacggctcctgtgcaataccaacctctgtacaatcagactaaagaacagaaga

SEQ ID NO: 378228 - DNA, 475 bp, Homo sapiens
tgataagtgaatatgaaaatgaacagtttggttgctggcaaatcctagggagagggaggaaggtggtttgcatcttcataacatattcagaacactgatatctagttcacaattagatatccagtgggacaatcacatcccagctatgctggttgtctatccaagaaaaagtccaaggatctgagccaaatatctgtggatatagatccacagggcttccttttgcatgagctggttttcctaagtgggatgttacttgttgcccagtaatcattaactcctataggagggagaaaataataaagcaaccaggaaaaatcttaagtcaataatggatgaagataaccctgtttctcayttatacaacagctatctgtcccctaccatttactagagagaaggatgggaaatggttgggtcaacacggctcctgtgcaataccaacctctgtacaatcagactaaagaacagaaga

SEQ ID NO: 378229 - DNA, 611 bp, Homo sapiens
ggtcaacacggctcctgtgcaataccaacctctgtacaatcagactaaagaacagaagacctcaaagggatgtcattcacctttttaactgccttataatcacacctcatttttttcttgttctcaatcacatgttttgctctgtaggtgtgtgtttggcagggttacagggaaaggtgtagcaaatatacagtatacagcattgtataagctaaatagttacatcttagaagcaaaagaactggtacctggtatctcatacratcggttatctgtgggtgtctaatagattaaaatgaacgtcagaagactatttctaaatcctcctctgtggtaatgcaatgttttagatcttcctaggaacagcatctttggcaattcctgatagaccacacaactagagaaagtcaccttcatcgggcagtaacaagaatcgagctacaaattctcatgcttcggaaaaaagaaagaaaaaacatcttttgagggacactgtagttattcctctctgaaaatagagaactagtagcacttaggatcttaggaaataaaacagctcaagatatgggatgtttttgaacattcaggtgtttcaacaacaacataaagat

SEQ ID NO: 378230 - DNA, 518 bp, Homo sapiens
ccacaaatggaaatattcaaaaacaaatttgcatctgtactgaacatggacaaactttttttycttgtcatcattccctaaacaacgcagtgtaacaactatttagataacatttacattatattgggtattataattagcctggagattatttaaagtgtaagttatatgcaaataccataccattttataccagagacttgggcatcctcgagttttggtatctacaggaggtcctagaactaatcccttatggatattgagggacaactgtattccattagttattgttaattgatcaattatttaacaattctgaaaaatgcaaaaaagataaaaacatcatgcctgcattcaggtgttccacttggctagtatgttgtgaggctttattgattatttttcttatctctaaagttgcattaaaaatctctgtcaatgtttcagtcagccaatattcttcataaaatttcagaaattaatcaacccatctgttcctggagcactgtcattcctca

SEQ ID NO: 378231 - DNA, 518 bp, Homo sapiens
ccacaaatggaaatattcaaaaacaaatttgcatctgtactgaacatggacaaacttttttttcttgtcatcattccctaaacaacgcagtgtaacaactatttagataacatttacattatattgggtattataattagcctggagattatttaaagtgtaagttatatgcaaataccataccattttataccagagacttgggcatcctcgagttttggtayctacaggaggtcctagaactaatcccttatggatattgagggacaactgtattccattagttattgttaattgatcaattatttaacaattctgaaaaatgcaaaaaagataaaaacatcatgcctgcattcaggtgttccacttggctagtatgttgtgaggctttattgattatttttcttatctctaaagttgcattaaaaatctctgtcaatgtttcagtcagccaatattcttcataaaatttcagaaattaatcaacccatctgttcctggagcactgtcattcctca

SEQ ID NO: 378232 - DNA, 616 bp, Homo sapiens
tttgcagtttaaacttttcatatgttggaagagggaagtgaaagaaagaattcagaagttgggcagcttttatctctccagaattacatttttgcagagtggttttattactgtgattaaagagttatgtagaacatctggagcaattgcattcaaatataccaaaactctttccagagttaaattatggatgcagctaaatcatggtgattttacatcagtgccctccctccatcggtgtggagattgagatacagctgaatgctgctgcctcctttgtyaccattttaactttctatttccgtttcccctctcttcccccttctatattgttttctgcaattctaggaattacctttcttgactcctcttccttttcttttcatctttccataatacctttccattactcagaatttgatgtcagtatttttatgtgactatattttctgtttcatatacatcatccttatagttgctcaagcaagaaacttaaaaggcagcctacacttttacttccttgtatcaaaacatcaaattttactgactaactgcctacctttctctcagataagcttcctgtccacaactcgggattctctggtacgtgatacct

SEQ ID NO: 378233 - DNA, 591 bp, Homo sapiens
ggttctccttattcatgcaagagtgtgaggtccatgagggcagctatgtctgcactgactataacagtgcctactatgttaacattagatgaacaagtgaattagaggatttttaaatgtgtatccatcagtgtatggacacactccctctaacttcttcaaaaaacaaaaattcctggtagagctaagtggtttttagaagtttggttttggtaactgatttctacgagataattgaacactttttaaaatagttgatcattatgtcaaacagccctcaacagtaaacttaaattaggtagaattatagtaagctggaagagaaaatgttcccaaagagcattagtccctttctggcaccttattacagatgaataaattgagactcacagaaattaaatgacttagccccagttatccaactaactccttaatgtgaggccatgattaggaataggcttctagtattcagtcccatattattttgactgygtaataccacgtgccactttgattttaaagtcaaatctcggcttgaactgtatggggaaaaaaatctccagctggctctgctgaatccccagaggggcc

SEQ ID NO: 378234 - DNA, 508 bp, Homo sapiens
cctgtttgggagaactgaattcaactagactggactttgtctatggaagaaggcttagatctttatagaattataagaatattccttagagctggtgaggggcatagagaggggagtgcaatagggaggtgttgattaagagtgcaaagattcagttagacaggatgaataaattctggagatctattgtacagcactgtgactatagttaataataatgtatactttaagaaagtagatcttaaatattctcaccacacacacacacacacacacacacacacacacatacacacacacactatgtgaggtgatggatgtgttagcttgactgtatcattttacagtggacacatatatcaaaacatcaacttgtgcactgtaaatatatataatttttaaataaaaaaatttatttcaatatctagtttccttttaaaattagagctattggacagttytttttgtaatttaaaatttaatatcagaggtggggaaaacattaaca

SEQ ID NO: 378235 - DNA, 579 bp, Homo sapiens
gtccaattaaacctttttcctgtattaattacccagtctcaggtatgtctttatcagactaatacaggtaggaagagcacagagaaaaagtgccatcctcatcacatctcatcaaggatacatactatcaaaatgacttgtcactgtggatgtaatccttgatcacctcacggagwcagtgtttgtcagatttctccactggaaagctactctttttgatcctttccatgctgtatgtattcttcagaagggagccgttctatgcagcccactcttcagaagtgcagcattatgctccatctcctcgggagcagggtatctacggaaatcacttggaatttttatgtccaggagatttgtccatttcctcttatttaatatttaatgatttatatcaacataggttcatggttttaaaatatattttgggttataatccaaccttactttattcattttgttcaaatgactcttgccactgtgatcatttgacacgtctccatctctgtgaattgttggaggttttgttttggtttttgagcactttactttctggcactacggggtgttctaggttca

SEQ ID NO: 378236 - DNA, 579 bp, Homo sapiens
gtccaattaaacctttttcctgtattaattacccagtctcaggtatgtctttatcagactaatacaggtaggaagagcacagagaaaaagtgccatcctcatcacatctcatcaaggatacatactatcaaaatgacttgtcactgtggatgtaatccttgatcacctcacggagtcagtgtttgtcagatttctccactggaaagctactctttttgatcctttccatgctgtatgtattcttcagaagggagccgttctatgcagcccactcttcagaagtgcagcattatgctccatctcctcgggagcagggtatctacggaaatcacttggaatttttatgtccaggagatttgtccatttcctcttakttaatatttaatgatttatatcaacataggttcatggttttaaaatatattttgggttataatccaaccttactttattcattttgttcaaatgactcttgccactgtgatcatttgacacgtctccatctctgtgaattgttggaggttttgttttggtttttgagcactttactttctggcactacggggtgttctaggttca

SEQ ID NO: 378237 - DNA, 622 bp, Homo sapiens
tttttctaaggctccttgttaaacttacacaaaaacaaagggcaaaacttttgctatarttctgtagaagtttgaggacttttcaacatctctcatgggagcacttacctgtcctatcttaaggccacttgtggcttagagtgaaatttcttgacactaaattatttggtaaaagatgctcactcttctagtataacctgcaaaagcaattaagagtgatgaaaaatgtcacaatttaataataggtctgaaaatgatttacttatttagataatacaaatattttgttatataaagtagcatcaatatatgcatattcaaataattttatgcaaattattttttacacttctgatgatttttaattcatttatgaacaaggagccttagaaaatcagtttcttttaattggaagtggttcttaaaatctttagcatttctaaaatttgttcatgattaaaaatcctaattaaaggagcacaacttcaactcagaacaaatttagggtaattcttttttctgttttgattcataacaatcatttttaatttattcattggattactgttttccagatagcagtattttgatgacccttacacaatttttagctgtatgtatg

SEQ ID NO: 378238 - DNA, 622 bp, Homo sapiens
tttttctaaggctccttgttaaacttacacaaaaacaaagggcaaaacttttgctatagttctgtagaagtttgaggacttttcaacatctctcatgggagcacttacctgtcctatcttaaggccacttgtggcttagagtgaaatttcttgacactaaattatttggtaaaagatgctcactcttctagtataacctgcaaaagcaattaagagtgatgaaaaatgtcacaatttaatartaggtctgaaaatgatttacttatttagataatacaaatattttgttatataaagtagcatcaatatatgcatattcaaataattttatgcaaattattttttacacttctgatgatttttaattcatttatgaacaaggagccttagaaaatcagtttcttttaattggaagtggttcttaaaatctttagcatttctaaaatttgttcatgattaaaaatcctaattaaaggagcacaacttcaactcagaacaaatttagggtaattcttttttctgttttgattcataacaatcatttttaatttattcattggattactgttttccagatagcagtattttgatgacccttacacaatttttagctgtatgtatg

SEQ ID NO: 378239 - DNA, 558 bp, Homo sapiens
tggcacattcagctttctgcctatatatctccttagatcaaatcagaagttccttaggtgtcttttctatcttctacgtgatcttggaagacgttttattagttttttaacatcatataacttgggttcccttttctccatctgcccatcatgatttcctggctgtcttatcaggcaggctttattaacaataccctcggtgcttctagtctctgcctcctacktgttaacaaaactcatgccacattttttttttttttgccatggcagtatctactttggataccaatttctgttctgaatatttattgcagtgcaataaactgcccccaaaatatgtgtattaaaggataattttgatatttctcatgattcaagaattggctggtgctcagctggctggtacttctgctggtctcacttacaatctgctttgtcattgcagttagatggtgctgaggttgaaatctttttttgttcttggagatttttatttgtgccactggtgcctgggtaagaatagctgaacctctgggctcagctgggacactgggatgc

SEQ ID NO: 378240 - DNA, 590 bp, Homo sapiens
cagtttaaatctgggtccccccctcaaatctcatgtcaaattgtaatctccagtgttggtggtggggcctggtgggaggtgagtggatcatgggggcagtttctcctgaatggtttaccaccacgcgccttggtcttgtcatcaagataatgcattaccagagatctagtgtttaaaagtgtgtagctggggccaggtatggtggctcacgcctgtaatcccagcactttgggaggccaaggcggacggatcacttgaggccagaagttcgagaccagctatggcctacacggcaaaaccccgtctctactaaaaatacaaaaattagctgggcatggtggcgcacacctgtaatcccagctacttgggaggctgagccatgagaaatgcttgaacctgggaggcgaaggttgcagcgaaccgagatcacatcactgcaytccagcctgggggacagagtgagactctgttttaaaaaaagtgtgtagcacctcccccgtctctctcttggtcctgcttctgtcacataagacacctgctcccactttgcctcccaccatgagtaaaagtttcctgaggcctctccagag

SEQ ID NO: 378241 - DNA, 629 bp, Homo sapiens
ccaagttccttgggctttttatgatttgactcatacatatattatcaatctatctatatctaaatgtttcatcttatgtatatattatggtattgcagccataatacagatatcctttaagtgcatgtgattacatacatgtgattaagtttatggaattatgttacattatgtcttgcaaaaagactaccttttttgctggctcaataaagtaagcasgcatgtttggggagcccatatctcaaaaaactgttgagacctctaggaaatgcaggcagcttccaaccaacagccagacacaactagtgtcttcaagtctatagcaccaagtgagtgaattcttccaacaacctgagtgagcttggaagtggatctttctctcatgcaagcttctgataagaaagcagttcatgctgacatctggattgcaagattgagaccctgaagcagggaactcagctaaaccactcctagactcctgtcccaccaaacagtgagctaataaatgagtgatactttaggctgtcacatttatgatgatatcgccacacagcaatggataactaatactcacatcatgctgtttctcaccttcttctcttaaccttgacactgtcacctactagcct

SEQ ID NO: 378242 - DNA, 428 bp, Homo sapiens
aaaaacaccagttggggcaggtaacggggtgctgacatcacccctcccctaatcccaggctgcacagctcgtagctctaaaagagaccctttccttctgcttgagagsagagtaaagagtggggaggactttgtcttgtatcttggatattagctcagccacagcaggataaggcactggtcagagttgaaggccctcttaactccaggatgacatttataggcatgccctgggccagaaggggacctgatgccttgaagggaatgacccagtcctgggaggactcattacctgctatctgaagagcccttgggccttgaataaccagcagtgatacacaggtactaccctagggccttggatgaggctctgagacttcttggcttcacatgagactcagcacattcccagatgtggtgccacagggc

SEQ ID NO: 378243 - DNA, 659 bp, Homo sapiens
gaatgatatggtttggctgtgtccccacccaaatctcatcttcaattgcagttcccacaattcccatgtgtcatgagaggtacctggtgggaggcaattgaatcatggcatcacatctttcccttgctgttctcatgatactgaataaatctcacaagatcagatggttttacaaagacaagcttccctgcacatgctttcttgccttccaccatgtaagacatgcctttgcttcttctttgcctttcatcataattgtgaagcctcacaagccatgcagaactatgaatacattaaacctttttcctttataaattacccagccttgggtatgtctttattagcagtgtgagaatgacataatacagggtgctctctaaagtakatacaacttaaatcacagcacccaaatcctttcaaatacatggaaagccttcttaagaaggataggtacaaacaaacccagacagtgacaactaaaataaatacctaattcttaaatgcccagacatagaagaacatctacaactatcaagatattccagggaaaaatcatctcaccaaaggaactaaataaggcaccaggtaccaatcctggagaaacagagatatgtgacctttcagatagataattcaaaatagctatgttgaagaaacac

SEQ ID NO: 378244 - DNA, 558 bp, Homo sapiens
caaaactcactggtaatagcaaatacacagaaaagcacagaatatgattacactgtaactgtgatgtgtaagctactcttatcctaagtacaaagaataaatgatgaagaaataaaaaaaaacatgactacaataacttttcaagatagacagaaaaataagatataaatagaaataacataaagtttaaaagcagggtgatgaagtttaggcacagagtttttattcattttcttttttcttagttgtttatgcaaacagtgttaagtgattataagcttaaaataatggtttatgatagtatttgcgtgtgtcatggtaacctgaaaccaaaaaacatacaacagaaacataaaaaataaaaatcaagaaactaagtcttattaccagagataatcacyttcaccaaggaaaaacaggaagaaaacaaagaaggaagagatgatcacaaaacaaccagtaaacaaataacaaaatggcagaaaagtttttacttatcaataataacattgaatataaatagtctaaactctccaatcaaaagacatggggtggctg

SEQ ID NO: 378245 - DNA, 456 bp, Homo sapiens
acacacccaagactgggcaaattacaaaagaaagaagtttatttaaaaccatcagatctcgtgagacccatttactatcatgagaacagcacgggaaagacccacccccatgatgcaatcatctcccactgggtccctcccacaacacgtgggaattatgggagctacaagatgagatttgggtgggtacacagtgccaaaccatatcataataacaaagaaaaactgaaataattaattgccagcagacctacccttcaaaaagtggtaaaggaagttctataggcagaaagaatatgatagcaaacaggaacttcaatctacacaaagaaataaagagtgctgaaaatagaatcaatgaatggaaaataaatttttttcatattttaattgtgctaaaatataactgactctytaaagccaaaatggtaccaacatattgtatgtttgtagcat

SEQ ID NO: 378246 - DNA, 566 bp, Homo sapiens
caacatagagagaccccatctgtaaaaaataaatgaataaaaagtgtatactcaatcctaccaaagattctgatgctttacctgtttctgttcctagaaagaatacaacgtagaaagaaagaaaaaaaaaactctttaaaaaacaattttcatgaaaataatagtaatataataaatgtttgttcatgctggtggtataattttgttaatccaaccaagactattgaaagtaagctaaagatatatataaaatccatcaacatatcttgagcascaagtattgtcttcttcctgatttcatggagatcatactctcaatctatgctgggtgacaggccatacaaagacacataagtgaacaggaaaaatttaaatagtgacaagtgctatgaaaataattaaaatacagtgatgtgacataaagtgacagagttgggtggatcatcagggaaattctctgagtaggtggcatttaatctgagatctggacgatgagattatcacttctccttttctaatgaccaatcaagaactttacttttcttgtaactcaataacacagaatt

SEQ ID NO: 378247 - DNA, 576 bp, Homo sapiens
gtattaatatggaagggcattctttgttggtacttgatgaggtaagaattaagaatttaaaacttattggtataaacatatacctaatttaaatcatttaagttatgatatattaagctaayacatgcttgaatttgttactacttttgaaaatttctgtgtctccccacaccttcctcattccacttcgctagttattatgtttcttttttaatttatgaagatggaatataatgcccaattcataatactgtttttcaggtacaaagttggcatagacaatactgaaatacatgtgatgacatttacagtagcaattcaaattaaaagagaaaagcatctttctaaaccatcttcaagtaaacacttgccatttatttctactagcaaatatttctatgtatcctaaaaattaaaagtgatatacattgagtaagactttacagtcctcagaatactataatggaaaaatatgtatttgatatgttttcctgccatttcgctatctagaaaatgtcctaattcttaaaaaagatcattagctagccactgaaatctcagggggaaaagctgtta

SEQ ID NO: 378248 - DNA, 600 bp, Homo sapiens
ctcccctgggttggaggtaaaaagtttctattccttaggaaatggaataaaataaattggttaaaagaagttttgagattcattcgtcyatagcattctaaaataggaattagcttagaaaggtcatcaacgaccaaaattatctgagtttggtggagataaaaaagcaagactgaaagttatattttttttcaagcaatgtttgaatggataaagtacagaaggagaaaaatggttgcatttctatgcattgaaaatgcttatttggttttcttttaagcttgttgtttcaaatggcccacttaaatttactgactctataccaaataaattaatctcacttttcacactgctatccctctagtttcttgcctcaatttattccagaatgacattctacatttattcaataagtactcagagggatgtgttatgtgcatggcattcaactaaccattagttggacaagacaaactaagtaaaggatatctttcctgccttcttaaggtttgcagtttaattatcttgatttcgagcctcattctcttacattttcactaattttccatattttttctaagtctctgagaagttttgata

SEQ ID NO: 378249 - DNA, 600 bp, Homo sapiens
ctcccctgggttggaggtaaaaagtttctattccttaggaaatggaataaaataaattggttaaaagaagttttgagattcattcgtccrtagcattctaaaataggaattagcttagaaaggtcatcaacgaccaaaattatctgagtttggtggagataaaaaagcaagactgaaagttatattttttttcaagcaatgtttgaatggataaagtacagaaggagaaaaatggttgcatttctatgcattgaaaatgcttatttggttttcttttaagcttgttgtttcaaatggcccacttaaatttactgactctataccaaataaattaatctcacttttcacactgctatccctctagtttcttgcctcaatttattccagaatgacattctacatttattcaataagtactcagagggatgtgttatgtgcatggcattcaactaaccattagttggacaagacaaactaagtaaaggatatctttcctgccttcttaaggtttgcagtttaattatcttgatttcgagcctcattctcttacattttcactaattttccatattttttctaagtctctgagaagttttgata

SEQ ID NO: 378250 - DNA, 600 bp, Homo sapiens
ctcccctgggttggaggtaaaaagtttctattccttaggaaatggaataaaataaattggttaaaagaagttttgagattcattcgtccatagcattctaaaataggaattagcttagaaaggtcatcaacgaccaaaattatctgagtttggtggagataaaaaagcaagactgaaagttatattttttttcaagcaatgtttgaatggataaagtacagaaggagaaaaatggttgcatttctatgcattgaaaatgcttatttggttttcttttaagcttgttgtttcaaatggcccacttaaatttactgactctataccaaataaattaatctcacttttcacactgctatccctctagtttcttgcctcaatttattccagaatgacattctacatttattcaataagtactcagagggatgtgttatgtgcatggcattcaactaaccattagttggacaagacaaactaagtaaaggatatctttcctgccttcttaaggtttgcagtttaattatcttgatttcragcctcattctcttacattttcactaattttccatattttttctaagtctctgagaagttttgata

SEQ ID NO: 378251 - DNA, 581 bp, Homo sapiens
tataattatattcaagaattttttaaccttttatctcactaaataaatttcaatattcattataaataayaaattcaagcatttaaaatattatttatatattcttaatttttgttgtttgttttaattacacatgtcaatcctgttatggaatgacatcaacatccccttggcaagaggatatttttaaatttccacatgtacattttaagagttgatacaaccctatttatctatgattttctctttcctataattagtaattttcactgtagaagactcacttataaaagtgtatattattatcatatttggatgataaactaaaattttgaaatatttagaagcattgttatgaactcattaaaattatcagaatcaattcatataaaatgatatttaatattttcttatacataaattagtgacattaattgttttatacttttaatttaatttgattatgaaaactttctatgtgtttttgaatttgtgtaaccttagacagattgctaaacccatttcatcatgcattaatagaataggattagataatctctaagggtccttggctctaagat

SEQ ID NO: 378252 - DNA, 504 bp, Homo sapiens
tactgtcattaggtagtcctttcctttattcagaagcccaagaagttagtagaggtttgtatactacgcacctttcaccagaaaataaaaagggagaactttaagtatttgacatcatcaaaaattaggtgttatggtgctatgcttaagttttgatattatatattaattacatttcccttagtactacctcctctgaattcttgagcttgtcagtagttgaaaacatttgaacctaaaccatttttgcacattcagaactaaatgtctgggtaacttgrgaattaatactctacaacctgtgatggagcagggagcagggtcagctgtccattagcatctcttgtgaggtctctccattttcataaagaggcttgagaaaatctccagatttgcctgagggtagacacaaagcaatactcagttatactcaatgttatcaacctactggacttggtataaaagactttttgagcactgtattgcctattaaaaaacagtaaa

SEQ ID NO: 378253 - DNA, 504 bp, Homo sapiens
tactgtcattaggtagtcctttcctttattcagaagcccaagaagttagtagaggtttgtatactacgcacctttcaccagaaaataaaaagggagaactttaagtatttgacatcatcaaaaattaggtgttatggtgctatgcttaagttttgatattatatattaattacatttcccttagtactacctcctctgaattcttgagcttgtcagtagttgaaaacatttgaacctaaaccatttttgcacattcagaactaaatgtctgggtaacttgggaattaatactctacaacctgtgatggagcagggagcagggtcagctgtccattagcatctcttgtgaggtctctccattttcataaagaggcttgagaaaatctccagatttgcctgagggtagacacaaagcaatrctcagttatactcaatgttatcaacctactggacttggtataaaagactttttgagcactgtattgcctattaaaaaacagtaaa

SEQ ID NO: 378254 - DNA, 530 bp, Homo sapiens
aaacttttatgaataatttgctaagaaattagctctaatgacaggtagtttatgtatataccttgataacatctacaggtatcttatgcacatgacattatagaaatatttgtttgggtttttctcaaccagtcattttctacaccataattccagctcagcccactccacttgcaattgcttgctctcatcttctaactcctgtttattcttctcaatttctgctgtaatggcttcatttaacctgctcctctgtatcttgtatgctttttagttcactgcttatttccttcttcctgctggaaaacttggctaaatarctcgtattaatattttagcctcatttggctttaagattatctcataaggatatcatatataaatggtagttaatatttctgagcaccaacttcccttactccagctctcagacttcttcccattgttatgacaattgaaggctttttaaattcctgtcttaggaaaagtggcccaaaatttgccatagatctatgatgttttaattaata

SEQ ID NO: 378255 - DNA, 530 bp, Homo sapiens
aaacttttatgaataatttgctaagaaattagctctaatgacaggtagtttatgtatataccttgataacatctacaggtatcttatgcacatgacattatagaaatatttgtttgggtttttctcaaccagtcattttctacaccataattccagctcagcccactccacttgcaattgcttgctctcatcttctaactcctgtttattcttctcaatttctgctgtaatggcttcatttaacctgctcctctgtatcttgtatgctttttagttcactgcttatttccttcttcctgctggaaaacttggctaaatagctcgtattaatattttagcctcatttggctttaagattatctcataaggatatcmtatataaatggtagttaatatttctgagcaccaacttcccttactccagctctcagacttcttcccattgttatgacaattgaaggctttttaaattcctgtcttaggaaaagtggcccaaaatttgccatagatctatgatgttttaattaata

SEQ ID NO: 378256 - DNA, 633 bp, Homo sapiens
gtttactctgacgtgtgatgtaaagttcttcctaaagccccctttcttttcctttttaaaattattaacatagatgaatacagagaatgtgaacatattagctatacagatatcacaacaggagaacagtaaatgttatgttttagactatttcaaccctaaaatatggacacaggttggaatgaggatccaattcarcataatagcctctaatggagtaggaaacatataaaatcctgtgttgctttatgaaatgttgcttatttgctgcatggttttaaaaagtatcagttttatttaatagtgggatctttatgtcagtgattactgatgtttccagcaagctaattcataccagggagacaatgtaaacatttagaaaggggattatatttctgtactatctgcatatgtcagatgacaacgagagtttcaaagtacaatcttatgaagggttgtattgcagatttggcctagaagcccaaaaccattaaatttttatcaaaattatacctgaaaattcttcatgttgtttattagcagtcattatctttacaaagatataggaaataaagtgatttccatctgttgcaatcacttgccttttacaatagacaaaattgttattttcat

SEQ ID NO: 378257 - DNA, 633 bp, Homo sapiens
gtttactctgacgtgtgatgtaaagttcttcctaaagccccctttcttttcctttttaaaattattaacatagatgaatacagagaatgtgaacatattagctatacagatatcacaacaggagaacagtaaatgttatgttttagactatttcaaccctaaaatatggacacaggttggaatgaggatccaattcagcataatagcctctaatggagtaggaaacatataaaatcctgtgttgctttatgaaatgttgcttatttgctgcatggttttaaaaagtatcagttttatttaatagtgggatctttatgtcagtgattactgatgtttccagcaagctaattcataccagggagacaatgtaaacatttagaaaggggattatatttctgtactawctgcatatgtcagatgacaacgagagtttcaaagtacaatcttatgaagggttgtattgcagatttggcctagaagcccaaaaccattaaatttttatcaaaattatacctgaaaattcttcatgttgtttattagcagtcattatctttacaaagatataggaaataaagtgatttccatctgttgcaatcacttgccttttacaatagacaaaattgttattttcat

SEQ ID NO: 378258 - DNA, 623 bp, Homo sapiens
gtgaacatattagctatacagatatcacaacaggagaacagtaaatgttatgttttagactatttcaaccctaaaatatggacacaggttggaatgaggatccaattcagcataatagcctctaatggagtaggaaacatataaaatcctgtgttgctttatgaaatgttgcttatttgctgcatggttttaaaaagtatcagttttatttaatagtgggatctttatgtcagtgattactgatgtttccagcaagctaattcataccagggagacaatgtaaacatttagaaaggggattatatttctgtactatctgcatatgtcagatgacaacgagagtttcaaagtacaatcttatgaagggttgtattgcagatttggcctagaagcccaaaaccattaaatttttatcaaaattatacctgaaaattcttcatgttgtttattagcagtcattatctttacaaagatataggaaataaagtgatttccatctgttgcaatcacttgccttttacaatagacaaaattgttattttcattagattttacaaaaggaatgatatataaatttttaaaaggcatgtttaggttytttcaccagagaaatttagattatt

SEQ ID NO: 378259 - DNA, 531 bp, Homo sapiens
agcctgggcaacatagcgagactccatctccacaaaaaagtgttaaaaattagccagacatggtggtgcatgtcttagttctaactactcaggaggctgagaaaggaagattactttagcccaggagctcaaaggtgcagtgagctgtgactgcactccagcccgtctaaaaaaaaaaaaaaaaggaaagaaaagaaaaaaagaaataaaaaggtatacacattttttttctgaagtggatggaaatatgtcatgtcagaggtaaattgtgacttgagtaagttttatgttgagcaactctttttgtttacattttctatgttgcccaaataaagtcttattttcataaatcactgctttacataacaacttttcctgcagccctgggtatggtggcacacagttgtagtcccaggtacactggatgctgaggcaaaaggatcatttgaacccagaacttsaaggtcaacctgggcaacatagcaagatcctatctgtagcaaaaatttttttaatgataattctcatgca

SEQ ID NO: 378260 - DNA, 589 bp, Homo sapiens
cacattttttttctgaagtggatggaaatatgtcatgtcagaggtaaattgtgacttgagtaagttttatgttgagcaactctttttgtttacattttctatgttgcccaaataaagtcttattttcataaatcactgctttacataacaacttttcctgcagccctgggtatggtggcacacagttgtagtcccaggtacactggatgctgaggcaaaaggatcatttgaacccagaacttcaaggtcaacctgggcaacatagcaagatcctatctgtarcaaaaatttttttaatgataattctcatgcaaaattcagtttgcactgttttaaaaaatgaaacacttataagagcatggtcataaggcaattctgacttggtgtcaagccatttaaacttagatataacctaggatttaggatccttgctattgtttacatagtaagtccacatttaatatcagtagattattggaaactgcaactatcagcaaaatggtgaacaatgaaacaaattttaccataggccaattgatacaacaagatataagttcctactgcatatttctggtcacaatattatcac

SEQ ID NO: 378261 - DNA, 548 bp, Homo sapiens
aatctacttttaattgataattgctttataaaataatctgattacttttggtataaaggataacatattccactaatactgtgaagtttcagtgatataaacacttagaaatcatctgctctgttatggaaaaaaacatctagaagtatctttcagattgaaaaatgtttttaaggtgctggaataacggtacctcttgcagatttgtctagcrttacccaatgcttgtgattgctagtaatattagtgaaataagtatgcaaatcttttaataactgaatagaatccttccctgaacaatttcccaggtgttattgctgttgctatcttattaaatattcaatgccatctattatatcctatacagagtcaaataataagcttacataaactaatatttaatataatactaataaatttaagatgatataaagcagaataaaataacatttcagaataaaaagactttgaagcttccctgtattacttgataagatttaggtacagtctcaagaaaacattttttttttccttcttctgcatcagct

SEQ ID NO: 378262 - DNA, 548 bp, Homo sapiens
aatctacttttaattgataattgctttataaaataatctgattacttttggtataaaggataacatattccactaatactgtgaagtttcagtgatataaacacttagaaatcatctgctctgttatggaaaaaaacatctagaagtatctttcagattgaaaaatgtttttaaggtgctggaataacggtacctcttgcagatttgtctagcgttacccaatgcttgtgattgctagtaatattagtgaaataagtatgcaaatcttttaataactgaatagaatccttccctgaacaatttcccaggtgttattgctgttgctatcttattaaatattcaatgccatctattatatcctatacagagtcaaataataagsttacataaactaatatttaatataatactaataaatttaagatgatataaagcagaataaaataacatttcagaataaaaagactttgaagcttccctgtattacttgataagatttaggtacagtctcaagaaaacattttttttttccttcttctgcatcagct

SEQ ID NO: 378263 - DNA, 577 bp, Homo sapiens
tcatctacaaaccaatttatttctgaaataggccccaggggcaggctggttggtgactgtaatgggggatatctgactggccactcaaggaaattgctatggacttttaatcttattttgaytaagttctgtgcagattgtgtctgccaggcgagcattaagattactgtttctgagatcttttggttgctatcagactggactcaattttttttctacattctcaaggttaagttgaaacagtattacccattatttataaatggtaagtgtttaggttttgccttgtgttacaaactagaatgttaataaaaatactatatttaacaagttgcaagtttatgaaagtcattgtttttgaaagtaagttttagattaaaaaaacaaaagaaaggaaaagaaaaatcttttaaggggaaacaatgtctttatgtgtttaaagtttcaaaatgtaatttataaagaaatcaaatctagttaaaaataactaatcaaagatgaatatttagtgtagaagaacatggatatggataaactgtagggtattttatttatctttttctttcagcaaagatct

SEQ ID NO: 378264 - DNA, 577 bp, Homo sapiens
tcatctacaaaccaatttatttctgaaataggccccaggggcaggctggttggtgactgtaatgggggatatctgactggccactcaaggaaattgctatggacttttaatcttattttgactaagttctgtgcagattgtgtctgccaggcgagcattaagattactgtttctgagatcttttggytgctatcagactggactcaattttttttctacattctcaaggttaagttgaaacagtattacccattatttataaatggtaagtgtttaggttttgccttgtgttacaaactagaatgttaataaaaatactatatttaacaagttgcaagtttatgaaagtcattgtttttgaaagtaagttttagattaaaaaaacaaaagaaaggaaaagaaaaatcttttaaggggaaacaatgtctttatgtgtttaaagtttcaaaatgtaatttataaagaaatcaaatctagttaaaaataactaatcaaagatgaatatttagtgtagaagaacatggatatggataaactgtagggtattttatttatctttttctttcagcaaagatct

SEQ ID NO: 378265 - DNA, 577 bp, Homo sapiens
tcatctacaaaccaatttatttctgaaataggccccaggggcaggctggttggtgactgtaatgggggatatctgactggccactcaaggaaattgctatggacttttaatcttattttgactaagttctgtgcagattgtgtctgccaggcgagcattaagattactgtttctgagatcttttggttgctatcagactggactcaattttttttctacattctcaaggttaagttgaaacagtattacccattatttataaatggtaagtgtttaggttttgcyttgtgttacaaactagaatgttaataaaaatactatatttaacaagttgcaagtttatgaaagtcattgtttttgaaagtaagttttagattaaaaaaacaaaagaaaggaaaagaaaaatcttttaaggggaaacaatgtctttatgtgtttaaagtttcaaaatgtaatttataaagaaatcaaatctagttaaaaataactaatcaaagatgaatatttagtgtagaagaacatggatatggataaactgtagggtattttatttatctttttctttcagcaaagatct

SEQ ID NO: 378266 - DNA, 609 bp, Homo sapiens
ttcttattttaatatgcatcatgaacctccagttgaggcaatgtgcaacacattttgagagacatgatctacctgttggaatcttaacatttagaacagatatattgatcagtgtataatttttggattatcaaagatgggaataaaattgagctataatatataaaataagaggatttatatatgtttgtttttttactccccatytcacctgctacttctttatggataacagttatcccacttgatggaatttttctcttttcatccattacttttttatttaaagtattccctctcctaggatgtaagtttctatagactgaaatgttgttatttaatggtaataagccttattttcaggctgctttacagaattttggctttgtcttttgttttcttcattgtacttttcttactccactcagaatttgttgaccttcttaaatctgcttatatctgtcttcaatcagtactaaaaacattctctattatttccttagttattgcctttgtctctcttttcctggtaaagtttagacacatattaacgtttaactctatcctttgtatcttgaaacttttcttcaataatttattttctttctt

SEQ ID NO: 378267 - DNA, 602 bp, Homo sapiens
aatctccaactgcttttgtttctattttaagaaagtaaatattatgacataaatgtttgcaatgtttttgtttaaataaagtatttctagatttctcttaattcatagttacgtttgtttctttattgatgttcaaacacagacttttaaaaattcatatttttttcaaaatgtgtractatttactttctagctcaatttaaaaagcatttaccataaaaatggcagtatctttttgtacagatgctacctctgaatcaaagcctctcagcaactggcaaacaggaagctttaatgcactttaaccctaatagttataaaatatgcaatcatctgaaatcacatactgatttccacttcttttctaactacggttatatgtaaatatttcactttcaataatagatctttgcctgtttatttagtttttttttttccttggcttagaaatagtttttatgaaatattcaaatacaaacatagtctctaaaagcaaagtatggttctttgacagccaaaacactttcccctaagcatttcattagttatataagtgataaatgtttttctgaatgggaatttacctaaagtgtttcaaaatt

SEQ ID NO: 378268 - DNA, 602 bp, Homo sapiens
aatctccaactgcttttgtttctattttaagaaagtaaatattatgacataaatgtttgcaatgtttttgtttaaataaagtatttctagatttctcttaattcatagttacgtttgtttctttattgatgttcaaacacagacttttaaaaattcatatttttttcaaaatgtgtgactatttactttctagytcaatttaaaaagcatttaccataaaaatggcagtatctttttgtacagatgctacctctgaatcaaagcctctcagcaactggcaaacaggaagctttaatgcactttaaccctaatagttataaaatatgcaatcatctgaaatcacatactgatttccacttcttttctaactacggttatatgtaaatatttcactttcaataatagatctttgcctgtttatttagtttttttttttccttggcttagaaatagtttttatgaaatattcaaatacaaacatagtctctaaaagcaaagtatggttctttgacagccaaaacactttcccctaagcatttcattagttatataagtgataaatgtttttctgaatgggaatttacctaaagtgtttcaaaatt

SEQ ID NO: 378269 - DNA, 602 bp, Homo sapiens
aatctccaactgcttttgtttctattttaagaaagtaaatattatgacataaatgtttgcaatgtttttgtttaaataaagtatttctagatttctcttaattcatagttacgtttgtttctttattgatgttcaaacacagacttttaaaaattcatatttttttcaaaatgtgtgactatttactttctagctcaatttaaaaagcatttaccataaaaatggcagtatctttttgtacagatgctacctctgaatcaaagcctctcagcaactggcaaacaggaagctytaatgcactttaaccctaatagttataaaatatgcaatcatctgaaatcacatactgatttccacttcttttctaactacggttatatgtaaatatttcactttcaataatagatctttgcctgtttatttagtttttttttttccttggcttagaaatagtttttatgaaatattcaaatacaaacatagtctctaaaagcaaagtatggttctttgacagccaaaacactttcccctaagcatttcattagttatataagtgataaatgtttttctgaatgggaatttacctaaagtgtttcaaaatt

SEQ ID NO: 378270 - DNA, 602 bp, Homo sapiens
aatctccaactgcttttgtttctattttaagaaagtaaatattatgacataaatgtttgcaatgtttttgtttaaataaagtatttctagatttctcttaattcatagttacgtttgtttctttattgatgttcaaacacagacttttaaaaattcatatttttttcaaaatgtgtgactatttactttctagctcaatttaaaaagcatttaccataaaaatggcagtatctttttgtacagatgctacctctgaatcaaagcctctcagcaactggcaaacaggaagctttaatgcactttaaccctaatagttataaaatatgcaatcatctgaaatcacatactgatttccacttcttttctaactayggttatatgtaaatatttcactttcaataatagatctttgcctgtttatttagtttttttttttccttggcttagaaatagtttttatgaaatattcaaatacaaacatagtctctaaaagcaaagtatggttctttgacagccaaaacactttcccctaagcatttcattagttatataagtgataaatgtttttctgaatgggaatttacctaaagtgtttcaaaatt

SEQ ID NO: 378271 - DNA, 317 bp, Homo sapiens
gttcaatttttttttattaagtctgaagaaatatttacttgaatatgacatctaagaatgatggacaaaagctttttaaattttctttccactcctttttctgaaagctttgatacaaaaatcatttgacacaaatgatttttttttttttttgtgacaggatcttactatgttgcccaggctgaagtgcagtgtgctcatgcaatcctcccatctcagcctcctgagtaactgggactacaggcacatgccrccatgcccagctaatttttgtatctttagtagaaacaaggttttgccacattgcccaggctggt

SEQ ID NO: 378272 - DNA, 652 bp, Homo sapiens
ttggcctcccagtgttctgggattacaggagtgagccactgtacccggctgatgcaaatgatttctattattaatatcttgcagttaktcttccattggataaccatcaatgtcaaaataaagattattagttactgaaggactgaaaaatcaaaaatcaacttcatgagatgctttacaaacaagtgttctcttttaatatttgactcagtaaaagtttttaagaaaagttaagtttgtgtttttatttgtgtatactctctagtgcttaaatgtatcaggatagaacttttctaaactaggtcagtcttttttccatatctatggttgaatacttcagttaaataaagcaatggtagatagcaaactatgttataattggcattttgggcactggttgcaattaattgccaaaaaaagcatatctcaccacaattgatctctcatttttccactctcatttatttcccttcacttccttcttggcttctgcaaaagcatttgtttttcctttttctttcttctttaaaaaaatatatttgaagagatttattctaagccaaatatgagtaaccatggccagtgacacagcactcaggaggtcctgagaacatgtgcccaaggtggttgggatgcagcttgcttttataca

SEQ ID NO: 378273 - DNA, 652 bp, Homo sapiens
ttggcctcccagtgttctgggattacaggagtgagccactgtacccggctgatgcaaatgatttctattattaatatcttgcagttagtcttccattggataaccatcaatgtcaaaataaagattattagttactgaaggactgaaaaatcaaaaatcaacttcatgagatgctttacaaacaagtgttctcttttaatatttgactcagtaaaagtttttaagaaaagttaagtttgtgtttttatttgtgtatactctctagtgcttaaatgtatcaggatagaacttttctaaactaggtcagtcttttttccatatctatggttgaatacttcagttaaataaagcaatggtagatagcaaactatgttataattggcattttgggcactkgttgcaattaattgccaaaaaaagcatatctcaccacaattgatctctcatttttccactctcatttatttcccttcacttccttcttggcttctgcaaaagcatttgtttttcctttttctttcttctttaaaaaaatatatttgaagagatttattctaagccaaatatgagtaaccatggccagtgacacagcactcaggaggtcctgagaacatgtgcccaaggtggttgggatgcagcttgcttttataca

SEQ ID NO: 378274 - DNA, 652 bp, Homo sapiens
ttggcctcccagtgttctgggattacaggagtgagccactgtacccggctgatgcaaatgatttctattattaatatcttgcagttagtcttccattggataaccatcaatgtcaaaataaagattattagttactgaaggactgaaaaatcaaaaatcaacttcatgagatgctttacaaacaagtgttctcttttaatatttgactcagtaaaagtttttaagaaaagttaagtttgtgtttttatttgtgtatactctctagtgcttaaatgtatcaggatagaacttttctaaactaggtcagtcttttttccatatctatggttgaatacttcagttaaataaagcaatggtagatagcaaactatgttataattggcattttgggcactggttgcaattaattgccaaaaaaagcatatctcaccacaattgatctctcatttttccactctcatttatttcccttcacttycttcttggcttctgcaaaagcatttgtttttcctttttctttcttctttaaaaaaatatatttgaagagatttattctaagccaaatatgagtaaccatggccagtgacacagcactcaggaggtcctgagaacatgtgcccaaggtggttgggatgcagcttgcttttataca

SEQ ID NO: 378275 - DNA, 618 bp, Homo sapiens
ctgtttatgatgatttttcattttaccaatggtgatttacaaggaacagatactcttgatataagtgggaccaaacttacaaatcatcttgctccagtcagtttttgtgctggtttgaaaatttttttcatactctgagattcaggctaaattgcttttaaaattttaaagctttgtgtttcaaatttatattcttgatgagatgtatagagtgagaatgagatacattgtctttttattataaacaatcttgctttagtagctactgaagtttacttttgaaattgtatttcttaaatatttctgttaattatagaaaattgattttgtattctattttatatccattaactttgctcatttagtaattctaatmatcctaggcattctccacaatgcattgtaagataatgtatacatttcataggatgacaatttttaggtacacttaatggtatgggactatagattattggaattttctttggtttaaaattggcaaactatttttaaggggaagttgttaacaatcactttctacaatatgtgactctctcttcaaagagtaaatcagagacaaatcttttttttcaaatttctttttttgaaaatcaataa

SEQ ID NO: 378276 - DNA, 618 bp, Homo sapiens
ctgtttatgatgatttttcattttaccaatggtgatttacaaggaacagatactcttgatataagtgggaccaaacttacaaatcatcttgctccagtcagtttttgtgctggtttgaaaatttttttcatactctgagattcaggctaaattgcttttaaaattttaaagctttgtgtttcaaatttatattcttgatgagatgtatagagtgagaatgagatacattgtctttttattataaacaatcttgctttagtagctactgaagtttacttttgaaattgtatttcttaaatatttctgttaattatagaaaattgattttgtattctattttatatccattaactttgctcatttagtaattctaataatcctaggcattctccacaatgcattgtaagataatgtatacatttcataggatgacaatttttaggtacacttaatggkatgggactatagattattggaattttctttggtttaaaattggcaaactatttttaaggggaagttgttaacaatcactttctacaatatgtgactctctcttcaaagagtaaatcagagacaaatcttttttttcaaatttctttttttgaaaatcaataa

SEQ ID NO: 378277 - DNA, 461 bp, Homo sapiens
ttggggaccactagattggggaggaaaggtaggggttgtgggctgaagaactacctgttgggtactgtgttactgcctgggtggtaggatcactgggactccaagcctcagcatcacacaattactcatgtaacagtctttcattaacctataataaaagttgaaattaattaaaaaaacaaaacaactacaytgtttcattgctctagatttctttttgtctccatttaattatggagagacttgcagagacagaaatgactgtcatgtgttcttatacacataaagccctagaaacaggagccacagcacatcatgcactggggccatatggggaagtaccagagtcagtgaaggcaaaaggagcaagactaaagcatgagccagagcctttaatatggttttccttggaaggaatgagtgagacagtgtaagcagctgagcaggtttaagactgggta

SEQ ID NO: 378278 - DNA, 621 bp, Homo sapiens
ggatttctggattagcactactgaatttgtaagtataatgtaaatattctgaaatctgaaaatratttgaaatctgaaatacctctggtcccaagcattttttaactcactatatgtgctcatttttttttttaacaaatacctattaagcagacactatgaacaaaaactgtgcaaacattggaaatacataagtaagcaaggcagaagggcctcttgtattaaaaataaacgaaggaggacactagttaaagtggtaaggacagattttaatcagtaataatgattgcaacagggaaaagagtgcagcatgagttgaattcaacttcaatttgtatattggcaactgattgttttattttattttagattctaggggtacatctgaacgtttgtcacatgggtatactgtgtgatgctgaatattggacttctaatgatctcatcacccatgtggtggacataagacccaatagatagtttttcaacagttggccagctccctctctcttcccttttggaatctccagtgtttatggttcccatctttgtgttttggggtaccaaatgtttacctcctacttataagtgaaaacgtggtatttagtttgctgtttttgc

SEQ ID NO: 378279 - DNA, 621 bp, Homo sapiens
ggatttctggattagcactactgaatttgtaagtataatgtaaatattctgaaatctgaaaatgatttgaaatctgaaatacctctggtcccaagcattttttaactcactatatgtgctcatttttttttttaacaaatacctattaagcagacactatgaacaaaaactgtgcaaacattggaaatacataagtaagcaaggcagaagggcctcttgtattaaaaataaacgaaggaggacactagttaaagtggtaaggacagattttaatcagtaataatgattgcaacagggaaaagagtgcagcatgagttgaattcaacttcaatttgtatattggcaactgattgttttattttattttagattctaggggtacatctgaacgtttgtcacatgggtatactgtgtgatgctgaatattggacttctaatgatctcatcaccyatgtggtggacataagacccaatagatagtttttcaacagttggccagctccctctctcttcccttttggaatctccagtgtttatggttcccatctttgtgttttggggtaccaaatgtttacctcctacttataagtgaaaacgtggtatttagtttgctgtttttgc

SEQ ID NO: 378280 - DNA, 594 bp, Homo sapiens
cctctggtcccaagcattttttaactcactatatgtgctcatttttttttttaacaaatacctattaagcagacactatgaacaaaaactgtgcaaacattggaaatacataagtaagcaaggcagaagggcctcttgtattaaaaataaacgaaggaggacactagttaaagtggtaaggacagattttaatcagtaataatgattgcaacagggaaaagagtgcagcatgagttgaattcaacttcaatttgtatattggcaactgattgttttattttattttagattctaggggtacatctgaacgtttgtcacatgggtatactgtgtgatgctgaatattggacttctaatgatctcatcacccatgtrgtggacataagacccaatagatagtttttcaacagttggccagctccctctctcttcccttttggaatctccagtgtttatggttcccatctttgtgttttggggtaccaaatgtttacctcctacttataagtgaaaacgtggtatttagtttgctgtttttgcattaattcgacaagcattttggataagcagttcttaaccggtaaaatgtgttgt

SEQ ID NO: 378281 - DNA, 594 bp, Homo sapiens
cctctggtcccaagcattttttaactcactatatgtgctcatttttttttttaacaaatacctattaagcagacactatgaacaaaaactgtgcaaacattggaaatacataagtaagcaaggcagaagggcctcttgtattaaaaataaacgaaggaggacactagttaaagtggtaaggacagattttaatcagtaataatgattgcaacagggaaaagagtgcagcatgagttgaattcaacttcaatttgtatattggcaactgattgttttattttattttagattctaggggtacatctgaacgtttgtcacatgggtatactgtgtgatgctgaatattggacttctaatgatctcatcacccatgtggtgracataagacccaatagatagtttttcaacagttggccagctccctctctcttcccttttggaatctccagtgtttatggttcccatctttgtgttttggggtaccaaatgtttacctcctacttataagtgaaaacgtggtatttagtttgctgtttttgcattaattcgacaagcattttggataagcagttcttaaccggtaaaatgtgttgt

SEQ ID NO: 378282 - DNA, 594 bp, Homo sapiens
cctctggtcccaagcattttttaactcactatatgtgctcatttttttttttaacaaatacctattaagcagacactatgaacaaaaactgtgcaaacattggaaatacataagtaagcaaggcagaagggcctcttgtattaaaaataaacgaaggaggacactagttaaagtggtaaggacagattttaatcagtaataatgattgcaacagggaaaagagtgcagcatgagttgaattcaacttcaatttgtatattggcaactgattgttttattttattttagattctaggggtacatctgaacgtttgtcacatgggtatactgtgtgatgctgaatattggacttctaatgatctcatcacccatgtggtggacataagacccaatagatagtttttcaacagttggccagctccctctctcttcccttttggaatctccagtgtttatggttcccatctttgtgttttkgggtaccaaatgtttacctcctacttataagtgaaaacgtggtatttagtttgctgtttttgcattaattcgacaagcattttggataagcagttcttaaccggtaaaatgtgttgt

SEQ ID NO: 378283 - DNA, 456 bp, Homo sapiens
gtgtaaaatggggcaaacactccagagaacagttaattattttcttataaagtttaaaatatatttttctttgacccagtaagttttttctctgttaygtatacaaaagaaataataactgatgccacgataaagatttattcaaaacttattagaacagttttattcttaaaactaaaccttgaaacaacccaaacaaccttcaataaaggaatggatacacgaattgtatatattcatacagtggacactacagtactcagaattaacaacaacaacaacaaatcagatattgacgtgtaacaaaatgtctgggcctctataaaatattatattgaatgaaataaaaaagttgaatatctattcttattatgttgaacaaattaaaaaaaattacatggcataaagttccatttatatgacattccagaagaggcaaaactaatccatggttat

SEQ ID NO: 378284 - DNA, 456 bp, Homo sapiens
gtgtaaaatggggcaaacactccagagaacagttaattattttcttataaagtttaaaatatatttttctttgacccagtaagttttttctctgttacgtayacaaaagaaataataactgatgccacgataaagatttattcaaaacttattagaacagttttattcttaaaactaaaccttgaaacaacccaaacaaccttcaataaaggaatggatacacgaattgtatatattcatacagtggacactacagtactcagaattaacaacaacaacaacaaatcagatattgacgtgtaacaaaatgtctgggcctctataaaatattatattgaatgaaataaaaaagttgaatatctattcttattatgttgaacaaattaaaaaaaattacatggcataaagttccatttatatgacattccagaagaggcaaaactaatccatggttat

SEQ ID NO: 378285 - DNA, 456 bp, Homo sapiens
gtgtaaaatggggcaaacactccagagaacagttaattattttcttataaagtttaaaatatatttttctttgacccagtaagttttttctctgttacgtatacaaaagaaataataactgatgccacgataaagatttattcaaaacttattagaacagttttattcttaaaactaaaccttgaaacaacccaaacaaccttcaataaaggaatggatacacgaattgtatatattcatacagtggacactacagtactcagaattaacaacaacaacaacaaatcagatattgacgtgtaacaaaatgtctgggcctctataaaatattatattgaatraaataaaaaagttgaatatctattcttattatgttgaacaaattaaaaaaaattacatggcataaagttccatttatatgacattccagaagaggcaaaactaatccatggttat

SEQ ID NO: 378286 - DNA, 460 bp, Homo sapiens
aaaaaatttgcctcaccagtgaaactctgtctacctaaagtctgcagaaagcataactcaagaatttaacataaggtcccctaatcacatgaaggtaagaaacagccatcttttaaacatttaaaaagtcaggggaataaaaaatccaggagtttttttttttttaataactattaaacttatgccagtgaaagaaaataaaattaattttcacaaaagttgatayacatgactgaggataaatctatattgatattgttgagattaaaatacaacgcaattttaataaacatttaaaacacggacatggtgtccctaacaatttgttgataggggagaggataatataaaaattaattttatgaatcccacataagtacttgttaaaaacatatgcctctgttctttttatttaggaatcactcacagaaagcacacattctttgcttctgcactaact

SEQ ID NO: 378287 - DNA, 460 bp, Homo sapiens
aaaaaatttgcctcaccagtgaaactctgtctacctaaagtctgcagaaagcataactcaagaatttaacataaggtcccctaatcacatgaaggtaagaaacagccatcttttaaacatttaaaaagtcaggggaataaaaaatccaggagtttttttttttttaataactattaaacttatgccagtgaaagaaaataaaattaattttcacaaaagttgatacacatgactgaggataaatctatattgatattgttgagattaaaatacaaygcaattttaataaacatttaaaacacggacatggtgtccctaacaatttgttgataggggagaggataatataaaaattaattttatgaatcccacataagtacttgttaaaaacatatgcctctgttctttttatttaggaatcactcacagaaagcacacattctttgcttctgcactaact

SEQ ID NO: 378288 - DNA, 460 bp, Homo sapiens
aaaaaatttgcctcaccagtgaaactctgtctacctaaagtctgcagaaagcataactcaagaatttaacataaggtcccctaatcacatgaaggtaagaaacagccatcttttaaacatttaaaaagtcaggggaataaaaaatccaggagtttttttttttttaataactattaaacttatgccagtgaaagaaaataaaattaattttcacaaaagttgatacacatgactgaggataaatctatattgatattgttgagattaaaatacaacgcaattttaatraacatttaaaacacggacatggtgtccctaacaatttgttgataggggagaggataatataaaaattaattttatgaatcccacataagtacttgttaaaaacatatgcctctgttctttttatttaggaatcactcacagaaagcacacattctttgcttctgcactaact

SEQ ID NO: 378289 - DNA, 460 bp, Homo sapiens
aaaaaatttgcctcaccagtgaaactctgtctacctaaagtctgcagaaagcataactcaagaatttaacataaggtcccctaatcacatgaaggtaagaaacagccatcttttaaacatttaaaaagtcaggggaataaaaaatccaggagtttttttttttttaataactattaaacttatgccagtgaaagaaaataaaattaattttcacaaaagttgatacacatgactgaggataaatctatattgatattgttgagattaaaatacaacgcaattttaataaacatttaaaacacggacatggtgtccctaacaatttgttgataggggagaggataatataaaaattaattttatgaatcccacataagtacttgttaaaaacatatgyctctgttctttttatttaggaatcactcacagaaagcacacattctttgcttctgcactaact

SEQ ID NO: 378290 - DNA, 605 bp, Homo sapiens
ataaggtcccctaatcacatgaaggtaagaaacagccatcttttaaacatttaaaaagtcaggggaataaaaaatccaggagtttttttttttttaataactattaaacttatgccagtgaaagaaaataaaattaattttcacaaaagttgatacacatgactgaggataaatctatattgatattgttgagattaaaatacaacgcaattttaataaacatttaaaacacggacatggtgtccctaacaatttgttgataggggagaggataatataaaaattaattttatgaatcccacataagtacttgttaaaaacatatgcctctgttctttttatttaggaatcactcacagaaagcacacattctttgcttctgcactaactctggaattcaatattagaaggctcaactgccatgaatataaatcaaattcatctgcatcccctatatcagactaaatgtgtttgtttctcagtattctgctatrttccttgtattaattttaatagaatcaaaactgagatatggaagaggatgttatatattgaacaccttttcttccatctagcatacccaatatttgccgcatgggccagaa

SEQ ID NO: 378291 - DNA, 453 bp, Homo sapiens
gatgagaaagaacacaagagactgcagtaacctttggttagagtgatttttatcacccctagtttgaaagggccagtggcaaagcaagtttactaactttaggataaagtagactcatcaggaaaagagcaaccacctaagcttaagggacaaagccaatcacccctgggaagccagtgttaaaaatacttgatcttgctctctgctttcctgagaatacaaatcattcactttaactcattgaattcactcagcagtcagaagaaaaggaagcctcttgttggaattcatactaagaagatcagaaagtgtagtggaaaagagaggactaraactgcaggtgcaagtagaagtcagtgaccaaaaagaagtgtatttgtattgttcatttgacctcatttattttagtatgcaagcgtatgcttaaaaatatttcagccttctttttactat

SEQ ID NO: 378292 - DNA, 453 bp, Homo sapiens
gatgagaaagaacacaagagactgcagtaacctttggttagagtgatttttatcacccctagtttgaaagggccagtggcaaagcaagtttactaactttaggataaagtagactcatcaggaaaagagcaaccacctaagcttaagggacaaagccaatcacccctgggaagccagtgttaaaaatacttgatcttgctctctgctttcctgagaatacaaatcattcactttaactcattgaattcactcagcagtcagaagaaaaggaagcctcttgttggaattcatactaagaagatcagaaagtgtagtggaaaagagaggactaaaactgcaggtgcaagtagaagtcrgtgaccaaaaagaagtgtatttgtattgttcatttgacctcatttattttagtatgcaagcgtatgcttaaaaatatttcagccttctttttactat

SEQ ID NO: 378293 - DNA, 453 bp, Homo sapiens
gatgagaaagaacacaagagactgcagtaacctttggttagagtgatttttatcacccctagtttgaaagggccagtggcaaagcaagtttactaactttaggataaagtagactcatcaggaaaagagcaaccacctaagcttaagggacaaagccaatcacccctgggaagccagtgttaaaaatacttgatcttgctctctgctttcctgagaatacaaatcattcactttaactcattgaattcactcagcagtcagaagaaaaggaagcctcttgttggaattcatactaagaagatcagaaagtgtagtggaaaagagaggactaaaactgcaggtgcaagtagaagtcagtgwccaaaaagaagtgtatttgtattgttcatttgacctcatttattttagtatgcaagcgtatgcttaaaaatatttcagccttctttttactat

SEQ ID NO: 378294 - DNA, 453 bp, Homo sapiens
gatgagaaagaacacaagagactgcagtaacctttggttagagtgatttttatcacccctagtttgaaagggccagtggcaaagcaagtttactaactttaggataaagtagactcatcaggaaaagagcaaccacctaagcttaagggacaaagccaatcacccctgggaagccagtgttaaaaatacttgatcttgctctctgctttcctgagaatacaaatcattcactttaactcattgaattcactcagcagtcagaagaaaaggaagcctcttgttggaattcatactaagaagatcagaaagtgtagtggaaaagagaggactaaaactgcaggtgcaagtagaagtcagtgaccaaaaagaagtgtatttgtattgttcatttgacctcatttattttagtatgcaagcgtrtgcttaaaaatatttcagccttctttttactat

SEQ ID NO: 378295 - DNA, 622 bp, Homo sapiens
aattatttatttaaactaatttaattaaaattttaaaaataattaaatttttcaataatcaagtaaaacaaattaaacttaaacaatagaaccttttattttgagatgcaaaagcatgaatcaaagacatctgtaaagcttaaaygtattcagattgtaaagctaacccatgtaaaccaaactaggccaggaattagactatattagcgccccagactcccccaagtgtcccttcctaaaagaagctcctctcaccctaagttttatgtataatttttttgctgtgcttcaaaaaggtatagcatgtatgcatctctgaacaacataccttagtgttttttggcctgctttgataattactatgaaatcctctttctgtattattttgtgccacactccttttgttcaacatatgtttatgagtgacagccctgttgttgcaagcagttgtaatttatttattttcactgctctataatatttgattgtttatatagatgagaattttctattttattccttatatacatttgtgttattttaaagtttggttgcttaggagcaaagtcaatatgaaaatacttggacatatgctctcagaattatatgcataagtttatct

SEQ ID NO: 378296 - DNA, 622 bp, Homo sapiens
aattatttatttaaactaatttaattaaaattttaaaaataattaaatttttcaataatcaagtaaaacaaattaaacttaaacaatagaaccttttattttgagatgcaaaagcatgaatcaaagacatctgtaaagcttaaacgtattcagattgtaaagctaacccatgtaaaccaaactaggccaggaattagactatattagygccccagactcccccaagtgtcccttcctaaaagaagctcctctcaccctaagttttatgtataatttttttgctgtgcttcaaaaaggtatagcatgtatgcatctctgaacaacataccttagtgttttttggcctgctttgataattactatgaaatcctctttctgtattattttgtgccacactccttttgttcaacatatgtttatgagtgacagccctgttgttgcaagcagttgtaatttatttattttcactgctctataatatttgattgtttatatagatgagaattttctattttattccttatatacatttgtgttattttaaagtttggttgcttaggagcaaagtcaatatgaaaatacttggacatatgctctcagaattatatgcataagtttatct

SEQ ID NO: 378297 - DNA, 622 bp, Homo sapiens
aattatttatttaaactaatttaattaaaattttaaaaataattaaatttttcaataatcaagtaaaacaaattaaacttaaacaatagaaccttttattttgagatgcaaaagcatgaatcaaagacatctgtaaagcttaaacgtattcagattgtaaagctaacccatgtaaaccaaactaggccaggaattagactatattagcgccccagactcccccaagtgtcccttcctaaaagaagctcctctcaccctaagttttatgtataatttttttgctgtgcttcaaaaaggtatagcatgtatgcatctctgaacaacataccttagtkttttttggcctgctttgataattactatgaaatcctctttctgtattattttgtgccacactccttttgttcaacatatgtttatgagtgacagccctgttgttgcaagcagttgtaatttatttattttcactgctctataatatttgattgtttatatagatgagaattttctattttattccttatatacatttgtgttattttaaagtttggttgcttaggagcaaagtcaatatgaaaatacttggacatatgctctcagaattatatgcataagtttatct

SEQ ID NO: 378298 - DNA, 622 bp, Homo sapiens
aattatttatttaaactaatttaattaaaattttaaaaataattaaatttttcaataatcaagtaaaacaaattaaacttaaacaatagaaccttttattttgagatgcaaaagcatgaatcaaagacatctgtaaagcttaaacgtattcagattgtaaagctaacccatgtaaaccaaactaggccaggaattagactatattagcgccccagactcccccaagtgtcccttcctaaaagaagctcctctcaccctaagttttatgtataatttttttgctgtgcttcaaaaaggtatagcatgtatgcatctctgaacaacataccttagtgttttttggcctgctttgataattactatgaaatcctctttctgtattattttgtgccacactccttttgttcaacatatgtttatgagtgacagccctgttgttgcaagcrgttgtaatttatttattttcactgctctataatatttgattgtttatatagatgagaattttctattttattccttatatacatttgtgttattttaaagtttggttgcttaggagcaaagtcaatatgaaaatacttggacatatgctctcagaattatatgcataagtttatct

SEQ ID NO: 378299 - DNA, 570 bp, Homo sapiens
tcccttaatcatcttggtggtgagatgaagaacrccagatgatacctcacaagagagactgctacgttgtggtgcattggcgagactgcaactttaagaagtgtgacttttattgctgctgaattattttatctcctacccaattgaaaataaaggatataaagtgcttaggttgaacacaaagtcctctgctctaggtaacatcttcagcagccacattagcagaggcatgggtggtaatggtggagtagatgtctctttgcttctgacagggtgtctgcttatgtgttaaacaaaatagtatggtatatatttcattaagaaatctgctaaaaaatgaagtaaaacaggttcatgttcttaagaggcacaggatttgctacggcagcaagaccaaaaggcttaagtaacaaaaatgtgcatagtagttacaaacattttcatctaaacaaaacaatgtgagcatctgcatatgacaataacttatgcaaaaaatatttttaactgagattgaaatcattttatacataacaaatgttatcactgtattctcaggtaatatattgtttg

SEQ ID NO: 378300 - DNA, 570 bp, Homo sapiens
tcccttaatcatcttggtggtgagatgaagaacaccagrtgatacctcacaagagagactgctacgttgtggtgcattggcgagactgcaactttaagaagtgtgacttttattgctgctgaattattttatctcctacccaattgaaaataaaggatataaagtgcttaggttgaacacaaagtcctctgctctaggtaacatcttcagcagccacattagcagaggcatgggtggtaatggtggagtagatgtctctttgcttctgacagggtgtctgcttatgtgttaaacaaaatagtatggtatatatttcattaagaaatctgctaaaaaatgaagtaaaacaggttcatgttcttaagaggcacaggatttgctacggcagcaagaccaaaaggcttaagtaacaaaaatgtgcatagtagttacaaacattttcatctaaacaaaacaatgtgagcatctgcatatgacaataacttatgcaaaaaatatttttaactgagattgaaatcattttatacataacaaatgttatcactgtattctcaggtaatatattgtttg

SEQ ID NO: 378301 - DNA, 570 bp, Homo sapiens
tcccttaatcatcttggtggtgagatgaagaacaccagatgatacctcacaagagagactgctacgttgtggtgcattggcgagactgcaactttaagaagtgtgacttttattgctgctgaattattttatctcctacccarttgaaaataaaggatataaagtgcttaggttgaacacaaagtcctctgctctaggtaacatcttcagcagccacattagcagaggcatgggtggtaatggtggagtagatgtctctttgcttctgacagggtgtctgcttatgtgttaaacaaaatagtatggtatatatttcattaagaaatctgctaaaaaatgaagtaaaacaggttcatgttcttaagaggcacaggatttgctacggcagcaagaccaaaaggcttaagtaacaaaaatgtgcatagtagttacaaacattttcatctaaacaaaacaatgtgagcatctgcatatgacaataacttatgcaaaaaatatttttaactgagattgaaatcattttatacataacaaatgttatcactgtattctcaggtaatatattgtttg

SEQ ID NO: 378302 - DNA, 614 bp, Homo sapiens
tgctacgttgtggtgcattggcgagactgcaactttaagaagtgtgacttttattgctgctgaattattttatctcctacccaattgaaaataaaggatataaagtgcttaggttgaacacaaagtcctctgctctaggtaacatcttcagcagccacattagcagaggcatgggtggtaatggtggartagatgtctctttgcttctgacagggtgtctgcttatgtgttaaacaaaatagtatggtatatatttcattaagaaatctgctaaaaaatgaagtaaaacaggttcatgttcttaagaggcacaggatttgctacggcagcaagaccaaaaggcttaagtaacaaaaatgtgcatagtagttacaaacattttcatctaaacaaaacaatgtgagcatctgcatatgacaataacttatgcaaaaaatatttttaactgagattgaaatcattttatacataacaaatgttatcactgtattctcaggtaatatattgtttgtatatagatgtgataaataataacttatttaagttattcatcatttatacaacaaataattctttggaatctacaaaatgctggttttgttctaggcactgaa

SEQ ID NO: 378303 - DNA, 614 bp, Homo sapiens
tgctacgttgtggtgcattggcgagactgcaactttaagaagtgtgacttttattgctgctgaattattttatctcctacccaattgaaaataaaggatataaagtgcttaggttgaacacaaagtcctctgctctaggtaacatcttcagcagccacattagcagaggcatgggtggtaatggtggagtagatgtctctttgcttctgacagggtgtctgcttatgtgttaaacaaaatagtatggtatatatttcattaagaaatctgctaaaaaatgaagtaaaasaggttcatgttcttaagaggcacaggatttgctacggcagcaagaccaaaaggcttaagtaacaaaaatgtgcatagtagttacaaacattttcatctaaacaaaacaatgtgagcatctgcatatgacaataacttatgcaaaaaatatttttaactgagattgaaatcattttatacataacaaatgttatcactgtattctcaggtaatatattgtttgtatatagatgtgataaataataacttatttaagttattcatcatttatacaacaaataattctttggaatctacaaaatgctggttttgttctaggcactgaa

SEQ ID NO: 378304 - DNA, 614 bp, Homo sapiens
tgctacgttgtggtgcattggcgagactgcaactttaagaagtgtgacttttattgctgctgaattattttatctcctacccaattgaaaataaaggatataaagtgcttaggttgaacacaaagtcctctgctctaggtaacatcttcagcagccacattagcagaggcatgggtggtaatggtggagtagatgtctctttgcttctgacagggtgtctgcttatgtgttaaacaaaatagtatggtatatatttcattaagaaatctgctaaaaaatgaagtaaaacaggttcatgttcttaagaggcacaggatttgctacggcagcaagaccaaaaggcttaagtaacaaaaatgtgcatagtagttacaaacattttcatctaaacaaaacaatgtgagcatctgcatatgacaataacttatgcaaaaaatatttttaactgagattgaaatcattttatacataacaaatgttatcactgtattctcaggtaatatattgtttgtatatagatgtkataaataataacttatttaagttattcatcatttatacaacaaataattctttggaatctacaaaatgctggttttgttctaggcactgaa

SEQ ID NO: 378305 - DNA, 632 bp, Homo sapiens
gttttgttacacaggtatacatgtgtcatggtggtttgctgcaacatgggtgtaggttttgcaggtaattattatattattaaaagataacagaatacctagctaaaaaaaatgcgaggaggcattgatgggcacatgtttastgagcacatcctgactccagaattaaaaatccaatttatgcctctgcagtccaataaaatttttccttaagaatccagggatcagactttcatctcagcaaccactccaatatggtttctcacctactcattccaacgagctgctcatatcaaaatataagtgctatccatattgttaaattataaattgaaccataacttctcagccttcatcttaatttatatatcagcagcatttcacacagtctatctccaccttctctttgtaaaacttttttatagaattccagaacacttaacttactttccccccaccacgtttttgaaaattacccctagtccttttttgcaggtttcatctttactatttttcaaatgttagaggaccattatgctcaggactttcacttcttatctttcttatctttgctttcttactaatttttgtgtcattaatttcctgatatttcatattacacctaaacactg

SEQ ID NO: 378306 - DNA, 632 bp, Homo sapiens
gttttgttacacaggtatacatgtgtcatggtggtttgctgcaacatgggtgtaggttttgcaggtaattattatattattaaaagataacagaatacctagctaaaaaaaatgcgaggaggcattgatgggcacatgtttagtgagcacatcctgactccagaattaaaaatccaatttatgcctctgcagtccaataaaatttttccttaagaatccagggatcagactttcatctcagcaaccactccaatatggtttctcacctactcattccaacgagctgctcatatcaaaatataagtgctatccatattgttaaattataaattgaaccataacttctcagccttcatcttaatttatatatcagcagcatttcacacagtctatctccaccttctctttgtaaaacttttttayagaattccagaacacttaacttactttccccccaccacgtttttgaaaattacccctagtccttttttgcaggtttcatctttactatttttcaaatgttagaggaccattatgctcaggactttcacttcttatctttcttatctttgctttcttactaatttttgtgtcattaatttcctgatatttcatattacacctaaacactg

SEQ ID NO: 378307 - DNA, 632 bp, Homo sapiens
gttttgttacacaggtatacatgtgtcatggtggtttgctgcaacatgggtgtaggttttgcaggtaattattatattattaaaagataacagaatacctagctaaaaaaaatgcgaggaggcattgatgggcacatgtttagtgagcacatcctgactccagaattaaaaatccaatttatgcctctgcagtccaataaaatttttccttaagaatccagggatcagactttcatctcagcaaccactccaatatggtttctcacctactcattccaacgagctgctcatatcaaaatataagtgctatccatattgttaaattataaattgaaccataacttctcagccttcatcttaatttatatatcagcagcatttcacacagtctatctccaccttctctttgtaaaacttttttatagaattccagaacacttaacttactttccccccaccacgtttttgaaaattacccctagtccttttttgcaggtttcatctttactatttttcaaatgttagaggaccattatgctcaggamtttcacttcttatctttcttatctttgctttcttactaatttttgtgtcattaatttcctgatatttcatattacacctaaacactg

SEQ ID NO: 378308 - DNA, 625 bp, Homo sapiens
gccacaacaatagaattgattagttgcaacaaaccatatagcccaaaaacctaaaataattaccaacagwtcctttccaaaaaacaaaaaaaattcttgacacctgatgtataattatttcctattttgattcctgagatggcatacttgtttcttctcttaattttatcaagccatttctccagagttttgttattgtatggctcctacaacaactaacaaacttttggccatatttcttgacttttctttccctgtattcttaatcactatgcatgtatttattatttccttttatttctgttgatatttctaacttctaccaataaattcaaaacattttaaaaattaatttgttgtcctcataaaataagaatttaaggttctacattttcctctaaaatgacacattttataatgtagtatacattttttaattaaaaatattttataatttccattatgatttgctcttgggtgttgagttactaagaagtatatttctgaggtttttcttcaatatgactgactatagatatttgactctagttattctcagaaagagaaagcaaagttatggataaataatcgttaattccaatatctatatagacggaagtgtgct

SEQ ID NO: 378309 - DNA, 587 bp, Homo sapiens
ctaacttctaccaataaattcaaaacattttaaaaattaatttgttgtcctcataaaataagaatttaaggttctacattttcctctaaaatgacacattttataatgtagtatacattttttaattaaaaatattttataatttccattatgatttgctcttgggtgttgagttactaagaagtatatttctgaggtttttcttcaatatgactgactatagatatttgactctagttattctcagaaagagaaagcaaagttatggataaataatcgttaattccaatatctatatagacggaagtgtgctagagcaccacaagaagaaatttgaacacagaaaaataaggaagcaagaacccagcagacattatactctgagggacttgatgttccatggaaaagcayaggtgggggtgtcttttgctcttctcacctctgcggcagactgcttgtttctgaactgttggagagccctccattctcacaagcccaagcactggtgtgggccgcaatcttggaacaaattgaggacagagaacaaggctactatttcctgcagtgccacttgcccttcacccagc

SEQ ID NO: 378310 - DNA, 587 bp, Homo sapiens
ctaacttctaccaataaattcaaaacattttaaaaattaatttgttgtcctcataaaataagaatttaaggttctacattttcctctaaaatgacacattttataatgtagtatacattttttaattaaaaatattttataatttccattatgatttgctcttgggtgttgagttactaagaagtatatttctgaggtttttcttcaatatgactgactatagatatttgactctagttattctcagaaagagaaagcaaagttatggataaataatcgttaattccaatatctatatagacggaagtgtgctagagcaccacaagaagaaatttgaacacagaaaaataaggaagcaagaacccagcagacattatactctgagggacttgatgttccatggaaaagcacaggtgggggtgtcttttgcycttctcacctctgcggcagactgcttgtttctgaactgttggagagccctccattctcacaagcccaagcactggtgtgggccgcaatcttggaacaaattgaggacagagaacaaggctactatttcctgcagtgccacttgcccttcacccagc

SEQ ID NO: 378311 - DNA, 555 bp, Homo sapiens
gtcttttgctcttctcacctctgcggcagactgcttgtttctgaactgttggagagccctccattctcacaagcccaagcactggtgtgggccgcaatcttggaacaaattgaggacagagaacaaggctactatttcctgcagtgccacttgcccttcacccagccccaagatgaggtggtgggcaccatactggatatgcctctgtggtggacttctatactgcctttgagtgagagagaggcttgccccatccccttgccggcttccttctccgtccctgcgtcgagctgtggctagatttctccatgagggcagagggcagggcaagaggcgtgagaagcatcttctggaaggtctgcgggcaccctcctgcgggtggacaatgagcgcctgggaggccgttgtccttggttggggagcggtcgtctggatctagcctagcaaagaggctgctccggatggggaggraatgaaaacccctgcggctccgacgcagatgcccacgttgcccaggccttcacagacccccaagccggaaccgccgggaaaacg

SEQ ID NO: 378312 - DNA, 428 bp, Homo sapiens
taggggtaccccaactcggacagaaggcccatgagttgaatttgaagtttgtgggaatagaggtgaggcaccaggggcagaaaaaaaacaggagacctcgcctcagacaagcggggcctgggtcccccatggatgaaagtgccttcccattatgctgtaccctgggcagagtggacagtgacgaccctggttcgagcccagggtgcgcttcgggaccgcttgcggttaccagaaagygaacaaatggtccatgagcggaaggtgaggcacctgaggcagagaaagtaaagaaacgcgccgccgagaagcagtgcctgggtccctcacggaggaaattgtcttctccttagcccgttcgcttggcagtgaggtccctggcgtccctggtttgatcccagggtacgcctcgggccactagtgttacccca

SEQ ID NO: 378313 - DNA, 428 bp, Homo sapiens
taggggtaccccaactcggacagaaggcccatgagttgaatttgaagtttgtgggaatagaggtgaggcaccaggggcagaaaaaaaacaggagacctcgcctcagacaagcggggcctgggtcccccatggatgaaagtgccttcccattatgctgtaccctgggcagagtggacagtgacgaccctggttcgagcccagggtgcgcttcgggaccgcttgcggttaccagaaagtgaacaaatggtccatgagcggaaggtgaggcacctgargcagagaaagtaaagaaacgcgccgccgagaagcagtgcctgggtccctcacggaggaaattgtcttctccttagcccgttcgcttggcagtgaggtccctggcgtccctggtttgatcccagggtacgcctcgggccactagtgttacccca

SEQ ID NO: 378314 - DNA, 428 bp, Homo sapiens
taggggtaccccaactcggacagaaggcccatgagttgaatttgaagtttgtgggaatagaggtgaggcaccaggggcagaaaaaaaacaggagacctcgcctcagacaagcggggcctgggtcccccatggatgaaagtgccttcccattatgctgtaccctgggcagagtggacagtgacgaccctggttcgagcccagggtgcgcttcgggaccgcttgcggttaccagaaagtgaacaaatggtccatgagcggaaggtgaggcacctgaggcagagaaagtaaagaaacgcgccgccgagaagcagtgcctgggtccctcacggaggaaattgtcttctccttagcccgttcgcttggcastgaggtccctggcgtccctggtttgatcccagggtacgcctcgggccactagtgttacccca

SEQ ID NO: 378315 - DNA, 618 bp, Homo sapiens
atggcctactataatgataagagattattttaaatatgtagtaatgagataaaattacatgaatgartgtttttatttataatgagcataccagtgtgtagcctctttagtacttgtatacttggaagcagtttattctctgaagattttttttttatttcttctctaacttgtttattctttttaaatttaatgtcaatataatatgttttaactttaaaaatttaggtgccttatgagtggaatctcagttaaaaaatgttattattcagtaggtactaaattgagttcctgttttactttacaaaccaagcaccataggttattacagaaaaccattataagtcaaattttttaaaagtttcttcagtgaagtagacattacaaaagttatatttaaacacaacactatgaactcaagtcacagaggcaaagagaaactattgtatttgctttgagcatctacacattgtaaaaaaggttattgaatgcaattcaaatctaacttcatctgaggataaccccaggcactttgtgcctgtatttcttgtagttttgtactgactattggaaactcattcagttttgccttaaagcacccagtaacctatgaacaaa

SEQ ID NO: 378316 - DNA, 618 bp, Homo sapiens
atggcctactataatgataagagattattttaaatatgtagtaatgagataaaattacatgaatgagtgtttttatttataatgagcataccagtgtgtagcctctttagtacttgtatacttggaagcagtttattctctgaagattttttttttatttcttctctaacttgtttattctttttaaatttaatgtcaatataatatgttttaactttaaaaatttaggtgcyttatgagtggaatctcagttaaaaaatgttattattcagtaggtactaaattgagttcctgttttactttacaaaccaagcaccataggttattacagaaaaccattataagtcaaattttttaaaagtttcttcagtgaagtagacattacaaaagttatatttaaacacaacactatgaactcaagtcacagaggcaaagagaaactattgtatttgctttgagcatctacacattgtaaaaaaggttattgaatgcaattcaaatctaacttcatctgaggataaccccaggcactttgtgcctgtatttcttgtagttttgtactgactattggaaactcattcagttttgccttaaagcacccagtaacctatgaacaaa

SEQ ID NO: 378317 - DNA, 618 bp, Homo sapiens
atggcctactataatgataagagattattttaaatatgtagtaatgagataaaattacatgaatgagtgtttttatttataatgagcataccagtgtgtagcctctttagtacttgtatacttggaagcagtttattctctgaagattttttttttatttcttctctaacttgtttattctttttaaatttaatgtcaatataatatgttttaactttaaaaatttaggtgccttatgagtggaatctcagttaaaaaatgttattattcagtaggtactaaattgagttcctgttttactttacaaaccaagcaccataggttattacagaaaaccattataagtcaaatttttwaaaagtttcttcagtgaagtagacattacaaaagttatatttaaacacaacactatgaactcaagtcacagaggcaaagagaaactattgtatttgctttgagcatctacacattgtaaaaaaggttattgaatgcaattcaaatctaacttcatctgaggataaccccaggcactttgtgcctgtatttcttgtagttttgtactgactattggaaactcattcagttttgccttaaagcacccagtaacctatgaacaaa

SEQ ID NO: 378318 - DNA, 576 bp, Homo sapiens
aaaacaaaacaaaacaaaacaaaacaaaacaaaaaactctgtcctcagactgatttgtgaaaataactatttaatctaaaaataaactaaagagtgaaaatgagaattagcaaatagagttgaaggtgtgtctcaaaatggattgtattttatatagccttttactataattattcttataacagggcttgttttcctctattagactgcaaatgtgttggttactgaggcggttgcacttgtttttgtatcacttatgaaacctagtatagtgctttgtattatagtaatcmttcattagatattatgtgaatgatttgaattatatttcatagtagctcaaagttagtcttgatggataaatgaatgtaatacaaccatatacattattagtaaggaacttaataatatcatgaagtatctttaaccaaagtaataattaaaaagtaggagtaaaccatagtaagttcaaatttagaatttgatagataatggagattactttttaggcctaaatattgaaggatagatgtttatgaaactttgaggttcaaattatttgtagaaatgtttatt

SEQ ID NO: 378319 - DNA, 576 bp, Homo sapiens
aaaacaaaacaaaacaaaacaaaacaaaacaaaaaactctgtcctcagactgatttgtgaaaataactatttaatctaaaaataaactaaagagtgaaaatgagaattagcaaatagagttgaaggtgtgtctcaaaatggattgtattttatatagccttttactataattattcttataacagggcttgttttcctctattagactgcaaatgtgttggttactgaggcggttgcacttgtttttgtatcacttatgaaacctagtatagtgctttgtattatagtaatcattcattagatattatgtgaatgatttgaattatatttcatagtagctcaaagttagtcttgatggataaatgaatgtaatacaaccatatacattattagtaaggaacttaataatatcatgaagtatctttaaccaaagtaataattaaaaagtaggagtaaaccatartaagttcaaatttagaatttgatagataatggagattactttttaggcctaaatattgaaggatagatgtttatgaaactttgaggttcaaattatttgtagaaatgtttatt

SEQ ID NO: 378320 - DNA, 554 bp, Homo sapiens
tggtttgagaacaaagctgtcattacttgcaagatgaaaacagtaaaaattgcatgtgtttattaaaacacagaagtatattcctgtgcaaattaatgcagattctgaagygaaagacaggacttttgagagattttgagtccaagggttcacctcttcaaacacaactgaaaaaactctattttttctatttttaaatctaatcagtttatatatgcccaggtccagcaaaaagaagctgggttgataatgtgttttgcagttattcaagctagtttgaaagagtacctggcagtgattgtgaagaccaatgattgtgctactaaggtctctcaattgccagacacccaccaagtattttttaaatatgctattctgttttgaaactcaaaaccttgtatttttgttaatctagttacctgccaaatcaaacaggaatccaaagtttcataaccctgctgtgttctctggttactagaaataagcatatttttgatgttttaacaaccttttaaaataataatttctaataatgaaatagaatatttctattt

SEQ ID NO: 378321 - DNA, 554 bp, Homo sapiens
tggtttgagaacaaagctgtcattacttgcaagatgaaaacagtaaaaattgcatgtgtttattaaaacacagaagtatattcctgtgcaaattaatgcagattctgaagcgaaagacaggacttttgagagattttgagtccaagggttcacctcttcaaacacaactgaaaaaactctattttttytatttttaaatctaatcagtttatatatgcccaggtccagcaaaaagaagctgggttgataatgtgttttgcagttattcaagctagtttgaaagagtacctggcagtgattgtgaagaccaatgattgtgctactaaggtctctcaattgccagacacccaccaagtattttttaaatatgctattctgttttgaaactcaaaaccttgtatttttgttaatctagttacctgccaaatcaaacaggaatccaaagtttcataaccctgctgtgttctctggttactagaaataagcatatttttgatgttttaacaaccttttaaaataataatttctaataatgaaatagaatatttctattt

SEQ ID NO: 378322 - DNA, 554 bp, Homo sapiens
tggtttgagaacaaagctgtcattacttgcaagatgaaaacagtaaaaattgcatgtgtttattaaaacacagaagtatattcctgtgcaaattaatgcagattctgaagcgaaagacaggacttttgagagattttgagtccaagggttcacctcttcaaacacaactgaaaaaactctattttttctatttttaaatctaatcagtttatatatgcccaggtccagcaaaaagaagctgggttgataatgtgttttgcagttattcaagctagtttgaaagagtacctrgcagtgattgtgaagaccaatgattgtgctactaaggtctctcaattgccagacacccaccaagtattttttaaatatgctattctgttttgaaactcaaaaccttgtatttttgttaatctagttacctgccaaatcaaacaggaatccaaagtttcataaccctgctgtgttctctggttactagaaataagcatatttttgatgttttaacaaccttttaaaataataatttctaataatgaaatagaatatttctattt

SEQ ID NO: 378323 - DNA, 298 bp, Homo sapiens
ttccataatcctcatgtgtcctgggagggacccagtgagaggtaactgaatcatggcggcagtttccccatgctgttctcatgatagtaagtgagttctcatgtgatctgayggttttataagcagctggcatttcccttgcttgaggtgatgaatgccccatttaccctgatgtgattattacacattgcatgcctgtgtcaaactatctcatgtaccccataaatatatacacctaccatgtactcatataaattaaaaataaaaataaattttttaaaaaagtgtgagttttaaa

SEQ ID NO: 378324 - DNA, 432 bp, Homo sapiens
aagttcaaacagtgcagtaataaatatgcaagagtgcttttagacattaaacaatrtggctctaaattaaggacctagtgcctgtaatcccagcactttgggaggtcgaggtgggtggatcacctgaggtcagaagttttgagaccagcctggccaacatggcaaaaccccgtttctacaaaaaatacaaaaattagctgggtatggtgatgcgcacttgtagccccagctactcgggaggctgaggtaggacaattgcctgaacccacgaggcagaggttgcagtgagctgagatcctgtcactgcactccagtctgcgggacagagtgagactctgtcccaataataaataaataaataaataatctagaagtacaattgcttagccaaatttcttatgcattttgaatgataagagttgctgcctcatt

SEQ ID NO: 378325 - DNA, 556 bp, Homo sapiens
ggtgtaatcctagctcattgtagcctccaacgcctaggctcaagcaatcctcttacctcagcctccctcccaattaactaggattacaggtgcatgccaccacaccckgctaattttattcttagttatgggatcttgctatgttgcccaggctggtcttgaaatcctggcctcaaggtgacctcagcctccagtgtagctgacattacaggcgtgagacactgtacctggctgaatgagtgcctctatcctgacacttgtgtccccacgggatcctgcagaattcaggaccctgtccacacaggggaaaactctctgttggggtcctgatgactgaggagggagcttacccatggctctcctggtcatttttatttaatagtgagcacagaacctcacattttctggaatgttcccatatgattttgtgagagaaaagagaatagagaccccaaccccaagctcactgtgtcaaagggaaaattaagcttgggaactgagttacgcaatactgccttccttgttctcaaacacatagctataacttcacaaccct

SEQ ID NO: 378326 - DNA, 562 bp, Homo sapiens
gttgtataggatcattttgcttcatttctgggtactttcagaggaccaaggctctgtacaagttccttggttgcagataggctcctgtrgtggcttggtgtggtgatgtatttttgtttggtggtgtaattcaggcttcagtccagtagacagtgcttaagagtaacagctggctgcagggtcttctcctctgtgtacttgtcctcgacaggtgcagaagtgacaaagtgccaaaagcgccctgtcccagtgtgtactagtcttcagcaggggcagagctgctggagaaacctaagaagcagcctctttcagcccacgttccttgggtcccaacaggatgaccactgctggatctgcagcagtgcactaggaaggggacagagggcaagagataaccacctctctaaatctgttcccaggctttggtgtgcccctttcagcagctgatatcgtgatcgtgtttcctttgatccaaggggtggctttggcaagctgtattcctccttcccttagggctggtcctcaccaaagtttaggtctcctggggaatggggttcacctc

SEQ ID NO: 378327 - DNA, 562 bp, Homo sapiens
gttgtataggatcattttgcttcatttctgggtactttcagaggaccaaggctctgtacaagttccttggttgcagataggctcctgtggtggcttggtgtggtgatgtatttttgtttggtggtgtaattcaggcttcagtccagtagacagtgcttaagagtaacagctggctgcagggtcttctcctctgtgtacttgtcctcgacaggtgcagaagtgacaaagtgccaaaagcrccctgtcccagtgtgtactagtcttcagcaggggcagagctgctggagaaacctaagaagcagcctctttcagcccacgttccttgggtcccaacaggatgaccactgctggatctgcagcagtgcactaggaaggggacagagggcaagagataaccacctctctaaatctgttcccaggctttggtgtgcccctttcagcagctgatatcgtgatcgtgtttcctttgatccaaggggtggctttggcaagctgtattcctccttcccttagggctggtcctcaccaaagtttaggtctcctggggaatggggttcacctc

SEQ ID NO: 378328 - DNA, 562 bp, Homo sapiens
gttgtataggatcattttgcttcatttctgggtactttcagaggaccaaggctctgtacaagttccttggttgcagataggctcctgtggtggcttggtgtggtgatgtatttttgtttggtggtgtaattcaggcttcagtccagtagacagtgcttaagagtaacagctggctgcagggtcttctcctctgtgtacttgtcctcgacaggtgcagaagtgacaaagtgccaaaagcgccctgtcccagtgtgtactagtcttcagcaggggcagagctgctggagaaacctaagaagcagcctctttcagcccacgttccttgggycccaacaggatgaccactgctggatctgcagcagtgcactaggaaggggacagagggcaagagataaccacctctctaaatctgttcccaggctttggtgtgcccctttcagcagctgatatcgtgatcgtgtttcctttgatccaaggggtggctttggcaagctgtattcctccttcccttagggctggtcctcaccaaagtttaggtctcctggggaatggggttcacctc

SEQ ID NO: 378329 - DNA, 562 bp, Homo sapiens
gttgtataggatcattttgcttcatttctgggtactttcagaggaccaaggctctgtacaagttccttggttgcagataggctcctgtggtggcttggtgtggtgatgtatttttgtttggtggtgtaattcaggcttcagtccagtagacagtgcttaagagtaacagctggctgcagggtcttctcctctgtgtacttgtcctcgacaggtgcagaagtgacaaagtgccaaaagcgccctgtcccagtgtgtactagtcttcagcaggggcagagctgctggagaaacctaagaagcagcctctttcagcccacgttccttgggtcccaacaggatgaccactgctggatctgcagcagtgcactaggaaggggacagagggcaagagataaccacctctctaaatctgttcccaggctttggtgtgcccctttcagcagctgatatcgtgatcrtgtttcctttgatccaaggggtggctttggcaagctgtattcctccttcccttagggctggtcctcaccaaagtttaggtctcctggggaatggggttcacctc

SEQ ID NO: 378330 - DNA, 616 bp, Homo sapiens
tctggattgcacaaatccccagtgaaaaggtgagttgcagagggagactggctgctcttctctcatactggagtttcactcccttttatgaaccaaatgctatcacagagtctgctttcccacctccccatccacaggatctggagtgttcttctctattcctgtgaattcctatttttcttcttgaattgaagtcacaaagtttatctttatgcttatttttctacttccaagtggctgaggcacaytgaaagcccctaatccatcattctaggaaaaaaggatggtttaaataaaggaatgttcatataaaatatatattaattagtgcaaacatattttatttgacatgagttaggtgaatctttgatacattaattaattttaaaattgttaaataaaattagaaatatcttcgaatttgccaaggtatgtttctctcctgggattactggtcagttttattttttccttggatagacattttaagccataaatcttgacatagacctgatgtagacctccatacctttcccagatgtgggacagagcaactgggacaggtccatcctagcactaagggatgattaaacctaacttgtagtcgttgtacaac

SEQ ID NO: 378331 - DNA, 616 bp, Homo sapiens
tctggattgcacaaatccccagtgaaaaggtgagttgcagagggagactggctgctcttctctcatactggagtttcactcccttttatgaaccaaatgctatcacagagtctgctttcccacctccccatccacaggatctggagtgttcttctctattcctgtgaattcctatttttcttcttgaattgaagtcacaaagtttatctttatgcttatttttctacttccaagtggctgaggcacattgaaagcccctaatccatcaytctaggaaaaaaggatggtttaaataaaggaatgttcatataaaatatatattaattagtgcaaacatattttatttgacatgagttaggtgaatctttgatacattaattaattttaaaattgttaaataaaattagaaatatcttcgaatttgccaaggtatgtttctctcctgggattactggtcagttttattttttccttggatagacattttaagccataaatcttgacatagacctgatgtagacctccatacctttcccagatgtgggacagagcaactgggacaggtccatcctagcactaagggatgattaaacctaacttgtagtcgttgtacaac

SEQ ID NO: 378332 - DNA, 616 bp, Homo sapiens
tctggattgcacaaatccccagtgaaaaggtgagttgcagagggagactggctgctcttctctcatactggagtttcactcccttttatgaaccaaatgctatcacagagtctgctttcccacctccccatccacaggatctggagtgttcttctctattcctgtgaattcctatttttcttcttgaattgaagtcacaaagtttatctttatgcttatttttctacttccaagtggctgaggcacattgaaagcccctaatccatcattctaggaaaaaaggatggtttaaataaaggaatgttcatataaaatatatattaattagtgcaaacatattttatttgacatgagttaggtgaatctttgatacattaattaattttaaaattgttaaataaaattagaaatatcttmgaatttgccaaggtatgtttctctcctgggattactggtcagttttattttttccttggatagacattttaagccataaatcttgacatagacctgatgtagacctccatacctttcccagatgtgggacagagcaactgggacaggtccatcctagcactaagggatgattaaacctaacttgtagtcgttgtacaac

SEQ ID NO: 378333 - DNA, 616 bp, Homo sapiens
tctggattgcacaaatccccagtgaaaaggtgagttgcagagggagactggctgctcttctctcatactggagtttcactcccttttatgaaccaaatgctatcacagagtctgctttcccacctccccatccacaggatctggagtgttcttctctattcctgtgaattcctatttttcttcttgaattgaagtcacaaagtttatctttatgcttatttttctacttccaagtggctgaggcacattgaaagcccctaatccatcattctaggaaaaaaggatggtttaaataaaggaatgttcatataaaatatatattaattagtgcaaacatattttatttgacatgagttaggtgaatctttgatacattaattaattttaaaattgttaaataaaattagaaatatcttcgaatttgccaaggtatgtttctctcctgggattactggtcagttttattttttccttggatagacattttaagccataaatcttgacatagacctgatgtagacctccatacctttcccagatgtgggacrgagcaactgggacaggtccatcctagcactaagggatgattaaacctaacttgtagtcgttgtacaac

SEQ ID NO: 378334 - DNA, 522 bp, Homo sapiens
tcctgtgaattcctatttttcttcttgaattgaagtcacaaagtttatctttatgcttatttttctacttccaagtggctgaggcacattgaaagcccctaatccatcattctaggaaaaaaggatggtttaaataaaggaatgttcatataaaatatatattaattagtgcaaacatattttatttgacatgagttaggtgaatctttgatacattaattaattttaaaattgttaaataaaattagaaatatcttcgaatttgccaaggtatgtttctctcctgggattactggtcagttttattttttccttggatagacattttaagccataaatcttgacatagacctgatgtagacctccatacctttcccagatgtgggacagagcaactgggacaggtccatcctagcactaagggatgattaaacctaacttgtagtcrttgtacaactataaacatggttgatgctttaagagaaagatcttgatggaaagggttaaatgtgaaaattgatc

SEQ ID NO: 378335 - DNA, 342 bp, Homo sapiens
accagttttatcaaatggctactgaaacaacctcttgaacactaagactagctttacccaccactgtccctcacctatcagagcctgccagctctcaaaaacyttactggtgccagtgaactttctcaaagagaaatacataccgtttttctctctgtctcccttttttataaaacctctaactttctctttatgttttgtacatactaaagacacccattctgcatgtatgtgtgaagttgtaatacttgtatctcaaataaaacattttaatttcagatgtttgtctatatttatttgactttgacaatctgatattatttagcattatttccagtctcc

SEQ ID NO: 378336 - DNA, 342 bp, Homo sapiens
accagttttatcaaatggctactgaaacaacctcttgaacactaagactagctttacccaccactgtccctcacctatcagagcctgccagctctcaaaaactttactggtgccagtgaactttctcaaagagaaatacataccgtttttctctctgtctcccttttttataaaacctctaactttctctttatgttttgkacatactaaagacacccattctgcatgtatgtgtgaagttgtaatacttgtatctcaaataaaacattttaatttcagatgtttgtctatatttatttgactttgacaatctgatattatttagcattatttccagtctcc

SEQ ID NO: 378337 - DNA, 342 bp, Homo sapiens
accagttttatcaaatggctactgaaacaacctcttgaacactaagactagctttacccaccactgtccctcacctatcagagcctgccagctctcaaaaactttactggtgccagtgaactttctcaaagagaaatacataccgtttttctctctgtctcccttttttataaaacctctaactttctctttatgttttgtacatactaaagacacccattctgcatgtatgtgtgaarttgtaatacttgtatctcaaataaaacattttaatttcagatgtttgtctatatttatttgactttgacaatctgatattatttagcattatttccagtctcc

SEQ ID NO: 378338 - DNA, 561 bp, Homo sapiens
gccagctcacttggtgggaaatkctcaagagagcaagatgttcttgtgctgcatccccatatctcaagtctcctgcttcaggaatggcaggagtgagagcctttcttttccaacgatgcccttgtaggctcatccctcaccccagatgtctctggccatttgacagaaggcccccccaggtaccacaggacaggagtcaccaggtagacatcaggccccagatggagctaccaggccaggcctcaccagtgatcccaccagggccacatctgcacattgtccttgtccagctggagcctctggagctcattgagacacaggcacatggtgaggtcacctgcagtctggaagtctttccagggacaatgttttcaggctgaaattcctttaaattcagtgaggttgttttcatgtttggaaattccagtggaaagtgagtgatattggtgacctctctcctttttcagctcctgcttcaggtgcagaaacacagctatttccagtgccagctgttgagccagtgccagcaccaggggcagagccccttccagggacagcgct

SEQ ID NO: 378339 - DNA, 526 bp, Homo sapiens
ccctgctgctactgctgctgggggtgtttgcctgcctgcaggaggtgctggagagcaagaaaaggagcctgtgagcaggggttccagcaggtcctcckgctcccagaggtgacctcctcctccaggaatggaggtttgccctcagctgggcatctgggccatttgcctctaatgtgctgcccaggatggcctcttcttgacaggtggacaggggttgagggggccagggggcatctccaaaggaagcttttaaactcagcagcagcactccagaatctccatgcctgcacctgcccaaggatttattcatagcttaactaagaatttcaaatttctaccataacactgaaataaagtttgactttttgaaacttctatgacttctttcactccctaatattgtagatggtgtttttgaggtgacgttgaaaacctctgatagttgtgtgttttgttgtggttctttgggtgactaaattaccatctgatcaagtgatattgaaaacccttcaggtacggcttttag

SEQ ID NO: 378340 - DNA, 526 bp, Homo sapiens
ccctgctgctactgctgctgggggtgtttgcctgcctgcaggaggtgctggagagcaagaaaaggagcctgtgagcaggggttccagcaggtcctccggctcccagaggtgacctcctcctccaggaatggaggtttgccctcagctgggcatctgggccatttgcctctaatgtgctgcccaggatggcctcttcttgacaggtggacaggggttgagggggccagggggcatctccaaaggaagcttttaaactcagcagcagcactccagaatctccatgcctgcacctgcccaaggatttattcatagcttaactaagaatttcaaatttctaccataacactgaaataaagtttgactttttgaaacttcyatgacttctttcactccctaatattgtagatggtgtttttgaggtgacgttgaaaacctctgatagttgtgtgttttgttgtggttctttgggtgactaaattaccatctgatcaagtgatattgaaaacccttcaggtacggcttttag

SEQ ID NO: 378341 - DNA, 526 bp, Homo sapiens
ccctgctgctactgctgctgggggtgtttgcctgcctgcaggaggtgctggagagcaagaaaaggagcctgtgagcaggggttccagcaggtcctccggctcccagaggtgacctcctcctccaggaatggaggtttgccctcagctgggcatctgggccatttgcctctaatgtgctgcccaggatggcctcttcttgacaggtggacaggggttgagggggccagggggcatctccaaaggaagcttttaaactcagcagcagcactccagaatctccatgcctgcacctgcccaaggatttattcatagcttaactaagaatttcaaatttctaccataacactgaaataaagtttgactttttgaaacttctatgacttctttcactccctaatattgtagatggtgtttttgaggtgacgttgaaaacctctgatagttgtgtrttttgttgtggttctttgggtgactaaattaccatctgatcaagtgatattgaaaacccttcaggtacggcttttag

SEQ ID NO: 378342 - DNA, 526 bp, Homo sapiens
ccctgctgctactgctgctgggggtgtttgcctgcctgcaggaggtgctggagagcaagaaaaggagcctgtgagcaggggttccagcaggtcctccggctcccagaggtgacctcctcctccaggaatggaggtttgccctcagctgggcatctgggccatttgcctctaatgtgctgcccaggatggcctcttcttgacaggtggacaggggttgagggggccagggggcatctccaaaggaagcttttaaactcagcagcagcactccagaatctccatgcctgcacctgcccaaggatttattcatagcttaactaagaatttcaaatttctaccataacactgaaataaagtttgactttttgaaacttctatgacttctttcactccctaatattgtagatggtgtttttgaggtgacgttgaaaacctctgatagttgtgtgttttgttgtggttctttgggtgaytaaattaccatctgatcaagtgatattgaaaacccttcaggtacggcttttag

SEQ ID NO: 378343 - DNA, 572 bp, Homo sapiens
ttgtgcccttaaaacctaaaagttcacagggagaagacctcttactgacttgtagaatctcaatactacttatcttgaaatttcagtaagtgttaggtaaaagagttcatttgggataatcacactatgatagtctttagcttttgaattggaatccaaattttagtttagaacagcaaagtttgcgcctaaagatttcatgaagtaaaaatactaattgtgattatatatctaaatatttgcacatctaaagttgtcttttacccgtaaccagaataaatgatacctttttwaaaaaaaaaaaaaagaagagtaatctatctagaaaatgaaaaaattaggctaaaatggtgacttaagtaatttaaatggatatagatttataaaattaaactatttctcaattttgagaggaaaaaatcaaggaaatcaaatataccttctctttcttttgtcaacagatgtatgctgtcttaattgatgcttaatttatttttccattacataattttaatattgtaataattataacaacagacacaaaatgaaatttctgtacatttatgaaaaat

SEQ ID NO: 378344 - DNA, 597 bp, Homo sapiens
ggttgctagaaatatactgtaatatttattcttgatatatgtttgttactttaacgggaatacataggctataaatagtccccttgcctctcacaagttagacagtcctgcccagaatgccctgctgaagagttgtagcagatcaccctgttcctccttaacctctctgttcctcatatgctcacctgtaaaatagtgatcatagtaacacccatcttgtgatgatgtagagaggttyaaagaagcgaattaggggaggccaggcatggtggcttatgtctgtaattccagcactttgggagtccaatcacttgaagtcaggagttcgagaccagcctggccaacatggtgaaacccacttctactaaaacaaacaaacaaacaaacaaaaaacacaaaaattaactgggcattgtggcagttgcttctaatcccagctacttggttggctgaggcaggagaatccgttggacccaggaggcggaggttgcagtgagccgaggtcacaccactgcactccagcttgggtaacagagcaaggttttgtctcaaaaaaaaaaaaaaagaaagaaaccaattagggtggaaacacttaga

SEQ ID NO: 378345 - DNA, 597 bp, Homo sapiens
ggttgctagaaatatactgtaatatttattcttgatatatgtttgttactttaacgggaatacataggctataaatagtccccttgcctctcacaagttagacagtcctgcccagaatgccctgctgaagagttgtagcagatcaccctgttcctccttaacctctctgttcctcatatgctcacctgtaaaatagtgatcatagtaacacccatcttgtgatgatgtagagaggtttaaagaagcgaattaggggaggccaggcatggtggcttatgyctgtaattccagcactttgggagtccaatcacttgaagtcaggagttcgagaccagcctggccaacatggtgaaacccacttctactaaaacaaacaaacaaacaaacaaaaaacacaaaaattaactgggcattgtggcagttgcttctaatcccagctacttggttggctgaggcaggagaatccgttggacccaggaggcggaggttgcagtgagccgaggtcacaccactgcactccagcttgggtaacagagcaaggttttgtctcaaaaaaaaaaaaaaagaaagaaaccaattagggtggaaacacttaga

SEQ ID NO: 378346 - DNA, 597 bp, Homo sapiens
ggttgctagaaatatactgtaatatttattcttgatatatgtttgttactttaacgggaatacataggctataaatagtccccttgcctctcacaagttagacagtcctgcccagaatgccctgctgaagagttgtagcagatcaccctgttcctccttaacctctctgttcctcatatgctcacctgtaaaatagtgatcatagtaacacccatcttgtgatgatgtagagaggtttaaagaagcgaattaggggaggccaggcatggtggcttatgtctstaattccagcactttgggagtccaatcacttgaagtcaggagttcgagaccagcctggccaacatggtgaaacccacttctactaaaacaaacaaacaaacaaacaaaaaacacaaaaattaactgggcattgtggcagttgcttctaatcccagctacttggttggctgaggcaggagaatccgttggacccaggaggcggaggttgcagtgagccgaggtcacaccactgcactccagcttgggtaacagagcaaggttttgtctcaaaaaaaaaaaaaaagaaagaaaccaattagggtggaaacacttaga

SEQ ID NO: 378347 - DNA, 597 bp, Homo sapiens
ggttgctagaaatatactgtaatatttattcttgatatatgtttgttactttaacgggaatacataggctataaatagtccccttgcctctcacaagttagacagtcctgcccagaatgccctgctgaagagttgtagcagatcaccctgttcctccttaacctctctgttcctcatatgctcacctgtaaaatagtgatcatagtaacacccatcttgtgatgatgtagagaggtttaaagaagcgaattaggggaggccaggcatggtggcttatgtctgtaattccagcactttgggagtccaatcacttgaagtcaggarttcgagaccagcctggccaacatggtgaaacccacttctactaaaacaaacaaacaaacaaacaaaaaacacaaaaattaactgggcattgtggcagttgcttctaatcccagctacttggttggctgaggcaggagaatccgttggacccaggaggcggaggttgcagtgagccgaggtcacaccactgcactccagcttgggtaacagagcaaggttttgtctcaaaaaaaaaaaaaaagaaagaaaccaattagggtggaaacacttaga

SEQ ID NO: 378348 - DNA, 597 bp, Homo sapiens
gcaattaaaatttcatctaagctcattttgatgaatcttgaaggtgacatttatttcttatgctctgaacatcgtaagttctgttgatttttatgggaagttttcaaggtcattttcagagatctatgacaaaatgacattatttgagaaaaaaaagaagaaatagctcgaagtttaaagcattatggtattccctaagcccaaaattttctccctttacaaaaacaaatgaaaggcaaaatagacaaacaaagaaaccatcaaraataccttgaatcactgttggtgcgaatgaaaattagttcgaccattgtggaagacagtgtggagattcctcatggatctagaatcagaaatcccatgacccagtagtcacattacttggtatatacccaaaggaatataaatcattctattatgaagacacatgcacacatatgtttattgcagcagctatactatttattatagcaaagacatggaaccaacccaaatgcccatcagtgatagactagataaagaaaatgtggtacatatacaccatggaatactatgcagccatctaaagaaccagatcatatcctttgtaggaacatg

SEQ ID NO: 378349 - DNA, 597 bp, Homo sapiens
gcaattaaaatttcatctaagctcattttgatgaatcttgaaggtgacatttatttcttatgctctgaacatcgtaagttctgttgatttttatgggaagttttcaaggtcattttcagagatctatgacaaaatgacattatttgagaaaaaaaagaagaaatagctcgaagtttaaagcattatggtattccctaagcccaaaattttctccctttacaaaaacaaatgaaaggcaaaatagacaaacaaagaaaccatcaagaataccttgaatcactgttggtgsgaatgaaaattagttcgaccattgtggaagacagtgtggagattcctcatggatctagaatcagaaatcccatgacccagtagtcacattacttggtatatacccaaaggaatataaatcattctattatgaagacacatgcacacatatgtttattgcagcagctatactatttattatagcaaagacatggaaccaacccaaatgcccatcagtgatagactagataaagaaaatgtggtacatatacaccatggaatactatgcagccatctaaagaaccagatcatatcctttgtaggaacatg

SEQ ID NO: 378350 - DNA, 455 bp, Homo sapiens
tataataatattataataaaatatactagtcctctagtgtgtttkaatactatctattgttttcttcaatgagtagtaatactgttctctagtaaactctctttcctttcttctctctttttgcttaacatttatttactttaattccatattttttaatggcagttagatactcccgagatagtcattaagattcgtctactttctttttcttctccttttttctgtttgttgttgagttgcattatttcttcatgtttaacacacttaatagcatcatgttttgtcactttaatccccattacttgctcttaattataaaattaaacatatttagtccttatccagaagcttcacatgatgtttgtcttcttgtcagtaggtaggacatttctaaaaaagccatcacaggaacaatgttttttaaaatcataaatattcatgaagttctacat

SEQ ID NO: 378351 - DNA, 455 bp, Homo sapiens
tataataatattataataaaatatactagtcctctagtgtgtttgaatactwtctattgttttcttcaatgagtagtaatactgttctctagtaaactctctttcctttcttctctctttttgcttaacatttatttactttaattccatattttttaatggcagttagatactcccgagatagtcattaagattcgtctactttctttttcttctccttttttctgtttgttgttgagttgcattatttcttcatgtttaacacacttaatagcatcatgttttgtcactttaatccccattacttgctcttaattataaaattaaacatatttagtccttatccagaagcttcacatgatgtttgtcttcttgtcagtaggtaggacatttctaaaaaagccatcacaggaacaatgttttttaaaatcataaatattcatgaagttctacat

SEQ ID NO: 378352 - DNA, 577 bp, Homo sapiens
tattatcttccaatgacatttctgtctatctttatgccaatatcacactattttcattactgtagccttataagctttggtattagattgtgctaatccttcaaaaatattcttatttttaaggattattttggctattttagactctttgcatttctactgaagttttaaaattagtgtgtaaattcctataaaacaatgcctaataatattttaattgggaytgtattgaatctatatttagggataatcacattttaccatgtgaattttctaacccatattcatattacatctttccatttatttaagtcttctttaactttctgcagtgttttgagttttagtgtaccagactcttacatcatttgatagattaattcctaattcttctacatttttcatgatattattaatagtacttttattttaattttttattgttcattgctggtatatggaaatattagtttaatatgttgctttttttcttttttatgttgctaactcacttattatagccagcagtgtttttgtagatttcagtggactttctacatagacatgccgtctataa

SEQ ID NO: 378353 - DNA, 455 bp, Homo sapiens
tataataatattataataaaatatactagtcctctagtgtgtttgaatactatctattgttttcttcaatgagtagtaatactgttctctagtaaactctctttcctttcttctctctttttgcttaacatttatttactttaattccatattttttaatggcagttagatactcccgagatagtcattaagattcgtctactttctttttcttctccttttttmtgtttgttgttgagttgcattatttcttcatgtttaacacacttaatagcatcatgttttgtcactttaatccccattacttgctcttaattataaaattaaacatatttagtccttatccagaagcttcacatgatgtttgtcttcttgtcagtaggtaggacatttctaaaaaagccatcacaggaacaatgttttttaaaatcataaatattcatgaagttctacat

SEQ ID NO: 378354 - DNA, 455 bp, Homo sapiens
tataataatattataataaaatatactagtcctctagtgtgtttgaatactatctattgttttcttcaatgagtagtaatactgttctctagtaaactctctttcctttcttctctctttttgcttaacatttatttactttaattccatattttttaatggcagttagatactcccgagatagtcattaagattcgtctactttctttttcttctccttttttctgtttgttgttgagttgcattatttcttcatgtttaacacacttaatagcatcatgttttgtcactttaatccccattacttgytcttaattataaaattaaacatatttagtccttatccagaagcttcacatgatgtttgtcttcttgtcagtaggtaggacatttctaaaaaagccatcacaggaacaatgttttttaaaatcataaatattcatgaagttctacat

SEQ ID NO: 378355 - DNA, 561 bp, Homo sapiens
tcatctatgcctggtgtctccytggggccaggtagtcaacacagggcctgaagaccttctagagttcagtgttcacctggggtccgaagtccacctagggcttgggtgtccaaatagggcctggtgtcagcttgagatttgtgtatttacctagggcctggttgtccacttggggcttgattttttacttggtttttgtgttaatctggggtctagtgtccacctggggcctgggtatccacctagggactattgttcagctggagactaatgactacctatggcctggtaatcacctaaggctttgtttcacttaggtacttggtgccaaactgttgcctgctgttcacctggggtatggtgtccacctggggtctggatgtcagcctggggcttgttgtatacatgtatcttagatatccagataagggtctgttttctgcttaggtgcagcagtccatctggtgcttgagtgtcaacctaaggcctgatgtctatgttggacctagggttcacctgaggcctgatatccacctggggcctcaatgtccaaacggggcc

SEQ ID NO: 378356 - DNA, 561 bp, Homo sapiens
tcatctatgcctggtgtctccttggggccaggtagtcaacacagggcctgaagaccttctagagttcagtgttcacctggggtccgaagtccacctagggcttgggtgtccaaatagggcctggtgtcagcttgagatttgtgtatttacctagggcctggttgtccacttggggcttgattttttacttggtttttgtgttaatctggggtctagtgtccacctggggcctgggtatccacctagggactattgttcagctggagactaatgactacctatggcctggtaatcacctaaggctttgtttcacttaggtacttggtgmcaaactgttgcctgctgttcacctggggtatggtgtccacctggggtctggatgtcagcctggggcttgttgtatacatgtatcttagatatccagataagggtctgttttctgcttaggtgcagcagtccatctggtgcttgagtgtcaacctaaggcctgatgtctatgttggacctagggttcacctgaggcctgatatccacctggggcctcaatgtccaaacggggcc

SEQ ID NO: 378357 - DNA, 561 bp, Homo sapiens
tcatctatgcctggtgtctccttggggccaggtagtcaacacagggcctgaagaccttctagagttcagtgttcacctggggtccgaagtccacctagggcttgggtgtccaaatagggcctggtgtcagcttgagatttgtgtatttacctagggcctggttgtccacttggggcttgattttttacttggtttttgtgttaatctggggtctagtgtccacctggggcctgggtatccacctagggactattgttcagctggagactaatgactacctatggcctggtaatcacctaaggctttgtttcacttaggtacttggtgccaaactgttgcctgctgttcacctggggtatggtgtccacctggggtctggatgtcagcctggggcttgttgtatacatgtatctyagatatccagataagggtctgttttctgcttaggtgcagcagtccatctggtgcttgagtgtcaacctaaggcctgatgtctatgttggacctagggttcacctgaggcctgatatccacctggggcctcaatgtccaaacggggcc

SEQ ID NO: 378358 - DNA, 341 bp, Homo sapiens
gggtctgttttctgcttaggtgcagcagtccatctggtgcttgagtgtcaacctaaggcctgatgtctatgttggacctagggttcacctgaggcctgatatccacctggggcctcaatgtccaaayggggcctgatgcccatctgggccctgggtgtccacctgcagcatggatgtccactggtactttatatccaccaggggcctaatgtccacctaagacctggtgttcacctggggtctgatgttcagctgaagaccggatgtccacctggagccgaggaatccactcagggactggtgttgaactggggcctgatgaccacccggggacaaggtac

SEQ ID NO: 378359 - DNA, 341 bp, Homo sapiens
gggtctgttttctgcttaggtgcagcagtccatctggtgcttgagtgtcaacctaaggcctgatgtctatgttggacctagggttcacctgaggcctgatatccacctggggcctcaatgtccaaacggggcctgatgcccatctgggccctgggtgtccacctgcagcatggatgtccactggtactttatrtccaccaggggcctaatgtccacctaagacctggtgttcacctggggtctgatgttcagctgaagaccggatgtccacctggagccgaggaatccactcagggactggtgttgaactggggcctgatgaccacccggggacaaggtac

SEQ ID NO: 378360 - DNA, 252 bp, Homo sapiens
gggcctgatgcccatctgggccctgggtgtccacctgcagcatggatgtccactggtactttatatccaccaggggcctaatgtccacctaaracctggtgttcacctggggtctgatgttcagctgaagaccggatgtccacctggagccgaggaatccactcagggactggtgttgaactggggcctgatgaccacccggggacaaggtacacaccaggcttgttgtccacctgtcaccagatgtccacc

SEQ ID NO: 378361 - DNA, 341 bp, Homo sapiens
gggtctgttttctgcttaggtgcagcagtccatctggtgcttgagtgtcaacctaaggcctgatgtctatgttggacctagggttcacctgaggcctgatatccacctggggcctcaatgtccaaacggggcctgatgcccatctgggccctgggtgtccacctgcagcatggatgtccactggtactttatatccaccaggggcctaatgtccacctaagacctggtgttcacctggggtctgatgttcagctgaagaccggatgtccacctggagccgaggaatccactcagggactggtgttgaactgrggcctgatgaccacccggggacaaggtac

SEQ ID NO: 378362 - DNA, 485 bp, Homo sapiens
tcacctggagacagatgttcaactgtggycagaagtgctcctggggtctgggcttccacctggagcctgatgtttagctggggctagagttcacatggagaatgatgtccacctgaagtttgatgtttacctggggcctgatacctacctggtgcccaagtattctcatgtgcctaacatccactagttggcctggtgttcatctgagggcttggtgtcaaccagtggctttatgtacacctggattctagtgtcctcctggggccttatgcctaccaggagtctggtgtacccctggggtctagtatccacctggagtctgggcgtccacctggagcctaatgttgaggttagactgagtgtcagcctgaggcctgatgtctactagggcataggtattcacctggggcttgttgtttacctggggactaatgtcaaccttgagcctaggtatccacctggggaatagtgtccagttgcagcca

SEQ ID NO: 378363 - DNA, 485 bp, Homo sapiens
tcacctggagacagatgttcaactgtggccagaagtgctcctggggtctgggcttccacctggagcctgatgtttagctggggctagagttcacatggagaatgatgtccacctgaagtttgatgtttacctggggcctgatacctacctggtgcccaagtattctcatgtgcctaacatccactagttggcctgrtgttcatctgagggcttggtgtcaaccagtggctttatgtacacctggattctagtgtcctcctggggccttatgcctaccaggagtctggtgtacccctggggtctagtatccacctggagtctgggcgtccacctggagcctaatgttgaggttagactgagtgtcagcctgaggcctgatgtctactagggcataggtattcacctggggcttgttgtttacctggggactaatgtcaaccttgagcctaggtatccacctggggaatagtgtccagttgcagcca

SEQ ID NO: 378364 - DNA, 485 bp, Homo sapiens
tcacctggagacagatgttcaactgtggccagaagtgctcctggggtctgggcttccacctggagcctgatgtttagctggggctagagttcacatggagaatgatgtccacctgaagtttgatgtttacctggggcctgatacctacctggtgcccaagtattctcatgtgcctaacatccactagttggcctggtgttcatctgagggcttggtgtcaaccagtggctttatgtacacctggattctagtgtcctcctggggccttatgcctaccaggagtctggtgtacccctggggtctagtatccacctgsagtctgggcgtccacctggagcctaatgttgaggttagactgagtgtcagcctgaggcctgatgtctactagggcataggtattcacctggggcttgttgtttacctggggactaatgtcaaccttgagcctaggtatccacctggggaatagtgtccagttgcagcca

SEQ ID NO: 378365 - DNA, 366 bp, Homo sapiens
gggtcctggtgtcctcctggcaactgatgtccacctgggactkcatgcttacctagggcctggtgttcccctggggcctggtgtgcccctgagatctggggtccacctgggcctagtatccacttggggcctcatatccatctggaatatcatgtccacttggggccttgtagttacctagggactgggtgtccttctggcacttgagtgtcctcctggggcctggggttctcctggggcctgggtgtacatctctggcctgatgtccaccttgggtggatgtccacctggggacagatgttcacttgtggcttgagtgtccatctcgtgtctaatgtctacctggggcctggtgtttgcctgagg

SEQ ID NO: 378366 - DNA, 366 bp, Homo sapiens
gggtcctggtgtcctcctggcaactgatgtccacctgggactgcatgcttacctagggcctggtgttcccctggggcctggtgtgcccctgagatctggggtccacctgggcctagtatccacttggggcctcatatccatctggaayatcatgtccacttggggccttgtagttacctagggactgggtgtccttctggcacttgagtgtcctcctggggcctggggttctcctggggcctgggtgtacatctctggcctgatgtccaccttgggtggatgtccacctggggacagatgttcacttgtggcttgagtgtccatctcgtgtctaatgtctacctggggcctggtgtttgcctgagg

SEQ ID NO: 378367 - DNA, 366 bp, Homo sapiens
gggtcctggtgtcctcctggcaactgatgtccacctgggactgcatgcttacctagggcctggtgttcccctggggcctggtgtgcccctgagatctggggtccacctgggcctagtatccacttggggcctcatatccatctggaatatcatgtccacttggggccttgtagttacctagggactgggtgtccttctggcacttgrgtgtcctcctggggcctggggttctcctggggcctgggtgtacatctctggcctgatgtccaccttgggtggatgtccacctggggacagatgttcacttgtggcttgagtgtccatctcgtgtctaatgtctacctggggcctggtgtttgcctgagg

SEQ ID NO: 378368 - DNA, 534 bp, Homo sapiens
tggtagagcatataggttattttgcctttgttactttgtagaccttaaatcatggagtgagttagaacacagtatatttgtgacaaccatgacagttcagagaaatgcagtgaggtcatttactctgaaactgaaagacactaatctctgctctgagacccacaaagtcagattatctgttttacctktgtgatttctattcctctcattttgttgttctttttataaaacatctttgctaaataataaagttattactctaaggtagtgtccaggtctctttgataataatgaaatgtccatggccaaatcccattgctttgttttgacagtgtgctccaagaaaattactttgatatgccctctcatattagaataaacacattctacatacctattgcctacatcaagttttgaattataccattttcaggtttaacctggtcatacagcagattttcttaatggttggtgaacacggaataatagtttaatcattcagataaactattttgcagaaacatttaaaatcag

SEQ ID NO: 378369 - DNA, 588 bp, Homo sapiens
gccttaggcatatctcctaatgctatccctccccgctctccccaccccacaacagcccccagagtgtgatgttccccttcctgtgttcatgtgttctcattgttcaattcccacctataagtgagaacatgcggtgtttggttttttgtccttgcgatagttgactgagaatgatgaattaaaataaaaatgcatgcactttcaaatgtacttagtgcaacatattgaacttacattccagttttcctggaattacttgtgtcttgagctaaaggctgtatttggtataacagggaaggaaagaaattatttttcctataaaattagtttaaaaacacatataattaaacaaaataaaaatattatcccaccttttaaagaacatttactaagtcacagatattacccgaagtttagaaaatcacctaagaacaattgtttaaaaattatttasggaaaatgaagcaaaattgtttttacaatctgagattttaacagccagtgcactcctgttcttcagctgaatgtccccttcattctgaatgtctgcagtagaattgaattggggagcagttaggttccaggaac

SEQ ID NO: 378370 - DNA, 607 bp, Homo sapiens
aattgtttttacaatctgagattttaacagccagtgcactcctgttcttcagctgaatgtccccttcattctgaatgtctgcagtagaattgaattggggagcagttaggttccaggaacatattcactcctgttttgttctctccccaatctcagcctttcggtgactgtttgggcaaagcctcccttgtggtagaagatgcctcacttctggggagaggagactcctcatcttgcagacaagaagcagcacccactggttcctgctccaaaagccattaacattataaactggccaggtgyggtggctcaaacctgtaatcccagcaccacttgggaggttgaggcagaaggattgcttgagcccaggagtttgagaacagccttggcaacaaagtgagacccaatctctacaaaaactagagaaaaaatagcggggtgtggtggcactcacctatactaaggaggctgggctgggaggatctcttgagcccaggtggttgaggcttcagtgagccaagatcatgcctctgcacttgagcttgggtgacagagtaagatcctatctcaaaaaataaattataaactgattcacaataactttggt

SEQ ID NO: 378371 - DNA, 624 bp, Homo sapiens
agcccaggtggttgaggcttcagtgagccaagatcatgcctctgcacttgagcttgggtgacagagtaagatcctatctcaaaaaataaattataaactgattcacaataactttggttttgtcactaatatgctgaatattttcgttacaactaatatacaaaatgcaaactggctatcaytaccattctgataatggaattagctgtcctacatacctgatgacctaatgcttaacctaatcttcctctttcccactttgatttggaaacttgttacaatagagttctttacctcaaagtcttaaggaattcaagacaagactagagtatgttaagataccacaaaaagaaaaaaatatatatatagcaagagctttcttgagtaagcaaattttatacatataaaaataatttacatgcaaatgaccaagaggaaaggttaagtgactctggtgtaaataattagtttactgattctgccagagcatattaagaaaaattcactttggcaaaataatatggatttaaagaagtaacaagtgggtttctctaaagcacagtttggctttttactagaatatcaagtcacctttttgggtgaggagagtacaatgggagtggg

SEQ ID NO: 378372 - DNA, 610 bp, Homo sapiens
tgctgaatattttcgttacaactaatatacaaaatgcaaactggctatcactaccattctgataatggaattagctgtcctacatacctgatgacctaatgcttaacctaatcttcctctttcccactttgatttggaaacttgttacaatagagttctttacctcaaagtcttaaggaattcaagacaagactagagtatgttaagataccacaaaaagaaaaaaatatatatatagcaagagctttcttgagtaagcaaattttatacatataaaaataatttacatgcaaatgaccaagaggaaaggttaagtgactctggtgtaaataattagtttactgattctgccagagcatattaagaaaaattcactttggcaaaataatatggatttaaagaagtaacaagtgggtttctctaaagcacagtttggctttttactagaatatcaagtcacctttttgggtgaggagagtacaatgggartgggcagctggtgcaaataaacatttaaaattacttaaaacttcaacaaatgggatctgtatttaaatctgttttggtctgtcttccctttgttttttctaatccattccaacaatgcaaa

SEQ ID NO: 378373 - DNA, 588 bp, Homo sapiens
atatggatttaaagaagtaacaagtgggtttctctaaagcacagtttggctttttactagaatatcaagtcacctttttgggtgaggagagtacaatgggagtgggcagctggtgcaaataaacatttaaaattacttaaaacttcaacaaatgggatctgtatttaaatctgttttggtctgtcttccctttgttttttctaatccattccaacaatgcaaacctcagccactgtcaagggcaatctcagactggaggttgctgccyagggtgaggttctagcaagactgacaagcagagctcagggaaaagtctgcatgggaaaacagagccagacttagaaggcattgctgatgaattccattttcttactacagaagagctagcaaaaactgcaatatgatgtgtaaagtcagtgtaatcttatggacattataccaagtcacaacatgaggcatgagatacctcagatgttgttccctctaaatctcatgttgaattgtgatatccccaatgttggtggtaggtctggagggaggtgattggatcatgggggtggatttctcagaaatggtctagcatcctgt

SEQ ID NO: 378374 - DNA, 540 bp, Homo sapiens
ggctttttactagaatatcaagtcacctttttgggtgaggagagtacaatgggagtgggcagctggtgcaaataaacatttaaaattacttaaaacttcaacaaatgggatctgtatttaaatctgttttggtctgtcttccctttgttttttctaatccattccaacaatgcaaacctcagccactgtcaagggcaatctcagactggaggttgctgcctagggtgaggttctagcaagactgacaagcagagctcagggaawagtctgcatgggaaaacagagccagacttagaaggcattgctgatgaattccattttcttactacagaagagctagcaaaaactgcaatatgatgtgtaaagtcagtgtaatcttatggacattataccaagtcacaacatgaggcatgagatacctcagatgttgttccctctaaatctcatgttgaattgtgatatccccaatgttggtggtaggtctggagggaggtgattggatcatgggggtggatttctcagaaatggtctagcatcctg

SEQ ID NO: 378375 - DNA, 588 bp, Homo sapiens
atatggatttaaagaagtaacaagtgggtttctctaaagcacagtttggctttttactagaatatcaagtcacctttttgggtgaggagagtacaatgggagtgggcagctggtgcaaataaacatttaaaattacttaaaacttcaacaaatgggatctgtatttaaatctgttttggtctgtcttccctttgttttttctaatccattccaacaatgcaaacctcagccactgtcaagggcaatctcagactggaggttgctgcctagggtgaggttctagcaagactgacaagcagagctcagggaaaagtctgcatgggaaaacagrgccagacttagaaggcattgctgatgaattccattttcttactacagaagagctagcaaaaactgcaatatgatgtgtaaagtcagtgtaatcttatggacattataccaagtcacaacatgaggcatgagatacctcagatgttgttccctctaaatctcatgttgaattgtgatatccccaatgttggtggtaggtctggagggaggtgattggatcatgggggtggatttctcagaaatggtctagcatcctgt

SEQ ID NO: 378376 - DNA, 573 bp, Homo sapiens
taggtctggagggaggtgattggatcatgggggtggatttctcagaaatggtctagcatcctgtccctggtgctgtctttgtgatagtgagtgaattcttgcaagatctatttgtttaaaagtgtgtggtgcttcccctgccttgccaggtgatgtgcctgcctgctccttcttcatcttctgccgtgaataaagcctgctgaggcctcaccaggagctaggcagatgccagaatcatgtttgtacagcctgcagctatacaaacctcttttcaaacctcttttctttataaattacccagtctcaggtatttctttatagcaatgtaagaatggcctaatacagaaaattggtactgagacatggggcattgctataaagrtacttgaaaatgtggaagtgattttggaactaggtaatgggcaggagttggaagagtttggagggctcctaatacaggaagatgaaggaaagttctgaatttcttagaggctagttaaatggttgtgaccaaaatgctgatagtgatatggacggctgatgcggtctcagatgaaaatgaggaacttactg

SEQ ID NO: 378377 - DNA, 567 bp, Homo sapiens
atgccagaatcatgtttgtacagcctgcagctatacaaacctcttttcaaacctcttttctttataaattacccagtctcaggtatttctttatagcaatgtaagaatggcctaatacagaaaattggtactgagacatggggcattgctataaaggtacttgaaaatgtggaagtgattttggaactaggtaatgggcaggagytggaagagtttggagggctcctaatacaggaagatgaaggaaagttctgaatttcttagaggctagttaaatggttgtgaccaaaatgctgatagtgatatggacggctgatgcggtctcagatgaaaatgaggaacttactgggacttggaataaaggtcatgcctgttatgcctttgcaaagaacttggctgcagtctgttcatgtactagggatctgaggaagtttgaacactcagatgcaggagcaaaaaaatgacttaaagttggaatttacaattcaatgggaagcagaccatacaagtatagaaaatttgcagcctgcccatttggcaaaggaagataaagcattttcaggggaa

SEQ ID NO: 378378 - DNA, 573 bp, Homo sapiens
taggtctggagggaggtgattggatcatgggggtggatttctcagaaatggtctagcatcctgtccctggtgctgtctttgtgatagtgagtgaattcttgcaagatctatttgtttaaaagtgtgtggtgcttcccctgccttgccaggtgatgtgcctgcctgctccttcttcatcttctgccgtgaataaagcctgctgaggcctcaccaggagctaggcagatgccagaatcatgtttgtacagcctgcagctatacaaacctcttttcaaacctcttttctttataaattacccagtctcaggtatttctttatagcaatgtaagaatggcctaatacagaaaattggtactgagacatggggcattgctataaaggtacttgaaaatgtggaagtgattttggaactaggtaatgggcaggagttggaagagtttggagggctcctaatacaggaagatgaaggaaagttctgaatttcttagagrctagttaaatggttgtgaccaaaatgctgatagtgatatggacggctgatgcggtctcagatgaaaatgaggaacttactg

SEQ ID NO: 378379 - DNA, 567 bp, Homo sapiens
atgccagaatcatgtttgtacagcctgcagctatacaaacctcttttcaaacctcttttctttataaattacccagtctcaggtatttctttatagcaatgtaagaatggcctaatacagaaaattggtactgagacatggggcattgctataaaggtacttgaaaatgtggaagtgattttggaactaggtaatgggcaggagttggaagagtttggagggctcctaatacaggaagatgaaggaaagttctgaatttcttagaggctagttaaatggttgtgaccaaaatgctgatagtgatatggacggctgatgcggtctcagatgaaaatgaggaacttactgggacttggaataaaggtcatgcctgttatgcctttgcaaagaacttggctgcagtctgttcatgtactagggatctgaggaagtttgaacactcagatgcaggagcaaaaaaatgacttaaagttggaatttacaattmaatgggaagcagaccatacaagtatagaaaatttgcagcctgcccatttggcaaaggaagataaagcattttcaggggaa

SEQ ID NO: 378380 - DNA, 299 bp, Homo sapiens
agttaatttttaaagggctccagctctttctctttctcagggggaactgggttttctcacatacaactgagtttctgcttacacattctttaatttcttttaattcctgttccacttggaccagggccagggcatcactgtcctgtaccacccccaggagggtgttccttgcatcctggcccttctagctccagccttggttcaaagggctgcagatagagctcaggtcatggcttcagagggtgcaaactataagccttggtggmttccatgtggtgttaagcctgcaggtgagcaaa

SEQ ID NO: 378381 - DNA, 299 bp, Homo sapiens
agttaatttttaaagggctccagctctttctctttctcagggggaactgggttttctcacatacaactgagtttctgcttacacattctttaatttcttttaattcctgttccacttggaccagggccagggcatcactgtcctgtaccacccccaggagggtgttccttgcatcctggcccttctagctccagccttggttcaaagggctgcagatagagctcaggtcatggcttcagagggtgcaaactataagccttggtggcttccatgtggygttaagcctgcaggtgagcaaa

SEQ ID NO: 378382 - DNA, 568 bp, Homo sapiens
aaaaatattaagtagaacctacaccctacacattcattctagctttctgtgagttctgttgaggatgaaagaatattccctttaaaacttgtgaaaatttgaggaataggcaatatatttttagttgtctttattttctattgttaacttaagcattttttcgtgattaggtatctaactctgaaatacataccaaatgtattttagctgtttacactaacaaagctgtatggtttgattgtggtcttaaacatttcagctctctttaagagtccagggtttgatgtttcctttttgccctgtttgatgtattgaacattgaaacactgtagattctaaattattcaaaatatgttccctttccttgtgagcatttacatctagtagtttgttgtcattgtaaccagtattttgctatatgtagtgctattgtgattacagtaagttagtgttgctcatgttgtgtaatatggttgctaagaacataccagrttgaactagagcctgtctttgtttattccttcaccaataaaagaaacattatgtaaggactcggctaatatcactg

SEQ ID NO: 378383 - DNA, 576 bp, Homo sapiens
cttcaatctgaacaaccaaattaagccaacaatggatgatcaagaggttaaaggctgatgctctgatacaaagtcatgatcacttgcccagtttctggacttgaaccagtttttggacctagaatatatttaattggagggagagggcatgtccctagaagaaagaactctgcagcaccagcacaagtgtacacagtaataattccccaagtccttccctcaagtgatctatagccatttacttaggtggccatacactggagaaaagggaatatctaacgatttcaaggacatcatggacacagtgtgtaaaatgacattgataccaagagactcagagtttcattattggccctttcttagcatggagatatatggaaatcgagactggatgtctggcccaggtccagctcatggtaagtctacagcgttctcaaactacttgctatgcccccagtatacaaacatacacatagaataaacatcattagtagtttgtgcracccccatattaaattctggatctgtaaggggtaagagctatcatactggggaattccaagtggaagtttagga

SEQ ID NO: 378384 - DNA, 560 bp, Homo sapiens
atgaacccacagtaaaagtgcaggttaccagagccttgaacccagctactttacttccctctaccgaagagccaaaagaacttatgcataatgtttaccaattattgactaaggtgttttccagtcaccctaatttaaaggacacagccctgccatatgcatactggacattgttcatggatgggagcagcctggtaacygacagaaaaagaaatgctatatatgtaatggtaacgttttcagaggtcacagaagccaggactttaccactaggaacctctgcacagaaggcagaactgattgcccttacaagagcctgcagttgttccaggtaaacaaggcacttggaataaattgcagactatactcagcatggagaccacagtcttctggacagactgaaaggaaaatccagcactaaaaacagttattgccaaactgtgccaggaaactcaaccaaaatgaattcaggtacttggcattgcattgctctgggtaagaatgacctccccagatgtgggattaggttaagtcctgtgaaatgatacatgagagaccct

SEQ ID NO: 378385 - DNA, 560 bp, Homo sapiens
atgaacccacagtaaaagtgcaggttaccagagccttgaacccagctactttacttccctctaccgaagagccaaaagaacttatgcataatgtttaccaattattgactaaggtgttttccagtcaccctaatttaaaggacacagccctgccatatgcatactggacattgttcatggatgggagcagcctggtaaccgacagaaaaagaaatgctatatatgtaatggtaacgttttcagaggtcacagaagccaggactttaccactaggaacctctgcacagaaggcagaactgattgcccttacaagagcctgcagttgttccaggtaaacaaggcacttggaataaattgcaractatactcagcatggagaccacagtcttctggacagactgaaaggaaaatccagcactaaaaacagttattgccaaactgtgccaggaaactcaaccaaaatgaattcaggtacttggcattgcattgctctgggtaagaatgacctccccagatgtgggattaggttaagtcctgtgaaatgatacatgagagaccct

SEQ ID NO: 378386 - DNA, 544 bp, Homo sapiens
ttcactggcattttgttagggattgcattgaatctgtatattactttggataatataaacattttaacaccattayattttttagtctataaatatgagatgtcttttaattttttgtgccttcttcaatttctgtcatcagtgttttataattttcatttcagatatctttcacttctttgcttaaatttattcctggggattttttgtagctattgtaaatgaaattgctttcttgaattcttttacagattgacatatagaattgatactgatttttgtgtgttgattttgtatcctgcaatgttcttgaatttattgatcagttctaaaagtttctggggggagattttctaaatataagaccatgtcatttgcaaacaagcacaatttgacttctttcttttcaatttgtatgtcttttatttcagtctcttgcctaattgctttctctgggttttctagtactctaaaatgaaagtaaaaagaggtgaaaatgggcatccttgtcttgtttcagaccttagggaaaaggctttcaatt

SEQ ID NO: 378387 - DNA, 607 bp, Homo sapiens
atctgtaggactccttatgactttataaaaagagcagataaaataagtgacaaaatgtactttctggaataataattaaatttaattttctataaatatataaatacaattactatatctcagctctcaaagaactggtacattcctaagacatattatgggtaacatcattttctctgtctacatttgttcctaattctctcattttcttggtcatattctgttaaaacttttaattacaatagctttggttcatataggtcagaaaaatttatttttcatgttacagtttcaatacaaattgcattacattgcaacttygcactaaaaatgccaggcaggtttttattattatctagagatactattcctgataattcttggtgctgccacctctttgtctttctctgtatatttctgagtatattagagtgtagaaataggtttactatttggaagagcggtttccaaactgtaccagaccctaaaaggagacttgttgctccttgaataatactctcaaatctcctttctactgatcaagcctatggacaatgacttgaatgaaatcttagaggaaaccggataatacatgtaataaattcag

SEQ ID NO: 378388 - DNA, 624 bp, Homo sapiens
tgggaaaaatgccaaaatagacttttgaaaagggaaaaagatgaccatgaaaattatgtatcattcagtttaggtgtaaacatccatctgtccctattatgttataacagtttattattcaaatgcatactgtgaaagaagaacatcaaactgataagtagttagtttaatttttaacaaacaccaaagattaaaagataaacattttagtcttggataagtcatctgtatttgattaaactaaaaaattaaagtgaagaaacttacaagaataagctttgttaaacgttctcatttgtaataaggaatcmccagtgtgccaaacaaatgtttattttacatttaattacttgctaccagtaataaataacaattaaaatttccaaatattttgaacattataaaatttttacatgcatataatattgaaagacatcaatatttatattattcaaaaggaatgataacttctttatgtcaagagaagccatttctgaattaatttagtgaatttaataatttagtttctcaaaattaaattaatggctttgattcatctgtctgttctagattgcattaatcattttattttttacttttaaaatttacattgaaatttaacac

SEQ ID NO: 378389 - DNA, 629 bp, Homo sapiens
ttctttatgtcaagagaagccatttctgaattaatttagtgaatttaataatttagtttctcaaaattaaattaatggctttgattcatctgtctgttctagattgcattaatcattttattttttacttttaaaatttacattgaaatttaacamaattttctgcaagatctatgagtttttgttgctgttaagcttatgattatatgcccttaattaaaaagacactgacctttctaatcccttgtaattaaaaatgtctcaagatttcagtaactctgtgttcaaaatattaagcatctttgctttttgtttttgtatataatctaatcattcttgatttttttgtcaattcttttgtaatagttctcaaaatgtttacttttttaaaattgtcataatcactagttcaaggccatgtcaccagacacttgtgcaattgctaaaattcttcataggctctactttcctgaagtgccctcttcttccaatacaaattacatagtcctaagagattaaatccttaaaaattcctaacaactctctgttatctagaagttcaagtccatagcttttagtttcatattaaaactattcctcaaactagtcttagtttcagctactaaatt

SEQ ID NO: 378390 - DNA, 629 bp, Homo sapiens
ttctttatgtcaagagaagccatttctgaattaatttagtgaatttaataatttagtttctcaaaattaaattaatggctttgattcatctgtctgttctagattgcattaatcattttattttttacttttaaaatttacattgaaatttaacacaattttctgcaagatctatgagtttttgttrctgttaagcttatgattatatgcccttaattaaaaagacactgacctttctaatcccttgtaattaaaaatgtctcaagatttcagtaactctgtgttcaaaatattaagcatctttgctttttgtttttgtatataatctaatcattcttgatttttttgtcaattcttttgtaatagttctcaaaatgtttacttttttaaaattgtcataatcactagttcaaggccatgtcaccagacacttgtgcaattgctaaaattcttcataggctctactttcctgaagtgccctcttcttccaatacaaattacatagtcctaagagattaaatccttaaaaattcctaacaactctctgttatctagaagttcaagtccatagcttttagtttcatattaaaactattcctcaaactagtcttagtttcagctactaaatt

SEQ ID NO: 378391 - DNA, 336 bp, Homo sapiens
ggaaatcaaaaccagcaattgagggtaaatttcaataatttccaagaagaaataagggcctgaacaaagagagagccagtagaaacaggaagaaaggaaaccatttcagygatagtacgaagttataaacacggcttgaccattaaagtggggagataaggtagaggaaagaatttatttagaatgactcacaggtcttgagtgtattgctggaaaattattcatttgctggaaatattaatgaataggttatatttatgtcctgctaagaataccgagagagaactggagaagcagatataaattcagtaattctacattttatttgcaaactgt

SEQ ID NO: 378392 - DNA, 592 bp, Homo sapiens
atcaaatggctaaatgcacaatgttggtaaccaattataaaatgcattatagatagtatatttctttttcctagaaagttctttctgaatagtagcaaatgaacattacctgggtatgaaagaggaggtttccctaacataaatgttactgaagaaaacattaggcctcaattagcctttttaacaccattaactataataattagcaaaaggaaaaaagacagttttataacctacagtttccttcaagaaatagctatttaataattcataaacaatccatctgcagaaaatataatggtatagatagcaatgtctttactaggctgcagcactatcatagtgtatcagcaaactgcagttaacagaacaaatatttttggctgtagagggataggcyctccaaacacaaattaatctccttaatggattttccttaccttcatgaaaaatgcattatgggttcttaagtcacactcaacacattgttagggttttttatgatgtggggttggcacaaagatgatttttctttcacactgtgggtaaaaaaacaatgagctgggtggtttggagccagactatttaatca

SEQ ID NO: 378393 - DNA, 592 bp, Homo sapiens
atcaaatggctaaatgcacaatgttggtaaccaattataaaatgcattatagatagtatatttctttttcctagaaagttctttctgaatagtagcaaatgaacattacctgggtatgaaagaggaggtttccctaacataaatgttactgaagaaaacattaggcctcaattagcctttttaacaccattaactataataattagcaaaaggaaaaaagacagttttataacctacagtttccttcaagaaatagctatttaataattcataaacaatccatctgcagaaaatataatggtatagatagcaatgtctttactaggctgcagcactatcatagtgtatcagcaaactgcagttaacagaacaaatatttttggctgtagagggataggctctccaaacacaaattaatctccttaatggattttccttaccttcatgaaaaatgcattatgggytcttaagtcacactcaacacattgttagggttttttatgatgtggggttggcacaaagatgatttttctttcacactgtgggtaaaaaaacaatgagctgggtggtttggagccagactatttaatca

SEQ ID NO: 378394 - DNA, 421 bp, Homo sapiens
atatgattcatgcaggctttttcagctttatctcttttctctgtttttacacagaatgccctttactgaaggaatatagaaaggaagtgatgaacgcaaaagggtataaatcattcacctttattagtaagtgctaattaagtcatggattacttcaaacatgaccaacccacccataccacgaactgtgttaccaccaactgctgaactctcaggrgattgagtgattattatgctaccatctatatatttgatgaggaaaaatatttgatatggtttggctgtgtccctacccaaatctcatcttgaattatagttcccataatccccacatgccatgggagggaccaggtgggaggtaactgaatcatggggtggttaccctcatgctgctctcttgatagtgagtgagttctcacgt

SEQ ID NO: 378395 - DNA, 533 bp, Homo sapiens
agggaccaggtgggaggtaactgaatcatggggtggttaccctcatgctgctctcttgatagtgagtgagttctcacgtgatctgattgttttataaggggcttttccccttttgctcagcacttctmtctcctgctgccatgtggagaagaacatgtttgattccccttctgccatgattgtaagtttcctgaggccttcgcagccatgcagaagtgtgagtcagttaaacctcttttctttataaattacccaatctttgggattttttcatagcagtgtgtgaacagactaacacaatattacaaggaggaattatttaatattttttggaagtgttacaaattgatcttagtgtgtcatttttgaccaactgaccaacttgtgccaagggtcttttcttatacttaattctacaagagtcaattagattaattacatctgatccaataacatcctattgttcaattagtttcagcaaacaatattactgcctgtcttattacttttttattcaaaattgttcatagcaa

SEQ ID NO: 378396 - DNA, 433 bp, Homo sapiens
tttgatgaatctgtcattaattcaacatattcctttcataagtataaacagtctttatattatatatagatgtcaattacacattttcagaattgtgtgaatcatgatacaactatgggttcaacatatacattatacagttaataaaaagacwtacccaagccttttcatggtcaatgccaaaaatatgtatttatatatcaattctatttcagcatgcttcacttggatacttattgaaattctagcatactttgaaaagtgtattagtgatgcaaagatttaggtaactatactcattataaacaacaacaacaacaacaaaaaacctcattaacagctatatgggcaacccttagttgccttgattatacatggatcttagccatcagggctaagtgaatgcatgtccaccttctcaggatttactttg

SEQ ID NO: 378397 - DNA, 523 bp, Homo sapiens
actacataattagcattatatttatttatctcctctactggaatgtaagttctattaatgctagtgttatgcctgtttttcactactttattccacgacctargggggtacttgacatgtaaagggcagtaattatgtctgtgatcaaatttaacccaggacactaaatttctttgtattttaatatatttctctgttaaagattattctacttcatggccgggcgcggtggctcacgcctgtaatcccagcactttgggatgctgaggcggggggatcacgatgtcaggatatcaagaccatcctggctaacacggtgaaaccccatctctactaaaaacacacacacaaaaaaaaaacattagccgggcgtggtgacgggcacctgtagtcccagctactctggaggctgaggcaggagaatggcgtgaacccaggaggcggagcttgcagcgagccgagatagcgccactgcactccagcctgggcgacagagggagactccgtctcaaaaaaaaaaaag

SEQ ID NO: 378398 - DNA, 523 bp, Homo sapiens
actacataattagcattatatttatttatctcctctactggaatgtaagttctattaatgctagtgttatgcctgtttttcactactttattccacgacctaggsgggtacttgacatgtaaagggcagtaattatgtctgtgatcaaatttaacccaggacactaaatttctttgtattttaatatatttctctgttaaagattattctacttcatggccgggcgcggtggctcacgcctgtaatcccagcactttgggatgctgaggcggggggatcacgatgtcaggatatcaagaccatcctggctaacacggtgaaaccccatctctactaaaaacacacacacaaaaaaaaaacattagccgggcgtggtgacgggcacctgtagtcccagctactctggaggctgaggcaggagaatggcgtgaacccaggaggcggagcttgcagcgagccgagatagcgccactgcactccagcctgggcgacagagggagactccgtctcaaaaaaaaaaaag

SEQ ID NO: 378399 - DNA, 605 bp, Homo sapiens
taaacagtttggagtgtattgttgagtaccaatgtttggcttaaatttcttgaatgtgtgtttcactatatacaattttatgaaatggaagttaatgctctgaataatgttagtagaattcccaccagttgcataaaaaaaaaattacctagggaatatgtgtgcatttgtgtgagcaaaaggaggtgtcatggaagagagagagaaactgaaagaggggatacattaatcaaggttccagagaggcaaaggatgggaggagatgcagggttctttaatctcttttactgatatttcactctactcactaaaaatcaatcttcatccataaaatgagaattataatagactctaccccaaaggggtattgagaaaaatgtaatgtgcttaggacactacctagcacataaattatattcyatgttacccattgttcttcttgtacttgttttagagaccaaaaaactcacagaaattgactataaaaagtcattttttattatatagttttctgtattacagctctcaggattctgccccctccccaaacctttcaattcagtctcatattattcaggaaaatattttgaataataattcatctc

SEQ ID NO: 378400 - DNA, 526 bp, Homo sapiens
actagctctaataagaatatttgtgtattcttcatttagtaaatgtattttactttgcttaaatcctcttaaaattgagaacacaaatatgataacttgttcagagaggatgtgaaagaaatttgagttgcaacattttatcaacctagattgtccccttcttycatatctattctaaactacaagaaatgaagatttccaaaggttctagagaaaaactcacacacataaatattttatacccctcctccactttctataggctggtattaggtaaattagagttggttagatggctatgaaagtaatggagcagaagataaaatttgagacattaagaattatcagctatgggtaccagatatacggatatggtaatgagctgattcatgtcttattttgttgtttgttaccaattttcttttaacaaaatcattttggaaaactggttttcaccacacaaattttaagaaacacattcagaccacaatacttggtctctctaagaaatgacctttaagctgaa

SEQ ID NO: 378401 - DNA, 526 bp, Homo sapiens
actagctctaataagaatatttgtgtattcttcatttagtaaatgtattttactttgcttaaatcctcttaaaattgagaacacaaatatgataacttgttcagagaggatgtgaaagaaatttgagttgcaacattttatcaacctagattgtccccttcttcmatatctattctaaactacaagaaatgaagatttccaaaggttctagagaaaaactcacacacataaatattttatacccctcctccactttctataggctggtattaggtaaattagagttggttagatggctatgaaagtaatggagcagaagataaaatttgagacattaagaattatcagctatgggtaccagatatacggatatggtaatgagctgattcatgtcttattttgttgtttgttaccaattttcttttaacaaaatcattttggaaaactggttttcaccacacaaattttaagaaacacattcagaccacaatacttggtctctctaagaaatgacctttaagctgaa

SEQ ID NO: 378402 - DNA, 612 bp, Homo sapiens
gagtgttatggtgagttctatggtgatattatttaagaatgttttgtccatcattctattaatacttaatcctcacagaaagcctataagacagtgtattgtctgagwctgatcagaaatcggaactactctcagactttgaggcaggaaagtatttgctacaaggaaacagcttacaaaatcttcaaactggctaagaatacaggtcaggaacattcaccaatgggcgcagcaataaagacatggcaggcattgcaagacaccgctgctgatcctcttgcccacctgcagtgctgcaccaagtgatctgaggagaatggttcctgctttgcttttaccattcagatatcatcacagtcttttttgctggcagaatataaacttgaaccccgctggaagggagtctggaaaaggtagttttcagacttccagcccttgcaatatggaaaggtaggaacgatgctgaatgtcagcagatgatatgtggctcaggaagatgttattattcttcctgttttacactgtaggaaattgagcctacagtctggtgactccagggccagagctgccaaagtctatatcataaactctttctagggaaggttgtttgaa

SEQ ID NO: 378403 - DNA, 570 bp, Homo sapiens
accaatccttcagagaagaggacacgtggaaagccatgattttgttgggtgtataatggagtttgcagtcaatggaaggcctctggaacccagccaagctttggcagcacaaggcatcctagatcagtatggcgattttatttcttactgttttaaagaaaaaaaatgcaaaaaagtatgcttcagtgagcatcaaaagatgaaattattatgctcaaatctctaaaaataccaaatgatttacattgttttgaattttaaatactatacctttgaaattttggcataaagtatgatatttaattagaaaattaatatgtttctagattcttatacatatatatatatatatatatgcatgtgggcatgtatatgttttatcctcttacagagagttgtgaagattaaattagttaagttggtaaattatataaaaaagggttccagcacagagagatatrtagatgttagccatcatggacacatagaactttatttcacattaaatagttttacttatagacatacatattcctaaaaacttgatacagctttaaaaacaggcaataa

SEQ ID NO: 378404 - DNA, 549 bp, Homo sapiens
cttgttctgtcgcccaggctggagtgcaatggcgggatctcggccccctgcaacctccacctcctgggttcaagcaattatctgcctcagcctcyggagtagctgggattacaggtgcctgccaccacgcacagctaatttttgtatttttagtagagacggggtttcaccatgttgaccaggctggtcttgaactcctgacctcatgatccaccacctcagcctcccaaagtgctgggattatagaggagagccactgcacccagcctagaatggtttttaaaacataagtcagttaacttttcacttcttggctcaaagtgcttcaatagcttcccatctcacccagcttcaaagccaaaatcctgaccctgaatgaaaacatttttatgatctgccatctcccttcacttcctgaacatatctaactattcttcttcttgtgccctgagctccaaccatgttgggcctcggtgtttctcaaacatggcagtacgctttcacttcaaggctttctcactggctgtttcctctagctgaaaagatatt

SEQ ID NO: 378405 - DNA, 613 bp, Homo sapiens
acttcattcccttattttatttaggtcttaacaaagattaagattaattcactgcctaatctaaagattcagcaaacccgcaaactcactataccctttctcaccttgattttctctatagctatttttttctttattttctgcctcttccacaagaaaaaataagtacttcctcagtacacggttattttttcattactttacttccatgcttagaacagtgcttagcatatggtaggcattcaataaacattagttgcatgagtatcctgatagacatgtgtcaaaaaatatgtggtccctggatcatatgtattaaccaaagtgtttatttgaccaaggtattttattcaagtaagaattaatttaaagaagaaattgtcacagctttctcattattatataagacataattttttttgaatcttctttagtgtgaggcagactatgttttctaggaaaacttctggtttgattagtttctccaaatgtagttgtaacttgagcttcaaataatggagtgcttgaaattaaacaagctaataaaagtktatattgagttttagcaaacttctcctcatcttttatgtgcgttattgttctcattatgatt

SEQ ID NO: 378406 - DNA, 583 bp, Homo sapiens
agggctgaaatccatttgagctcattttcttaatattctttctttagctatattatttgtttctataacttaagcttcaatatttctggaatgtggatttttttcagattacaataaactataatatacatactgattatacatgatgataaattatatgtgatgattactgaaaataaagttagttaccgatgtaaatacttgattgaacacttctttgtcctaatttatagcatactagagactaaagattacaaatcattttaaccatgcaaacrtatattttggaaacacagtgaaaatgattacaaacaaatttttcaagtacatattaccaacaagtgcctgtctttagatattcataatttacgtaatgtggcaaatagtttagtaaaatatttcccaaatggttaatgactgtcatagagtattttaagttcatggttctgaaatgcatttaaacatgtgaaatcaacttatataatgattcataaatggaaattattttttaagagtagagttgggggacattaattcccaaaacgacattttcattgtcctttttatatttttgtcactatag

SEQ ID NO: 378407 - DNA, 583 bp, Homo sapiens
agggctgaaatccatttgagctcattttcttaatattctttctttagctatattatttgtttctataacttaagcttcaatatttctggaatgtggatttttttcagattacaataaactataatatacatactgattatacatgatgataaattatatgtgatgattactgaaaataaagttagttaccgatgtaaatacttgattgaacacttctttgtcctaatttatagcatactagagactaaagattacaaatcattttaaccatgcaaacgtatattttggaaacacagtgaaaatgattacaaacaaawttttcaagtacatattaccaacaagtgcctgtctttagatattcataatttacgtaatgtggcaaatagtttagtaaaatatttcccaaatggttaatgactgtcatagagtattttaagttcatggttctgaaatgcatttaaacatgtgaaatcaacttatataatgattcataaatggaaattattttttaagagtagagttgggggacattaattcccaaaacgacattttcattgtcctttttatatttttgtcactatag

SEQ ID NO: 378408 - DNA, 614 bp, Homo sapiens
ctgtaaataagatactagacttatatacagatgaataatttcattagatatccatttttgcatcggcccttagctttctgaagttttaaacctatgttctgctttctttcccacaaataagtcatctcctagaccaacagtttctttagtttagttatatttactgccttccattaatattactttgtatcattctactgataattttttayataaattttagtaaattcttaagataacaaatccagatttcctgaattattttcatctattagtcaatatttaataactactccagggatagttcacagagaaaaagagcaatttgttcagaaaaattatttggtttaattcacatataatactaaaaataaaaatagatgttcacttctaaacttcagcctctttcatcctcaaaatttttctctgtgcaagccaaccatgattatgttgcatataaatatatttaataagtagtacaaaaaccaatatttcttaccttctcaaatgataattcctctagtccagtcatttccaactaggatagattttacccccatgggacatttggcaatatctggagacattttcaattgtcacggttaggagttggg

SEQ ID NO: 378409 - DNA, 549 bp, Homo sapiens
tattttatggttgcttatttatttaatgataaaaatataaatacccaccaaaaatataaaatacacattgaacataactatttaaatggcttgcagattgtcatcaaattgcataataaaaaatttcagtgaaatgcagttattttaatttttggttgtttataatcgttaaacaaaatcaaagtttagaaaactactcttaaatttttaagccccaattttaattgattaaatataatactaattttatatcaatatataatgttgggtatggattcatagcaaatgaaaggtgactttctattaagtcatacaatctcatactatgagcaatttagtctctaaaycattcattgactcagtaaatggtcattttgatagtgacaggaggcagtcaaatgcctaggcagatgggagagggtctctggtgaaactccaccttcaagccaaaaaacagcctgaagtctgaaagactggactgctggtcccaggtcaaaccagctactcagagtgaaaacttccgttcctgtttgcctgccctttcccaat

SEQ ID NO: 378410 - DNA, 552 bp, Homo sapiens
cagcaccttaatcttggacttttgcacctgcagaactgtgagaaataaatttctgttgtttaagccagtcagtctgtggtatttagttatagtagcccaagtaaactaatgtgccattacttcattctygactaaacatgaagactctatctgtatgtttcttaataagaactatacaggactctacctaggggatttccaaaactataatgccaaagtgtgatggtttatagagttctcatccactctgtatcagtttgctgtggctgctgtaacaaagtaccaccaaatttatgttttaaaacagcagaaatgtatcctcccacaatactgaagcacagaggaccaaaatgaaggtgttggcaggccacactcactaccgaggctctagggaaatatccttttcttgcctttttcatcttctggtggctgtcaacattctttgccctgtgtcttccctctaatcttcaaggccagaatcttcaagtgtccggtttttttttctttcttttttttttttttcatatcacctacccctttgtgtgtagtaag

SEQ ID NO: 378411 - DNA, 552 bp, Homo sapiens
cagcaccttaatcttggacttttgcacctgcagaactgtgagaaataaatttctgttgtttaagccagtcagtctgtggtatttagttatagtagcccaagtaaactaatgtgccattacttcattctcgactaaacatgaagactctatctgtatgtttcttaataagaactatacaggactctacctaggggatttccaaaactataatgccaaagtgtgatggtttatagagttctcatccactctgtatcagtttgctgtggctgctgtaacaaagtaccaccaaatttatgttttaaaacagcagaaatgtatcctcccacaatactgaagcacagaggaccaaaatgaaggtgttggcaggccacactcactaccgaggctctagggaaatatccttttcttgcctttttcatcttctggtggctgtcaacattctttgccytgtgtcttccctctaatcttcaaggccagaatcttcaagtgtccggtttttttttctttcttttttttttttttcatatcacctacccctttgtgtgtagtaag

SEQ ID NO: 378412 - DNA, 573 bp, Homo sapiens
atatctcaacataataaaagccatatatgagagacctatagctagtatcatactgaatgaggaaaaactgcaagcctttcctctgagatctggaacacaacaaggatgcccagtttcaccactgttattcaacatagtactagaagtccttgctagagcaatcagaaaagagaaagaaatagaaggcatccaaattggaaaggaagaaatcaaagtacctttgtttgcagatgatatgatctttatatttggaaaaacctaatgactctatacgaaaactattagaactgataagcaaattcagtaaagttgcagactacaaaatcaacaaccaaaaatcagtagtatttctacatgttaacagtgaactatctgaaaaggaaataaaaacgtaatcccatttacaatagcaacaaataaaattaaatacctaggaattaactttaccaaagaagtgaaacaattctgtaatggaattwactttaccaaagaagtgaaagaactctgtgatgaaaacaataaaacactgatgatataaattgaagagaacatcaaaaatttgaaaaagattcc

SEQ ID NO: 378413 - DNA, 504 bp, Homo sapiens
attattaaaaaaatggtaaatgcaaatatcagttttgaaaacaaaacaaagacaaaatgagaagaaacacacaatttcttttcagctatttttaaaaagagcatcatcacacatttttgagattggtttctagatacagtactgacaactgtttaggtaactttyaccattagaatcttctagccagtggaacatgtttatattttgttttcaagtacacacatgaaggcccaatagtgataaaaggcttgggatcaaaaatcactgaaaagtctcatatttttattgctatttaatctaagtgaatgtcacttaattttgataatggtaaattacaagtaaaggagcttgagagaaatccaagtcagtataatttctttaaggacaaggctaatccttcctgaacattaaaactttgtacctgagtcatagattttcctcattacccaaaggaaaagatctgaaaccagctgaaattattgattgaattgaattaccttggaa

SEQ ID NO: 378414 - DNA, 546 bp, Homo sapiens
aagtcagtataatttctttaaggacaaggctaatccttcctgaacattaaaactttgtacctgwgtcatagattttcctcattacccaaaggaaaagatctgaaaccagctgaaattattgattgaattgaattaccttggaaacagacaccatttaaacatttttattctcacctactttttgttttcttttttttctttttttattttttttgagaaggagtcttactctgtcacccaggctggagtgcaatggcaccatcttggctcactgaagcctctgcctcctgggtttcagtgattctcctgcctcagcctcctgagtagctgggattacaggtgtgcaccaccacacctggctatttttttttttttgtatttttagtagagacaggatttcaccatattggtcaggctggtcttgaactcctgacctcaagtgatacgcctgcctcagcctgccaaagtcctgggattacaggcatgagccaccatgccttgcccctcacttactttttcaaataacaaaataatgtgctatttctg

SEQ ID NO: 378415 - DNA, 560 bp, Homo sapiens
taggcaattaggaacaaggttggggccagcagtggtggggttgcagagagagagagaccaagactcccctctggccaaaaargggttgaacagctgctaaggagggcttctgaaactcttctggcccacagtagctgagacacaaggaaagactttcaggtcagggaaccaaaatctgttactgaaacaccagaggttcagtctgggtcctgtggtttgctgcacagaaagccaattgctgagataatatgcattgccagggaagaaggctttaattgggtgctgcagccaagaaaacgggagatcagtcttaaatccatctcgccgactaaaatcaggggtttatatagcagggaagaaatgtaactacatgcaggaaaacaggaattaagcacggataaggaagtggagttgatcaacaggaagcaggcgattggttagacaattgtgatgggtgaggggtctggctcctcattgtccagatgcagtgatctggtaagtttcagttactggatactatctgggaagccagatggttgatttttggcaaaaggaactta

SEQ ID NO: 378416 - DNA, 560 bp, Homo sapiens
taggcaattaggaacaaggttggggccagcagtggtggggttgcagagagagagagaccaagactcccctctggccaaaaaagggttgaacagctgctaaggagggcttctgaaactcttctggcccacagtagctgagacacaaggaaagactttcaggtcagggaaccaaaatctgttactgaaacaccagaggttcagtctgggtcctgtggtttgctgcacagaaagccaattgctgagataatatgcattgccagggaagaaggctttaattgggtgctgcagccaagaaaacgggagatcagtcttaaatccatctcgccgactmaaatcaggggtttatatagcagggaagaaatgtaactacatgcaggaaaacaggaattaagcacggataaggaagtggagttgatcaacaggaagcaggcgattggttagacaattgtgatgggtgaggggtctggctcctcattgtccagatgcagtgatctggtaagtttcagttactggatactatctgggaagccagatggttgatttttggcaaaaggaactta

SEQ ID NO: 378417 - DNA, 575 bp, Homo sapiens
ttttcacctttaaaacagttttcaaaaattcagaaatatggcgagactaagtaataataggtccttttataaaaatatgatggagcattaaaaataatagtgacttgaaaagccaattctacttttaaaatgtagcaattatttttggcacactgaaattataatacagattatgaaatcttgctgggagtcataaagagtcaaaaaattttaaaaaagagcagaaactaagaaaaaggaaaaaaggtgggcttttttctcttcataatccaatgatctaattcttccaccaataatgttagtaactctttaaggactcagaataaatatgaggaggcaactctagtaagtcattttgttatggaatactttgcctctggaaaatatatttattccaggaaggtaaatagtaaatattcaactattaagtgatgtggraaaactctgctggccctggatcaaaagacaaccaggtaccatgttgcaggtgctgacatggtcaatgactgtctgaggccaatgcacaggcagtaaaggggtttatcaagacagtaatgagtttagaaaggcaaatt

SEQ ID NO: 378418 - DNA, 528 bp, Homo sapiens
tatgtagtatgtgatcaaacaaatcactgaaaaaaaaaagactatggaagactatggataggagaaaaaaaatgtgtctcctggggtggaggagttactgaatgttttgagctagggagcagattttttgtgtgaagacaatttcctaagattttcaccctgacaatgaatcactctgcagagaacagtgatgggccatctatgggagggaagatgatgaatgtgtccagaagacttgaggtgactaaggaacacttgtggaaacattcgctgacactttcctaagctctgcgtctgtgtactacttggcactgtgtaagggatggcctagcccccggctcacaggtccacagctgggtttctgtcyttctcgcatgcccacctgactcctcaccctcagcttaacccttgaaaactttcccctcctggtttttctgctttctaaattccatctgcccctcacttatgagtcacagtcaccactcagctgggtaattagtcagtgttaactcatctctgagcagcaaa

SEQ ID NO: 378419 - DNA, 528 bp, Homo sapiens
tatgtagtatgtgatcaaacaaatcactgaaaaaaaaaagactatggaagactatggataggagaaaaaaaatgtgtctcctggggtggaggagttactgaatgttttgagctagggagcagattttttgtgtgaagacaatttcctaagattttcaccctgacaatgaatcactctgcagagaacagtgatgggccatctatgggagggaagatgatgaatgtgtccagaagacttgaggtgactaaggaacacttgtggaaacattcgctgacactttcctaagctctgcgtctgtgtactacttggcactgtgtaagggatggcctagcccccggctcacaggtccacagctgggtttctgtctttctcgcatgcccacctgactcctcaccctcagcytaacccttgaaaactttcccctcctggtttttctgctttctaaattccatctgcccctcacttatgagtcacagtcaccactcagctgggtaattagtcagtgttaactcatctctgagcagcaaa

SEQ ID NO: 378420 - DNA, 502 bp, Homo sapiens
aataacaagaaaccatatgatgtactaactcaggcttggtgatggctacgcatcttcagctggtgtcacagcccacactacctggcacttgtttggattaaaaccattactgaagtgacataatttgattgatttttcctccagagttttaagcatacctagaaagacacaacataaaatatattttcttttatatctagtccatgggctctctaagagttgtttaggagagtccctggactacaggwtaagaatccatggcctcaatcagaggtaaagactagcactgaggacgatattccctgacacctcggatgcccagttatctattcattgggaaaaagttgatgagttcctgagggtgttgaccacactgcaatttaaggacaaaaaaaattacacttcagactacggggtggcaaactataacctttgggtcaaatctagtcctctacctatttttgtaagtgaagttttatgggaacacagacatgcctatttg

SEQ ID NO: 378421 - DNA, 502 bp, Homo sapiens
aataacaagaaaccatatgatgtactaactcaggcttggtgatggctacgcatcttcagctggtgtcacagcccacactacctggcacttgtttggattaaaaccattactgaagtgacataatttgattgatttttcctccagagttttaagcatacctagaaagacacaacataaaatatattttcttttatatctagtccatgggctctctaagagttgtttaggagagtccctggactacaggttaagaatccatggcctcaatcagaggtaaagactagcactgaggacgatattccctgacacctsggatgcccagttatctattcattgggaaaaagttgatgagttcctgagggtgttgaccacactgcaatttaaggacaaaaaaaattacacttcagactacggggtggcaaactataacctttgggtcaaatctagtcctctacctatttttgtaagtgaagttttatgggaacacagacatgcctatttg

SEQ ID NO: 378422 - DNA, 546 bp, Homo sapiens
ctcatttttttcccatcctttctagggaaaaatgttctttaatcagcagctgccacaatctaaaaggctttcagactgagctactctaggcacagcctgaagcactttgccggggtctgcaggaaatatctaggcctattaggacacagtagatcccttgtaagtcacattggctgctcttgctccaagctacatgccaattagtctgcrggctgctatttatttgcaatcattggaatcatgtccactttggggtatctctcaagaaccccatgactgggaaaccaaacgatgcaaatgcccaatgtttgttatcaacctggatctcagatgtgcttggcataatctacctgaacccttagaagattattttggtgttaggaaatgtgaataaaaaaaagtgaatattttacaaggtaaggaagcaactagtcatatgctgtgatttagaaggagaaattataaaggattattaaaagaaaaccagttttctatgagttgcaaaggctatcaccatgtgtttctattctctcaaagttgctgaaa

SEQ ID NO: 378423 - DNA, 546 bp, Homo sapiens
ctcatttttttcccatcctttctagggaaaaatgttctttaatcagcagctgccacaatctaaaaggctttcagactgagctactctaggcacagcctgaagcactttgccggggtctgcaggaaatatctaggcctattaggacacagtagatcccttgtaagtcacattggctgctcttgctccaagctacatgccaattagtctgcaggctgctatttatttkcaatcattggaatcatgtccactttggggtatctctcaagaaccccatgactgggaaaccaaacgatgcaaatgcccaatgtttgttatcaacctggatctcagatgtgcttggcataatctacctgaacccttagaagattattttggtgttaggaaatgtgaataaaaaaaagtgaatattttacaaggtaaggaagcaactagtcatatgctgtgatttagaaggagaaattataaaggattattaaaagaaaaccagttttctatgagttgcaaaggctatcaccatgtgtttctattctctcaaagttgctgaaa

SEQ ID NO: 378424 - DNA, 546 bp, Homo sapiens
ctcatttttttcccatcctttctagggaaaaatgttctttaatcagcagctgccacaatctaaaaggctttcagactgagctactctaggcacagcctgaagcactttgccggggtctgcaggaaatatctaggcctattaggacacagtagatcccttgtaagtcacattggctgctcttgctccaagctacatgccaattagtctgcaggctgctatttatttgcaatcattggaatcatgtccactttggggtatctctcaagaaccccatgactgggaaaccaaacgatgcaaatgcccaatgtttgttatcaacctggatctcaratgtgcttggcataatctacctgaacccttagaagattattttggtgttaggaaatgtgaataaaaaaaagtgaatattttacaaggtaaggaagcaactagtcatatgctgtgatttagaaggagaaattataaaggattattaaaagaaaaccagttttctatgagttgcaaaggctatcaccatgtgtttctattctctcaaagttgctgaaa

SEQ ID NO: 378425 - DNA, 546 bp, Homo sapiens
ctcatttttttcccatcctttctagggaaaaatgttctttaatcagcagctgccacaatctaaaaggctttcagactgagctactctaggcacagcctgaagcactttgccggggtctgcaggaaatatctaggcctattaggacacagtagatcccttgtaagtcacattggctgctcttgctccaagctacatgccaattagtctgcaggctgctatttatttgcaatcattggaatcatgtccactttggggtatctctcaagaaccccatgactgggaaaccaaacgatgcaaatgcccaatgtttgttatcaacctggatctcagatgtgcttggcataatctacctgaacccttagaagattattttggtgttaggaaatgtgaawaaaaaaaagtgaatattttacaaggtaaggaagcaactagtcatatgctgtgatttagaaggagaaattataaaggattattaaaagaaaaccagttttctatgagttgcaaaggctatcaccatgtgtttctattctctcaaagttgctgaaa

SEQ ID NO: 378426 - DNA, 426 bp, Homo sapiens
ttaaagtcagcttaaccacatgaatttgaactggtctcctcgtacctagccacatcattccattatgcctgagggactctggaccaagccccccaacccctgtagtcagtggcaggctctcaataatgccccagcaccttttcatatactgaactttaagtacaatgaacaaagacttgggggtcaggaaagacctggattcaaacaatagataggagttaaaaaattattcttttagccttgtatttctcatatgtaaaaatataaataataaaaagcgaaccttgtatatgttgttgtgatgcttaaaygcgataattaaagcagaagtatcttaccaaaagagaatcagacacagtggctacactacaaacacttcagagcccacttcatgccgggtcctaggtattgtctgctttaatcatt

SEQ ID NO: 378427 - DNA, 598 bp, Homo sapiens
ttccccattccgtttatgcaggcttttcatacagtttaaagtcagcttaaccacatgaatttgaactggtctcctcgtacctagccacatcattccattatgcctgagggactctggaccaagccccccaacccctgtagtcagtggcaggctctcaataatgccccagcaccttttcatatactgaactttaagtacaatgaacaaagacttgggggtcaggaaagacctggattcaaacaatagataggagttaaaaaattattcttttagccttgtatttctcatatgtaaaaatataaataataaaaagcgaaccttgtatatgttgttgtgatgcttaaacgcgataattaaagcagaagtatcttaccaaaagagaatcagacacagtggctacactacaracacttcagagcccacttcatgccgggtcctaggtattgtctgctttaatcattataacgatcctatgagagagatgctgtatagtcccattttccctatgaggaagctgaggtctagaagggttaagtaacttgccgagtcacagatggagcgtgaaaatatctttggttgacttaaaagccataataaa

SEQ ID NO: 378428 - DNA, 607 bp, Homo sapiens
tgggactacaggcgtgtgccgtgccaccacgctcggctaattttttgtatttttagtagagacggggtttygctgtgttagccggaatggtcttgatctcctgacctcgtgatccgcccacctcggcctctcaaactgctgtgattacaggcgtgagccactgtgcccggctctgaccttatcttatacggttctacaacatctcactctgttccagccattgcagccgctttttctgctctgcgaacattccagctctttcctgcctcaaggcctggcttttcctttctggaatgtcctttaccaaatactcacatggctcattccttcacatctccactcaaatgtcaccttatttttgaggcattccctgacttcttcatagcacttatcaacatcagacatattcattacagaatacaaatatgtatgtaaataaataaatatttacatgaataaatacatttattatatatgtactgaatatgaatatatacacaaatatttatagtcatttattatttagactatgaacaccataagggcagaccctttcttttgtgtactgtttaagtcctatcaactgagaaagtatgtagcctattac

SEQ ID NO: 378429 - DNA, 440 bp, Homo sapiens
ctttctcttgtcttttggttctttacctgatcccctcgagttgggatytaatttctttttatatttgcacatatggggctcaaaggcatacatgggacagactcgttatttgatctatttcttcattttaaaacaggatggtaaaccaaattcaggaagtattttccaggtcccttgccctttaggccctttgtccttcacagatctcaggacaccccagttatattcttactttactggcacacttgtatctggagacttttgtccattctgcccttttatctctgatccaccaggttgatttagaggtcctttctgttgtgtatgtcaggactcctctgcacttatccagggcaaatggagttttgtctcctctgtgcagagaaagactttagttactgggtaaaacacattttcagccagaatccctttatgggacc

SEQ ID NO: 378430 - DNA, 440 bp, Homo sapiens
ctttctcttgtcttttggttctttacctgatcccctcgagttgggatttaatttctttttatatttgcacatatggggctcaaaggcatacatgggacagactcgttatttgatctatttcttcattttaaaacaggatggtaaaccaaattcaggaagtattttccaggtcccttgccctttaggccctttgtccttcacagatctcaggacaccccagttatattcttactttactggcacacttgtatctggagacttttgtccattctgcccttttatctctgatccaccaggttgatttagaggtcctttctgttgtgtatgtcaggactcctctgcacttatccagggcaaatggagttttgtctcctctgtgcagagaaagactttagttactgggtaaaacacaytttcagccagaatccctttatgggacc

SEQ ID NO: 378431 - DNA, 607 bp, Homo sapiens
ggttttttatatctgctaggacaagccttctcatgagaaaaagtcaaaccatcagtgaggcagcactccactgtggggatgacctacatgtaggcctgctgaggccatgtgcattcctcatcaggatcccagttggaactgcaatacccaaactgcctcagacactaggaaaaatattttaaaakttggccatagttggctcaggtccttattaaaatctgaaaaatgggtcccctaaatcccaacaaatccctttatggaaaagacttttcactgtgttactttccactccaacaacaattaagatttctgatatccatagttggatccatcattcccacataaatacctagaaaggctccaaataactagaaacagaacaaacacccagttacttttgtgaaccactggaggacctgaagtttctcttcaaacaaaaagataagtaaatgccttctcctttctcatctcagagttttcagatccaaaacatcaaacagataatgttgcattaacataaaatagcctcaatattgggaatcttatttatagggaacagaagaaaatgaaaataaggtaaaaagaaagaaaaaacacaaagtagggg

SEQ ID NO: 378432 - DNA, 657 bp, Homo sapiens
aatgttgcattaacataaaatagcctcaatattgggaatcttatttatagggaacagaagaaaatgaaaataaggtaaaaagaaagaaaaaacacaaagtaggggaaagtgatataaaaaagttatgaatatgaagatgcatttttggtaaagaaggttataaatgaaataagttttatataaggaaagatcttgtatggtaaattcttgtcctaaagtaaaatgactaaatacttagaaaagagggaagtttaggacaagctggaaagttcaagcatgttacggatggtctgtgtaagttgcaaaatgggaaagaaaaatgtaaaaactggcaaataaaaatctcacaacgactgaaacttcttctgtctatatgtatgtatgtgtgtatatatatacacacatatgcatacagacacacatatagtgtctgtgatgtacatataaaaatgctaattaattagcttaaagaaaaagtgattaartcaaatattttctcaggaaaatagaaacttcagtgccatttagttcatgtgactttagtaatctttggcaaataaagacagttttaaatattatttgtaacataaaatgagaatgtcttcaaaatttagacatttggtataaattatgcaggtaagatattaggtctactaa

SEQ ID NO: 378433 - DNA, 631 bp, Homo sapiens
cattaaattctaagtaaagcctggggacacgtgcagttagccatttcccctagctatgctggcaagagtcagactttatttgtggttgcatatctattcctccctaacaattggaggggaagtttatctctgatttgtctttcctgtgatgtggccttcctaaaccaaccagtcrgttcctatcccccttacctcccaagtttgcatctcaagagtagccatagcttttctccccttacttatggctctggggctagaaaccagattaagtgaagtggtaacaggagctgcagaaattttaagctctcaacaagagcatgccatgttatcccatgaggatggtccaccaaaaccaccacaccttagacatcagcatctcagctcagggaggaacctctgctatacgtaaaaaaagaatgttgcttttatgtgaactagtcagaagtcatacaggacagcattcaatggctacaagaaagaggtaaacatctacaggccaatttttggggacatgcaacatccttaattgattctggcctcctctgtgggcccactctccactgtgatccttctcctcttaggtccttgcctcatcaatttattaactaaattaattttctcccacattcag

SEQ ID NO: 378434 - DNA, 518 bp, Homo sapiens
tagatttttgaatttgccagaattttgtacagagttgagaagagtcagtatttagaattcaagattttgttacttaatataaataattacaagacaaagttagaaattgattctgattttttatttttcataagaaactggcttgagtggtagtttgttatttgccagaaaaaaaatctgtgccaattatttgtgagactatgactactatagaatttgatacattctatgcctctccatcatctactactattcacaccccrgatacactggggctggatttaatcttacgtgatgtagaggttcatttagaaactcaatattgaactaaatcctttgtaaataatgaattttaaaatgaactaatttgttctcaacacttgagattagggtaatcactctgtcagaatgtatgtacagtagagataaaaggcatttaagcagtgaaagctgataattctattttcttctatgaaccattaatgtttatgccccaggaggactgtagtatgaacatc

SEQ ID NO: 378435 - DNA, 589 bp, Homo sapiens
tttgcattttacatttaagtctgtttcattttgaggtaatttttgtgaatggtgtaatgtctgtgtctagaatgatttttacatgtagttgtccagttgtagtactrttttttgaaaggactatcttttgtttattgtaatgcctttgtctttttgtcaaagatcagttgactatatttacttaggcctgtttctggactcttttcagctccatttatctgtttgtttgttcttttatcaataccataccaccttgatttctgtagctttatagtaagttttgaagttgaatagtatcagtcctccatctttgttcttcttcttcaaaactaggttgggtattttggaagttttgcctcttcatataaactttagaatcagtttgtcaatatccacaaaattacttgctgagattttagttgagattgctgtgaatctatagatcaacttaagaagaactgacatcttgacaatattgggtcatcttatgcatggacatggaatatctttcaatttctttagctatttaatttcatcagagttttgcagttttcttcattccaagtttgtaaatcttgtacttattttg

SEQ ID NO: 378436 - DNA, 582 bp, Homo sapiens
ctttcttctcaatctgaatatattttatttcctttctttgtcttattgcataagttaggacttccagtatgatgttgaaaagcagtggtgagaaggaacatccttgtctttttcctgatgttggcagaaaagcttctagtttctcatcaagaggatgttagctgtaggttttcataggtgttctttatcaagttgaggaagttyccctcattagtagcttgttgagagtatttatcacaaacaggtattggatattgtcaaatactctttgtacatatattgatatgatcatgtgattttgttttcagggtgttgatgtgtcccagccctcagtcccatggggcgggctagagccagctggagctgggtatctcccttcccccagatcagttagtctctgataaaatctcccagaagttatgtgttggttaaatagtttttccagagggtagatgttgtttaaaaaaaaaaacccagaatgctctggagtatttttattttattttgttttatttattttattttaagtttcagggtatatgtgcaggatgtgtaggtttgttacataggtaaagatgtgca

SEQ ID NO: 378437 - DNA, 582 bp, Homo sapiens
ctttcttctcaatctgaatatattttatttcctttctttgtcttattgcataagttaggacttccagtatgatgttgaaaagcagtggtgagaaggaacatccttgtctttttcctgatgttggcagaaaagcttctagtttctcatcaagaggatgttagctgtaggttttcataggtgttctttatcaagttgaggaagtttccctcattagtagyttgttgagagtatttatcacaaacaggtattggatattgtcaaatactctttgtacatatattgatatgatcatgtgattttgttttcagggtgttgatgtgtcccagccctcagtcccatggggcgggctagagccagctggagctgggtatctcccttcccccagatcagttagtctctgataaaatctcccagaagttatgtgttggttaaatagtttttccagagggtagatgttgtttaaaaaaaaaaacccagaatgctctggagtatttttattttattttgttttatttattttattttaagtttcagggtatatgtgcaggatgtgtaggtttgttacataggtaaagatgtgca

SEQ ID NO: 378438 - DNA, 600 bp, Homo sapiens
ctgattacccacgtgaacttctaagcatcgcctattcctgatgcttatgaggatgtttcattacctcccatggaggtcccacaccagtgctttctgaccacttcctagggccactgccagactgtycacagagctggtcccatgacagaaggacttcctccctttcctgcctcatcccaggggctgaatcatgttcaagagccgtgccttccccgtctgggtctgtctgctgaaactgagcagatgtggaaagtcatgtcccaagacataaaaacctttgaataaatggcttagagggaactcctcaacatattctctataacattactctaaatcacaaaacagttaaacttcagaagtagatgaaatactagaaattatgtaactgagaggcatcagaattttagatttttaaaaaccatgaggggactgtgacaaggttgtcaaatatattaataattactaattattaaccaatacccttaatttttaaaatacagatactaataaataaataaggatattaataaataaggatattaataaataaggaaattaaggttaattaatttcaaataaggatattaataaataaaccat

SEQ ID NO: 378439 - DNA, 600 bp, Homo sapiens
ctgattacccacgtgaacttctaagcatcgcctattcctgatgcttatgaggatgtttcattacctcccatggaggtcccacaccagtgctttctgaccacttcctagggccactgccagactgttcacagagctggtcccatgacagaaggacttcctccctttcctgcctcatcccaggggctgaatcatgttcaagagccgtgccttcccygtctgggtctgtctgctgaaactgagcagatgtggaaagtcatgtcccaagacataaaaacctttgaataaatggcttagagggaactcctcaacatattctctataacattactctaaatcacaaaacagttaaacttcagaagtagatgaaatactagaaattatgtaactgagaggcatcagaattttagatttttaaaaaccatgaggggactgtgacaaggttgtcaaatatattaataattactaattattaaccaatacccttaatttttaaaatacagatactaataaataaataaggatattaataaataaggatattaataaataaggaaattaaggttaattaatttcaaataaggatattaataaataaaccat

SEQ ID NO: 378440 - DNA, 605 bp, Homo sapiens
ctgaatttcttgagggcaggcactgtgtgctgtttatttttgtagcctgggagtctagaaaaaagtgcctgctatgtcacatgggctctaaaagtatctgctaaattaaggatgaatatacttactgaagtaattataccagtcacatatattaactgaaggcttaattcaatccaatgttaacctgagtactcccaaagaaaagcttactcaaaccgttgatgcctgacctacctactttaaaaagatctatgtccccctcacaggaccgcataagaatggcattttaaggcasaaatagaacactttgaattactgtcctatttttagcccacaggctaaaatggctggcaggtcaaaacactcacacatacccctgacacacatttgccacccagaaacacaggatgttggcacaatatggtcagtgatggttacacgttgttctgggctggctctatagcaagcatgcttcttggttctgacccctttcagaatccctgtccccctaaacccttcttttccagggagcaaagcaactggacagaatcagtacactaaagcacatggagaatttattaataatcacgtcctcagaaatagaa

SEQ ID NO: 378441 - DNA, 574 bp, Homo sapiens
taattaacagaaaaaaattttgtttattattggtaagttgtaatggacagtggtaatggacactataaaacatagtttgtgtttccctgtgtgtacaatagatatgcatttaaagggaggcctatttaaaattgactttaatayattgtgtagtattattttttctttttaaaaagtttaacaagaaagccgtgtagaattttcctattacaattttaaatgtttcttgtgaacatttcaaacagcctattatgattaatagttataaagaatagcaaaagaatttcaaaaatataaataagactctctaatacaaactacaaatactttaaatgtacaaagtaaaagattttaaacatcttaagatatttgtcactggattttatttaagaactttgttctactgactacaacatatggagtaataaaatttctgagagtgattccatatgatttggatgctttcccttaagtaatttatggttctgtaagtaataaactcatttttaaacctaaaaaaccaaaccctttagaattagaaggaagaaaaagttatagcttgtattacaagact

SEQ ID NO: 378442 - DNA, 574 bp, Homo sapiens
taattaacagaaaaaaattttgtttattattggtaagttgtaatggacagtggtaatggacactataaaacatagtttgtgtttccctgtgtgtacaatagatatgcatttaaagggaggcctatttaaaattgactttaatataytgtgtagtattattttttctttttaaaaagtttaacaagaaagccgtgtagaattttcctattacaattttaaatgtttcttgtgaacatttcaaacagcctattatgattaatagttataaagaatagcaaaagaatttcaaaaatataaataagactctctaatacaaactacaaatactttaaatgtacaaagtaaaagattttaaacatcttaagatatttgtcactggattttatttaagaactttgttctactgactacaacatatggagtaataaaatttctgagagtgattccatatgatttggatgctttcccttaagtaatttatggttctgtaagtaataaactcatttttaaacctaaaaaaccaaaccctttagaattagaaggaagaaaaagttatagcttgtattacaagact

SEQ ID NO: 378443 - DNA, 574 bp, Homo sapiens
taattaacagaaaaaaattttgtttattattggtaagttgtaatggacagtggtaatggacactataaaacatagtttgtgtttccctgtgtgtacaatagatatgcatttaaagggaggcctatttaaaattgactttaatatattgtgtagtattattttttctttttaaaaagtttaacaagaaagccgtgtagaattttcctattacaattttaaatgtttcttgtgaacatttcaaacagcctattatgattaatagttataaagaatagcaaaagaatttcaaaaatataaataagactcyctaatacaaactacaaatactttaaatgtacaaagtaaaagattttaaacatcttaagatatttgtcactggattttatttaagaactttgttctactgactacaacatatggagtaataaaatttctgagagtgattccatatgatttggatgctttcccttaagtaatttatggttctgtaagtaataaactcatttttaaacctaaaaaaccaaaccctttagaattagaaggaagaaaaagttatagcttgtattacaagact

SEQ ID NO: 378444 - DNA, 533 bp, Homo sapiens
atggtttgcacagtccttcaccttttccttccttgcgtkccccttgagctccattgttctcattgttgactaggacaaacgtaatcattttctcaatcaagcgcaatattactgtccaccaaaattgagtaactaaggaactttgcaagtctccttgcatacccctagggttggaatgtgttttttttccatcatggtacccctgggaactctgcgtaccaaggaggaaaccatgactttgtagctgggagaagagtgagagagtctttcacactaaccaattccacgggttcccacattgaaggaaacaagaatggtggaaaagaataaagggaaagaaaacagaatagagggcaccagatattatgtctcatgttttatagaggaggttgttgttatgagctattctcattatgaaaaccaccaaatcttttctttctctggctctttattgtgcattcggagatcccttaggctatttcatcaagtatccatgaataaaaagcccccacaagacagacacaaaaggaaag

SEQ ID NO: 378445 - DNA, 533 bp, Homo sapiens
atggtttgcacagtccttcaccttttccttccttgcgtgccccttgagctccattgttctcattgttgactaggacaaacgtaatcattttctcaatcaagcgcaatattactgtccaccaaaattgagtaactaaggaactttgcaagtctccttgcatacccctagggttggaatgtgttttttttccatcatggtacccctgggaactctgcgtaccaaggaggaaaccatgactttgtagctgggagaagagtgagagagtctttcacactaaccaattccacgggttcccacattgaaggaaacaagaatggtggaaaagaataaagggaaagaaaacagaayagagggcaccagatattatgtctcatgttttatagaggaggttgttgttatgagctattctcattatgaaaaccaccaaatcttttctttctctggctctttattgtgcattcggagatcccttaggctatttcatcaagtatccatgaataaaaagcccccacaagacagacacaaaaggaaag

SEQ ID NO: 378446 - DNA, 576 bp, Homo sapiens
tagaattcattactgctttttaaaaaaatgcattaattttaggtctggagttcaaaatctgcctcacaatgccaaggtttactacaactatgccaatttcctgaagacccaggtcagaacaaggaaggaacytaccgctatagaacggccctcacataaaccatacaggaagggtactggccactgtactttgaagatacttatttcactcatcccatcccaatatatggggagtttgtttgtttctcttgacagtgaactgatccttggaggtggtgtagctcttggactgtgagtcttttagctcaatattcaagtttggtattaattcaataactctactttgcatctaactcttggtgtttcctggaaaattttccagtgctacacattatgcagtgaagtgacactcagttgagtatatatatgcaggaagacagaaattggttgctaaaaatatagtggtaagttctcagggcatgtattccagtgaattattaatagagtgtatgggaaaatcttggcttgccactgcatgaggaagatttctatggaaacatttaaagcaatgaagat

SEQ ID NO: 378447 - DNA, 522 bp, Homo sapiens
caaaatctgcctcacaatgccaaggtttactacaactatgccaatttcctgaagacccaggtcagaacaaggaaggaacctaccgctatagaacggccctcacataaaccatacaggaagggtactggccactgtactttgaagatacttatttcactcatcccatcccaatatatggggagtttgtttgtttctcttgacagtgaactgatccttggaggtggtgtagctcttggactgtgagtcttttagctcaatattcaagtttggtattaattcaataactctactttgcatctaactcttggtgtttcctggaaaattttccagtgctacacattatgcagtgaagtgacactcagttgagtatatatatgcaggaagacagaaattggttgctaaaaatatagtggtaagttctcagggcatgtattccagtgaattattaatagagtgtatgggaaaatcttggcytgccactgcatgaggaagatttctatggaaacatttaaagcaatgaag

SEQ ID NO: 378448 - DNA, 644 bp, Homo sapiens
ggcagatattactgggcttgattttccttttctggcttgtgaggatacagaagaacattctcctgagctgcaaagaggtaaatctcttctctcgacacccctgttagggtctccaaggtgaccaagtataagcctggccgccatcagcacagctgcatatctggctaatcagctgacagcagcctttctcaattccatagactactgcagttgaattccagctccaggcaaagtataacctggaagctccttgctgtcgctttctcttcttcctcctagctcagcttccagagcatggggcacagctgagaaagcacaaagatagcacacacaggtataggcagatgcagacacatacacacaaagacccagactccaatactgaggtgagagaatcttgggtcagggttagaaataaaaaaatttaatggttatttgctaagaaaccgagtcacttctgccacagcttaataattctgtttttggctacatccctgattaagacctgaactgccacaacaccatgctgcagaggggcttaagggcagccctcccatgacaygagcacaggtcatatctgtatctcaaacgcagacctgaataaaagacgctttaacattttctctctctgcggcaacaggaca

SEQ ID NO: 378449 - DNA, 519 bp, Homo sapiens
tgctctcacagcaaagcaaagcaaagcaaagctaacattcatatttgttgaaaatttaagttaagcattctttctttctttgtttgtttgtttstttctttctttttcttttctttcttttttttaaatgatttagggttttaactgaatctgtaacttaataatgcagcacttttccaggggaggtttctcacactatacaaaaatacttaaattggctatggctaaagggaaggtgcagaggcaattctgcaagattgtaaaaataaaataaaaatgtaaaagaaacaatagagtcatgttgtatataattaccagtttactatgagctagtttgagaaatataagccagccaaaaaaaaaaaatgattggctggcaataaatacaatttgaatgattaacttcactactgctttgggaatctgtacaatcactgatagctgtagtagatgattgttggaactgatttttagatcctttaactttgtatttccccattattctccttcttgctgtct

SEQ ID NO: 378450 - DNA, 634 bp, Homo sapiens
ggattacaggtgtgagccaccatgcccaaccgaactctttattcttagtaaaagttctgaatgacgtcatctgctgctgagtgtgtatggggcatagagaaaggtagcaaaggggcacgatgaggaaagaaagtatttattcacagaagaaaaattttaattttttcatcatgttttccttaaagttttctaagtgttgccatttatctcaagtttgtcatattcttgaaaccgtggagccctacgtgaaggcctagcaaaagctgaaagcaggcagtggggttacctagggttggggcctggtcaaacagttacaagaagaatcagsatgtgaaaaagtctagggtgacactacacacattaatgagatggccgagtgtggttaaagatggcttagggattgtgaagaaagtgagaagcagagagaccagaaaccctaacaatagtaacaaccagggccagcatgaacgagggagtggaagtggagaaaccctgccatttaaagtcaaggagtggaatgcagggttaaggtctgagaagagggtggtgagtacagagaagagttgagcagcttcagttcttgatcataatccctccaaagatcaaggtcagcaagagtgagagggtggaagaa

SEQ ID NO: 378451 - DNA, 634 bp, Homo sapiens
ggattacaggtgtgagccaccatgcccaaccgaactctttattcttagtaaaagttctgaatgacgtcatctgctgctgagtgtgtatggggcatagagaaaggtagcaaaggggcacgatgaggaaagaaagtatttattcacagaagaaaaattttaattttttcatcatgttttccttaaagttttctaagtgttgccatttatctcaagtttgtcatattcttgaaaccgtggagccctacgtgaaggcctagcaaaagctgaaagcaggcagtggggttacctagggttggggcctggtcaaacagttacaagaagaatcagcatgtgaaaaagtctagggtgacactacacacattaatgagatggccgagtgtggttaaagatggcttagggattgtgaagaaagtgagaagcagagagaccagaaaccctaacaatagtaacaaccagggccagcatgaacgagggagtggragtggagaaaccctgccatttaaagtcaaggagtggaatgcagggttaaggtctgagaagagggtggtgagtacagagaagagttgagcagcttcagttcttgatcataatccctccaaagatcaaggtcagcaagagtgagagggtggaagaa

SEQ ID NO: 378452 - DNA, 559 bp, Homo sapiens
gggtttttctggttaggaagttttatcgggaggtccttgaaatattctgagggagagtttatggtaaatgttttaacagggtacagtagccaaaatatgatacttgatgtagacagaaacccagatggtggctgagatgtcaggaaatgcgattttctattttatctggggaaaagcttttccctgaattccagaacctacagtgacctggcctcacagatagtctgatttgaagcctctacacaaaagcatcttcctctgcttgttagggagaggatctggactactacttctgggatcatttggcaactggattagctccctctaagttgcagccgaattcaaatgctttagctaagaaagaaagtcattcatctgaaggcctgtgggctgataagcactaataaaatgatgagagatggtaccagacgacaagagctctgcaaatactattcctttatcactagtactttgaagatgcttatcttcacaaaaactctgaaaagtaggtatcattatctactttgtaaagygatgactttacaaacttgctaactaa

SEQ ID NO: 378453 - DNA, 544 bp, Homo sapiens
cacctgtgggcataaggagtccttccaacttccactgcccttgcccgccttcaggcccatcccatttcagatctcccagcagattctctgctttcaacctctctaccagcatccaatcctgtcacataaggctgaagcttccagggccaccttatcatcatagatggctagaactgggagggcatttgcatttcaaagatgaggsaagagtggatcaaaaagagaaagtggattgtaccaaggacacccttgatatgatcaaggttagtggcagagcaagcatgagaactcacatctgtgacgccatccaggtttccttcttctgtacccctcagcactcttcctaaagtcttgctgctatgactcctccaagcctcacaatgaaattcggtccccagtgttggaagtgggacctaatggaaggtatttgggtcatgggggcagatccctcatgacaggctgatgctgttctcacggtgatgagtgagttctcagtctgttagttcctgagaaatctggttgctaaaaaagaggctgccacctc

SEQ ID NO: 378454 - DNA, 544 bp, Homo sapiens
cacctgtgggcataaggagtccttccaacttccactgcccttgcccgccttcaggcccatcccatttcagatctcccagcagattctctgctttcaacctctctaccagcatccaatcctgtcacataaggctgaagcttccagggccaccttatcatcatagatggctagaactgggagggcatttgcatttcaaagatgaggcaagagtggatcaaaaagagaaagtggattgtaccaaggacacccttgatatgatcaaggttagtggcagagcaagcatgagaactcacatctgtgacgccatccaggtttccttcttctgtacccctcagcactcttcctaaagtcttgctgctatgacycctccaagcctcacaatgaaattcggtccccagtgttggaagtgggacctaatggaaggtatttgggtcatgggggcagatccctcatgacaggctgatgctgttctcacggtgatgagtgagttctcagtctgttagttcctgagaaatctggttgctaaaaaagaggctgccacctc

SEQ ID NO: 378455 - DNA, 593 bp, Homo sapiens
actatagtatactgtctgcatgtgatgacttaaacttataaatataatacagtccaagttttctggaatgttccactaatgtttataattttgataaaattcttctcataaaattcttctcatacctccttaaacttaaaatcctgtctaaataagtaacacaacctgcacttaattataaactggaaccacaaggctaatctttagataaactaatatcccacatttcttaaatgtatttcaaatgccaaatatacctagttttcccccccttactccaaaaatattaatactatgttcattttattatttgtatcctatgtgatatatttcatcatctgtacacttaattttaagagagtatgttttaaaatgcctacttaaaaaaccattctctcacctcaagtgatgaggrgttacctttccagttgaattggggtgacaccagctgggtgaggtgtggctcggccaagggtctggatgtggaggcaccgagtccagaataccagcgccaaaagggattctccagtggcttgtgttcccagcccctgttcccgattctcaggtctgatgaatctgcaagccctacctac

SEQ ID NO: 378456 - DNA, 606 bp, Homo sapiens
ttaggtgtgagccttttgaggggacctgttacaggggcacctgcttataatgaccttggacacaaagaagccgtgcgcatggtgaatttgtgcagcagggtagagataataactcctgtaagactatagtatgaggcggctctgctaaacctctgcatcgtgaaaaaccgtgttggctggattaagcaaatgagaaggaayattgtaccagaacgcattgatcttgataatctaacaattcgtgcagcccactggtttccaggaaggtgggcatcaggacattgatgtttttgctctgcaaattcctcagtgggaccagaaatacatttttagtgttttagataatgattagcaattagttggagcacatagtccttcagtacctgcaaattttaaaatctggtgtatttcttttctggaagagattctgattcttggtagataaaatgtagtattgcaactaagtgtgttagacattcattttcagtgtattttcaaaatatgctgagcaggtatgtttgcagaagcaaaattaaagcaaaacaaaataaaatgtaccaccacactaaattttaaagtgtttgtagatcctgttgtttataatta

SEQ ID NO: 378457 - DNA, 606 bp, Homo sapiens
ttaggtgtgagccttttgaggggacctgttacaggggcacctgcttataatgaccttggacacaaagaagccgtgcgcatggtgaatttgtgcagcagggtagagataataactcctgtaagactatagtatgaggcggctctgctaaacctctgcatcgtgaaaaaccgtgttggctggattaagcaaatgagaaggaatattgtaccagaacgcattgatcttgataatctaacaattcgtgcagcccactggtttccaggaaggtgggcatcaggacattgatgtttttgctctgcaaattcctcagtgggaccagaaatacatttttagtgttttagataatgattagcaattagttggagcacatagtccttcagtacctgcaaattttaaaatctggtgtatttcttttctggaagagattctgattcttgstagataaaatgtagtattgcaactaagtgtgttagacattcattttcagtgtattttcaaaatatgctgagcaggtatgtttgcagaagcaaaattaaagcaaaacaaaataaaatgtaccaccacactaaattttaaagtgtttgtagatcctgttgtttataatta

SEQ ID NO: 378458 - DNA, 570 bp, Homo sapiens
gggtttcatcgtgttagccaggatagtctccatctcctgacctcgtgatctgcccgcctcggcctcccaaagtgttgggattacaggcatgagccaccatgcctggccatgcatttttttwaaaagcaggttatttatatatagctgacataatataaagcaacatattttaagtgtacactttgataaatttcatcacatgaacacacccataaaaccatcgccacaatcaggataatgaacatatctatcacccccaaaagcttccttatgaccttctgtgatccatctgtgtctctccacaccttgtccccaggtcaccatggatctgttttctttcgctatacatttatttgttttacacaaatgggatcatatagaatgtacttttctttatgtctggcttctttcaataagcttaaatattttgctatccatgctatggtgtatatcattattggttcatttcttttgattgctgagtagtattccactatatgaatgtaccatagtttgttattcactcacttgttgatgaacatttgggttgtaccaggttggggctattaa

SEQ ID NO: 378459 - DNA, 575 bp, Homo sapiens
attagcccattctacagataaggaacctcaaggtcagagaggttaagcacctggctcaaagtcacagtgcaagtaagcactgtatttgctggtagctcctagaggtctgtacagcacaagctccctcttctaattcctgcccagtgacccagttctgactttaatatcttgaattattctgcccgctcctcaccccyggggttattgtttcctttctgtgtatttgcaatggcaaagtcaaaatcccaactatctgccataaaatatgaagaaaagtattacttttaactagaaggctgtggtcacggcagccggaacctagcagggcgggtgggtcagctgacagtaagggtcttacaaacccatgccgcttgtctctccccaccaacctcatcttgccacttctgcaaagtcattgagggaacaactgctgactctgaagaacagccaagaagcacaactctgaagctggtgcactcatgccgagctgtcctctgggcctactgccttcgagcctggagtcctcccattgctgtgtcttggttggttttatagtttctttaagactaaaaata

SEQ ID NO: 378460 - DNA, 603 bp, Homo sapiens
tctggtgtttgaagagccctgaagcattgttcctaattggggcaatggggctgagcttttatgaccacgcagcaatgacccattatgctcagggctgcccttaaggaaggtgtgtggcattgagcgaggcaactctcttcagctgagggcagcctctgggactggactcagccatatgctgtcaatggtcaacactcttagtagctgggggaatgagtgctttgatcctgggggtggggagacagaatttggctggggcgccacaacatccatgccagtccatgcctcatgttgctcagatccactcctttggtgtgtgtcctgaaagcagatcttttaggattctagtggacctctttttctagagaaacttaaaagaggaaggttaatgctgtaaactaatgtgttgcctgctgcacctgatcccaaggacaaaacagatactcagcatcttcktcgtctcctatcactcccctcagtctcagctactgcctctgcaggtttagatagcttacctggtgagggtgcccagaccttcatatccgagggatttgaaatcttgttcctctgcccttctcaggcaatgactcctacacttaccta

SEQ ID NO: 378461 - DNA, 500 bp, Homo sapiens
cacctttactgcaagtcttctcagcaccctctttttttctttccttttctttttttagagatggggtcttgctatgtcaccaggctgaagcgcagtgggtattcacaggtgcaatcccactactcatcggcatgggagttttgacctgctctgtttccaacttgggccggttcacccctccttatgcaacctggtggttcccctctcgggaggtaccatattgatgccaaacttagtgcagacacccgacaggcatagcacactatagcccagaactcctacgctcaagtgatcttcctgcctcagcttcctgagtagctgggaccacaggtgyaggccaccatgtccgaaatcttggagcctttatggtgcattgcattgtatgctgtgaatcaccaagaaggggctaatataccacaacacttccccaacttttttttaagctatggagctctggttgagataaggattgtgaaaaacacttaaagaaactgtcctgt

SEQ ID NO: 378462 - DNA, 583 bp, Homo sapiens
gcagactcctggttcatgtgattgtggcaagttacctaacctttctttgcctcaatttccctgtatgtaaaatgggacaataatacttcctactatatatgcttgtgagttaatttatgtgaaatgcctagagtagtgcctggcaatcaataataaacaatcaactataataagtaattaatagctactattatttttaaatcatttattttattttttaattgacaagtaattattgtacatattcatgaggtacatagtgatattttgatacatatgatgtgttgtgattagatcagagtaattagcatagacatcatctcaaacatttatcatctcaatgtttcaaatattcgatatcctccttctagctatttgaaactaaatatatttttgttacctatagtcttcctacagtgctgtagracactagaatttattcctcctatctagctataattttgtatcctttaaaaaatcttggctgggtgtggtggctcatgcctgtaatcccagcactttgggaggccgaagtgggaggattgcttgagcccagaagttcaagaccagcctggacaacata

SEQ ID NO: 378463 - DNA, 642 bp, Homo sapiens
gcaagaatgccccaccctctgtatatgatcaggtttctcatcctccaccctccaccatcccccaggtgacttcagaccaccctggcctgccttcagcaagaatcctgttaggtctgtgtattagtcagttcttgcactgctatacagaagtacccgagacgggggtatttataaagaaaagaggtttaattggcacacagttccrcaggctgcacagggagcatgatactggcatctgcttggtttctgagaaggcctcaggaaacttacaatcatggcagaaggtaaagagggagccagcatatcacatggctagagcagaaggaaaaggagcaaggggaagaggtgccacacatttttaaacaaccgggtcttgcgatcactcactcactatcccaagaacagcaccaacgggatggtgctaaactattcatgaaggaccaccccatgagccaatcatctccccccaggccccacctccaatactggggattacaattcgacatgataatttggtggggacatagatctaaaccataacagtcagtttagccagaattctccttactaatttcttagtaattttccatccacccactcccaccatgctccttggctataaattcctacttacccatgtta

SEQ ID NO: 378464 - DNA, 625 bp, Homo sapiens
accatgccaactagggctgggattttaacatgggtctctcccactctaaaattgatgttagtcacgagtttcagggaaggcacaaaactagaggtgattgctttaattgaatttaaaagattttaggtaaagtccatttgaatcctgaagrttgcttactactatgagatactgcttctttgcaggattgttttgagattagggaaacccattgatatggtttggctgtgtccccacagaagtctcatcttgaattatagctcccataatccccatgtgtcatgggaggaacccagtgggaggtaatttaatcataggggcaggctttctcatgctcttctcatgatagtgaataatttcaggagatctgatagttttatgaagggctggtcccctacacatgctctcttgcctgatgccatgtaagatgtgcctttgctcctccttcaccttctgccatgattgtgaggcctccccagccatgtggaactgtgagtccattaaacctctttcctttatcaattaccagtcttggatatgtccttatagcagcatgagaatggactaatacacccatataaaggacctagcataaggcctgacacatagttggtactgagtaaat

SEQ ID NO: 378465 - DNA, 575 bp, Homo sapiens
gctactcaggtgtcatcttgtcaggaagccgtcgctgagcctcctcctggtctcagtgttgctcccctgtgtgctcataataccgtctgtgaatccactgttgcacgttccccactgtgctggaaacagctatttatcactttttccttccttaggccaagagctttgtcaggttaagaaccatttatgccttttttacctttctaccctctacctgttacagtgcctgacacacacagcctactcaatrttgaagaaatgaatgaataaatggatgaataattatacaaggacccagtcctcctcccaacactcacacacacattgaaaaacaatcagtttgtttttggtaagttttgcttcttctcttgatcccatgtagcccaagcacttatggtgcatacactcagcagcagtgcatactgtgatagagaagcacacccggaacatgcacacgcatacacacatatgtacacacatacacacccatgcacacatactgggattggacactacctcttgatcatagagcacttcttggctgctcttccttaaatgcaaagcacatgcacttc

SEQ ID NO: 378466 - DNA, 575 bp, Homo sapiens
gctactcaggtgtcatcttgtcaggaagccgtcgctgagcctcctcctggtctcagtgttgctcccctgtgtgctcataataccgtctgtgaatccactgttgcacgttccccactgtgctggaaacagctatttatcactttttccttccttaggccaagagctttgtcaggttaagaaccatttatgccttttttacctttctaccctctacctgttacagtgcctgacacacacagcctactcaatgttgaagaaatgaatgaataaatggatgaataattatacaaggacccagtcctcctcccaacactcacacacacattgaaaaacaatcagtttgtttttggtaagttttgcttcttcycttgatcccatgtagcccaagcacttatggtgcatacactcagcagcagtgcatactgtgatagagaagcacacccggaacatgcacacgcatacacacatatgtacacacatacacacccatgcacacatactgggattggacactacctcttgatcatagagcacttcttggctgctcttccttaaatgcaaagcacatgcacttc

SEQ ID NO: 378467 - DNA, 649 bp, Homo sapiens
gggtatctacccagaaggaaaagaagtcattatttagaaaagatacttgcacatgcatgtttatagtagcacaattcacaattgcaaaatcatggaaccaacccaaatgcccatcaatgaacgagcatcttcttcccttccattgaccaaaaacaagtttttaaaaagaaaaaatgtacaataccacatgccacttyctgataacatcctacaggctctggtggttgtctactgagtaggagggctcaagtcattattaggagaaaattttctagcaacagaatcacattaaaccagcaaacctcttgatcagggaaatgcaaatcaaaaccacaatgcgataccaccttactcctgcaagaatggccgtaatcaaaaaatcataaaacagtagatgttggcgtggatgcagtgatcaggggacacttctatactgctgacgggaatgtaaactgctacaaccactatgtaaaacagtgtggagattccttaaagaactaaaaatagaaccaccatttgatccagcaatcccactactgggtatctacccagaggaaaagaagtcattattcaaaaaagatacttgcacacacatgtttatagcagcacaattcacaattataaaactgtggaaccaacccaaatgccc

SEQ ID NO: 378468 - DNA, 649 bp, Homo sapiens
gggtatctacccagaaggaaaagaagtcattatttagaaaagatacttgcacatgcatgtttatagtagcacaattcacaattgcaaaatcatggaaccaacccaaatgcccatcaatgaacgagcatcttcttcccttccattgaccaaaaacaagtttttaaaaagaaaaaatgtacaataccacatgccactttctgataacatcctacaggctctggtggttgtctactgagtaggagggctcaagtcattattaggagaaaattttctagcaacagaatcacattaaaccagcaaacctcttgatcagggaaatgcaaatcaaaaccacaatgcgataccaccttactcctgcaagaatggccrtaatcaaaaaatcataaaacagtagatgttggcgtggatgcagtgatcaggggacacttctatactgctgacgggaatgtaaactgctacaaccactatgtaaaacagtgtggagattccttaaagaactaaaaatagaaccaccatttgatccagcaatcccactactgggtatctacccagaggaaaagaagtcattattcaaaaaagatacttgcacacacatgtttatagcagcacaattcacaattataaaactgtggaaccaacccaaatgccc

SEQ ID NO: 378469 - DNA, 588 bp, Homo sapiens
agcttactgcaaccttcaactcctaggctcaaacaatcctcctgtctcagtctcccaagtaacctggactgtgggtgcatgccacaatgcctggctaatttttaatttttgtagagacagaatcttgctatattctccaggctggtcacaaactcttggctttaaccttctgcctcagcctctggagtttctagrattacaggtgtgagccaccacaactgggtcttgttttgttttagtccctctattgctttttttttccagtagggtttgaatcggaatagaggtaaatgtgtttgcttaaatcttccttctttaactgtatttcagtctttttctatgtatatagttatctatgtgctttgttttttccccaaaataggattttactttattggtttaaccaattttatgcttatattatgaattgtttttcatattttaaaactttttttcacaacatgaatgaatgcctactagtccattggctgcatatagttgagtgcaaattagaaatactaaaatactgtacgtgtaatatgagctttgaggaaataatgactaatggtaggacaggatgaaattatg

SEQ ID NO: 378470 - DNA, 586 bp, Homo sapiens
tgacttttcctattaaggtagttctttctgaaaagtcattaaaactgatacctcagctaacctaagttattggagatcagcacttgaaggaaaagattattgttatcaagcttgcgaaagtggagaaaagacacctgcaatgtaattgtaaaggctgaggatgaggtactgggtgtggtggctcacgcttgtaatctcagcaccttgggaggctgaggcagaaggatcacttgagcccagaagttcagaactgcagtgagctatgattgtgccactgtactccagcctggcagacagacagagaccctgtctctaattaaaaaaatttaaaaaaaaaatttttttaaaaggctgaggatgaaaaagtgatagttgatttttggaarcaaggcattttactctaagaagtctcttacctcatttaaacttaataccttttcctccacttcttgattcctaattgtacatcagtcaaaactgtataaaagcgagctttaaggcaacaaaggatgttgtgaacatgtttagtaattttattttcccagaacgcctttgtgctttcaattaattatgcctcctgatagaa

SEQ ID NO: 378471 - DNA, 581 bp, Homo sapiens
ttggttcatgtggttgtgacccagaactctttggcggagggcatttcagagaccttaaggactctcagtgaaatgagacactatcaaaggctgccagattatgtggtggtaatttgtgcatcgaaaatcagaggaaatgaattttgtgtggtagtgttaggtgagtaatttttttgttttttgtttgtttaatcaattcattcgaccatttttccatttaaaaatgtgtgttatgtgtttcaggcatccacataatcaacctctgattaattgctggagcttgggctcatcctcctaattttaactttccctttccttctcagatcaggttttgtgtagccctcagtttggctggtgcccctgtcagctggttgtgggagcattatttcaaagctctccctagtaacagatacccctgtctcatgtaactgctgtcctttaaagattttggaaatgttactactctagcatgtgataaagccagtgccacaggtggcytaagccagttaatcgaatttgccagaaaattagctcatatattccccttctcactgaacagtctatttaatattgtaacatag

SEQ ID NO: 378472 - DNA, 635 bp, Homo sapiens
accctggggtttgtaaaatgagaaggtagaagagagttgtgaggtacaccatcatttaagagtctcaaagaagactgcctaagaaggcatgagcagcaaggtaggagagccagaagagagtggtagaaaccaagggaaaaatgtcaagaatcaaagaatgatcaaccctgtcataccacagttgaagactgaagagagcccaagtgatgttaggaaaagagcagtctcagtggagtggtggaggcagcagggacacggtgagtgtacactaatggccacagaytgtagaagagggtgagtctgtaattgctgactatataaaggtgcttatagattttttgttagcagccctcatgtagttgttggttgtttataaaaatatctagcatagagacatggtaagagccacaaatatagtcaggaactacaagattttatgggcgatgcttttatctgcatggacacacagataaaaagcagtattttactacttcataatatgcaagagtgaacttggtttatctactgaaagcctgactgttgtaaggacagtcagcgcgtccaacaaacctgcagtgttattttaattgttcttgtttactttgcacggctgcccagctatagagtcttatcct

SEQ ID NO: 378473 - DNA, 544 bp, Homo sapiens
tttccttcaaccaacttttcaggtgaagtattcttaagtttaaagaagtccaattgttaacctaaaaaaaagtataataaactgttttcctcctgtttccagacatttgggacacactctagtataattactaaagtgtttcagataaacttaactgaacccattgctaacattatgaggtatttcttctgaaaaagcatccagaggttgaagaaaaacatactgagtatattattkgaaagtgtaatgaacatattaaacttatttaaaaataagtttaccttttggttcctgatttttaaaataacctatataataaaatggttccaggattcattatctggttcacttctcaacacaataaactctctgaacacttgaagtatggaactctaagttagactaacacctgcctcacactagataaaataaacttttatgtttccgcattatatttataaactggaatatatccttatatcttaaaaatattataagattaagtcatgtttaatttcaggtttactatgacctacttagcaat

SEQ ID NO: 378474 - DNA, 598 bp, Homo sapiens
gagcctatccctacatttcagcaatttcacttgcatcctgtggctatgtctgaaggtggcttccacatatgggagtttgagagccccttcacctttaaattaatgtctctgctcacctgaggtctcaaacacacccctttgggagcagcctgaccaacccccaaagtcattcagtcaacagatatttatttatgccttttgggtgctaggcacaggtcccagcacagggctgggtactgaatacatggtgagaacaaaaaagacctggcccctgcccttggagaacttagaaacatttttaatagcaaatacggaaatgtgtatacaattatatgtatattatacaatcataagcattacgaaggaaaattaaagtgtattaggaaataaatcaaagatggaatcttctcagagtgaaatctcagagaaacttccctgagaaaaataaatgaattagaaatgggaccctaatttgggtgaacatcagaattctgccttgtgcagtgtgaagattagcataaaattgcttcccctrtgtggaaagggactgatgcatagcaagcagttgatcctgttaatcagctaatttgaaagttct

SEQ ID NO: 378475 - DNA, 616 bp, Homo sapiens
gaatatttaaatctctggtaaagaaaattagtcattactgaattttttgttcaattaatttattggtgtttcccaaggtgctcaggattatggaatttgttaatgttgaatttggtcatttgttaggcagttttcaagcagaagaattttaaaataaaaacaattgtggattgtgaatatgccttcaaaataccatttaatcatcaagtagacaagtgagctaggaatggctcttttctgctgcactgtcaatatgatctatcactgattatgttcccagtgagtgtcagtttggttaatctccaaaaggcaagtgtaaaaatttmctttttggtttggaagcacatcatacttcattatattttcattgcactttgttatggctattctgatattatgggaagggaccaaactgcaggaaatataaatgtgtcatgctgtaaaggacaaattcaggagcaactcacagaattgcctctttacttatctccagaacggaatgacatcacttttcagaaagacacaaactactcacctgaaccaaaggaggtaaataggaattgtgatgcctacagttaacagatatcagtaacaagaagaaataataattgaaaat

SEQ ID NO: 378476 - DNA, 616 bp, Homo sapiens
gaatatttaaatctctggtaaagaaaattagtcattactgaattttttgttcaattaatttattggtgtttcccaaggtgctcaggattatggaatttgttaatgttgaatttggtcatttgttaggcagttttcaagcagaagaattttaaaataaaaacaattgtggattgtgaatatgccttcaaaataccatttaatcatcaagtagacaagtgagctaggaatggctcttttctgctgcactgtcaatatgatctatcactgattatgttcccagtgagtgtcagtttggttaatctccaaaaggcaagtgtaaaaatttactttttggtttggaagcacatcatacttcrttatattttcattgcactttgttatggctattctgatattatgggaagggaccaaactgcaggaaatataaatgtgtcatgctgtaaaggacaaattcaggagcaactcacagaattgcctctttacttatctccagaacggaatgacatcacttttcagaaagacacaaactactcacctgaaccaaaggaggtaaataggaattgtgatgcctacagttaacagatatcagtaacaagaagaaataataattgaaaat

SEQ ID NO: 378477 - DNA, 582 bp, Homo sapiens
cattctcaactatgtctccatctccacatatatatacttaccaaacacatattatgggtgagtcactcaggagctattcttctaatgcacgcaaagagaaacaaatggaacacaacagccttaacatttaatttttcttttttttcttttttttttttttttgagacgaagtcttgcttttgtcccccaggctggagtgcgatggcacaatctcggctcactgcaayctctgcctcccagattcaagcgactctcttgcctcagcctcctgagtagctgggattataggcgcctgccaccatgcccggctaatttttgtatttttagtaaagacggggtttcaccatgttggccaggctgatctcgaactcctgacctcaagtgatccacctgcctcagcctcccaaagtgctgggattataggcgtgagccaccaggcctggccaatttttcttgtttttaaaaataacattaaattccgtgttagactacagcttctcaattaacttccagtttaaaacccaaattgggagaaggcttgttccattagttaattatcccctctaaaatagagagataatt

SEQ ID NO: 378478 - DNA, 582 bp, Homo sapiens
cattctcaactatgtctccatctccacatatatatacttaccaaacacatattatgggtgagtcactcaggagctattcttctaatgcacgcaaagagaaacaaatggaacacaacagccttaacatttaatttttcttttttttcttttttttttttttttgagacgaagtcttgcttttgtcccccaggctggagtgcgatggcacaatctcggctcactgcaatctctgcctcccagattcaagcgactctcttkcctcagcctcctgagtagctgggattataggcgcctgccaccatgcccggctaatttttgtatttttagtaaagacggggtttcaccatgttggccaggctgatctcgaactcctgacctcaagtgatccacctgcctcagcctcccaaagtgctgggattataggcgtgagccaccaggcctggccaatttttcttgtttttaaaaataacattaaattccgtgttagactacagcttctcaattaacttccagtttaaaacccaaattgggagaaggcttgttccattagttaattatcccctctaaaatagagagataatt

SEQ ID NO: 378479 - DNA, 589 bp, Homo sapiens
aatacaaaatagccatgcatctgagtaagggcctatytgctagccattactcttaagcaacatccactggatcacagcccaaatcacataaaaaattattcttccaataaacattcctatgacactcagggcaagaatccaatcacaaataaagatcttgtacagagacttagccctctgaaagcatccagaaataaagccaattgactatactcaacttatgccatagttaaagatacaccagccctttcagatgaaaaagaatcagtccaagatctctacaactcaaaaatccaaagtatccccttatctacaaatgattccactagcttcccaacagtggttcttaggcagattagaatgactgaaatgacagacatagaattcagaatatggctgccaaggcagttcattgagcttcaggaaaaagttgaaacccaaaccaaggaatccaaagaatccagtaaaacaatccaagagctgaaagacaaaaatagacattttaagaaagaaacaaactgaacttctagaattggacaattcactacaagaatttcataatataattagaagtgttaacagcagaata

SEQ ID NO: 378480 - DNA, 339 bp, Homo sapiens
caataaacattcctatgacactcagggcaagaatccaatcacaaataaagatcttgtacagagacttagccctctgaaagcatccagaaataaagccaattgactatactcaacttatgccatagttaaagatacaycagccctttcagatgaaaaagaatcagtccaagatctctacaactcaaaaatccaaagtatccccttatctacaaatgattccactagcttcccaacagtggttcttaggcagattagaatgactgaaatgacagacatagaattcagaatatggctgccaaggcagttcattgagcttcaggaaaaagttgaaacccaaac

SEQ ID NO: 378481 - DNA, 589 bp, Homo sapiens
aatacaaaatagccatgcatctgagtaagggcctatctgctagccattactcttaagcaacatccactggatcacagcccaaatcacataaaaaattattcttccaataaacattcctatgacactcagggcaagaatccaatcacaaataaagatcttgtacagagacttagccctctgaaagcatccagaaataaagccaattgactatactcaacttatgccatagttaaagatacaccagccctttcagatgaaaaagaatcagtccaagatctctacaactcaaaaatccaaagtatccccttatctacaaatgattccactagcttcccaacagtggttcttaggcagattrgaatgactgaaatgacagacatagaattcagaatatggctgccaaggcagttcattgagcttcaggaaaaagttgaaacccaaaccaaggaatccaaagaatccagtaaaacaatccaagagctgaaagacaaaaatagacattttaagaaagaaacaaactgaacttctagaattggacaattcactacaagaatttcataatataattagaagtgttaacagcagaata

SEQ ID NO: 378482 - DNA, 589 bp, Homo sapiens
aatacaaaatagccatgcatctgagtaagggcctatctgctagccattactcttaagcaacatccactggatcacagcccaaatcacataaaaaattattcttccaataaacattcctatgacactcagggcaagaatccaatcacaaataaagatcttgtacagagacttagccctctgaaagcatccagaaataaagccaattgactatactcaacttatgccatagttaaagatacaccagccctttcagatgaaaaagaatcagtccaagatctctacaactcaaaaatccaaagtatccccttatctacaaatgattccactagcttcccaacagtggttcttaggcagattagaatgactgaaatgacagacatagaattcagaatatggctgccaaggcagttcattgagcttcaggaaaaagttgaaacccaaaccaaggaatccaaagaatccagtaaaacaatccaagagctgaaagacaaaaatagacattttaagaaagaamcaaactgaacttctagaattggacaattcactacaagaatttcataatataattagaagtgttaacagcagaata

SEQ ID NO: 378483 - DNA, 566 bp, Homo sapiens
aattgactatactcaacttatgccatagttaaagatacaccagccctttcagatgaaaaagaatcagtccaagatctctacaactcaaaaatccaaagtatccccttatctacaaatgattccactagcttcccaacagtggttcttaggcagattagaatgactgaaatgacagacatagaattcagaatatggctgccaaggcagttcattgagcttcaggaaaaagttgaaacccaaaccaaggaatccaaagaatccagtaaaacaatccaagagctgaaagacaaaaatagacattttaagaaagaaacaaactgaacttctagaattggacaattcactacaagaatttcataatataattagaagtgttaacagcagaatagaatagaccatgccaagaaaagaatcttagagctcaaggactagttctttgaatcaatggagccttacaaaaataaakaaaaataatttaaaaaaatgaataaaacctccaagaaatatgggattttgcaaagagatagaatttatgactcactggcattgctgaaagagggaagagg

SEQ ID NO: 378484 - DNA, 595 bp, Homo sapiens
aatgacagacatagaattcagaatatggctgccaaggcagttcattgagcttcaggaaaaagttgaaacccaaaccaaggaatccaaagaatccagtaaaacaatccaagagctgaaagacaaaaatagacattttaagaaagaaacaaactgaacttctagaattggacaattcactacaagaatttcataatataattagaagtgttaacagcagaatagaatagaccatgccaagaaaagaatcttagagctcaaggactagttctttgaatcaatggagccttacaaaaataaataaaaataatttaaaaaaatgaataaaacctccaagaaatatgggattttgcaaagagatagaatttatgactcactggcattgctgaaagagggaagagggtaagcaacttggaaaacatatttgaacatatagtccacaaaaatttccccaatcttgttaggttgacatacaaattcaagaaatacagagaaccttggtgagatactatacaagaccaccatctctgaggcacatagtcatcagattcaycaaggaaaacatgaaagaaaaaaatcttaaaggcagctagagaga

SEQ ID NO: 378485 - DNA, 594 bp, Homo sapiens
caatcattgacacagaaatctaacgacgaaattctgtacttgaacttgacactcaaccaattggacctaaaagacatgcacagaatgctctaccaatcaaccacaaactatacattcttctcatctgcacacagaacatattctaagatcaactacatgcttgatcataaagcaagtctcaataaattcaaaaaattgaaattataacaagsacaatctcagaccacagtgcattaaaaacagaaatcaatagcaagaagatctttcaaacatacacatatacacgaaaattaaacaacttgcttctgaacaactcttttaaggcagaaataaaaaaaaaattgtttgaaattaatgaaaatagaggcacaacttaaccaacatccttggaatgcagctaaagcagtgttaataggaaagtttatagcactaaaatgcctacatcaaacagttagaaagatctcaaactaacaaactaaaatggcacctagaggacaaagaggaaaaaaaaagagaaaaaaccccccaaagctagccaaagaaaagaagtatctaaaactatagaggaactgaatgaaattgagatgcaaaaat

SEQ ID NO: 378486 - DNA, 594 bp, Homo sapiens
caatcattgacacagaaatctaacgacgaaattctgtacttgaacttgacactcaaccaattggacctaaaagacatgcacagaatgctctaccaatcaaccacaaactatacattcttctcatctgcacacagaacatattctaagatcaactacatgcttgatcataaagcaagtctcaataaattcaaaaaattgaaattataacaagcacaatctcaraccacagtgcattaaaaacagaaatcaatagcaagaagatctttcaaacatacacatatacacgaaaattaaacaacttgcttctgaacaactcttttaaggcagaaataaaaaaaaaattgtttgaaattaatgaaaatagaggcacaacttaaccaacatccttggaatgcagctaaagcagtgttaataggaaagtttatagcactaaaatgcctacatcaaacagttagaaagatctcaaactaacaaactaaaatggcacctagaggacaaagaggaaaaaaaaagagaaaaaaccccccaaagctagccaaagaaaagaagtatctaaaactatagaggaactgaatgaaattgagatgcaaaaat

SEQ ID NO: 378487 - DNA, 594 bp, Homo sapiens
caatcattgacacagaaatctaacgacgaaattctgtacttgaacttgacactcaaccaattggacctaaaagacatgcacagaatgctctaccaatcaaccacaaactatacattcttctcatctgcacacagaacatattctaagatcaactacatgcttgatcataaagcaagtctcaataaattcaaaaaattgaaattataacaagcacaatctcagaccacagtgcattaaaaacagaaatcaatagcaagaagatctttcaaacatacacatatacaygaaaattaaacaacttgcttctgaacaactcttttaaggcagaaataaaaaaaaaattgtttgaaattaatgaaaatagaggcacaacttaaccaacatccttggaatgcagctaaagcagtgttaataggaaagtttatagcactaaaatgcctacatcaaacagttagaaagatctcaaactaacaaactaaaatggcacctagaggacaaagaggaaaaaaaaagagaaaaaaccccccaaagctagccaaagaaaagaagtatctaaaactatagaggaactgaatgaaattgagatgcaaaaat

SEQ ID NO: 378488 - DNA, 594 bp, Homo sapiens
caatcattgacacagaaatctaacgacgaaattctgtacttgaacttgacactcaaccaattggacctaaaagacatgcacagaatgctctaccaatcaaccacaaactatacattcttctcatctgcacacagaacatattctaagatcaactacatgcttgatcataaagcaagtctcaataaattcaaaaaattgaaattataacaagcacaatctcagaccacagtgcattaaaaacagaaatcaatagcaagaagatctttcaaacatacacatatacacgaaaattaaacaacttgcttctgaacaactcttttaaggcagaaataaaaaaaaaattgtttgaarttaatgaaaatagaggcacaacttaaccaacatccttggaatgcagctaaagcagtgttaataggaaagtttatagcactaaaatgcctacatcaaacagttagaaagatctcaaactaacaaactaaaatggcacctagaggacaaagaggaaaaaaaaagagaaaaaaccccccaaagctagccaaagaaaagaagtatctaaaactatagaggaactgaatgaaattgagatgcaaaaat

SEQ ID NO: 378489 - DNA, 594 bp, Homo sapiens
gaaattgaatcagtaataaaaaactaccaactaaaaatagtcgtgggccagatagattcacaaccaaattctaccagatgtacaaagaataactggtaccaattttattgaaactattcccaaaaattgaggaggaggggctcctccataactcatcctatgaagatagcatcaccctgacagcaaaagctggcagagacacaatgaaaaaagaaaacttcagtttaatatctctgctgaacatagacacaaaaatcctcaacgaaacattagcaacccaaatccagcaaaacatcaagaagttaatacaccacaatcaagtaggctttattcctgggatgcgaggctgtttcgcatacacaaatcaataaatatgattcatcagataaayaaaattatagcaaaaacagataaatctatcaaaagtgggcaaaagacacgaacagattgcacaaaagaagataaatggccaaaaaacatatgaaaaactgttaatcctcacaaatcatcggagaaatgcaaatcaaaacaacgggataccatctcacacctgtcagaatggctattattaaaaagtcaaaaaatagcagatgc

SEQ ID NO: 378490 - DNA, 594 bp, Homo sapiens
gaaattgaatcagtaataaaaaactaccaactaaaaatagtcgtgggccagatagattcacaaccaaattctaccagatgtacaaagaataactggtaccaattttattgaaactattcccaaaaattgaggaggaggggctcctccataactcatcctatgaagatagcatcaccctgacagcaaaagctggcagagacacaatgaaaaaagaaaacttcagtttaatatctctgctgaacatagacacaaaaatcctcaacgaaacattagcaacccaaatccagcaaaacatcaagaagttaatacaccacaatcaagtaggctttattcctgggatgcgaggctgtttcgcatacacaaatcaataaatatgattcatcagataaataaaattatagcaaaaacagataaatctatcaaaagtgggcaaaagacacgaacagattgcacaaaagaagayaaatggccaaaaaacatatgaaaaactgttaatcctcacaaatcatcggagaaatgcaaatcaaaacaacgggataccatctcacacctgtcagaatggctattattaaaaagtcaaaaaatagcagatgc

SEQ ID NO: 378491 - DNA, 594 bp, Homo sapiens
gaaattgaatcagtaataaaaaactaccaactaaaaatagtcgtgggccagatagattcacaaccaaattctaccagatgtacaaagaataactggtaccaattttattgaaactattcccaaaaattgaggaggaggggctcctccataactcatcctatgaagatagcatcaccctgacagcaaaagctggcagagacacaatgaaaaaagaaaacttcagtttaatatctctgctgaacatagacacaaaaatcctcaacgaaacattagcaacccaaatccagcaaaacatcaagaagttaatacaccacaatcaagtaggctttattcctgggatgcgaggctgtttcgcatacacaaatcaataaatatgattcatcagataaataaaattatagcaaaaacagataaatctatcaaaagtgggcaaaagacacgaacagattgcacaaaagaagataaatggccaaaaaacatatgaaaaamtgttaatcctcacaaatcatcggagaaatgcaaatcaaaacaacgggataccatctcacacctgtcagaatggctattattaaaaagtcaaaaaatagcagatgc

SEQ ID NO: 378492 - DNA, 606 bp, Homo sapiens
aaaattatagcaaaaacagataaatctatcaaaagtgggcaaaagacacgaacagattgcacaaaagaagataaatggccaaaaaacatatgaaaaactgttaatcctcacaaatcatcrgagaaatgcaaatcaaaacaacgggataccatctcacacctgtcagaatggctattattaaaaagtcaaaaaatagcagatgctgacaaggctgcagagaaaaggaaacacttatacactgttggtgagaatgtaaattagttcagccaccgtagaaagcatgttggagatttctcaaagagcttaaaacacagctaccattacccagccatcccattattggatatatactcaaaggaaaataaagtgttctaccaaaaagacacacacactcaaatgtccatcacagtgcgattcacaaaagcaaaaacatggaatcaaccaagatgaccagcaacagaggactggataaagattccatggtatatatacaccatggaatcctacacagccacagaaataaacaaaatcatgtcctttgcaggaacatggattcagctggaggccattatcctaagtaagttaacccagaaacagaaaactaaa

SEQ ID NO: 378493 - DNA, 606 bp, Homo sapiens
aaaattatagcaaaaacagataaatctatcaaaagtgggcaaaagacacgaacagattgcacaaaagaagataaatggccaaaaaacatatgaaaaactgttaatcctcacaaatcatcggagaaatgcaaatcaaaacaacrggataccatctcacacctgtcagaatggctattattaaaaagtcaaaaaatagcagatgctgacaaggctgcagagaaaaggaaacacttatacactgttggtgagaatgtaaattagttcagccaccgtagaaagcatgttggagatttctcaaagagcttaaaacacagctaccattacccagccatcccattattggatatatactcaaaggaaaataaagtgttctaccaaaaagacacacacactcaaatgtccatcacagtgcgattcacaaaagcaaaaacatggaatcaaccaagatgaccagcaacagaggactggataaagattccatggtatatatacaccatggaatcctacacagccacagaaataaacaaaatcatgtcctttgcaggaacatggattcagctggaggccattatcctaagtaagttaacccagaaacagaaaactaaa

SEQ ID NO: 378494 - DNA, 606 bp, Homo sapiens
aaaattatagcaaaaacagataaatctatcaaaagtgggcaaaagacacgaacagattgcacaaaagaagataaatggccaaaaaacatatgaaaaactgttaatcctcacaaatcatcggagaaatgcaaatcaaaacaacgggataccatctcacacctgtcagaatggctattattaaaaagtcaaaaaatagcagatgctgacaaggctgcagagaaaaggaaacacttatacactgttggtgagaatgtaaattagttcagccaccgtagaaagcatgttggagatttctcaaagagcttaaaacacagctaccattacccagccatcccattattggatatatactcaaaggaaaataaagtgttctaccaaaaagacacacacactcaaatgtccatcacagtgcgattcacaaaagcaaaaacatggaakcaaccaagatgaccagcaacagaggactggataaagattccatggtatatatacaccatggaatcctacacagccacagaaataaacaaaatcatgtcctttgcaggaacatggattcagctggaggccattatcctaagtaagttaacccagaaacagaaaactaaa

SEQ ID NO: 378495 - DNA, 646 bp, Homo sapiens
accaggctgttacctgttttattaggtaagacttctgtggctttctcttttgaaggtgctgatgatatctaacaggaggtttaggtttataaatactattctagccatgggttttcacacattctagttttgtctgcaggaatagaaatgaaacattagtgtcaagaaatgtccaaatgattaaagatacatatactgcctttccctggataagtagcatcaatcagtcagtgaagttgtctacaatgtgccagagattacaaagggagcagaagctgtctcttctctcagtgagtttatacttaagagtttattatttggagagtttacaatattattcctgttatagaaactctcaggaagattattataaataatatcaagccaagggaaatcacctaaatgtctaaactacccaaacacgagaacacatagccattatggacttgtccaaatttgtaagaggtgcggtgttccaagaaaatctgaggtcatcaacgatgcttgatcagtcagtacgaatgccagggaagaagtgagccatgtgacgttctgggkcatgaaatgagaggactctgagcacagctgaggcataagtaagatttgtaatgaagtccacaacagcatgttatgagggaaacagcac

SEQ ID NO: 378496 - DNA, 452 bp, Homo sapiens
aagctgtaaggtggagaagcagacaagaggaccattatccgatctggatgttgtttgatgagtttaatgtctcagacacaaagtaaccaagatttatttctctctctctctctctgtgtctgtgtgtgtgtgtgtgtgtgtgtgtgtgtgtgtgtgtgtgtgtgtcttttttcaaaggatctggccagactttaaattatggacttcagaagtatttaccttactgtcttcatagaggaagttggccgctggttgggtgagtctgaaagagttctttgcattactctgaaatataaagcctctgactcagacactccctacttttttttttatgatggccatgatarttttaaataatgtcattaaaataaatatattcagatgctttatagagcaatttaaaagaagtctgtagaatattagctatagctctaattcaaagtagtcaaata

SEQ ID NO: 378497 - DNA, 447 bp, Homo sapiens
tgcctctgggatagggtcatggcgcattgtgtataactgataattgatctattcctgatagcaggttttgatggacaatgggctgggacaccaagccaaggatacacaggcatcagtgaggtaaagaataggatgcaaaataagtccaagactgactgacatggcccaaggaagagaccacgggtcacagtgttctctccagcagaatccaaacccaagcacatttgtgtatggtgatamaagctgccccaccagaaaagcatccctccaaggaggcgacctggagagatttcaggcctctgagcatgatcattggccatttacatcttccttgagattcgttagtgaacttacctcttgcctacaacagaagataagagcaataatgtaaatcaataattggataagcaaatcaacagtgtactcacgctagcatctgatacccag

SEQ ID NO: 378498 - DNA, 561 bp, Homo sapiens
gcatgcagagtttctgttttcataacttgggaaatactatacaattgtrttgtaatgcaattctctacagtgacccatttagtaacacaggtcgaacttgttcttttctgggttcattggcctgaaatgcattcccaagtcatggaattctcaaagaatagcatggtgaaatgttaggatttaagacattagaaatttccttgatttagtaaagtaattagttcatgttcacaggacatgatttttaataaagaaaagtagctacaatattatttacccaatggccaataatttctgccttattaaacccaagtcaaaggcaccagtgaaagctgaaactcattctttagcctttaacttcattctctgactttttattatttaaggtactctttgtaagtgcttcatatttccataacagtttaacatcagatatttaatttttggattagtatcatcctttaggcagcacatgatgaatttgaccactaccaaatttagcttctggctgtgacttcatcagaattattttaaaagaagacaaacctatttttagattgt

SEQ ID NO: 378499 - DNA, 509 bp, Homo sapiens
ctagggcctgcctctaatttagctcataccatagaaatggcatgcagagtttctgttttcataacttgggaaatactatacaattgtattgtaatgcaattctctacagtgacccatttagtaacacaggtcgaacttgttcttttctgggttcattggcctgaaatgcattcccaagtcatggaattctcaaagaatagcatggtgaaatgttaggatttaagacattagaaatttccttgatttagtaaagyaattagttcatgttcacaggacatgatttttaataaagaaaagtagctacaatattatttacccaatggccaataatttctgccttattaaacccaagtcaaaggcaccagtgaaagctgaaactcattctttagcctttaacttcattctctgactttttattatttaaggtactctttgtaagtgcttcatatttccataacagtttaacatcagatatttaatttttggattagtatcatcctttaggcagc

SEQ ID NO: 378500 - DNA, 467 bp, Homo sapiens
gttacaggactgagtcactgaacctggcctaaatagggacttaaaatattcttcaaattgcagatctgttaagcatagcttgcctcactaattcaccttttaaaatgatactttttcaagcgaattttgctcagctaaacctcaaacttcagtgtctgctactgaaacaarctagttatgaaaaaagaaggccagtagaaagaaactaagctcagtttcatgtttgtctttaatttttgtccctattcatgcctcctgcaatccaaaaattgctcttgacttctcataaagaaaaactgaaaacaaggaggacacgaaatgaaaagaatccatgaaaaatgtatttttcatccatttcagaagaaatagaagaaaaagaaagtaaaggcctctaactatagcctgaaacaccacctcaacttaagacctcagtttaggccgggcgcggtggctcacgcctgtaatcc

SEQ ID NO: 378501 - DNA, 467 bp, Homo sapiens
gttacaggactgagtcactgaacctggcctaaatagggacttaaaatattcttcaaattgcagatctgttaagcatagcttgcctcactaattcaccttttaaaatgatactttttcaagcgaattttgctcagctaaacctcaaacttcagtgtctgctactgaaacaaactagttatgaaaaaagaaggccagtagaaagaaactaagctcagtttcatgtttgtctttaatttttgtccctattcatgcctcctgcaatccaaaaattgctcttgacttctcataaagaaaaactgaaaacaaggaggacacgaaatgaaaagaatccatgaaaaatgtatttttcatccatttcagaagaaatagaagaaaaagaaagtaaaggcctctaactatagcctgaaacaccacctcaacttaagacctcagtttaggccgrgcgcggtggctcacgcctgtaatcc

SEQ ID NO: 378502 - DNA, 632 bp, Homo sapiens
cccaaatgttttaattcctgaatctcattatgtttgtgatakggaacaatcacagattttctagattttaggtgtaaccagaaagccatgaggactgccagagttttcatgctggggctaaggatgggcctccctctaagcagctttatagggacaataggaggggaatgcaaagttgcttttgtggcttatttccatgagtcttgctggtttgttacattgtttatactggcagaggcagagcttctgttagctctttgaagggtgaaaattcacctccctgcccccttggtgcctgtgatggttaattccatgtgtcaacttcgctaggtccacaggtatttggtcaaacaccagtctggatgttgctgtgaaggcaatttttgataaaattaacatttaaatcagtacactttgagtaaagcagattacctccatagtgtgggtagacctcatgcaatcagttgaaggccttaagagaagatagattaaggtctcttgaggaagagggcactctgcctccagactgccttcagactcaagctgcaggatcaattcttccctgggtatcaagactgccctgcagattttgcacttgccaacctccacaattgcatgagccatttccttta

SEQ ID NO: 378503 - DNA, 632 bp, Homo sapiens
cccaaatgttttaattcctgaatctcattatgtttgtgatatggaacaatcacagattttctagattttaggtgtaaccagaaagccatgaggactgccagagttttcatgctggggctaaggatgggcctccctctaagcagctttatagggacaataggaggggaatgcaaagttgcttttgtggcttatttccatgagtcttgctggtttgttacattgtttatactggcagaggcagagcttctgttagctctttgaagggtgaaaattcacctccctgcccccttggtgcctgtgatggttaattccatgtgtcaacttsgctaggtccacaggtatttggtcaaacaccagtctggatgttgctgtgaaggcaatttttgataaaattaacatttaaatcagtacactttgagtaaagcagattacctccatagtgtgggtagacctcatgcaatcagttgaaggccttaagagaagatagattaaggtctcttgaggaagagggcactctgcctccagactgccttcagactcaagctgcaggatcaattcttccctgggtatcaagactgccctgcagattttgcacttgccaacctccacaattgcatgagccatttccttta

SEQ ID NO: 378504 - DNA, 501 bp, Homo sapiens
atatatatatatgttttataattgacaatggtgaacatacatatagtgggaactttaagaaaaagtctgacataataaaaaccacaacacaggactatatgggctgttttccagtcatgacaacccacatctctcttagcgtgtactctcattcaataaactctctggtctcttagctaaattgcctcttggccaaattctttctctcaaaaaagacagaaacggaggacccccacacttacatgtgacatcctcaagatgtttatggtgaaaagtagatatcaaaaaccattyttacttttcctacacccatcattggtgctacatgtctctccatgttaccacagttaaacccactgtgcctgtggagtcttgggttatcctgtgatgttggccaaaacagcttcttgtctttatgccatgtgactaatgggcctggtatacaatcactgggacaaccacgtgcaacaagacagccattcactgcaccaaggaacttgc

SEQ ID NO: 378505 - DNA, 501 bp, Homo sapiens
atatatatatatgttttataattgacaatggtgaacatacatatagtgggaactttaagaaaaagtctgacataataaaaaccacaacacaggactatatgggctgttttccagtcatgacaacccacatctctcttagcgtgtactctcattcaataaactctctggtctcttagctaaattgcctcttggccaaattctttctctcaaaaaagacagaaacggaggacccccacacttacatgtgacatcctcaagatgtttatggtgaaaagtagatatcaaaaaccattcttacttttcctacacccatcattggtgctacatgtctctccatgttaccacagttaaacccactgtgcctgtggagtcttgggttatcctgtgatgttggccaaaacagcttcttgtctttatgccatgtgactaatgggcctggtakacaatcactgggacaaccacgtgcaacaagacagccattcactgcaccaaggaacttgc

SEQ ID NO: 378506 - DNA, 518 bp, Homo sapiens
tcttctggtatctcaaatttacaattagtcttaaaaaagaaatggctctaaatttctcatgactcttcacctctctattatcaggagttcaaatccaaatataattatcttattttttatacaaggaaaagtcgcaaatctctttggaaagagcacaattgacccttcatctgtaatggtcctggtgaatrccatatatttcaaaggacaatggcaaaataaatttcaagtaagagagacagttaaaagtccttttcagctaagtgaggtaagtattttattttcagactcatgacaaatgttggaggatacaataatcatttaaggacaatttagaaagatgtagtgatttagtgaaaatattggtctaggtttctgttggttctttttattgtattttctacagattttcatttttcctttattaagtgacaataacttttatcacagagcacctaactggagacttgggatactaagattctctggcagaggagaaaacccattcttttcttaat

SEQ ID NO: 378507 - DNA, 518 bp, Homo sapiens
tcttctggtatctcaaatttacaattagtcttaaaaaagaaatggctctaaatttctcatgactcttcacctctctattatcaggagttcaaatccaaatataattatcttattttttatacaaggaaaagtcgcaaatctctttggaaagagcacaattgacccttcatctgtaatggtcctggtgaatgccatatatttcaaaggacaawggcaaaataaatttcaagtaagagagacagttaaaagtccttttcagctaagtgaggtaagtattttattttcagactcatgacaaatgttggaggatacaataatcatttaaggacaatttagaaagatgtagtgatttagtgaaaatattggtctaggtttctgttggttctttttattgtattttctacagattttcatttttcctttattaagtgacaataacttttatcacagagcacctaactggagacttgggatactaagattctctggcagaggagaaaacccattcttttcttaat

SEQ ID NO: 378508 - DNA, 518 bp, Homo sapiens
tcttctggtatctcaaatttacaattagtcttaaaaaagaaatggctctaaatttctcatgactcttcacctctctattatcaggagttcaaatccaaatataattatcttattttttatacaaggaaaagtcgcaaatctctttggaaagagcacaattgacccttcatctgtaatggtcctggtgaatgccatatatttcaaaggacaatggcaaaataaatttcaagtaagagagacagttaaaagtccttttcagctaagtgargtaagtattttattttcagactcatgacaaatgttggaggatacaataatcatttaaggacaatttagaaagatgtagtgatttagtgaaaatattggtctaggtttctgttggttctttttattgtattttctacagattttcatttttcctttattaagtgacaataacttttatcacagagcacctaactggagacttgggatactaagattctctggcagaggagaaaacccattcttttcttaat

SEQ ID NO: 378509 - DNA, 566 bp, Homo sapiens
gaccctgaatctcttcttctgtcccgacatttgcaacagtgaattaataaagtttaattacttatgacatttataaagtgatcaaaaaaaaatcaaagtatgtgagagaccagaaaaaaaattgaagaatataattaacaagaagaaatgaaggaacacttaaacagcaggatagatatatcatgtttatggaatggaacactcaatattataaacatgtcaattttcccaaattttccatctttttttttcttttttgctattccaatcaaaatttagcaggtttttttgtgtatatgtgttgtaaattgccaggttgattctaaaatttttatcaaaagaaagaaggccaagaataatgaagacaatcttgaagtttaaaaatgaaattggagccttacattagcagatgccaactataaggctacagtaattaagactatgatattggtgcaaagataggcaaacagagcagcagaatagaagagggyggccaaaaacagaccagccaatttcatgttgctttcaaacaaagtcaccattaagtaaaggaagagggacagaga

SEQ ID NO: 378510 - DNA, 594 bp, Homo sapiens
taactataaagaaaaatattaataaactgayttcattaaaattaagaacctccagtcatcaaaaaaatctcctttaagaaaagaaaaagacataccacagagtggtagaaaatatttgtagagctcccagatagcttctagatggtggaggttccaggaggttggcatgcccagggaggacatggaagctccgtgacccttcctataaataaataaataaataaataaataaataaataaataaataaataatttgcaataaatatttctgagaaagatctattacccagaatgtatcaagtaattccacaaatcaataataaaagaaaagatagcccagtagaaaatgtcaagcaggaacttcacaaacaatttgaacagaaacttcacaaatgagaaaatccaaatgtccaaaagcttatgaaaaaattctcaacatcattagtcaccagaaaaatgcaaattaagaccacagtaaggtaccactgcacacccattaaagtgagtatttttagtaagactggtaatacaagtgttgctgaggatgtagaggaactggaactctcatatattgctgatagaagtataaattac

SEQ ID NO: 378511 - DNA, 594 bp, Homo sapiens
taactataaagaaaaatattaataaactgatttcattaaaattaagaacctccagtcatcaaaaaaatctcctttaagaaaagaaaaagacataccacagagtggtagaaaatatttgtagagctcccagatagcttctagatggtggaggttccaggaggttggcatgcccagggaggacatggaagctccgtgacccttcctataaataaataaataaataaataaataaataaataaataaataaataatttgcaataaatatttctgagaaagatctattacccagaatgtatcaagtaattccacaaatcaataataaaagaaaagatagcccagtagaaaatgtcaagcaggaacttcacaaacaatttgaacagaaacttcacaaatgagaaaatccaaatgtccaaaagyttatgaaaaaattctcaacatcattagtcaccagaaaaatgcaaattaagaccacagtaaggtaccactgcacacccattaaagtgagtatttttagtaagactggtaatacaagtgttgctgaggatgtagaggaactggaactctcatatattgctgatagaagtataaattac

SEQ ID NO: 378512 - DNA, 604 bp, Homo sapiens
taaaataggcttttaaaaatgatgtgctcagaacatgaaaaaataaagcgaataaaatttcaaatatctcgggcccctactgtaggccagatactgttctagatgyggtcatgaatgagatggccaaatttcctactctgtaatgtatactccttttatagatttggcaaacaatgaatatataaaggggaaaaatggagctcttacattcatactgaaagaaaatttaatcagtagaaatttgtaatgatagatatttataatgcctaagtgaaataccccacaaactattttaccaggagaatccaagataagatttagaaattaaataccatatgcctatcacatcctcctccccctcctacaactgagtctgctatctagtgtttggatggtaaactgccatccatagttcactagaatctgtacaaaatctttccacgggttttgacctgccagttagcatgtatgaattaaatatgttcattttcttaatcagaaatatcaagtgttctctacagctttcaaataacattcaaatttatcgatgtgggattcaaatgagtacacaatctggtctctgtctatcgagtgtaaagaaata

SEQ ID NO: 378513 - DNA, 620 bp, Homo sapiens
tttagtcatactgtagactcattaaaaccagggttcaaggactcacctaaggtatgataatattactgagttgtcaaatgctctttaacctaagagaaggatgaaataatagtctgggtgttgagtagaaaagctccttcttttgcccatgagggaaccagctatktgtccccctttaaccttcctgatgataactacagcctgtagagtttaatataataatgataataataacaatagtaaagtttcttagattttattacctgctttattgccatctttactcaaacttttttgttcctttatggacggtgccctgtgttgagtttgccagttttgtctatgtggtgttagacttttctgtctagagtggggactgagaaaggaccctgatgcttggcatataattatgtactgggaaaacatggcctaatattgcccaatccacatgctctgggactatggtctctagttttttccagtagaaggattcattttgacatcaaaattatatagaactcctacatgaaaatagttctgtttgattacgattggttgagaaaatacataaatgcatatagactcacagaataccagcttcacggaacccaacttactac

SEQ ID NO: 378514 - DNA, 581 bp, Homo sapiens
tgagccaagagacaggagttctgtttccatttagaatatataactttgggcaagtcacttctgtctttaaaatgagaggattaggcttagttctttgtagctccaatattctaacaccatttatgccctttcccaacaccatggtcctatgtagttttattgagtatttactctgtgccagtcattctgcttagctcattacaagcattatctcctataatcctcacactgtgctaagatatkggtataaaatttccattaattctacagactgtgaagcagattctgaaaagtcaggctgataagggtcacagacatatttaaatggcaaaacctggatttaacccctatgcaaatctgtcttcctggttttaattgctacatcatcttgtgattgaggtgaaatgcaagcttttgtttgaccagggttatttaaatgctatctgggtgaagctggatgaaaacatgagtttctaatgttcttccctggcctggtagatcaggttatgtcttggataacctatgtgatgagcttctgatagtcagaatatttgcaacttggggtaggtattatagacatt

SEQ ID NO: 378515 - DNA, 518 bp, Homo sapiens
actgaaacgaaacttgagtttagattctggttctttgacttactgtgtgtcctcaggtaaattgcttaatctctctgagcctgcattgtctaaactttaaaatatggttgattgtatcacctaccctgttggttgctgttgcagaacaaatgacaaataactataaaacacttaacacaagscaagcacagagtaaaacctcaataaatatcaactattattattaataattggtattttttatgattctctgatgtagcccttaggatatttgagaacctatgttttccttgctttatttggccaaaaacttaagtgacaactgtaagttatacagctatgatctcctactgagcaataggcacatgtctttggcaattgctgttacttcctcactgtaccttttcttttattttaaatacaaataaaattttatttgtatatcaaagactctatgaaatgataacataatgttaacagagttgatgtcaaaacaccaataggtttgaagttataga

SEQ ID NO: 378516 - DNA, 518 bp, Homo sapiens
actgaaacgaaacttgagtttagattctggttctttgacttactgtgtgtcctcaggtaaattgcttaatctctctgagcctgcattgtctaaactttaaaatatggttgattgtatcacctaccctgttggttgctgttgcagaacaaatgacaaataactataaaacacttaacacaaggcaagcacagagtaaaacctcaataaatatcaactattattattaataattggtattttttatgattctctgatgtagcccttaggatatttgagaacctatgttttccttgctttatttggccaaaarcttaagtgacaactgtaagttatacagctatgatctcctactgagcaataggcacatgtctttggcaattgctgttacttcctcactgtaccttttcttttattttaaatacaaataaaattttatttgtatatcaaagactctatgaaatgataacataatgttaacagagttgatgtcaaaacaccaataggtttgaagttataga

SEQ ID NO: 378517 - DNA, 518 bp, Homo sapiens
actgaaacgaaacttgagtttagattctggttctttgacttactgtgtgtcctcaggtaaattgcttaatctctctgagcctgcattgtctaaactttaaaatatggttgattgtatcacctaccctgttggttgctgttgcagaacaaatgacaaataactataaaacacttaacacaaggcaagcacagagtaaaacctcaataaatatcaactattattattaataattggtattttttatgattctctgatgtagcccttaggatatttgagaacctatgttttccttgctttatttggccaaaaacttamgtgacaactgtaagttatacagctatgatctcctactgagcaataggcacatgtctttggcaattgctgttacttcctcactgtaccttttcttttattttaaatacaaataaaattttatttgtatatcaaagactctatgaaatgataacataatgttaacagagttgatgtcaaaacaccaataggtttgaagttataga

SEQ ID NO: 378518 - DNA, 580 bp, Homo sapiens
aagtaaatgctaatgagaaaagtaaaacagcaaagagggattgagagtgtgtactgaggttgcaatttagatagaagctgaagctcagagtctgatatctctaagtgggaattacgagcatggccagggtcccagatggacccctgtgattatgcaggaattcgggtggcatgggagcacatgaagaagtggtgagggagcctaatggagattatttgaatgaggaaaaaagaaacatcctggaaagaatttatgctcaagtgmagagtcagagtcaggatgtccatgaccaaaggacgtggttcaggctgggagatgaggggtgattatgcaagcagcccacctgtctgctcaggtcatgttcctctccccaccacagtctgaatctcagagagaaaaggcaccatggaacagttcaaagaacttctgcaacatctgaacaagactgggaggtcaagtcagccctgattagaatgacagaatgggattacagccaacagatggtgagagtcttgccaccccagcttctacaaccagcccagaaatacctgacaacatcaaattctcaagccctatgggc

SEQ ID NO: 378519 - DNA, 487 bp, Homo sapiens
cgagttccaaccactgggatgggtgaatcccctctggctagggctggtccaaatgctcacttcgggcaagggtgagctggctgagcccagcacrgccttattctctgctaagctttattctctactgtgatagagcagtactgaattcaatgtaaaatcccaagttgctgcactctccctccctcaagggcatagactctttctccatgttgcatggggaaagggtggcatcgacaattcaagattgtctctcctgcccccctcaattcctctttccaggatatgaagttaaaaccagttactatgattgctcacctgatttttggttctcgtgacactgctttttttttttttttagactaagtttcactcatgtcacccaggctggagtgcaatggtgcaatcttggctaactgcaacctccacctcccagattcaagagattctcctgcttcagcctcacgagtagctgggattacaggtgccc

SEQ ID NO: 378520 - DNA, 487 bp, Homo sapiens
cgagttccaaccactgggatgggtgaatcccctctggctagggctggtccaaatgctcacttcgggcaagggtgagctggctgagcccagcacggccttattctctgctaagctttattctctactgtgatagagcagtactgaattcaatgtaaaatcccaagttgctgcactctccctccctcaagggcatagactctttctccatgttgcatggggaaagggtggcatcgacaattcaagattgtctctcctgcccccctcaattcctctttccaggatatgaagttaaaaccagttactrtgattgctcacctgatttttggttctcgtgacactgctttttttttttttttagactaagtttcactcatgtcacccaggctggagtgcaatggtgcaatcttggctaactgcaacctccacctcccagattcaagagattctcctgcttcagcctcacgagtagctgggattacaggtgccc

SEQ ID NO: 378521 - DNA, 487 bp, Homo sapiens
cgagttccaaccactgggatgggtgaatcccctctggctagggctggtccaaatgctcacttcgggcaagggtgagctggctgagcccagcacggccttattctctgctaagctttattctctactgtgatagagcagtactgaattcaatgtaaaatcccaagttgctgcactctccctccctcaagggcatagactctttctccatgttgcatggggaaagggtggcatcgacaattcaagattgtctctcctgcccccctcaattcctctttccaggatatgaagttaaaaccagttactatgattgctcacctgatttttggttctcrtgacactgctttttttttttttttagactaagtttcactcatgtcacccaggctggagtgcaatggtgcaatcttggctaactgcaacctccacctcccagattcaagagattctcctgcttcagcctcacgagtagctgggattacaggtgccc

SEQ ID NO: 378522 - DNA, 487 bp, Homo sapiens
cgagttccaaccactgggatgggtgaatcccctctggctagggctggtccaaatgctcacttcgggcaagggtgagctggctgagcccagcacggccttattctctgctaagctttattctctactgtgatagagcagtactgaattcaatgtaaaatcccaagttgctgcactctccctccctcaagggcatagactctttctccatgttgcatggggaaagggtggcatcgacaattcaagattgtctctcctgcccccctcaattcctctttccaggatatgaagttaaaaccagttactatgattgctcacctgatttttggttctcgtgacactgctttttttttttttttagactaagtttcactcatgtcacccaggctggagtgcaatggtgcaatcttggctaactgcaacctccacctcccagattcaagagattctcctgcytcagcctcacgagtagctgggattacaggtgccc

SEQ ID NO: 378523 - DNA, 558 bp, Homo sapiens
caatggtgaggctttccagaactcaggttccaaccactgagatgggtgattcctccctggctcaggctggtctaaatgctccctctgtgggcatcagctaagttctgctcagtgtcggtaacactgaattccaatgcaaagcctcacaattgctatgttctccccttccaagagcacagagtctctcctgccatgtggcccctgctgggggatggggaagggtggcatcagtaattcaagactgtttttcctaccctcttcccttccactttcagtgatatagagttgaaaccagatgctgtgatggcttgcctgatttttgattcttataaaggtgctttttggtgtggatagttgttgaatttggtttcttgtgggaagaatgatagtgaaagcttctatttggccatattgctctgtctcctccttgagaatatttttttaagaacaaaattaagggaaaattaamacctgagagaatgatatttaccaccaaaaacaacacacaaatggttaatattctttacctaaaaagagttcctgcgtatcagtattttt

SEQ ID NO: 378524 - DNA, 603 bp, Homo sapiens
ctagaaactaaccagaagagttaagtggacataataaagcctatttataatgttataattatatgtaagtttggattaacctrttcattacaaggtggctatctatgacactgttgctttattgttctgttttcacatgtctaaaactgttgaagcttttagcagaaaacatatgcctcaattattttttagtgtaaatcatgtaaattggagtttgtagacaaatacacacatatattgttcactcctgattattatagtaagtttgtgtacacagacatacacagagatgcccactttaaaaagtgactttatgcaaaccataataaacccactcttcagaatataatgcaggaaggaaaacgctttcccactactatacactttcaataggatatataatcctaccacttgtaaactgaaaactttactagttctgactattgcaacttagtcaattgtttaatcaggaatccatttttggggtacctacaatgtttcaagtacactaaaaatacagagataaatacaaaattaacaatctttttaggagattaaaataagcaggcagatggtcacttaaaagtttaattaatgtctaat

SEQ ID NO: 378525 - DNA, 566 bp, Homo sapiens
catcagtgctaaatcagtgatttcaaaactccagaaagaatttctcacctactagaaagtaagttgactatttcagtagtttctaatttgtcttaaaaatttttttgtaatccttctttgctgattaaaattctcccttcccgtcccccaaccactgaattttagatatacaatgaaaagataattaaaaacaaactattggagtcatttttcttcctaaataaagcaacatttattaatagtactascaaaattgaaatggcctcagccttttacatccgtgcgccacgttttaaaaatgacgattactggattccaaggcatggttgtcagaaacattctgcgtaattaaagcagagcagcagaaaatacaaacgtgagtgccaatcaacatgagtgtgtaaagaaaaaaagtaaaattttgcattctgtgcaatgtgtcgaacgtgaacgtattgcacgttgtgttgcagatttactacagctgagtcatttcgggacacgagtgtgtgtttccaagaaaaacgagaggaaggaaccaggctgaggggctcgccgggttcccc

SEQ ID NO: 378526 - DNA, 551 bp, Homo sapiens
ttgaactaggacacccattttcaatgttcgaaggtaatgaaccctaaagattcatccttccactctccaaaatggccattttacctctttccatattgggtccttgacaaaatatttttaaaaaattaaaaaatgaaaacaaaatagccatttttgcaacacctatttcttgtcttctattaaaatgtctaacacttcttcagacatcacttaaaacataaagtcagatgacagccatctcttattcccaccaccaaacagcactgttcatttacatatatttctgtcttacctcatgttacaatgaatgaaatttctatacgttttatctcatgccaaaccctccatttacactctgttgagcactttatacatgactaatccaaattgatattgytgtaagcataaaatttatgccaaatttcaaagacttaatatacaaacagtaaaaaaactcaataattttataataatacatgttgaaatgagaatattttggatatctaaggttaaatttaaaattttaaaattaattttacctgtttcttttt

SEQ ID NO: 378527 - DNA, 534 bp, Homo sapiens
ctgctacaggtggtttgttttttttttccatgtcttgaacacaaaccattctcttcttctctttctctctccctctctcaacccacagtcattcatttccttctttgaactggaaatgtgcttacctcctttccaatttctattattttgagacacattttatgttagcaggcatacacaattttaaaatcagacacacactgatttctcatatctggcaagtcaggtaaaaatttggaaaccaaatgtttataaaytgcaaagttacttttaagactctaattattatcaatcaccatattgccataactattttgtatgttcccccaaatagcattgcttttgatgaatgcagtgtgattcagagtactcccaatacacagtcatttgaccgttttttttaacactggcaagcatgtagcagattttaagatatattaaaagatgtttgtcatatctagtatctaatagatgtaatcaaacaaaggcttttttttaagcccattcagaagattcattttataggcacaagat

SEQ ID NO: 378528 - DNA, 454 bp, Homo sapiens
gattctaatggccatctcaaattcaacatggccaaaacagaaattttgataactttcaccctcaaatcaataccttctgtctcttctaattactaccattgctaagaatcaaaactttggagtcatttaaactttttgtatcctcacaccatgcattgaatgcagaaaaaaatcccattggctccatcatgaaatataaattctaatttccaaattacattctcaccacttcaacggctataccatcctagttcaagcctacattatctcaaattatagccatttcttcctaastagtttccatgcttttaaaaaattctttaattctctacatttccctagattgatcttttaaaattataatcctgaattgtggctatgtgatgtatacatgtgtaaaacatgtggtctgtacatttgagattctcttggtttgctttatgtacatttttaa

SEQ ID NO: 378529 - DNA, 578 bp, Homo sapiens
tgtattatactctggggatgaatcgatgccatgtgttttttttttttttttttacaacttctcaaggkgattttgatgcaaacaatgaaaatcattgtttattctacagaaagatacctttgttctagagaaattcagcaacttagccaagttcacagagatgattcggacaaatgagaactaaaatagagaacttcagactctcatatcaatgagctttctttctgaaacatcaagaaagataagttaaaatacaatttttcttcattgtgaatgtactaaatgccattgaatttaatactttaaagtggtgagtttacattaggcaaattttacccaattaaaaactaatttaaaaacatataaaaacaccacttttattttactattatgtaggcaagttaattttctaaataacacgtagaatggcaaccacatgttatatctggctagtgcaacagccaacagagaaatcattgatatagatcattcaagctactaaatcagctctctggtctgtaaaattagggaatgagaataataatgctttgttgttgaataaatgtgaatctatgaaa

SEQ ID NO: 378530 - DNA, 589 bp, Homo sapiens
gacatttttaatgaatgaaatttatatgtagtttattgtagatttaacatagactagatttaaggtaagctgataaaatacattgagtgaagtgttaatataaatttccaacttttgtctagaaattaagatactcttaacacaagatgtttatgaaaattcaggaaaaactacatttttattttgakactttatgtatttttctcctttctctctccatttttctaaaataaaccctaaaaatattttaccccaaaatatacttctttgtcatatgttgatatggctaatcagagggtctggagacagaaataaccctgaaaattgccttttgtggagtagacttgcatttttagaaaaaaatatgcatcaataaaataaacagcctggctttctcagaagctactctccctatcctgatgtaagaaagattaactgagaatctgacacctttgcaaaatctggtggagaaacatttaccataggctaccagatattcctttagggggatgatacctgtgaggtttcatctgcgtcacaagaccacatttgccccatgcttttcctcttctctcccttttatatccta

SEQ ID NO: 378531 - DNA, 518 bp, Homo sapiens
atcatgggcatattctcaaaaagcattcagaaataaagtccttatgggtgttgcccctgactataccacaactctgaaagccacatggtggatttatttaacctccaatttttgggaacacttagtagcatacgtgggctaatatttgttatggctcaatttactttctctcttttatcctggggaaaggaatactttgctcccacactgtgaggtttctgagaaagggtgaaaaaactataatcattcacttctcttgggcaaggygggagtgaaagaataaccaataaacaaatatatcaagtgctcatctgtgcagaatgctgcatgcttaatttagttaaatatacacatacataaaaggcacagccattattccatcggagcctgagcctgaaatcagaatatgaaggtcaaactggggtgtatttctgattacagaatgaaatcctcagaccagctgctctgtgtgtcccactgggctcagtctttctctctagtccatctttgcttccatg

SEQ ID NO: 378532 - DNA, 592 bp, Homo sapiens
acaatgattataatggtgggaaatagagttttatacactttcgtgctgtaatcagagttttagactcacaatatcaaacatttattctgaaggaattttaatactaaaattagtttttatggttaatgtttctcctttattgcaaactaagaatcattaatttcttgattaaagctgaaaataaatgactaaccaattatctgattgcctttcaatccacatatgtgagaatcttacaaatgttagcacccattgtaaaaatatgcaaagcacaaaactgaagtgaggtttttttaaaaaaaattacaaaataacaataaatcatagtacrgtttataaccaccatcagtaaagaaaaaaatatgatggcaatccagtagctataaactcaaaaaagtagctgagtgaatttatgctgcctatataatctttttttcctttcaaggtcactccaatttccctgtacaagagccattgaactatacaatgatgtgctaattattgtctttttaaaaatgattaaaatgaggataagtcagtgacactctccatatccaccaaaaagcccaatccagtctgataagtgataaga

SEQ ID NO: 378533 - DNA, 583 bp, Homo sapiens
aaaacttgtcagcctttgtcaaataaaacaaatccagacttaaaaaggaagactttatcaaaaggattactccaagcagggaagaggctaatggaatagaagaaaagagaactattgcaatggtaagaataccttgacatagatctggttgctccaaagggttaggcaaaaaggggttttcttctacagagaagagttaacaaacgtggttagaaacaggtgttacagaagtaggatgaaaggatggtgggatttgatagtagatcaagacatattttactctgargccagccaattttcctatttttcataagcagctgtatgctggttcaggctaagggtgggccaagtttaggagtctggtggaaggagagaatcttaaccaaaatttgtttaataagaactttgtttccagtaatcagtggggacaacaaattcagctaatcatttaggagaaaaaaatgaaaatttggagggcctatgtctggccttgtgataggcaaataagccatcagtgagccttatctaagtcctatggggaagggtagttatttccagtaaactattctctggaacacaaaaa

SEQ ID NO: 378534 - DNA, 614 bp, Homo sapiens
agtttcacactgatctgatctcttcacaacattaaaaagacctgaaaccccatctctactaaaaatacaaaattagtcaggcatggtggtgcatgcctctaattccagctacttgggaggctgaggcaggagaatcrcttgaacctgggaggctgaggttgcggtgagccgagatcatgccattgcactccaggctggtgacagagcgagactcagtctcaaacaaaacaaaacaaaacaaaacaaaacaaaacaaaacaaaaagacctgattcaccttaacagatttcttcactccttcctgctaaaataaaggccttttgtgttcttcaaaagtctaagggaactggagatgaaacagtacctggggaatttagagaaggaaagtggaggctccccgcaaaggaacacaattcttagggtggagaagagatgcaattgaggttattttattcattcagactttgctgcacattgtctctttaatgacaaaagtttttagatgacatatttataaataattttcaaaataatgttgttaaatttagcctttgactctatcctatgtattttccagagctgataaataaaagtttctgcaaagtcagaatttat

SEQ ID NO: 378535 - DNA, 548 bp, Homo sapiens
aataattcaagaatctggttttcattttcacttctgctcctagaacattggaccagcagtgctggtcctgtraaggacttgtgtttgtatggatgggacattgcatagaccagcttagcaagactaattgatggttcaagttctctgaagtatagttagtggccagaggttggactagaaggaagagaataagcaatttgtttgtccaggttttgatttgcctgaccaggtgtgtccattttctcatggttaatgcctgcgtcaacagcactgagaagcaactaaacattaaagatttatgaagaaaacatttcataacctatgaagaattttacaaactcttggatagatgagtcattgtggcattccacatctaatgctatgagttgctttccctgttccctcgtttccttgttgcatgtagccatataataaatagaactgagctgcgtggtgacccatgggataattataaatatagtaatgattgtctttggtttatctgacagacaaaatatggagaaatgtgattattgtactgtgttaaa

SEQ ID NO: 378536 - DNA, 551 bp, Homo sapiens
acacagccaagaaaggatagcctggtcctttttcatccttaatgtcacccatgaattacaastctctatggtggtgaactacaagataaactggaaaaaaaaatgcactatttcttctagaaatattctagataaaattgcaaaactcatagagttgtctgtgcagaagaaaaaaaaataaaagcaggcttcagacatatactaggccaacaggagtgcagatcaaacatgtaggatttttatttttgtgcatttatatttctggactagaacatcacttgatctgtatctattgaacatctattatatgccagatattctgctaaatcctggcaatataaagattcctaacctcaacgaatttactttgtaaaaaaggaaatagaaataaatatacaaacaaaaaatataaattgagataaggactgtgaagaaaacaaatgtgtttttaatagagaataacacgtaggaagaactaatttagatagtatgactaatgaaatcctcttgtaagaacttatttaggtggccctaaacaagaagaagaaacc

SEQ ID NO: 378537 - DNA, 423 bp, Homo sapiens
catacaataaataatgatatggttagtgtaaagataataattttatgataaatggtcaaaatcgatttatatgttatactttgacaacagttcccacactataccctttaaaatatgacctgccttaataaattccatgcacctagtagatgcgcaatagaaattatgaatgacattaatcaggattactttcatttgcctgttttacactccagatgaaaagtcaaagggaaataaaggacatttgaaaggaataaaaaatcacagatggggaagtgagtttccactgtatctgtccagtattctatggctgagaaatacttgagttgctcatacatygttttgtaacactttgtaccaaatgattgctttcagaaatgaacaagttgatctggtcttgagggaggaggaggcacaggaaca

SEQ ID NO: 378538 - DNA, 630 bp, Homo sapiens
ttatattagactttgcaatatatttctcaggtcaaaaattctctcatgtctccataaaaacattatctcagaaataccaatatctcaaatatgtaaaaagtgcactgtgggtaagaaccaagcctaatctagcctaattgattttctgccttggtgattaaatatgtttgattgccataaattaaagccacaccccaatgtttctatactccagttaaaaatctctaaaggtaatgatggctcaactatagactccccaactatttactcttgtcttgaacttacattgctaagaatgtaattggtaaagaaaacaattactcaacaacctttaactttatttccaatgtatttctagttaattttttctaactacttttagagcccttttccatgagaccatctgtagccccttctctacctctgtgttcttaaccttctaaagtcctgaagaaatggtcatttccagtttattaccacacttttctgctcttgattgggttgcaaagccagaaaaaaacgaacactamaacttcaaacaacctttgtgtttggttcaattactcatttagaaatataataataagatcactaatacatgggaagtcaccatactggcttttactaatt

SEQ ID NO: 378539 - DNA, 552 bp, Homo sapiens
agaattataaccgtgggcctatgcctcacacaggcttatgatcttaacttatgctacctctaatgtctgggaatccgtatgctaagaaattaatataaaaattgtccctgaaaggaagttcctgtgataaaaataygcaagtctcctgaaaagacatgatctcaggcctggatgcctaagatttccacagatgaacctccgccaaagatgaactcaccatcaaaattataatatcaatgaggaaataatccaccatgaatttgattcagatggtacagtaaatagcagagatagatagaagaatcagataaaaactatgcaaatatttttaaatggctaaaggcataaataaaagaactgaaatatgaggcaagcaagacactatgaaaaacgaacagggaaattgaagacaaatcaagtagaccttaagaattaaaatatatggaagttatagtaataatgtttttaaaaaagttcaatgaatatgtgtggcagatacttcaagttgcttttacaatacccattttctctttcttttaaaaaataaaaccc

SEQ ID NO: 378540 - DNA, 593 bp, Homo sapiens
taaaactgaaggttctaagaaacatgaagaatggaattgtcgctattgagacatggaaggcagagatcaggatgtaagaggcagggatgggatgagtcaggcagttgattttttagaagctcttttttctttttgtctgtattttgatttgtgtttttgagagacctattaaccacccaaacaaaaatgtttaataggcacttagatatacaagtctgaagttcaggaaagaagtgcatgctgtatatatacatttggaatggaaagctaatagtagtagtgctctaaagttcagcttaagatttggttttgaggaaaattctattattcaactttggaaaagtgaatatactgaatgctgccattatttcttgtacttgtgaacaaggaatttgtcatcaaatcctattggcataacaaggtaataaaataaggcacactatgtcaatatcaggtcaatccagagggataggaagcacacggggrtttaaacagaaaaagtttaatatgaagaattattaaactatgataaaagagtaactctaggatataagaaaactctgtgccatgctctaggactaagatagagtacc

SEQ ID NO: 378541 - DNA, 581 bp, Homo sapiens
aaatatagggtgtgtgtgtgtgtgtgtgtgtgtgtgtgtgtcaraaagactgcaataaatgccacagtggaccttcagtaattatattcctcccattttaagcaaactggtcttttatttacaaaaatttctttaaagataagcttttgcttattaagcactttgtagcagtcctcaagatttgtattctattacgtatgatatagtaattgtaacttattcttggagtaacttcagttctctttatattactttgtggattacctacccttttgagttttaagtaaatttggcataaaaccatatttcacaatgtctggggtacaggaccttcttaccatctctggaaattttaggacttaattccttataattctgtttttatggcccagtgaaccattttattttcttcagcctcatcactcctcctcctcaagtcaaaaccaacaaataaacagtttgaccacaactcggttgtaccattttgtggcttgcctaagaaattcactcacaccaagcatatcatggttatattcttgctaaaatggttaggtgaggtttacagtaaggagtaggatgca

SEQ ID NO: 378542 - DNA, 548 bp, Homo sapiens
gaagttcagcttctcactctctgcagaaaatctaycccagagcattcctgaaaattaaattagatagcttatacttggataattttagtgataagaagccttttaactctagaggcaactcttccattaaaaggcaagcctatttaaaattttctatattttcttaaaattttcttttcctaatttccccacatttttcttaggacttaacttgactagcttcattcagatttgaaggtcagtagaagagctgtcttttatatgcatcagatctactcagaattatatatatatatatactctgtcctcagagtcatccttccttttccgtaaaaagtagcccatgtttacagctaaagagtttttttggccatttccttcctgtagaaatctgagagtccaaaggcctcttttcattttatatactgtttgtacctcttaggccaagctgaccctattatttttaaaactatgtgagcttttattgatttataaatcactccattatgcaaagccacaccacaagatgtttgagaaaagctctcttc

SEQ ID NO: 378543 - DNA, 557 bp, Homo sapiens
atataaaatggcaaacttaatctataaatgtggtgtgtgttcctatggctccactgaccagacactctcccatctctctccctcccctccagcctctctattccataagacataacagtgctgaaattagtctaattaataacccaacaatgacctgtaagtgttcaagtgaaaggaagagtcaggggtctctcactttaaattaaaagctataagtgattaagttcagtgaggaaagcatgttgaaagcaaaaacgacagtagctagacctcttgcaccaaacagttacccaagtgtaaatgcaatagaaaagttcttgaagaaaattaaaaatgctaccrcagtaaatacacaaatcaaaagaaagttgttaagccattcttccattgctataaaaatatacctgagactgtgtaatttataaagaaaagaagcttaattgcttaacagttctgcaagctgcagaagcatggcactgacatctgcttcaatgtggggaggtctcaggtagttttactcatggcagaaggtaagcaagagcaggcatatcacatgg

SEQ ID NO: 378544 - DNA, 564 bp, Homo sapiens
gagaaagaccctaattatctttgattctttgaaggccaagagaggtggggaagctgtagaagaaaagctgaatgctagcagaggatgattcacaaagattaaggaaagaagctgtcttcataacataaaatacaaggtgaagcaagtgctgatgcagaaactgcaacaagttattcagaagatcaagctaacatcatttatgaaagtggctacactatgcaaaagattttcaatgtagacaaaacagtcttataatagaaaaagatgctatctaggacattcagagctagaaagaagtcaaygcctggcttcaaagcttcaaaggataggctgactctggagctcatgcagcagctggtgactttaggttgaagtcaatgctcatttaccattctgaaaatcctaggatccttaaaaattatgctaaatatattgtgcttgtgctgtagatatagaaaagcaaaccctgggtgaatgcacatctgattacagcatggtttactaaatattttaagcctgctgttgagacctagtacttagaaaaagattccttttcaaagtatt

SEQ ID NO: 378545 - DNA, 578 bp, Homo sapiens
tcccagtaggcaggaaagtgttatggctaagcatgtggactctggcactagacttcctaggttccaaatatctgctgcttactagctatgtgaccttaagcaagccacttaccctctgtgttcctgagtttttgcatgtgaaaagtgagaaaaatgatagtacttattttataatattattctgaggattaaattagttaaaatgagtaaagtacttagcttrgtacctgtttctataaaagggttaagtgaatcttactattctagaaaagctaatttcaatgcaaaaacaaagcctgaccaatcagggtttgagctaacagggaagtattttaaagtttcaaataagtcaaacaaatttggatgctgagaaagcatacttttgaagtccctctaggagccatattttagaaaacacattttttcttgttccttacatccatattatcaccctcaagcatatgctaacaacattatcttccacttccaaagaatcacaaaatatggtaagatcatgactaggggaggggattcttacatgaaaaccccacttctggtttgagtcccatgttaaacat

SEQ ID NO: 378546 - DNA, 610 bp, Homo sapiens
ataattatgtctttcctagaaggctatctttgtctgtagggatgcttttctgcatcttgttttcttttgtttcataatatctttgtgtaggtttctgtaacagtctggttttttttggtcattatgataccaaatttgaaccgtgagaaggaaaaggtaggtcagaagagcttttctaatttataacactaaggttcctcctctggttgttttttagaagtgtttaaaactcttcccttgtcttttctataatttcttagctctataacccttcttttttctagacccctctttttttggcccttactttttctttgcttctttttttctttacccaatgtagagctatgtcctaaaatgaagctttgtttgtgtattagtttgctagtgctgcttgaacaaataccacagagtagatggtataaacaaaataaatttattttctcacaattctggaggctagaagygcaagagcgaagtgtggtcatgattggtttcttctaagacctctcttcttggctttcaatggtcatctttttctggtgtcttcacatggtttttctgtaaattgttatctgtgtcctttttctctttttataaaaagaatctc

SEQ ID NO: 378547 - DNA, 577 bp, Homo sapiens
aacccataggctcaacatcacatggaagctgccaaggcttggagcatgcaccctgtgaagccacagcccaagctgtaccttgctccattttagccayggctacagcagctgggacacagggcaccaagtccctaggcacacagagcaggaggtccctgggtcaggcccatgaaaccattatttcctcctggcctctgggtctgtgatgggaggggctgctctgaagacctctgacatgccctgaagacattttccccattatcctgcattgtctgggggattaacatttggctccttattacttatgcaaatttctacagccaactcaaatttctcctcagaaaatgggtttttcttttctattgcttcctcaggctgcaaattttctaagcttttatgctctgtttcccttttaaaactgaatccttttaaaagtaccaaagtcaccccttgaatgctttgctgcttagaaatttcttctgccagataccgtaaatcatctccctcaagttcaaagttccataaatctctaggcatgggcaaaatgctgccagtctccttgctaaaacatagcaag

SEQ ID NO: 378548 - DNA, 577 bp, Homo sapiens
aacccataggctcaacatcacatggaagctgccaaggcttggagcatgcaccctgtgaagccacagcccaagctgtaccttgctccattttagccatggctacagcagctgggacacagggcaccaagtccctaggcacacagagcaggaggtccctgggtcaggcccatgaaaccattatttcctcctggcctctgggtctgtgatgggaggggctgctctgaagacctctgacatgccctgaagacattttccccattatcctgcattgtctgggggattaacatttggctccttattacttatgcaaatttctacagccaactcaaatttctcctcagaaaatgggtttttcttttctattgcttcctcaggctgcaaattttctaagcttttatgctctgtttcccttttaaaactgaatccttttaaaagtaccaaagtcacyccttgaatgctttgctgcttagaaatttcttctgccagataccgtaaatcatctccctcaagttcaaagttccataaatctctaggcatgggcaaaatgctgccagtctccttgctaaaacatagcaag

SEQ ID NO: 378549 - DNA, 402 bp, Homo sapiens
aagtccgcaaattagataatcctacattaaaaatgatcttggtggttaagaaaatatgtcttttaagaattgatcayatatgaggtagataaagacttgacattactagaagtcatttctaagaaatacaaattacccacttcagctaaagaacactttttttcctgagcatttttgcatttttgcatgctggtaagaggagccttcaaggagaaagggaatatactcaaattgaagagcaggattgaatatatcacacacttaggagtaactgagctatacatccaccaagacttccaataccagttcagaaggatgctggcatttttgttaacataattttaatatttgagagcttcaaatattctttgttattgctgctattctcaaactgttctccta

SEQ ID NO: 378550 - DNA, 554 bp, Homo sapiens
agtgacctaaagaagatttcaaggactttgcaaagtgtttatactttcttgtgaccagaaacctgagttaagaccatattgcacttgagactcaatctcatggaacagagcgttcacctaattgttaatcacagtatctcatcttggtgttagtgataataaaatgagaaaatgcatttgtggttgaagtaagcttaattagaagagctgctcgtgatctaattaactttatatggggggaaggtctgggaggcatttgcaaagggttttggttataaagaacagatgaaaaggatgagataatgaggagatggacttgaattgtaaataagagggaccataccaagttttcaacttcatgggcaatacgtgtaatatggctgtcatcagtgtaaatacagaaaatatctatgaattcatatttctcrtatctttcatctggtgtttttactgcttgaagggaagttcagggggctttaaatgatagagtgccttcttacagtgcctcttacacatgattggtgtagggtacaatctacagttgtagcttgctg

SEQ ID NO: 378551 - DNA, 479 bp, Homo sapiens
ggggcaggggggaagggggsgaggggggagcctcttggcttcgcactacaattcccaccaagcatctgtccctctctggcctctaataacgagtgcgccttgtggtccagcgtctggcaactttcacgcctagcgtcgcgtataccggaaaactgcatcgtccagaattgcttccgagtcggcgcggcgcaaggcttgctgggagacacataacctcgattttcttccgccatccggctaaatagtcccatgtgcactttgttccatggataaataaacactaggaacgcatttccaccctagatttcagcagaaatgctgaatgtaaaggaatatttgagtaaagtgagttgccgttcttgaagcccgtctcctaaggattctcccggtgtccgcgtagggatctcatgctatataggagggccctgccaggcaccgtctcctctctccggtccgtgcctccaagatggtgagtcttc

SEQ ID NO: 378552 - DNA, 479 bp, Homo sapiens
ggggcaggggggaagggggcgaggggggagcctcttggcttcgcactacaattcccaccaagcatctgtccctctctggcctctaataacgagtgcgccttgtggtccagcgtctggcaactttcacgcctagcgtcgcgtataccggaaaactgcatcgtccagaattgcttccgagtcggcgcggcgcaaggcttgctgggagacacataacctcgattttcttccgccatccggctaaatagtcccatgtgcactttgttccatggataaataaacactaggaacgcatttccaccctagatttcagcagaaatgctgaatgtaaaggaatatttgagtaaagtgagttgccgttcttgaagcccgtctcctaaggattctcccggtgtccgcgtagggatctcatgctatataggagggccctgccaggcaccgtctcctstctccggtccgtgcctccaagatggtgagtcttc

SEQ ID NO: 378553 - DNA, 570 bp, Homo sapiens
caggacattcctgccggattaagtctaaatcatgcaaagaggatacagtttctaaaaggaagatgtagttgtcaaagaaaaagaatactcgaccaaattgtataaatgaaaatttcaatacaaaagaagaaaactcattgttcctcctcatcccatcaactaaaataataatttaaataatttaagtgataataacagtagaaactaacatatatagcacttaatatgtgctgggaattattgttctaagttatatacctatatctgtatccatccatagatatatatgygcaataccttattcattgttctgaaatccaaaaagctttaaaatcaaaaatttttttcctagtcaacataactctacctgaataaattgaagtctatttataatactacccaatttgtgtagctgtgcataaatttcactataggaacagaaatatgtttaattaggggtacagtccagaaccctgctgggtgtgtttccttttaggccatacatgaatcatattactgtttaaaatttgaaaaactttaaatcccaaaatacattcagtttagggattg

SEQ ID NO: 378554 - DNA, 579 bp, Homo sapiens
caatgtcaaaaatccttgactttggaaacacataacccagatccttttttaacaagggaaggctcactggcaaggtccttggtacataagtcaagtatgatcaacaaaatagtggataaaaactggggctgtcattcacgttcataacttgtgaaaacctaattttatcttgcaattcttatagtctatcctgtgttcagaaatacaaggtgctgcagtttcagaaactattttctacatttaatatatctcaaaatatttaatacaaacaagagtccacagaaaaccataagtaactaatattttttactttccatattacagaaggaatgtatatttttagattaaaaacaaatcatktttgctttgcttagcacatttttgtgctgaccttcaaaaacagactacttgtgcaaatgttaaaaatatgatactcacactccaccaatgacacgaattgatccaattctgtgaaaatctccattatttttcaaaaaattaggaacagaatctatatgttcactaaactctttagcctgtccatggaagtgaggtttttcataaataataacctgaaaa

SEQ ID NO: 378555 - DNA, 590 bp, Homo sapiens
aattttctcaaaatgatttttaaaaggaattgtgataatgcgttcccaagactttcaccaaaatggactggacatgtaaatgacgccacccttctttatttctcatctctcctagaaacatytgcctcaagttcccaaacagattctggaaatcaggtttccagctgtcttggtttcagtaatcaaaatgtaccctttctctgtaatatttttatctttccttcactttcccatgttcaaaaatcaaaaaattttagacatgcctcatttaaatgcctgtttctgagtcttttcatccccccgaagaaagaggggttaagtaaaacgcagctcgctttcttaaacttatgagaggcttacactgtcttctcccgagattgcactagaatgaccattgtcattggaaggacacactccagaaaaccgtgtttacttcggactcaagatttcctggtgggcttaaaaaaaatggataggaaacagaactgagagtgagccaattccattagtattcagattttgtgatgtgattttagtcgtttgtgtgttcctcggtttccccgcttgtgaaacattttcattatgaccgt

SEQ ID NO: 378556 - DNA, 534 bp, Homo sapiens
caagcaattaaataacaaaatacgaatactgcaaatattacctaatgttaattcctttgcatcataatatatgcaacattgccaaaaattttttatttgcctacttagaacaatgaaacaccataattacagttcacattttcagcttttactgataaaaagcacaatgccatccttccatcctgtgaatgctcctttgtgctttgacaagacaataaaaggcaagagagtttacatctcacctaatttgtccccagttattaaaacatcaaattcaaaacatttcattctttgtcataagaagcatagtagttacaagaaatttatgatctgccactgaggtagaaaccacttttgtatacattttaatatgaaaggtaaaaatttctamtatatcttctaaaaattacataaaacaaatattggtgagaccacccaaataccattttcatgtcacttctgacattgccatttgtattgtttgtcataaagaacatagaaaatatttttccttaactgttttctataactgta

SEQ ID NO: 378557 - DNA, 602 bp, Homo sapiens
attcagtatattaaatatcaatttaaataaattatatgttaaatgccatatatatcaaatgccagaatatatggcatctttcgatgtattaaaayaggaattataactatatattttaacacttaaatattttttttgagatagggtgttgctctgttgcccaggctggagtgcagtggcataatcatggctcactgcagcctcaacatcccaggctctcaagcactcttcccacctcagccacctgagtagttgggactacaggcacatgccaccacactcagctaattttttgtttgttgtagagatgtgggtctcaccttgttgcccagactggtctccaactcctgagctcaagtgatccacctgcctcagcctcccaaaatgctgagattacaggtgtgagccactgtgcccagccaatggttaaatctttatatgagtagctactaacttttaaaataatttaccaaagtataatgaaccacacctcaacatcatcatttataatcaagttatgtgaaaagtgctatgctaaatatttcacatgaattacataatttaattataaaaataaatctatgagacagaaactaatatta

SEQ ID NO: 378558 - DNA, 594 bp, Homo sapiens
tattggtcaggctggtctcgaactcctgacctcaggtaatccacccgtctcagccacccaaaataatttttataactgtaaacacaaaacattttttcttgttgatgtaaaccatgtaaaatagaatttatcagaattcttgtttgtagggtacaaacctgtagcagtaccacaagctttgtgtgtgtgtgtgtagtactgcatgtttacacagcctttctatcaataagaaaaacagaactagaggaaagattgcattatcttttcattattatggaaaataatattactaaattattgtcatatgaaaggctattgaagagtacactgccaaaaatataggaaaaaaagtgattgtgcaaggcatttagtaagaaaacaaattgtttttctagtcaaccttttaaaattagtaatttgcatggtttatgttttcattcaatatrttcatttttatatctaattttcttttaaatcctttttctttaaagaggaccctccaaattgtaaaaacttcagatcccacaaaacctggatatgtcctctagtgcatactatgtgtcagatacatgctcattcttagacatagagata

SEQ ID NO: 378559 - DNA, 602 bp, Homo sapiens
attcagtatattaaatatcaatttaaataaattatatgttaaatgccatatatatcaaatgccagaatatatggcatctttcgatgtattaaaacaggaattataactatatattttaacacttaaatattttttttgagatagggtgttgctctgttgcccaggctggagtgcagtggcataatcatggctcactgcagcctcaacatcccaggctctcaagcactcttcccacctcagccacctgagtagttgggactacaggcacatgccaccacactcagctaattttytgtttgttgtagagatgtgggtctcaccttgttgcccagactggtctccaactcctgagctcaagtgatccacctgcctcagcctcccaaaatgctgagattacaggtgtgagccactgtgcccagccaatggttaaatctttatatgagtagctactaacttttaaaataatttaccaaagtataatgaaccacacctcaacatcatcatttataatcaagttatgtgaaaagtgctatgctaaatatttcacatgaattacataatttaattataaaaataaatctatgagacagaaactaatatta

SEQ ID NO: 378560 - DNA, 613 bp, Homo sapiens
acaaggtatgagaaataggcagatggagaaactgctgcactgatcctaatgtgacctacataatttaatttatagctgccaattattgcytgagacaggttagacgagtgaatcaagctggagaagtcttactaataaccatgtatctaatttaggactaaaatcaagtgtatacaagaatcaaaacaatctgacagctgtgtggcattcttacatgaactgcttttctcatagctattacctggaattcactcaaaagttggcaggttgaaagcattactattatgaaatcccaaaaggcacttggtccatctttattattaagagttaaagtgtttattttaattggtagcagtactgtattttctaatatagctacaactttcaataattacttaatttatataataagtatacatacatttcccatattggttgcaattatcaatctattcaggcagtttatttttatgagtgataccatttcaggcattcttttttgaacatactcatctaccttttattctaattcttcaatatgtaaaattcaattttctctacattgttatttcatataaatttttttctaaatattttaattttgaaaatattt

SEQ ID NO: 378561 - DNA, 602 bp, Homo sapiens
attcagtatattaaatatcaatttaaataaattatatgttaaatgccatatatatcaaatgccagaatatatggcatctttcgatgtattaaaacaggaattataactatatattttaacacttaaatattttttttgagatagggtgttgctctgttgcccaggctggagtgcagtggcataatcatggctcactgcagcctcaacatcccaggctctcaagcactcttcccacctcagccacctgagtagttgggactacaggcacatgccaccacactcagctaattttttgtttgttgtagagatgtgggtctcaccttgttgcccagactggtctccaactcctgagctcaagtgatccacctgcctcagcctcccaaaatgctgagattacaggtgtgagccactgtgcccagccaatggttaaatctttatatgartagctactaacttttaaaataatttaccaaagtataatgaaccacacctcaacatcatcatttataatcaagttatgtgaaaagtgctatgctaaatatttcacatgaattacataatttaattataaaaataaatctatgagacagaaactaatatta

SEQ ID NO: 378562 - DNA, 245 bp, Homo sapiens
tagttctcaatagtaacttcacatcagaaacactgggtagcttttaaaactacagatgccctgatcttattttcaaaaattcggattcagcaattgatttcagagtgcagccagggttgagaatcatggctatcagagtaggaagctgcagaaaacagttgtrtctctcgctgcacacttaagacacgattaacaaatattgactggcttcaattatcttttatttatgcatgcagaaagtcaac

SEQ ID NO: 378563 - DNA, 245 bp, Homo sapiens
tagttctcaatagtaacttcacatcagaaacactgggtagcttttaaaactacagatgccctgatcttattttcaaaaattcggattcagcaattgatttcagagtgcagccagggttgagaatcatggctatcagagtaggaagctgcagaaaacagttgtgtctctcgctgcacacttaagacacgattaacaaatattgactggcttcaattatcttttayttatgcatgcagaaagtcaac

SEQ ID NO: 378564 - DNA, 608 bp, Homo sapiens
tatcctgtggcttagtttccaccttttttaaatagagtgtttaggtaaaagggtaaacttaacatttatggggtgctttcttatgctaggtactttaacagtatctaatttaatctgtacaaaatataacacattttattttttacttttacagattaaaaaaatcttcacaaggtaacagatgttagctaacagagaggtaaattaataagtagtagaataaatttgctggactcagaagcctaagttttttttttttcaactatcagtcaatgctttctatataaaacagaggtactactgcttaccttgcagaaaattgtaaagggtacataaagtaatatggaaaaacaaggacacaaaagtatttccaaaatgtgtcctccttacaaagacttgggaggtaagacagataatgatggatcagaaaagtgaaagaaacaaaaattaggtatcaagaccagagttggcaatttgtattgtgatgttggattgctactgacacctagtggctaactgctagtgacaaaataaaaccagaaaaraagggatggagaaccacactttaaaatccagaagactatcaacctattttcagtaaatattgt

SEQ ID NO: 378565 - DNA, 473 bp, Homo sapiens
aaggttaagacaattgcccaagaccacacggctggaaagtagtggaatcagaattcaaacatcaggcagttgggcttgagctcctacatgctaaaccaccacacacactgcctcttatcatgccaggggctcatatcctatgacacttaaatatagaaatattaagatctgcgtattctgttttagccacaaaatattacctgccaaaaggctggaaaacttgggagagtcactgctctgatacagaaacgataacacagcagcacttaactyttttgccatactcaacacaaccaacaccacactggtcccttttatttttaaacaaggtttcattggaggcttccctgatcctattaaacattcctaatcctgatactcatttgctcagcaaacatttcctaagggtttgcaatgaatgcaggcaatccaatcattcatttactcatttaacatttgaacacctattcttt

SEQ ID NO: 378566 - DNA, 473 bp, Homo sapiens
aaggttaagacaattgcccaagaccacacggctggaaagtagtggaatcagaattcaaacatcaggcagttgggcttgagctcctacatgctaaaccaccacacacactgcctcttatcatgccaggggctcatatcctatgacacttaaatatagaaatattaagatctgcgtattctgttttagccacaaaatattacctgccaaaaggctggaaaacttgggagagtcactgctctgatacagaaacgataacacagcagcacttaacttttytgccatactcaacacaaccaacaccacactggtcccttttatttttaaacaaggtttcattggaggcttccctgatcctattaaacattcctaatcctgatactcatttgctcagcaaacatttcctaagggtttgcaatgaatgcaggcaatccaatcattcatttactcatttaacatttgaacacctattcttt

SEQ ID NO: 378567 - DNA, 473 bp, Homo sapiens
aaggttaagacaattgcccaagaccacacggctggaaagtagtggaatcagaattcaaacatcaggcagttgggcttgagctcctacatgctaaaccaccacacacactgcctcttatcatgccaggggctcatatcctatgacacttaaatatagaaatattaagatctgcgtattctgttttagccacaaaatattacctgccaaaaggctggaaaacttgggagagtcactgctctgatacagaaacgataacacagcagcacttaacttttttgccatactcaacacaaccaacaccacactggtcccttttatttttaaacaaggtttcattggaggcttccctgatcctattaaacattcctaatcctgatactcatttgctcagcaaacatttcctaagggtytgcaatgaatgcaggcaatccaatcattcatttactcatttaacatttgaacacctattcttt

SEQ ID NO: 378568 - DNA, 545 bp, Homo sapiens
accatttgttgaaaagattatctttgctccattgtagtgcctttgctcatttgttgattatcagttgactgtatttatgtaggtctgtttctaggccatctattctgttccatctatctattttcctattcttttgctaatatcatgcagtctttgtagtaagttttgaagttcagtagtaayagtcctgcaactccattcttcttcattatggctattctgtgtattttgccactccatataaactttagcattagtttgtggatatccacagaataattttttgaaattttgattgggattgcattgcatctatagatcaagttgagaagaactgacatcttgacaatattgagtcttcttatccatgagcattgaatatctctccatttatttagttcttctttgatttctttcattagagttttgtagtttttctcatatgtatcttgtacatattttgttaagtttatacataaggatttcattttgggggtactaatgtaaatagtttcgtttttaatttcaaatccctcttgttcatt

SEQ ID NO: 378569 - DNA, 560 bp, Homo sapiens
ggacagaaatgccacaggtagcctgaggacatgagctctttgtcctgtgggtctcagacatcaacaatgctgccactgttctcagaaagactggaatgtggatggaggccagctggactcaactaccacaaaagcagaccaaagagttgcaaatgggccaggaggaaggctagaagatgggtatttgagaatgcgggttgtggtgcactctcacagtgctcttcaaagcactgggctcttcccagttcaacgcgtgccaaatacccaaaggagcaagcaacatgcttctgattcccagtagaaagccatggcttagaagacccgtgaaggggaaaattkcctcaacaatgactaggtttctcattcatggcaggtgctttatacgttgatcccatttggtccccacagcacctgtgtcaagtttcaatcatcccaatgatgcaggtgcattgtaacccttcaaccaattttcgttatgattattgttattgtcatcattattattggaaacggagagaaagagactcatggcagttaactcatttgcccaaatttataca

SEQ ID NO: 378570 - DNA, 560 bp, Homo sapiens
ggacagaaatgccacaggtagcctgaggacatgagctctttgtcctgtgggtctcagacatcaacaatgctgccactgttctcagaaagactggaatgtggatggaggccagctggactcaactaccacaaaagcagaccaaagagttgcaaatgggccaggaggaaggctagaagatgggtatttgagaatgcgggttgtggtgcactctcacagtgctcttcaaagcactgggctcttcccagttcaacgcgtgccaaatacccaaaggagcaagcaacatgcttctgattcccagtagaaagccatggcttagaagacccgtgaaggggaaaatttcctcaacaatgamtaggtttctcattcatggcaggtgctttatacgttgatcccatttggtccccacagcacctgtgtcaagtttcaatcatcccaatgatgcaggtgcattgtaacccttcaaccaattttcgttatgattattgttattgtcatcattattattggaaacggagagaaagagactcatggcagttaactcatttgcccaaatttataca

SEQ ID NO: 378571 - DNA, 618 bp, Homo sapiens
attggcccaatcctgtagagcctcagttttctcatttgtgaggtgggaatcatcatgggtactatgtaagtttgtcttagggaggggggctatgcatgaaaactattgctctaagttctccataaagaaaaaagtggctatgttctgtcctactctgtctaggccttctcaggccttcaamcattgcccatgcccacagcccagtcatcatcatccacttagttgcaatgtgactccacgcatgtcctggccaattcagtaacctctacacaatgcagcaagatggcactggcagtatggcacctagatcctgggtgttggagccaggcaacatggcttgctaaaggcaatgtacagtaggcaggatttgaagacaactgctaataacctatacccttttattatcccctcctgttgagtgtgaaatgacctgttaatatgatgatatgtggcaaaagggattttatagaggtaattgggggccctaatcagttgagtgcattgaaagggagattatgcaggtgggcctgacccaattacatgagctctttaaatctggatctacagattagagacaaatgaagtcagagactcaaagcataagagatattcaacatg

SEQ ID NO: 378572 - DNA, 618 bp, Homo sapiens
attggcccaatcctgtagagcctcagttttctcatttgtgaggtgggaatcatcatgggtactatgtaagtttgtcttagggaggggggctatgcatgaaaactattgctctaagttctccataaagaaaaaagtggctatgttctgtcctactctgtctaggccttctcaggccttcaaacattgcccatgcccacagcccagtcatcatcatccacttagttgcaatgtgactccacgcatgtcctggccaattcagtaacctctacacaatgcagcaagatggcactggcagtatggcacctagatcctgggtgttggagccaggcaacatggcttgctaaaggcaatgtacagtaggcaggatttgaagacaactgctaataacctatacccttttattatcccctcctgttragtgtgaaatgacctgttaatatgatgatatgtggcaaaagggattttatagaggtaattgggggccctaatcagttgagtgcattgaaagggagattatgcaggtgggcctgacccaattacatgagctctttaaatctggatctacagattagagacaaatgaagtcagagactcaaagcataagagatattcaacatg

SEQ ID NO: 378573 - DNA, 642 bp, Homo sapiens
atgagacttaacacagactgcctttatagcaggtgtgaaatcttcagcccacaggccacatatgcacctcagcttaatgtcatctagccagaaggcaagcacccagagctggcactgccgttggtaccttctgctgtgaaaatacaagagggcatttgcagtctttattatcctataaacacataaactggggctgtttcccattcacctcactttctgccataattagaattctcartcttcctctgccctttcagtaagtgtctttgtgtgcctctaaatgttgctatgcataaggacagtgtgtgtgtttgtgtgcatgcatgtgtgtgtgtgtgtgagtgtgttatcagcctctcagtgtgtcttatgtgcaggtgcatagctccctttgagcacatctctcattattctttgtcctactgtatttgctggtcattctctttgtatggctcatagcatatgtaagttcagcattcactgcctttctttactctcatgtgattgtctcgatctatcacttaaaattctagaatgctagaattaaaatggaatattgtgttattttacagttggcaaaattccttaataaagaaccaaaatgtatattttattgcttactgaatgtattgaatagcattc

SEQ ID NO: 378574 - DNA, 544 bp, Homo sapiens
gcttcactaactgctgtaaataatgagtgtcgtagtccagacatcttttagctgtaggagtgtgattgctgggaaaagaagaggttgtgctaaaccaaaggacctgaaggaccctcttatgtaatcatgagcctcaggggaatgtttggtgttttttgtcctgatttttgctttatggattgtgagcattaagcttgactaagctttctgtcactgtctctaaattacgtttgtccaaatttgccatggttcctattttctgtatcatctgtatttattatttgaccacaaaagagttagaaaatgaacatgattatatgcttcccaggattagttattcattgagaagtgttccgactcagatatttyacattaaaaaaagtgtgtggaggggtgcacacaggtcttctggtcaagctttcttactgtactctatatggagattacatatatgtatgtattatctcattcagggctcagcatgaaattggagtaatcccggatttataagtggatgatgattatttccttccaactcagtgga

SEQ ID NO: 378575 - DNA, 657 bp, Homo sapiens
  misc_feature (1)...(657): n = A,T,C or G
nnnnnnnnnnnnnnnnnnnnnnnnctttttacattcaaaaaggagttggcgtgtacactaagaaacagcagacttagacctcccgcagttctgaattgtgcttaaacaagtattcaagcacatggggatttctcaagaaaatttggggaccatatcttagaaaaaaaacttacaaaatattcgttgaagactataatatgctaaagctaaggaacaaaattctcttgattgttctaaaaatacctagtaagagccacagaactcttccrtagttttctaagtagtttcataagtgtggattgtggttgccctgaaacttgacatctccctaccaagtacttgacaagtgacctggcaaaaatgtgttcaatagctcatttttgacatactccttaagaaatcattgccagagatttgaaactgcttcaagctgatgtctttttcaaaacaaaacacatactcacacacaaatacaaaatcgcattgctatcagtgatctggaaaataagcttgcaagctggccatgtggtgttctgaataatttttttaaagtagaagaagaaatgacaacagtgcaaccaacagtttctgtttaagttttatttgctaagacgttagcataaggaacatcttgtgatttaattaatcagaagatgg

SEQ ID NO: 378576 - DNA, 592 bp, Homo sapiens
tccatgacatgaaaccccacatttcccttttgcactgccctagcagaggttctccatgagtgccccatcccagagcaaacttctgcctgggtacccaggcgtttccatacatcttctgaaacctaggcgggggttcccaaaccccagttctttatttctgtgcacaggtaggctcaacaccatgtggaagctgccaaggctttgggcttgcaccctctgaagccacggcctgagctcaatgttggtccctttcagccatggccagagcagctgggacacagggcgccaagtccctagactgcacacagcatagggaatctgggcctggtctcccaaaccacttcttcctcctaagcctctgggcctgtgataggaggggctgctgtgaagacctccgacatgccctggagacattttcccccttgtcttgaggattaacattcagctcctyattaattacgcaatttctgcagccggcttgaatttctcctcagaaaatggcattttctttactatctcattgtcaagctgcaaattgtccaaacttatgttctgcttcccttataaagctgaatgtctttaacagcaccca

SEQ ID NO: 378577 - DNA, 563 bp, Homo sapiens
gcatcagggccattatgaacatgttacagtgctgcagagatttagtttatggccagttttggggccagtttatggccagattttgggcggcctgctcccaacatataatcactgtaattttttgtctcctgtttacaacctcaagtttgtgttcaartgtcattcttctggttttagatatcatgttgtcatgctcactttgctcaggggtgttttcaattaattatatgaagaccgtgtgcagacagaccccttttgacccttactgtatgactcctgcctcctggtgttcatgcctttgtgtaattctctcctatgagcatggatgggacctgtgatttgcttctaaccaatagaacatagcacaggtggtaggatacccctcccatgattatgttatgttatataatactctagcttgcttgctgactcactctagagtctccttgctggcttaatgatgtaagtggccatgttgaaaagtttcatatggcatggtcctgcagatgtactctagaaaatacagatatcctctagaaactaaaagcaacctctagccaatg

SEQ ID NO: 378578 - DNA, 556 bp, Homo sapiens
tagtgttatagtgttagttacaattactaaggagaaaaaatagagcaaagaagggggatacaaataacttagatggaaatgaaaattttagaaaaagtaagatttcattgaaaatgtgaaatttgagtaataacctgaaggaagacatctgtccaagctgatactcacacggttaattccaagaagaacaagtkcaaatacctgaggtgggagcatgcctggcacacgtaaggaacaataagaaggctggagagactggagtcaaatatgggtgaagagttgtagcaattgataacagaaagatgataggtcacataggattttgtgattaatagcaaaaagcgtggttccactcaaagcgacatggagatattaaaaagttcttagcagggaaataatctgacttgacaacattgctatgctccaatgttgaaaataaagtgaagaagcctcagctagaattaaggtgacaagttaggaggttattacacaaatccaggcaatatatgatggtggttcagacacgaaaagtgaaggtgcctagaatttatcaaat

SEQ ID NO: 378579 - DNA, 556 bp, Homo sapiens
tagtgttatagtgttagttacaattactaaggagaaaaaatagagcaaagaagggggatacaaataacttagatggaaatgaaaattttagaaaaagtaagatttcattgaaaatgtgaaatttgagtaataacctgaaggaagacatctgtccaagctgatactcacacggttaattccaagaagaacaagttcaaatacctgaggtgggagcatgcctggcacacrtaaggaacaataagaaggctggagagactggagtcaaatatgggtgaagagttgtagcaattgataacagaaagatgataggtcacataggattttgtgattaatagcaaaaagcgtggttccactcaaagcgacatggagatattaaaaagttcttagcagggaaataatctgacttgacaacattgctatgctccaatgttgaaaataaagtgaagaagcctcagctagaattaaggtgacaagttaggaggttattacacaaatccaggcaatatatgatggtggttcagacacgaaaagtgaaggtgcctagaatttatcaaat

SEQ ID NO: 378580 - DNA, 582 bp, Homo sapiens
aaataacaaaaccaattaccatatgtgcattatgtaagaatcatttttycagacacataaaattacacagtatcttttcttttctaaggaatagtttctacccaaaaagaaggcccaaatttatatagtcaggtttaaaaaaaaatctcattcactctaaaaggtatcttcttgatgttcatgagaacttcaaataataattaaaatacatataaaaataaaaagaaaactaagtttagtgattggctacttcactgaagaaataatcaaacctccacataaattataaatgagcttaaatgcactgataaacttacaaaaacatgaactataatccaccaaaaagtttatgtgaagaaacaaaccaagacaagttgctgagtactttatttgacttttgtttgtggtcatttgatgaaccaggtgaacttactttgatttttaagagatattgaggacaatatacaaagtctatgggtttacctatgcttaggagtctgataggagacatacacttaaagaggccaccaagggttacaatctccttacaaaagtgaatttaaaatgtactaacccctcctt

SEQ ID NO: 378581 - DNA, 582 bp, Homo sapiens
aaataacaaaaccaattaccatatgtgcattatgtaagaatcatttttccagacacataaaattacacagtatcttttcttttctaaggaatagtttctacccaaaaagaaggcccaaatttatatagtcaggtttaaaaaaaaatctcattcactctaaaaggtatcttcttgatgttcatgagaacttcaaataataattaaaatacatataaaaataaaaagaaaactaagtttagtgattggctacttcactgaagaaataatcaaacctccacataaattataaatgagcttaaatgcactgataaacttacaaaaacatgaactataatccaccaaaaagtttatgtgaagaaacaaaccaagacaagttgctgagtactttatttgacttttgtttgtggtcrtttgatgaaccaggtgaacttactttgatttttaagagatattgaggacaatatacaaagtctatgggtttacctatgcttaggagtctgataggagacatacacttaaagaggccaccaagggttacaatctccttacaaaagtgaatttaaaatgtactaacccctcctt

SEQ ID NO: 378582 - DNA, 453 bp, Homo sapiens
ctatgttttataaaaagctagcacagacgttaacaaatagtagtggaacaaaataaacactgtgtcacagaagaacaaaatatataatgaattttaatgtatgacaaagtggcattgaaaatcagtgggtagtagaatggcaaattcaataattgatctggggttatccggatgaaaaaagaaataaattttaattgctatgctayacaatgcacaaaaattctgtgtatggcttcgtaaagagtcagcttggcaaatttgaattatgttttctagaattttcttttctgtacgtttttcgtggtttgttatgaccaccaaagaaacttgcttgtgatttgaaaggaagatgagaacagtgactatatgtactccctgaaattcaatgtaggttaggccttcttgtggctcatgcacattttttttgccatctactggccaatctttttggca

SEQ ID NO: 378583 - DNA, 453 bp, Homo sapiens
ctatgttttataaaaagctagcacagacgttaacaaatagtagtggaacaaaataaacactgtgtcacagaagaacaaaatatataatgaattttaatgtatgacaaagtggcattgaaaatcagtgggtagtagaatggcaaattcaataattgatctggggttatccggatgaaaaaagaaataaattttaattgctatgctacacaatgcacaaaaattctgtgtatggcttcgtaaagagtcagcttggcaaatttgaattatgttttctagaattttcttttctgtacgtttttmgtggtttgttatgaccaccaaagaaacttgcttgtgatttgaaaggaagatgagaacagtgactatatgtactccctgaaattcaatgtaggttaggccttcttgtggctcatgcacattttttttgccatctactggccaatctttttggca

SEQ ID NO: 378584 - DNA, 584 bp, Homo sapiens
ctcaattgaccacacttaaagcatgttctctagattagctgaaaataattactsctttctcttaatttataattgtcttgttgtgaagtcacattttagaataatgctttctaagttattaatctttagtttatggatgagaatatgagacagagtcaaatctttttaaaaactttcttttttattagaattatcactttaccattatgtaaaagaactttgcatctgaaaattgatggtgtgagttatgtattatagcatttcctaaggtatcagagtcttcagccttagaaccaatatccatcccagcattttgggagatcagctgaggtcaggagttcaagaccagcctgaccaacatggcaaaacctcgtctctactaaaaatacaaaaattagccaggcgtggtagcatgtgcctgtaatcccagctactcgggaggctgaggcaggagaatcgcttgaatctgggagggagaggttgcagtgagccaagatcacgccattacactccagtctgggtgacagagcaagactctgtctcaaaaaaaaaaaaaaaaaaaaaaaaagaaaagaaaaaagaac

SEQ ID NO: 378585 - DNA, 565 bp, Homo sapiens
tttacccataaatggttcagcaggtaacatggttaggcttttgcccccacctaaatcttttcttgaattataatccccataatccctataatcctcgtgtgtcaaggaagataccaggtggacataattggatcatrgggccagttttccccatgctgtccctgtgatagtaagtgtgttctcaggtgatctgatggttttataagtgtttggtagttcctcctgcattcatttgccttcctgaggccttgtggagaaggtgccttgcttccctttctccttcccccatgattgtaagtttcctgaggcttccccagccatgctgaactgtgagtcaattaaagctctttcctttagaaattattcagtctcaggcagttcttcacagcagtgtgaaaacaaactaatacagtaggcatcattaattaataaagactttcatttttaaagttgctaccattcaattatctcactccatataattaaaaataattattttcatccaccactgcttagatgtttaaaaatatcaaatcatcagaaaaatcgcaactagagtacaaaa

SEQ ID NO: 378586 - DNA, 517 bp, Homo sapiens
tgtgtgagacctgcttgattcttccagatactataatccaaatttatataccagtggaaaagcatatcccatctgcttctctttttctctcctaatctctacccagtgtttaagtaaaattaagtgatacaaaaaagggaagtgtaatctgagcctccggatatctcctgcagctgctcatggrgaaaggggtggatattgcttcagagaggatttaattatcttttgagcaaactcctcccacagtatgtaatgaaacaggatcacactgtcaattggatctaatcaatggtgtataatttctcagtaaacgtatgtgttctctattttgagtacacattaatcaccctcttgtgcttgaaacgttatttgggtgtaaatcatttgcttcccactaggtatatgcttcctcaggaaaatgtaagttgaggccagttttgtcttacagaagcagaattaatatagctttagtaactctaagattgcaacagaaatcttaaaaacatgactcaaagct

SEQ ID NO: 378587 - DNA, 539 bp, Homo sapiens
catcccccagtttctagtttatttcaggactaatataaatattatattcacaagcaacaaaaaagtatataaatttgtggcatcagtgaaaagacgtatgctattttaattgtaaagtaataaatttaaaatacgctattggtaatatctttgttaagtttaagacaataggaggctgagtggaagaagatacagctacactggggaaggcagaattaagtaataaaaggatcatacatatcttattaagtgctgcattcccagcacttaggagagtgcttggtacctagttcaattaaaacttgctgaatgaatgaatgtactatactactatagtacattttctagcctataatcacgtggcttscttcagaaaagattccattttgtaggacagaaatactcattttgattatgacccattcatttgattgaatcatttacttagacatttcttgagcatctactatataccacactttgccagattttatgtctggaaacacaaagatgaataagaaatgacctagaagagttta

SEQ ID NO: 378588 - DNA, 576 bp, Homo sapiens
gctgggaagtccaagatcaaggtattatcattttgtttcttgccgtatcctcacatggcagaaggcagaagggcaaaagggaacacacctgmcactcaagcacttttataactcgttaatctctttgctagaattccttcctcataattgcagattctaaaaggttccacttcttaatattgttgcattggagacaaagttttatgggaggcaaggcccttggccgcccaaggtttcaatgataaatcaactcacaataagacagattaataagaaaaaagacatacaaatctattaagccatgttcatggggagaatcacagaggattcttccaacaccatccaggagcttatatatctgctcaagaatgggggcttggatcctggtaaaacaggttataaggtgggggagaataataattccattgagtggcaataattgattgcctggatgaattgttggatcaaggaacagaaattaatttgtaaatagttatctttggaattgaaatgatccttggagtcagtctttatctttaaaaagggtgtgttcagatgcagttacatttttagcct

SEQ ID NO: 378589 - DNA, 615 bp, Homo sapiens
agagatatttggccatgtgaccttgatctatacaagcatattaaggaagaagtaagagaggccatttgagattaggagccctaagcctcttttaaattcttaataatttatagcttaaatcctttggcacatacactaccaagtttgccatakataatgtgtcatatatagcttaaatcctttgggatatattcatacatataaacagagagtttaaagtggagactgatgggatgggaagaagaatagtttttaaaaatatttctgccttcataaataaaactcaagacactcccacacttgccatatcagctgaaaacagcaggatgggattagatattttgttctccacatgttctctcctggcctgtgaggaaaagaagggatggccatgaatacatacagtctgaaaaatactagaaaaatgccttgtttgacagtcaaatcaaccgacagctttaaaacgtggagtgttttcattcagattctggcatctgacagtcaaatcattcttcctggagttggccttgtcagtaacataatgatgtgaaaattactgagagtttgtggaggatccaggcttcccgaggaatctgaagctatttatttgtgggc

SEQ ID NO: 378590 - DNA, 551 bp, Homo sapiens
aagactacaagactttcttgctccttattaaaaacagaaaatctgtttaggcagcagctacagcacaaaggcagatagatatattatgggcaaaaaagagccaaactacaggcaggccaacatcaatggaaacagggcctgcggatctctaattaaacacagtgcctctctcaggtcaggaaaatcacaaacaatagcaatcctctttccctgcagtaacactgagagaatgttttcttcaagggaagagaagaactgcttgcgtgcctgcctgcctgccttctttccttccttccttccttcctttcctccctccctctctttcttccttccttccttttttttccttccccctctccttatcttttttctcttccttctcgcttctctccctccttctctctttttcctttctccctccctccatcctttccttctttcccttccttyctttcttctttctctctcgttccttctctctttcttccccccttactccctccatccttcttttctttcaccagctcactgaagattctggtttgtgacca

SEQ ID NO: 378591 - DNA, 608 bp, Homo sapiens
tggtgtcttggcacccagaaggcactgagtaaacttgttaatgtcatttttagagaaaaaatyaaagaaacaaaaatctaccgaaagcacacacacacacacacacatatacacagacacacacacacacatccctctcttcttcggtgaatttcccaccaatgttaagggagtatacttggcttctgttcttattcaaaactattataccaaaatatctgctttattatctaggaacctgaaagcgaattccctgtttgctcatgtttacatacatggaagctctgtgaacactgggatattcaaatttttacctcatgtatgcaaatctaaatattttcactgtaccttcgcagtatcttaaatgcaatcatttattttttaaaaacttttattttgagataatggtaagtttaaatgtggctgcaagaaatggtgcagaagggtctcaaacaccttccactcagctttccccaatggcaacatctttcatgactatagtacaagatgacaaccaaggaattgccattggcatccatcacacctgacttaattcagatttcaccagttttctgtccactcgtttgagtatgtgtttaattctatgc

SEQ ID NO: 378592 - DNA, 590 bp, Homo sapiens
agtttcagaaactgacagggtggtcaaaattcaagattttaaaggaagatgatttggggggcgccttagattggtttaattaaagagaagcccacttgaaagtttcatctggaagaattggaaaaagccttctctttcaatctctctcagtttctctctctctttctttcctaattattttcttcttctatcacaaagattttgaggcatattccagaatgatagggagtttcccaagttagaagaattgggcccagagttttaaactgcccctctcattaaaggaccccaaattactagaaatatcatccagcctgaattcasaacatttgcataaagtatgagtaaacaatccctgcttagaatttattcaatatgggactgcaaatgttatttcatccattcgcatattcattcattctacacttaacactgctaacatttgttcattaatttgccaaatgttctctgtctccttgtacttaatacatgtgaaccagattttcacttccctctgtggatgcctctggtagccttaagagtcttcatagaaaatgtgaaagcaaaagtgtctcttcacatttgacata

SEQ ID NO: 378593 - DNA, 590 bp, Homo sapiens
agtttcagaaactgacagggtggtcaaaattcaagattttaaaggaagatgatttggggggcgccttagattggtttaattaaagagaagcccacttgaaagtttcatctggaagaattggaaaaagccttctctttcaatctctctcagtttctctctctctttctttcctaattattttcttcttctatcacaaagattttgaggcatattccagaatgatagggagtttcccaagttagaagaattgggcccagagttttaaactgcccctctcattaaaggaccccaaattactagaaatatcatccagcctgaattcacaasatttgcataaagtatgagtaaacaatccctgcttagaatttattcaatatgggactgcaaatgttatttcatccattcgcatattcattcattctacacttaacactgctaacatttgttcattaatttgccaaatgttctctgtctccttgtacttaatacatgtgaaccagattttcacttccctctgtggatgcctctggtagccttaagagtcttcatagaaaatgtgaaagcaaaagtgtctcttcacatttgacata

SEQ ID NO: 378594 - DNA, 581 bp, Homo sapiens
acttactcagtcatttaaggacagttttatcaacagtttaaaaatatgatggagattaaatatgtaaattgccagaggacatagttttggaataagggagtttatggtttgtcaacttcagctaacatccaatgctgaattttttctctaacttccctgtcaagtgacttgaacttgggcttgcattccatgacagatggagagctttccatctcttggatcagcctagtctatctttagactgctcttgtgcttagaaaatcttccttgtattgagaaggatcctaccgctttatagcttctatccatgaaataagataaygattttaaagatcttggtcctttgctgcaacatggtaattccttagtaaatgttaatgactattaatattactattattgtcttagaaatagtagaagtagtgttacataaatatacgaacatccatattgcttatttatggtgcatatggttaaagcttcctaattaagttaatggggacctgacaaagtcaattgaaccaattgaccttgatgagttgaacattgatggttgccatgatgccagaagatcagagctg

SEQ ID NO: 378595 - DNA, 512 bp, Homo sapiens
tcttcatgggctgatttgggccctagtctcagctgggaataaagccaatgccatccctcagaggtcagtctcacttatgcgaggtgcgygcctccttttctttctttcttttttttttttttttaaattggctcaagctagttcgtgttagatttctgtcatttgcaaatagagaaatcctgaccactgcagtcctgttccagcatgggcagggtggtaaacactgagagaataaagaggaagtgatgagagcgatcagctacaagagatatctgactctgtgcaacacactgtgttagaagctgcaggagattaaaaaggtgtcagagattgtattagtttcctgttgttgctgtaaaaaattaccaccaacatagtggcctacaacaccacaaacttattatttcatagtcccgacaatcagacatagggcttgctgggctgaagtcaggttgtcagcagggctgaattcctttctggaggttctcagggagaatctatcttcttgtttg

SEQ ID NO: 378596 - DNA, 512 bp, Homo sapiens
tcttcatgggctgatttgggccctagtctcagctgggaataaagccaatgccatccctcagaggtcagtctcacttatgcgaggtgcgcgcctccttttctttctttcttttttttttttttttaaattggctcaagctagttcgtgttagatttctgtcatttgcaaatagagaaatcctgaccactgcagtcctgttccagcatgggcagggtggtaaacactgagagaataaagaggaagtgatgagagcgatcagctacaagagatatctgactctgtgcaacacactgtgttagaagctgcaggagattaaaaaggtgtcagagattgtattagtttcctgttgttgctgtaaaaaattaccaccaacatagtggcctacaacaccacaaacttaytatttcatagtcccgacaatcagacatagggcttgctgggctgaagtcaggttgtcagcagggctgaattcctttctggaggttctcagggagaatctatcttcttgtttg

SEQ ID NO: 378597 - DNA, 579 bp, Homo sapiens
ttcccccctattatttttaaagtactaacccttattttattgacttgcagtggacacaaaatctagagagatgactggacgcatttttcctgaatagttggggattatattttattaactgcaacccagaagggtcatggctgtttttaaagagaaatttgcctcctggtatggtttcttgagatgatcagtatccggttttaggaggtttggcaatggtgttgggtgtgtggggctggtgggatatttttgttaatggtttgtttctctgtgtttctctcccagctatcggcaggaccctcatcccccgttactttagcactgtgtttgaaggaggggtgaccgacctgtattacattctcaaacactcgaaagagtcataccacaactcatccatcacggtggactgcgaccagtgtaccatggtcacccagcacgggaagcccatgtttaccaaggtacaggacaggctctgtcacatgcccggcttttcctactctgagwgcattaaagaataataattatggttttcctatggaacctggggccgattgctcatctcccagacactttcaacac

SEQ ID NO: 378598 - DNA, 502 bp, Homo sapiens
aatccaaccaacgctatgtgataaggatcatcactaactaattgcgtagtaaatcctgctacagacttcattccctgatgatattgtcaagtaataagtatttctttccggttcatggagataggatgttacttctgtgagtttgtctataaaactagttctgtataccaataccattttccactgacttttattgtgtaattaggtatatgatggccttgtatccatatccattatgcaaatagatatatattcacatggagaatatgtgargtggagaagtatatagagtatttagaaatataaagaaactacactgagaattgtgagaggaataaggcaataattgcaactttcaaaaataaaaactgtagagaaaaggaagaaggaagaaaatgccaaagatagatttatagctctaaatgatcatttatagctcaaagaaaaacttcagattttcattgctcagttctctcctctctgagtagggaacacagacatg

SEQ ID NO: 378599 - DNA, 502 bp, Homo sapiens
aatccaaccaacgctatgtgataaggatcatcactaactaattgcgtagtaaatcctgctacagacttcattccctgatgatattgtcaagtaataagtatttctttccggttcatggagataggatgttacttctgtgagtttgtctataaaactagttctgtataccaataccattttccactgacttttattgtgtaattaggtatatgatggccttgtatccatatccattatgcaaatagatatatattcacatggagaatatgtgaggtggagaagtatatagagtatttagaaatataaagaaactacactgagaattgtgagaggaataaggcaataattgcaactttcaaaaataaaaactrtagagaaaaggaagaaggaagaaaatgccaaagatagatttatagctctaaatgatcatttatagctcaaagaaaaacttcagattttcattgctcagttctctcctctctgagtagggaacacagacatg

SEQ ID NO: 378600 - DNA, 564 bp, Homo sapiens
tttgataattctgtaaggtctaactcaacacctggagaaaagaatcaaatttattgtgacgagctagtgagtacctgtgagagtaatatggtgttttttttgtttttttgttttttgcacatgtattactaatgtgacttaaaaactaattataattaaatcaagacatagaaattaaccaacattggttgatcaaaaacaaaaagtgttccattttattscaccctaactccaagtaagctatgtagttttacttctctgatcgtggaatttctctcctattaaaaggaaggtgtggaatataatcatggataacctcattacttttattaaataactgtcagcattttatattttattttttcccacatctgttaagtgccattcatgatcactaatcaagagctaatcagtattaccataaccgggatcatcctactcgaatcagagaaacatgttaagtatgttcctttttaatgattttttaaaaaaatatagaactagctaaagttgcatttgaagaccttcaggaatccattgggattaggagatgctgctgggaat

SEQ ID NO: 378601 - DNA, 564 bp, Homo sapiens
tttgataattctgtaaggtctaactcaacacctggagaaaagaatcaaatttattgtgacgagctagtgagtacctgtgagagtaatatggtgttttttttgtttttttgttttttgcacatgtattactaatgtgacttaaaaactaattataattaaatcaagacatagaaattaaccaacattggttgatcaaaaacaaaaagtgttccattttattgcaccctaactccaagtaagctatgtagttttacttctctgatcrtggaatttctctcctattaaaaggaaggtgtggaatataatcatggataacctcattacttttattaaataactgtcagcattttatattttattttttcccacatctgttaagtgccattcatgatcactaatcaagagctaatcagtattaccataaccgggatcatcctactcgaatcagagaaacatgttaagtatgttcctttttaatgattttttaaaaaaatatagaactagctaaagttgcatttgaagaccttcaggaatccattgggattaggagatgctgctgggaat

SEQ ID NO: 378602 - DNA, 564 bp, Homo sapiens
tttgataattctgtaaggtctaactcaacacctggagaaaagaatcaaatttattgtgacgagctagtgagtacctgtgagagtaatatggtgttttttttgtttttttgttttttgcacatgtattactaatgtgacttaaaaactaattataattaaatcaagacatagaaattaaccaacattggttgatcaaaaacaaaaagtgttccattttattgcaccctaactccaagtaagctatgtagttttacttctctgatcgtggaatttctctcctattaaaaggaaggtgtggaatataatcatggataacctcattacttttattaaataaytgtcagcattttatattttattttttcccacatctgttaagtgccattcatgatcactaatcaagagctaatcagtattaccataaccgggatcatcctactcgaatcagagaaacatgttaagtatgttcctttttaatgattttttaaaaaaatatagaactagctaaagttgcatttgaagaccttcaggaatccattgggattaggagatgctgctgggaat

SEQ ID NO: 378603 - DNA, 564 bp, Homo sapiens
tttgataattctgtaaggtctaactcaacacctggagaaaagaatcaaatttattgtgacgagctagtgagtacctgtgagagtaatatggtgttttttttgtttttttgttttttgcacatgtattactaatgtgacttaaaaactaattataattaaatcaagacatagaaattaaccaacattggttgatcaaaaacaaaaagtgttccattttattgcaccctaactccaagtaagctatgtagttttacttctctgatcgtggaatttctctcctattaaaaggaaggtgtggaatataatcatggataacctcattacttttattaaataactgtcagcattttatattttattttttcccacatctgttaagtgccattcatgatcactaatcaagagctaatcagtattaccataaccgggatcatcctactcgaatcagagaaacatgttaagtatgttcctttttaatgattttttwaaaaaatatagaactagctaaagttgcatttgaagaccttcaggaatccattgggattaggagatgctgctgggaat

SEQ ID NO: 378604 - DNA, 540 bp, Homo sapiens
tttttgtttttctctttatttgttccccttgaaatatatcatctaatctgtagtttctctaactaagcactcaaagttgcttttccaactggtatccggcccacttatctagaatatcagagtagctttccctatcaaacagcttcactattccactgattattcactggccgcaaaggcaaaacaaaagatttattgaaagaagtggcagtagcctctttgtatagatttggtwtccacctacttagcagacatctgcttttattagattggtgcagaagtaattgcggttactttttaattgcaaaaatcacaattacttttgcaccaacataatatttcaaagcatctttacttctagtgttgaaatatggtttttaatctaagaaaaattcccactatattatttttgacaacctctttcttgatttacataattggtcagggcacagtggtttacacctgtaatcctagcactttgggaggctgaggtggaaagattgcttgaggcctagagttattgactagcctgggcaaaat

SEQ ID NO: 378605 - DNA, 510 bp, Homo sapiens
ttctttttaattttccttactattaatattaacttctctggtaaaagaagaaaaataaaataaaccccttccaaatttytgtgaagccaggagaaaaaaaaaaaaaaacagagatatccactagcaacttgcaaagacaaaagggagttctaggggtaataaaacatacacttgacaaccgatattatccactggtgagatattgttcataaatccacagcctgaaattgcacgaatgatcaccctggttatcaaggccatgcttacgatggcctggtggctctgggaattacctccttggattgctgcaaatccctcatcttcaacaaattcatcatgcaaagtctccactataatgaaccttgggtaaagactacagtgctccaacgtattttaacatgttaagtggagtgtggcccatctcagaaacataacagtttgggaatgttagaaaagaaacttcatctttccaatttattttccaaaattatcttaccacatggcatcaat

SEQ ID NO: 378606 - DNA, 510 bp, Homo sapiens
ttctttttaattttccttactattaatattaacttctctggtaaaagaagaaaaataaaataaaccccttccaaatttttgtgaagccaggagaaaaaaaaaaaaaaacagagatatccactagcaacttgcaaagacwaaagggagttctaggggtaataaaacatacacttgacaaccgatattatccactggtgagatattgttcataaatccacagcctgaaattgcacgaatgatcaccctggttatcaaggccatgcttacgatggcctggtggctctgggaattacctccttggattgctgcaaatccctcatcttcaacaaattcatcatgcaaagtctccactataatgaaccttgggtaaagactacagtgctccaacgtattttaacatgttaagtggagtgtggcccatctcagaaacataacagtttgggaatgttagaaaagaaacttcatctttccaatttattttccaaaattatcttaccacatggcatcaat

SEQ ID NO: 378607 - DNA, 595 bp, Homo sapiens
caactactaattatgtgtgctcttgggcaaattccagtagcctccctgggtctcactttcccatctgtaaaatgaatgggttggtctataaatctgcaccattcaatatggtggccagttgtcacaagttgctatttaaaattaaatttagtttaattaaaagtaaataagattaaaaattcacttcctcagttatattagccaaatttcaaatgctcaatagccccatgtagctagtggctactgaactggacagcacagatgcagaatgtttgcatcatagcagaaagttctattagcactgacatagctaaaatttatgtttcttaccaaactgaatttacatgcttataccaaaaatattttaggaaccaatttaatcaaggtgaaccatacaaacaacaaccatttgaaaagcaaaatagaagagaaagaaagggacagagaaagaaaatgaggtccagattccaggcttcctgccacattcattactgctatctgataagccactcatgttttaattccagtcttcaaaccaactcatctgcaaaatgaggagaaatcaagtgcctkcatccatagtcagcattacaaa

SEQ ID NO: 378608 - DNA, 588 bp, Homo sapiens
agaccgaggaaaacgtagcctatgtctttatggtgccttgcctgtaccttgtcctccataggtggcatgctttaaaaattgacaccgcagtaccatttctctcttcttcttttagaattaggttacaagggtttttatagttgttttttttcctcctgaatagaagttgttcagagaacttacattaaagyaatattctccattcttttcttgagtttactggtcttgttctaataaaaattatttcgtgtaaatattataataatagttgtgttaataacacaaaacataaatccagcactttcaaatggtaatctgtttcttcacccatttcttagcaaagataattttcccaatcagtgttatggaaccgtattagtctcttctcacgctactaatgataattaaatgaaaataaagctagatttctctctttccctttgacagacttgtttatgtctcaatgaagatttgggtaaccacacaattattgatcccatactatgagccaagcatgatagtagacaacaaaaatttgccatattgatgttcgtaactacataagacaagaataatcactccaactcc

SEQ ID NO: 378609 - DNA, 463 bp, Homo sapiens
ttataggcatttcaatggggctgtctgaggctattcacctctcccgggcttctgttgggaacaagaaaattattctatgcctcatcatcctgaggcacgagggaaaactcttctcagggctccccagtcccatctgaacttctgttctctactctaccctgggtttaaggagggatggcaaagggcacagagctcatcttccataaacacactgaatctaatctctttttacttactctccaattctctgactctctctttaattcaggaaaacttcatccgggcttaggaggaagaaaactttcaactggatttctttttacactcagagcactttcagagcctgaggwctctctgtttctgctataacgtttctaacagaggtaatgggtggttcctagttcagataagaagaaacaaggaacaacagaaaccatatgagttaatatttcaaacactctca

SEQ ID NO: 378610 - DNA, 647 bp, Homo sapiens
ctgcctgtaattccagcactttgggaggccaagacgggtggatcactggaggtcaggagtttgagaccagcctggccaacatggtgaaaccctgtctctactaaaaatacaaaaataaaaataaaaataattaactgggcatggtggtacacaccygtaatgccagctacttgggaggctgaggcaagagaatcacttgaacctaggaagcagaggttgcagtgagccaagatcacgccattgcactccagcctgggcaacagaatgagattctgtttaaaaaacaaacaacaaaaagagtatatttaatagaatattaaagtgtgctctaataatggctcaaagcgttaccactgttagttcttgaccagaaacaaaatcagttaaagttattttaatatctctcgttcttttagccaaataaaagcagcaaaactagttataatggagttaattgtcttttcattgaagtactggccatggcaatctgacttctacttacttatagaacccttatatctgaaaaattccttaattacacacgtagcttatgcaaggcaaaatccagctgaatcttcacatctattgccacagaaagaacttcaaatgactttccatggctgaataggaaaactgcctgaaaatgc

SEQ ID NO: 378611 - DNA, 609 bp, Homo sapiens
atgctctcccacaactataaaacctgaatagaacattgagagagactgaaaagaatgaaagaagctttactgtttatattaacaaaagacttctctattagcaatgttgcccctacttttttataactaaaaatgattcttattataaataaggtcatatrtggtggctcatgcctataattccagtgctttggaaggctgaggcaggaggatcacttgagaccaggagtttgcaaccagcttggacatcgtagtgagaccccatttctacaaaaaaattaaaactttgccaagcattgtggtgagagcctataatcctagctatttcagagacggagacaggagcatcacttcagcccaagagttagaggttccagtgagttaggatcatgccactgcactaacctgggcaatagagtgagatcctctctgggaaaaaaagaaaaagataaatgggtttcttctatgtcaaagtagaaacagaacagaagaccaaaaatcataaagaaaaaaatgtttttgattatataaaaattaaaataatttctagaaaaaaacattagaaatagtattaggagaaatattcagaaaaaatacttgcaacccata

SEQ ID NO: 378612 - DNA, 609 bp, Homo sapiens
atgctctcccacaactataaaacctgaatagaacattgagagagactgaaaagaatgaaagaagctttactgtttatattaacaaaagacttctctattagcaatgttgcccctacttttttataactaaaaatgattcttattataaataaggtcatatgtggtggctcatgcctataattccagtgctttggaaggctgaggcaggaggatcacttgagaccaggagtttgcaaccagcttggacatcgtagtgagaccccatttctacaaaaaaattaaaactttgccaagcatkgtggtgagagcctataatcctagctatttcagagacggagacaggagcatcacttcagcccaagagttagaggttccagtgagttaggatcatgccactgcactaacctgggcaatagagtgagatcctctctgggaaaaaaagaaaaagataaatgggtttcttctatgtcaaagtagaaacagaacagaagaccaaaaatcataaagaaaaaaatgtttttgattatataaaaattaaaataatttctagaaaaaaacattagaaatagtattaggagaaatattcagaaaaaatacttgcaacccata

SEQ ID NO: 378613 - DNA, 536 bp, Homo sapiens
cttgcaacccatataatacattgagggttatctatgaggttcaaggaatttctaccaatttataagaaaaggataacttagtaaaaaaaatacaattgggcgaacattaggcatagttaaatagaggaaattcacatgacctttaaacactggaaaagatgtgcaatttcactagccatcaaggacatgcaaattaaaactaagttgaggtactatttttcgtctgtcacaccagaaaaaattaagaaaatattaatatctaatgcctgtgtatgacattttagtggaagtatgaattgcgatatcaattttggaaagtgatttggaaatgttaattaacattataaacatacacttcctttgctctggaaawttcacctctataaaaataatagcaccaatgagtaggtagatcgatagataaagagatagaggattagttttgtattgctgtcacaaattaccaaaaatttagttgcttagaccaatacaaatttattagaacaagacaaatacaattctggaggtcagaagtc

SEQ ID NO: 378614 - DNA, 581 bp, Homo sapiens
gcacaccaagatggcacatgtatacatatgtaacgaacctgcacgttgtgcacatgtaccctaaaacttaaagtataataataataataataataaaaagaactttaacccgagtgcattgacacatgcctacaattccagctacttraggtgagagaattgcttgagcccaagagttcaaggacagcctaggcaacatagtgggatgctgtctcttaaaaatatatatacatatatatatatattttaaaagtttagaaaagtgatccttaaaacagacacaaaatgacccagcatttgtacttttgagactacatcctagaggaactttgacacatatataaggagatatgtaccattattttattagcaagatctgtggtggccaaaaattaaaaagtgtaaatattcattagggctatgaatcaaatgtgatatattgtattatgaaatattctgcagcaattaaatagaaaaaaactctttataactaattctccaaaacagttttgaatgaaaaaataattttattcttctgttcaaaacccagaaaatcgtgtttcactctaaatggctaaaga

SEQ ID NO: 378615 - DNA, 551 bp, Homo sapiens
cacactggcctcctggatgcccctaaataccccatgcacacttccaccttacagcttttgctttggctgttccctctgcctgaaatgctcttcccagctatttccttcatcttcctcaaatctttactcaaattcctcctaatcaatgaggcctgtcgtaaccactcaaattaaaattgcaactcaacttcactccaacttytgagagtcccaaattccgttccccatttcatttttttttttttcgtagtgcttactttcaaacacattctataatcccattttttggttgtgtttactgtttgctggctgtctcctctggctacagcataaaccccgtgagggctaggattttgtttcatccccagaagtttcctaaaacctaaaatagtacctgacacatagtaggtcactaaacatataaagcatacaggagagaaacactgaatatgaacactagggaagtgatagaatacattccctattacagaatatcatgaaggtattttaaaagcatgaataaaatcagtatctggtgatttccagaggtt

SEQ ID NO: 378616 - DNA, 599 bp, Homo sapiens
caaagatgtatgtaaatatatgtgtacatatgtattattactatgctatgtaaaggttttaaatggatatcactaatgattagtaaaacaacttgaacataaaaatattaattagggttctgcgggcaagttttgcctcagaattcttattgttttaatgggatttgtaataaagtaacatttataaaagaaagaaaatagagaaatcttgcctttcatattttcacaaataacttctaaaaggagtattttcattaatttttgaagtaaaacagactttctgtttaataaatctttttccactacaaacatactcatttccagaatatatcttattgttttttctgarcattattaaagaaatgaatatttcccaaaataaacttctaatgtgcaatataaatctgccacttgagcttattaagcattggtaacagtaaaggtagattcactgagtttcctctcaataatattattatactatattttatacaagtaagatactttataattaatattcaaattgatttctgtagcttttaatttttttatttcaataagttttgggggaacaggtagtgtttggctacctgaataag

SEQ ID NO: 378617 - DNA, 598 bp, Homo sapiens
gaacaattagaacagaagtgtaaatgacagcagacaaaaatgtttaatrgaatggaagaatagtaactgatttagtagagtagaaaaagctacaatctaaagtacccacaggagatatctccaagaagcatgcatatttgctcctgcgagagtactgatgttgacggcagataccacagaaaagtggagtgagaccaggagctaaaatgcaggattagttgacacctgtatatggaacatacaaacccccagagtctcttgccatcacatggggctggatgacacctcccacacacagagtgacttgcataccccacctcagacaggaggtagcaggcttattctcaggacaaataaaaaggaagtggtttgggactcaaagacatcttgtgcagtaaagggcaagatgaaacatgagatttaaaagaagtctgtatgcaaatgatgggagccccactatttcttcctgcttcccaaaactcctatagccaggctatttttcacaggaaagaaaattgaccttaaagaaaatacataaatatatctttccatattaacaattaggagttccccaataaagtaaattagttttttgaaa

SEQ ID NO: 378618 - DNA, 610 bp, Homo sapiens
aaaaacttagatggaacagaaaaatttcttgagtaacacaagctaccaaagattacccaagaagtactagataatgtcagtagtcttaaatccattaaggaaacttaatttgtagtaaaacaaaaattttcttacagcaacaactccagatccaaattacttcactggtaaawtaatgaacttgaaggcatacctaagtaactattaagaaatatatgaattctgcaaaattttcttgaaaattgaagagaaagaactacttctcaatttattctatgaggtcatcaatactgtggtcttgaaatctaataaagacattagaagaaaagaaaactacatttcctcacaaaaatagatgcaaaaattctaagcgaggttttagtagatggagtcatccatatataaaaggcaaattcatcaagaagaagtagggtttacaccaaaacataaggttagcttaacatttaaaagtcaaacaatttaatttaccatataaggaactaagaaaaaccataatttcagtaaccatagagaagaaaaacaataatttcaataaacatagagaaaacatttggcaaaatccaacatccatgtatcataaaaattctag

SEQ ID NO: 378619 - DNA, 610 bp, Homo sapiens
aaaaacttagatggaacagaaaaatttcttgagtaacacaagctaccaaagattacccaagaagtactagataatgtcagtagtcttaaatccattaaggaaacttaatttgtagtaaaacaaaaattttcttacagcaacaactccagatccaaattacttcactggtaaattaatgaacttgaaggcatacctaagtaactattaagaaatatatgaattctgcaaaattttcttgaaaattgaagagaaagaactacttctcaatttattctatgaggtcatcaatactgtggtcttgaaatctaataaagacattasaagaaaagaaaactacatttcctcacaaaaatagatgcaaaaattctaagcgaggttttagtagatggagtcatccatatataaaaggcaaattcatcaagaagaagtagggtttacaccaaaacataaggttagcttaacatttaaaagtcaaacaatttaatttaccatataaggaactaagaaaaaccataatttcagtaaccatagagaagaaaaacaataatttcaataaacatagagaaaacatttggcaaaatccaacatccatgtatcataaaaattctag

SEQ ID NO: 378620 - DNA, 604 bp, Homo sapiens
cccaaactggaaagcacacaaatgtccttcaaagggtgaatgagtcaacaaaggtacacttataccatggaatactattcagccataaagggcaaagaactgttaatacataagacaacttgaactaaccttaacaaattattctgcattacacgtggacacagggaggggaacatcacacactgaggcctgttggarggtagggggcaagggaagggatagcattaggacaaatacctaacgcatgtgggtcttaaaacctagatgaggtgttggtaaatgcagcaaaccaccatggcacatgtataactatgcaacaaacctgcatgtcctgcacatgaatcccagaacttaaagtaaaataaaaaaattattctgcatgaagaaagcaaatctgaaatgactcttattgcaagattccatctctataacaatcatgaaataacataattatagaaatagataatggattagtggttgccagtagttaggaataggaagggagatgggtatggccataaagaggggacacaagggagtcgtgtagtgatggctcagttgagtatcttgattgtggtgatggttacacaaagctacacgtgtg

SEQ ID NO: 378621 - DNA, 496 bp, Homo sapiens
gtttgtaggttggcggtatgcaaaaaaaaaaaaaaaggaaaggtaaatatgaactggagtgaagggactgagtgacaagactggtgtcaaagtgggtagggagatgtgacaatgactccttttttgtgtgaagaatacaaggccatctttttaggctccagcaaaaacagtggaaaacatggagcattcaaaaatttgagagacgggaaaagtgaggtgtgaagtcagcaaggagaagcaggaggagacagaatgccaagaacaagtcagctggaaggcaaagaggccacctctccctctaaaacagggagaaacgatggggayagtttatgtgtttttaactatagaaggaaagaaaggtaataaagtggctgcctaaaggtttctattttcttaagtcccagtgcagcaaaattatctactaagagtgaagaaaacaaagtgaggaggggacaaaagagtttgaaagaaagaataaagggccctgacagaaaac

SEQ ID NO: 378622 - DNA, 610 bp, Homo sapiens
atgttctttggttaaaatttgatagagcatttagagctgagtctaatggacctggttgggtctttaactgggataggtttgtcaccagggtcatgagcttcaagataaatatgacacttcttttttggagcatcaaattttcttgaaaaaaagtaaataattaaatgtattataaaattgtatacttagtaaatgtaattaattaatataaaagtatgtgtatgtgcatatatgtatatgtatgtgtgcatataaatatataatagagagagaaaaagagaaaataactgtggaaaaatattaacaagtgctatatctaggtcatggattctcaactggggcaatatcacctttaagagggtgaaaatttgttcttaggaagccaaaaacttactcttttatgtattaaatgtaagtacacatagagtgcacagatayatagtatatctgtagtactaaaacttgtgtgggggtttgcagttaggaaaaagcatctaaaaaggcttcttaggagggtgttattttcaactaaaggctgagaaacactgatctgagtgaagggtatggtcatttttattgtactattctggcaaattttctgaaggtttaa

SEQ ID NO: 378623 - DNA, 618 bp, Homo sapiens
tttgttgaacaaacgaatattttattgaatgcaattgtgtgaagcaatgaaagtttaattattttatatccagacagaatatttctgtgttctagtttttgctgggactggatttagctggctgatgcattgtatctgtgtttgatgtcctcattcttgtggaatgaagagtatatatgtgtgtgtgggaatctgcatttggggacagaagggcctatatttgggaagatgcaatgtgatcagctgcttttcacattttcttccatttcctctgttgtgtttcatctctcattactagactataaattctctgaggacaatgaccatgcctcatgtttgttgttaccgtatataatattttcgggcttgttaaatattggttgaatggatgaacayggtagcaaagacaactcaaaggaaagttagcattttttatctttatatgattttggaaacaaagcatcctatctttctcctttttttatctgcactgatttatatttgtttcatccatagctctgttccatggagctacctttggatttattgttctttaatctcattacctttggatttattgttctttaatctcatctttataaatgccacatgatttgt

SEQ ID NO: 378624 - DNA, 609 bp, Homo sapiens
tggaatgttgatggctgcattcctaacaccttgcagggtgcttggtgtataggatgcctcagaaatagttaatgaatgaatgagtaagtgaataaaagggaaatccaaaggtgctaggtgttgtttttacttccaatgtgaaagtgtggtccatatgaggttaagtgtcagattatcattttgttcttgtttgatatagtgctgcttccctgaatcatttgatcactgccatgaatacagtgacaagtactaatggtctcaatttatctattcaggtagtacgaaattgcaaatcagacaaaaatattgcccttagractctgtgtggtttattcttactcagattttaccattaggtcattgatacttattgattgcagtaaaatgctttttttctttcctgaactaatgaactttaaaagagaaattttatattctgatgtatttaaaatcccatttctaggtcctaaaggagaggctggaaatttggggatcccagggccaccaggagttgttgggccccaaggccctagaggctacaaaggagagaaaggtaggtaattcattcatgtcaaaactcaagggacattctgcatcatttttcaggag

SEQ ID NO: 378625 - DNA, 620 bp, Homo sapiens
tggaatgttgatggctgcattcctaacaccttgcagggtgcttggtgtataggatgcctcagaaatagttaatgaatgaatgagtaagtgaataaaagggaaatccaaaggtgctaggtgttgtttttacttccaatgtgaaagtgtggtccatatgaggttaagtgtcagattatcattttgttcttgtttgatatagtgctgcttccctgaatcatttgatcactgccatgaatacagtgacaagtactaatggtctcaatttatctattcaggtagtacgaaattgcaaatcagacaaaaatattgcccttaggactctgtgtggtttattcttactcagattttaycattaggtcattgatacttattgattgcagtaaaatgctttttttctttcctgaactaatgaactttaaaagagaaattttatattctgatgtatttaaaatcccatttctaggtcctaaaggagaggctggaaatttggggatcccagggccaccaggagttgttgggccccaaggccctagaggctacaaaggagagaaaggtaggtaattcattcatgtcaaaactcaagggacattctgcatcatttttcaggagagcaatttgct

SEQ ID NO: 378626 - DNA, 609 bp, Homo sapiens
tggaatgttgatggctgcattcctaacaccttgcagggtgcttggtgtataggatgcctcagaaatagttaatgaatgaatgagtaagtgaataaaagggaaatccaaaggtgctaggtgttgtttttacttccaatgtgaaagtgtggtccatatgaggttaagtgtcagattatcattttgttcttgtttgatatagtgctgcttccctgaatcatttgatcactgccatgaatacagtgacaagtactaatggtctcaatttatctattcaggtagtacgaaattgcaaatcagacaaaaatattgcccttaggactctgtgtggtttattcttactcagattttaccattaggtcattgayacttattgattgcagtaaaatgctttttttctttcctgaactaatgaactttaaaagagaaattttatattctgatgtatttaaaatcccatttctaggtcctaaaggagaggctggaaatttggggatcccagggccaccaggagttgttgggccccaaggccctagaggctacaaaggagagaaaggtaggtaattcattcatgtcaaaactcaagggacattctgcatcatttttcaggag

SEQ ID NO: 378627 - DNA, 609 bp, Homo sapiens
tggaatgttgatggctgcattcctaacaccttgcagggtgcttggtgtataggatgcctcagaaatagttaatgaatgaatgagtaagtgaataaaagggaaatccaaaggtgctaggtgttgtttttacttccaatgtgaaagtgtggtccatatgaggttaagtgtcagattatcattttgttcttgtttgatatagtgctgcttccctgaatcatttgatcactgccatgaatacagtgacaagtactaatggtctcaatttatctattcaggtagtacgaaattgcaaatcagacaaaaatattgcccttaggactctgtgtggtttattcttactcagattttaccattaggtcattgatacttattgattgcagtaaaatgctttttttctttcctgaactaatgaacttyaaaagagaaattttatattctgatgtatttaaaatcccatttctaggtcctaaaggagaggctggaaatttggggatcccagggccaccaggagttgttgggccccaaggccctagaggctacaaaggagagaaaggtaggtaattcattcatgtcaaaactcaagggacattctgcatcatttttcaggag

SEQ ID NO: 378628 - DNA, 603 bp, Homo sapiens
gtgtgtcatatggcaattctctgtttaatctctttaggaactgtcatactgtcctccaaagcactgcaccattatacattttcaccagtgacatgcaaatgttccaatttctctatatccttgtcaacacttgttattttccactgttttttgaatgcctgttatttcccccttttttgataatagccatcctaatgggtgtgaaatgctatctcattgcagttttagttttgatttgcatttctctgatgactggagatgtcaagcatctcttcttgtatcttgtaaagatacatttgtgtatcttctttggagaaatggctttggcaagtcctttatcaatttttttattcagttyggtttgatgctgagttgtagttgttctttatctattctgaatattaacctcttttcagatatatgactgaaaatatcttctcccattctttggcttgccttttaactgtcttgatggtggccttggatgcacagtttttaattttgatctacttgtatttatcttttttcctttcattgcctatgtttttggtgccatatccaagaataacactgttttgtttcagataaaggccaaacttctta

SEQ ID NO: 378629 - DNA, 626 bp, Homo sapiens
ttgtttctctatttcctctgtaaaaatatgggattctaaagttctgaggtctcaaaggtgtgccctgagacaggagtatgacctaaagcaggaagataacaatttcatctcttcattgccccaacactttacacatgagacaaagcaggctgggcgctgtggctcaggcctgtaatcccagcactttgggaagccgaggcaggcagatcccctgaggttgggagttcgagaccagcctggccaacatggagaaaccccgtttttactaaaaaaatataaaattagatgggcatggtggcaggcacctgtaatcccagctacttgggaggttgaggtaggaaaatggcgggaggcaraggttgcagtgagccgagatagtgcccccgcattccagcctgagcgacaagagcgagactttgtttcaaaaaaaaaaaaaaaaaaaaaaaaaaagagccagtggaaatgctaatcagccaaatattccattttcattgtgatacatacaaaaaattgcatttttctggaaaaataatgctgtattatgtttccagactggcccagaaatacatgttaagtatttttttaaccaaaattatactggtaatattataggtttttatagtgtt

SEQ ID NO: 378630 - DNA, 626 bp, Homo sapiens
ttgtttctctatttcctctgtaaaaatatgggattctaaagttctgaggtctcaaaggtgtgccctgagacaggagtatgacctaaagcaggaagataacaatttcatctcttcattgccccaacactttacacatgagacaaagcaggctgggcgctgtggctcaggcctgtaatcccagcactttgggaagccgaggcaggcagatcccctgaggttgggagttcgagaccagcctggccaacatggagaaaccccgtttttactaaaaaaatataaaattagatgggcatggtggcaggcacctgtaatcccagctacttgggaggttgaggtaggaaaatggcgggaggcaaaggttgcagtgagccgagatagtgccmccgcattccagcctgagcgacaagagcgagactttgtttcaaaaaaaaaaaaaaaaaaaaaaaaaaagagccagtggaaatgctaatcagccaaatattccattttcattgtgatacatacaaaaaattgcatttttctggaaaaataatgctgtattatgtttccagactggcccagaaatacatgttaagtatttttttaaccaaaattatactggtaatattataggtttttatagtgtt

SEQ ID NO: 378631 - DNA, 508 bp, Homo sapiens
aacaatgatatcatagtaactctatcacccagaccttgtcaaagagtgagagaggcctgtgctttttccaaatggttcctggcatatgtaaaaatgtcaaaacacctgtgtgcaacttgtaaaaaagttaaagctttagtttagctttttaaagaaaaggtggaccttttcttcctcagtcttatcagtggatctctgtgaccatgcaaaactcaaccagagattgtatcaaaactcagtacttgcggctctgagtgaacatgaagccaaataacgctttgggctccccctctgctgtccttgatattgctttaggaaggagaggccagggccaaaactgtgggggraagggaacacaggatagatgcgtagggcaggggggacttcggttccagggaaacaaaactgccaagtctgtgctgaaaaaaaccttcagtaagtggctaaacgggagtgccaggaacacatgagaaagatgagatgagggagaaagaaggaagacctcata

SEQ ID NO: 378632 - DNA, 508 bp, Homo sapiens
aacaatgatatcatagtaactctatcacccagaccttgtcaaagagtgagagaggcctgtgctttttccaaatggttcctggcatatgtaaaaatgtcaaaacacctgtgtgcaacttgtaaaaaagttaaagctttagtttagctttttaaagaaaaggtggaccttttcttcctcagtcttatcagtggatctctgtgaccatgcaaaactcaaccagagattgtatcaaaactcagtacttgcggctctgagtgaacatgaagccaaataacgctttgggctccccctctgctgtccttgatattgctttaggaaggagaggccagggccaaaactgtggggggaagggaacacaggatagatgcgtagggcaggggggacttcggttccagggaaacaaaactgccaagtctgtgctgaaaaaaaccttcagtaagtggctaaacggragtgccaggaacacatgagaaagatgagatgagggagaaagaaggaagacctcata

SEQ ID NO: 378633 - DNA, 593 bp, Homo sapiens
ctttcttataacatcttttgaaaatcttgtatagtagttattattatacctgcctttcagatgagtaaaccaaggaagagcttaagcgatttatttaatctcacatgacctgcgagtaggagagatgtctttaatcgtctaaaattaatgctcctataaccatttggaagcatagggctttcttgttcaacaaaagaccaaatgaatcctagaacattagagctggaaggagtttaaagatcagacttttcaattccttcattccatagatggagaaaagaagacccacgtccattaaggatttgcctggcatcacacagctcctttcaatggaagaaaggacagttgactcatgtcttgactcacatcttctgaacccaagtgaagcccttttacactctatcagactgcctktgaagtagattgatactattattttgtagccacttggctataagagaacaaaaaacttgaacttaaggcatgccgaatatccatcgttcggatgaatgttgaagactgtgattcataacagaaaagctgcagagagccttatttattaaaaacatcaactgatgtattaaatatcacaa

SEQ ID NO: 378634 - DNA, 599 bp, Homo sapiens
gtggcaagaaaagggactttgcctttgtaacttttgacaaccatgactccacggataagattgtcattcagaaataccatattgtgaatggccacaactgtgaagttaggaaagccctgtcaaagcaaaagatggctagtgctccgtccagccaaagaagtcgaagtggttctggaaactttggtggtggtcgtggaggtggtttcagtgggaatgacaactttggtcatggaggaaacttcagtggttgtggtggctttggtggcagccatggtggcagtgcagayggctataatggatttggtaatgatggaaagaattttggaggtggtagcagctacaatgattttggcaattgcaacaatcagtcttcaaattttggacccatgaagggaggaaactttggaggcaaaagatcttgcctctatggtggtggaggccaatactttgccaaaccacaaaaccaaggtggctatgggggttccagtagcagcagtagctatggcagtggcagaagatttcaattaggaaacaaaacttagcaggagaggagagccagataagtgacagggaagctataggttataacaaatttgtga

SEQ ID NO: 378635 - DNA, 658 bp, Homo sapiens
actttctctttgaattttctatataggttggcctggctgcagcttccatactagctaatcccttcttagtggtgtctgcgagttgttttctttgtatagtatctttgccctaggttctatgtagaccatatctgcctggaatacaaagggttacaaggacagtttggttttggctctggagtcagtcacatctagttttgaatctcagtccaccacttcatattttcacttgacaaatgtttactaaggaccgattttgtgccaggcctggttctaagtgctgagaaygaggaagtgagcaagatagtcagggtccctgctctcctgctgttacatgctaattggaagagctatgagaaacaaaaacaaaaccagagagattgtctggcagtgatggtaataatgctatggaaataaaattagagagttaggttgggtgagcagggaaggccttcacaaaatggtgaggaggagccttctgtgaagagattacatttaagctgggagcttaatcacatgaaagagccagtcaggataagaacactcctggcacacacaaaatcctggaagaggaataatcttggcctatctgaggaacaaaaagaaagcgcatgtggtgagtgaagggagagtagtatgagaaaaggctggacaatgt

SEQ ID NO: 378636 - DNA, 609 bp, Homo sapiens
atgccttcatgatgaatatctgataagagtgtttatcagtcagggtgccaggtaagacatgcatcattaggcctttgcaataycgtattgagtgagcacagctcactctagatggtgtgtgtaaaaagactttcatgaaagggctatctacagacatgtatgtcataggaataaacaagggctgttgaggcacccagacactagcaatgggatgagccattactactcctatggccaaaggagcaagagaaggaaagagtgtaactggagactcatgagaaccgaggagtagaaaaggggtcacttggcagaagctgtaatcttggagggaagtgactactggtggatacacagtgctaaaacagggaggagagggaagatctctcctcccaacagctgatctttcttctggtacctgccattggctgaacacaagtggaagcttgcaggcaagggagccagttggcaacatggttaagcatcagcattccagcacatggaacaaggcattgaaaggcagaaaatgcttcagggtagaggcagggatggttcaaaccagcccagaaagataaaacatgtacataaacaacagattctagacaaaggaga

SEQ ID NO: 378637 - DNA, 609 bp, Homo sapiens
atgccttcatgatgaatatctgataagagtgtttatcagtcagggtgccaggtaagacatgcatcattaggcctttgcaatatcgtattgagtgagcacagctcactctagatggtgtgtgtaaaaagactttcatgaaagggctatctacagacatgtatgtcataggaataaacaaggrctgttgaggcacccagacactagcaatgggatgagccattactactcctatggccaaaggagcaagagaaggaaagagtgtaactggagactcatgagaaccgaggagtagaaaaggggtcacttggcagaagctgtaatcttggagggaagtgactactggtggatacacagtgctaaaacagggaggagagggaagatctctcctcccaacagctgatctttcttctggtacctgccattggctgaacacaagtggaagcttgcaggcaagggagccagttggcaacatggttaagcatcagcattccagcacatggaacaaggcattgaaaggcagaaaatgcttcagggtagaggcagggatggttcaaaccagcccagaaagataaaacatgtacataaacaacagattctagacaaaggaga

SEQ ID NO: 378638 - DNA, 609 bp, Homo sapiens
atgccttcatgatgaatatctgataagagtgtttatcagtcagggtgccaggtaagacatgcatcattaggcctttgcaatatcgtattgagtgagcacagctcactctagatggtgtgtgtaaaaagactttcatgaaagggctatctacagacatgtatgtcataggaataaacaagggctgttgaggcacccagacactagcaatgggatgagccattactactcctatggccaaaggagcaagagaaggaaagagtgtaactggagactcatgagaaccgaggagtagaaaaggggtcacttggcagaagctgtaatcttggagggaagtgactacyggtggatacacagtgctaaaacagggaggagagggaagatctctcctcccaacagctgatctttcttctggtacctgccattggctgaacacaagtggaagcttgcaggcaagggagccagttggcaacatggttaagcatcagcattccagcacatggaacaaggcattgaaaggcagaaaatgcttcagggtagaggcagggatggttcaaaccagcccagaaagataaaacatgtacataaacaacagattctagacaaaggaga

SEQ ID NO: 378639 - DNA, 584 bp, Homo sapiens
ggccttcttcaaattgagttgctagttcatgctaaaataacctgcaagcagctcagcagctggagagaccaacattaaagagcctaaataattgacaaactagacaatcagacccaggatgatcaagaatttttaattgctttagcaatttgttgttcatctgctctaaacttttctcttcaaactccctataaatgacctttcacatcaaacaacccaagaaagattggaagcgggagggagatcatcrtgtaatcatgtgatggcccccaccaatttaatctgattgaacagaaacacagtctcttctctgggtgcgagagaggcctccactgtgtgtgaaacattgggtcacaatgcccagttcgcaacatcatgactttgtcagaattcccatctgttgttgcagcctgcacggtagaccaggaatatcatgacaggaggcctgaattagacagagcctctccagaggaacagaaccaataaggttatacataaagagatttatgataaagaaactggttcacatgattatggaggccgagaagtaccaagatctgcaggctgatggcctgagactcagg

SEQ ID NO: 378640 - DNA, 631 bp, Homo sapiens
tgcatccctcctccttcccctacccaaatactcacatgggaattgtgctggattaagtgttrtgggctcttggaagaaaggaggtgctgtcagaatagatgttgttcttaattttatccatggcccttgtatattagaccacagttcatgatcctgttttatagcaggctgactgctccctcctcccaatccctactcccttattaaacaaaagactgcacgttctgggaagtgttagcaactcacccatgtcactgtcatccagacagtgccgttatgtggtggaaagtactcagggttgggactttggaacagccttgctactctggggtgcttgcagcagggcctgtacaagtcccaccccagccctggtatcggagaggccagcaaaaggcagctggtgggagagacctacgcagctccacccacaaatgctacaaatgctaaaatctcttctcttcctcttcctcaactcttttgaccctcacttttctccagctctcttcttccaacttacttttgtctatttcatcacctcaaattcattcattccataaatatttatcaagcacctactatccaaggcacccaatctttgccacacctcagactgtcctgcatcctcatttct

SEQ ID NO: 378641 - DNA, 631 bp, Homo sapiens
tgcatccctcctccttcccctacccaaatactcacatgggaattgtgctggattaagtgttgtgggctcttggaagaaaggaggtgctgtcagaatagatgttgttcttaattttatccatggcccttgtatattagaccacagttcatgatcctgttttatagcaggctgactgctccctcctcccaatccctactcccttattaaacaaaagactgcacgttctgggaagtgttagcaactcacccatgtcactgtcatccagacagtgcygttatgtggtggaaagtactcagggttgggactttggaacagccttgctactctggggtgcttgcagcagggcctgtacaagtcccaccccagccctggtatcggagaggccagcaaaaggcagctggtgggagagacctacgcagctccacccacaaatgctacaaatgctaaaatctcttctcttcctcttcctcaactcttttgaccctcacttttctccagctctcttcttccaacttacttttgtctatttcatcacctcaaattcattcattccataaatatttatcaagcacctactatccaaggcacccaatctttgccacacctcagactgtcctgcatcctcatttct

SEQ ID NO: 378642 - DNA, 631 bp, Homo sapiens
tgcatccctcctccttcccctacccaaatactcacatgggaattgtgctggattaagtgttgtgggctcttggaagaaaggaggtgctgtcagaatagatgttgttcttaattttatccatggcccttgtatattagaccacagttcatgatcctgttttatagcaggctgactgctccctcctcccaatccctactcccttattaaacaaaagactgcacgttctgggaagtgttagcaactcacccatgtcactgtcatccagacagtgccgttatgtggtggaaagtactcagggttgggactttggaacagccttgctactctggggtgcttgcagcagggcctgtacaagtcccaccccagccctggtatcggagaggccagcaaaaggcagctggtgggagagacctaygcagctccacccacaaatgctacaaatgctaaaatctcttctcttcctcttcctcaactcttttgaccctcacttttctccagctctcttcttccaacttacttttgtctatttcatcacctcaaattcattcattccataaatatttatcaagcacctactatccaaggcacccaatctttgccacacctcagactgtcctgcatcctcatttct

SEQ ID NO: 378643 - DNA, 631 bp, Homo sapiens
tgcatccctcctccttcccctacccaaatactcacatgggaattgtgctggattaagtgttgtgggctcttggaagaaaggaggtgctgtcagaatagatgttgttcttaattttatccatggcccttgtatattagaccacagttcatgatcctgttttatagcaggctgactgctccctcctcccaatccctactcccttattaaacaaaagactgcacgttctgggaagtgttagcaactcacccatgtcactgtcatccagacagtgccgttatgtggtggaaagtactcagggttgggactttggaacagccttgctactctggggtgcttgcagcagggcctgtacaagtcccaccccagccctggtatcggagaggccagcaaaaggcagctggtgggagagacctacgcagctccacccacaaatgctacaaatgctaaaatctcttctcttcctcttcctcaactcttttgaycctcacttttctccagctctcttcttccaacttacttttgtctatttcatcacctcaaattcattcattccataaatatttatcaagcacctactatccaaggcacccaatctttgccacacctcagactgtcctgcatcctcatttct

SEQ ID NO: 378644 - DNA, 548 bp, Homo sapiens
tacagaacagcacatccatttaatttcttaattccaactttargttaatttgctaattgcagttatgattcaattgtatctttcattttggcaccaggaaagcactacctcattagtgcatgtttatttgcccttcctcacccctgttcatagggatagcagtctgtcctacgacatccttactatattgaactagatactctcttcccctatacaacttgaaagctaggatttctcagagttttggcattacatgattgaccttccttcagaaccttgaaaaaaagacatattagggaagcagaagaacaattattactattattgagaagcttcatattattgtggttaagaaagtatggactctgtagccattcttttttgggtttgaaccctggcccttcttcttaccagatgtgagaactttggcaagttacttaacctcttcaggcctcactttatccatctgtaaaatggggatgacttcataggggattaaatgagttaattttataatgtatttggcatattgtaactgttatataatg

SEQ ID NO: 378645 - DNA, 531 bp, Homo sapiens
attcctgttgggggtaattgtccccacactctgggacacacgggcttcttcaaactacagagtgaatcacasgtagtggttagttctcaaggaaatgaattctcacttgggtaatataatagtctgctcgggtggcttaaagaacataaatgtattctctcacaattctggagatgagaagtctagatcaagatgttggcaggtttagtttctcctgcggccactgtccttggcttgcagaccatggctttctcaccatgtcctcatacggcctttcctctgtgcatgcatgctatggtttggctctgtcctcacccaaatctcatcttgaattgtagctcccataattcctacgtgctgtgggagtgacctgatgagagataattgaaatatgggagcagtttcccccatactgttctcatgatagtgaatggaagtctcatgagatctgatggtattataagaggaaaccccctttgcttggctctcattctttcttttccggccaccatgtaagatatccctttgctc

SEQ ID NO: 378646 - DNA, 531 bp, Homo sapiens
attcctgttgggggtaattgtccccacactctgggacacacgggcttcttcaaactacagagtgaatcacacgtagtggttagttctcaaggaaatgaattctcacttgggtaatataatagtctgctcgggtggcttaaagaacataaatgtattctctcacaattctggagatgagaagtctagatcaagatgttggcaggtttagtttctcctgcggccactgtccttggcttgcagaccatggctttctcaccatgtcctcatacggcctttcctctgtgcatgcatgctatggtttggctctgtcctcacccaaatctcatcttgaattgtagctcccataattccyacgtgctgtgggagtgacctgatgagagataattgaaatatgggagcagtttcccccatactgttctcatgatagtgaatggaagtctcatgagatctgatggtattataagaggaaaccccctttgcttggctctcattctttcttttccggccaccatgtaagatatccctttgctc

SEQ ID NO: 378647 - DNA, 622 bp, Homo sapiens
acaaataaaatcaagggaacagggattagagatatttctactctcagggaacatcgtgtagaaaagcctgcaggaggacaataaccattaatggagaggaaattctcagaagttagctactcacatagcacaggagtccccaactgaacttacactcaatgtgtccttatctaagtccattctaggcacttcctcgccatgccttatggacactgttgatggcatttccaatctcctgtcatccaagctagacytctggcttcattctcagctcctccttttccctcatatccagccatcaccaaattatgttgctacaacctgaaaattgaacccacctgccatccccactaccactgccctgtcagagcacaggttcacttgtgggaggcactgctgcagccccatgactggctagtagtcctttgaacttgaaacctacagctgttttctgcctcactcccttctcttttagaaattatcagagcatgatagctgttagagaagactgcttgttcttcaggatagcctcaatttgctcatatatttgctttagtgcttgtatttcaaatggaaaaatagacataaataaggcaattagcaccatagagtgtgaaatcat

SEQ ID NO: 378648 - DNA, 622 bp, Homo sapiens
acaaataaaatcaagggaacagggattagagatatttctactctcagggaacatcgtgtagaaaagcctgcaggaggacaataaccattaatggagaggaaattctcagaagttagctactcacatagcacaggagtccccaactgaacttacactcaatgtgtccttatctaagtccattctaggcacttcctcgccatgccttatggacactgttgatggcatttccaatctcctgtcatccaagctagacctctggcttcattctcagctcctccttttccctcatatccagccatcaccaaattatgttgctacaacctgaaaattgaayccacctgccatccccactaccactgccctgtcagagcacaggttcacttgtgggaggcactgctgcagccccatgactggctagtagtcctttgaacttgaaacctacagctgttttctgcctcactcccttctcttttagaaattatcagagcatgatagctgttagagaagactgcttgttcttcaggatagcctcaatttgctcatatatttgctttagtgcttgtatttcaaatggaaaaatagacataaataaggcaattagcaccatagagtgtgaaatcat

SEQ ID NO: 378649 - DNA, 539 bp, Homo sapiens
ggggagctgattatagacccaggaagcacatgcctgttttcaagcttgcagcatcttagctggtgccttctgtgaatgcctcatgtatcacaggcagaggcagctaggcatcacatcagaagaatgagctaaggattccccaggcacttttttgagggctggcagttctaaaggtcatcctgctaaaatgggaagtaatttcatgggttggtggtgattctgcctttggtaataataaacaaagttgagaccaatcataatatttartatcccccactatgtagtgatgaaggagagtagttctgatgaattctgattgctttggaggaaaaatgcaaagaaaattaattttccccttgggggtaaagtcctcaccactggaggttaatggcccctcccagaagtgggtttgaggctcccattaggaataaatatcctgctttatttttaagaggtagcatttcacttaattataaaagtacgccataattttaaaaaaatatagggctcccttacacaatttactacccttgaaaact

SEQ ID NO: 378650 - DNA, 504 bp, Homo sapiens
tgtagtgatgaaggagagtagttctgatgaattctgattgctttggaggaaaaatgcaaagaaaattaattttccccttgggggtaaagtcctcaccactggaggttaatggcccctcccagaagtgggttygaggctcccattaggaataaatatcctgctttatttttaagaggtagcatttcacttaattataaaagtacgccataattttaaaaaaatatagggctcccttacacaatttactacccttgaaaactataacaacacatagggatgtggctccttgcttggatgggaccagactggaatgctgggtcagagtacaacattcaccatggatgaaagacaggatggctgatttgaatgaaagccatcgctgaagtttcctgtaaccatggtaaccaaatcagaagcacatattaatgataagcaaaaacaactggcagtttgcctaggcatcacttagaagtattaacttcctaaggtgagtgccatgaacag

SEQ ID NO: 378651 - DNA, 616 bp, Homo sapiens
tgccaaataattcacaatctataggaggaaacagaaatataactagtagttcaaagttttatagttaaaatatacagttttttttgttttgtttttgtttgtgtttttgcaagaacactcagaatcattaattctgcctggggttccaggaaaacagaaagagaaaggaaagaaacaaggatttgagaaaagttcagaaatagatgctgattaactctcgataattaaaagtcctttcaattcaacagatgtttagagagagtctactgtaaatctagtattatattaaggtccaaaagcatatggaagatgatatgacaagkttcctgcctcaagaagcatataatcttattgagaaaatgaaagctacacccataaaagtattagaaatgtatgacggagtgccaaatgcatcatgtagacaagaaatgcaatagaaggtgagaaaaaggagctctacaaacatggagttgagaagtcacgaagaatgttacagagataggacctcactgtatgtgttttgtgtactaaccttaccatggctccatcttatttacctacccctattttcccttagccagaatttctctgtttaaaaaaaaaggttgcatttatt

SEQ ID NO: 378652 - DNA, 616 bp, Homo sapiens
tgccaaataattcacaatctataggaggaaacagaaatataactagtagttcaaagttttatagttaaaatatacagttttttttgttttgtttttgtttgtgtttttgcaagaacactcagaatcattaattctgcctggggttccaggaaaacagaaagagaaaggaaagaaacaaggatttgagaaaagttcagaaatagatgctgattaactctcgataattaaaagtcctttcaattcaacagatgtttagagagagtctactgtaaatctagtattatattaaggtccaaaagcatatggaagatgatatgacaagtttcctgcctcaagaagcatataatcttattgagaaaatgaaagctacacccayaaaagtattagaaatgtatgacggagtgccaaatgcatcatgtagacaagaaatgcaatagaaggtgagaaaaaggagctctacaaacatggagttgagaagtcacgaagaatgttacagagataggacctcactgtatgtgttttgtgtactaaccttaccatggctccatcttatttacctacccctattttcccttagccagaatttctctgtttaaaaaaaaaggttgcatttatt

SEQ ID NO: 378653 - DNA, 563 bp, Homo sapiens
gtcaccacccaaaataagtcacatggctgacccacagtcagtgtgggagagaataaaaaagtacatggcaaaggatgtggatacagggaagggtgaaattcagatctcaatgcaatcaaacacagacatttcttgatgttagttcatccactaaatcgcatacaaaaccacaaagaaaagctatataataaaaagtggcaaacccaaaattaaaataatggcacattgagagacatatttgcatttctaatatataaggatcacattcaaatttataagaaaaaaaaaagattccagtggtaaattcccaaaggacaggaaacaatgttcctttaagaagaaatataagaagtgaacaagtacatgaaacaaatgtctatcttcatttgtgatacaacaattaaagctaacctaagatagaatttgcacttaataaattagcagaaaaatgaaagttttaaayaagtgcaaataaaatggatgagttacaattccattggaacataatatggcaatatacagaaaatatttattgcaacataattttgctcttgctgttctgt

SEQ ID NO: 378654 - DNA, 582 bp, Homo sapiens
agggtccagaaatggcatggccctggaaacacctcagacttctggctcccagaaccatgaaagatgaagttctgttgttttaaggcactttgttatggcagccctaggaaatatctaaactattgctaaagayacttataaaccattagtcatattatttgcttaagaaattcattatgtatctgtaacatggaaatcctttcctagataactggtcataagatttttttcacccacccaaaccaagttttgcatatagtaggcataaaaataagaactcagtacatttaagcatgcaaatgaacagaaagcatagttcaaggtgggattacactaagaagttatttattttccaattaattctcatctcctcaatacttcgcttattttgttatctactcatgaacccaatgtcccttctatcatcaaccaggtcactttctgaatattctataaatgtttaccaaaataaatctagtccttgacaaaccaagaattaggtatcatatagtagcatgagatttttgggagtttcaccacgacaacattattagaaccctgaaatgtacataaataaggaaa

SEQ ID NO: 378655 - DNA, 537 bp, Homo sapiens
aaaaaatcactttcccaaacaaacacatagatcatggcagaactgaaagatttgaaagaatagaaaaagcatccattgttcatttagaaagcagtaattttgaaaggtgtgaatattgaaaaatttcttataagtttagcaagaaataagaaatgggcatgttctaatagtaattcatagaatccattgtattgacagatttggattaataaacagctcatttctgaaaaaatatatttccctcatctcaaaaggcctttcaaaaagcttctcaaatgaaatggccttgacatttgcccaggtgaggtaaacttcactaaacttagtaaatgagtcartaccaactgggacgccacgttaatctcattttcttgatccagaagagctctccgcaatgactaggtagttggaggatgggatgatactcaaaatattaaatgtcattttatttccaggaattgtgctagtaggcaaactgtcttcacatatcagtgaggaatttttctggtatcaaagttgatgtgaagcagtttagca

SEQ ID NO: 378656 - DNA, 537 bp, Homo sapiens
aaaaaatcactttcccaaacaaacacatagatcatggcagaactgaaagatttgaaagaatagaaaaagcatccattgttcatttagaaagcagtaattttgaaaggtgtgaatattgaaaaatttcttataagtttagcaagaaataagaaatgggcatgttctaatagtaattcatagaatccattgtattgacagatttggattaataaacagctcatttctgaaaaaatatatttccctcatctcaaaaggcctttcaaaaagcttctcaaatgaaatggccttgacatttgcccaggtgaggtaaacttcactaaacttagtaaatgagtcagtaccaactgggacgccacgttaatctcattttcttkatccagaagagctctccgcaatgactaggtagttggaggatgggatgatactcaaaatattaaatgtcattttatttccaggaattgtgctagtaggcaaactgtcttcacatatcagtgaggaatttttctggtatcaaagttgatgtgaagcagtttagca

SEQ ID NO: 378657 - DNA, 604 bp, Homo sapiens
tttgaggtggtggactgggagaagaagacccaccctcaatgtgggtgggcactatccaatgggtcgccagccagctagaacagagcaggtggaagaagatggggtagcattgcttgctgagtctcctggcttccttccttttcccatgctggatgcttgcttccgcttctcctgcccttggacgttagactccaggttcttcagcctttggactctgggacttgcaccartgacttccccaggctcttgggccttcagcagcagactaaaggttatgctgttggcttccctgattttgaggcatttggacttggagtgagccattcttttctttccccagcttgcagacagtctaacatgggatttcgccttgtaattgcatgaggtaattctccctaataaactcccttttatatatacatatatcccattgattctgtccctgtggagaaccatgactagtgcaatcagtatttgacaatgatgccaagcatttagtaaagaagacattctctttaataattatgcaggaaaatctaaatacccgtatgaaaaggaaatgcatttcaatcctacttcataatacaaacaaatattaatgtga

SEQ ID NO: 378658 - DNA, 604 bp, Homo sapiens
tttgaggtggtggactgggagaagaagacccaccctcaatgtgggtgggcactatccaatgggtcgccagccagctagaacagagcaggtggaagaagatggggtagcattgcttgctgagtctcctggcttccttccttttcccatgctggatgcttgcttccgcttctcctgcccttggacgttagactccaggttcttcagcctttggactctgggacttgcaccaatgacttccccaggctcttgggccttcagcagcagactaaaggttatgctgttggcttccctgattttgaggcatttggacttggagtgagccattcttttctttccccagcttgcagacagtctaacatgggatttcgccttgtaattgcatgaggyaattctccctaataaactcccttttatatatacatatatcccattgattctgtccctgtggagaaccatgactagtgcaatcagtatttgacaatgatgccaagcatttagtaaagaagacattctctttaataattatgcaggaaaatctaaatacccgtatgaaaaggaaatgcatttcaatcctacttcataatacaaacaaatattaatgtga

SEQ ID NO: 378659 - DNA, 626 bp, Homo sapiens
ttttttctctaatggatagcttacagaattttcccttttcttttgttgttcttgtaatttatagtaatatgtttagatgtgaatttttttcctgttgattctggttggcactctttattttgaatatgggaaaaatacaacacgatgtggtttggctgcatgaacataatgccaaatatattaacctgcataaataattttcatttgtctttttaccacgcacaaaataaaaattacatatatttaacaatatcatttgtaatttattgattccaggcatgttaggctctatgcaagaagttttatgtatattatttctttaaccagaagtactttatgaaataagtgttattgttatttccatttttaggagatgaaggacttgaagtttaaagcrcttgcataacttgcccaaggtcatttagctagtaaaaggtggacctgaggcatcatcaatcccaggttgtttaactcaatatgttttttataatcacctcattaccctgtatctctagatatatttgtatcctgacaaatttgttccacttaattgatgagcagcatgtatgcttgagtttagtaattttttgggtaggtaggaatttttatttgcctgtaactaaaaa

SEQ ID NO: 378660 - DNA, 418 bp, Homo sapiens
ggaagaaatctgaccaaattaatggtcttagtcaagactgcattgcacacattccatttctactttttctaacaataggaaacctcaacttcttactatggcattataatgaaaaaagccacaagcaaatgtagcaatcagtaaataggtgctcagtgtgatgcagtctagttagcaatcttttagtggaaaatctggggaggaagtagagggatttgtaccccaggcaaagaatgacattacaawgagaaaaaatctgatttatatgtaagattatcatatatcctggtttgcctgtggcaaacctgtttaagcctgttaacttgatttaattatttatggttttacatttaattattaatagtttctcttttcactctcaaatacatcacaatttggacacaaattatatttgcca

SEQ ID NO: 378661 - DNA, 595 bp, Homo sapiens
atttcgactgtgaacacagaaaacaaactacactaatgaaggtgggcacactgtagataaaacctcaggcagtgatttgaatgaacttggccatattgattaatgtctgcttctaatgtgtctcaactcttctttgatatcattaaaattttttctatcatataagcaacgacagaaatataaaaaaccacagtgttatctttgaaaatgcactatttgaaaasaaataaaaatgtaaaagtgaacggaaacaaaaaatataaaataaatttatttttatttataaaaataaatattctatctccctggagaggctcagtcacttttgtgaaagtttttatttttcccaaattaatttataacttaaacacagctttaactcaatcttaatgcgatgttgtattatgtggcaaagtggctgtaaaggatatccaaaaaaaataaacataggaaaatatccaagacagtttcctttaaaaagaccacaggtgaaaggcttattctgtcttatggcacatttactgtaaacctcaaacaatttcaatcccgtagtgtcaatataggagatagaaaatgtggtagaaaaatgacaatc

SEQ ID NO: 378662 - DNA, 524 bp, Homo sapiens
  misc_feature (1)...(524): n = A,T,C or G
ggcacataggagacggaggccttcctcttatctcaactgcaagaagcctttctcttttactaatcctcctcagcacagatcctttactggtgttgggctgtgagaccgtcaggtctttcccttcccacaaggccatatctcaggctgtctcagtgggcagaaaccttggtcaatacccaggctttcttgggcagaggtccctgcggctttctgcagtgcgttttgcccctggttagtagagaatggagaatggtgatgacttttaccaggcatactgcctgcaaacatattattaacaaggcataacttgcacagccctagatcccttaaaccttgattcaatacagcacatgtttctgtgagcacagggttggggcttaagttacagattaacagcatctcaaagcagaacaattttttttagtacagwtcaaaatggagtttcttatgtcttccttttctacatagacacaataacggtctgnnnnnnnnnnnnnnnnnnnnnnnnnnnnnnnnnnnnnnnn

SEQ ID NO: 378663 - DNA, 551 bp, Homo sapiens
gacaaggacacgtgagtaaacgagacctcatccctcattcaagaaccgtctcatctcctgaagtcaaaggagcatgaaggaaaataacccagagagaaagaagcaggtggtcagccccagcaggggaccagcttccacccctgcctcaggggcatgagcgctgaggatctgcataatatacgagaatgcttgacccaggcaggctgctgtgacggtggtgggctgtgggtttgaactggattctaatatttttaagacaggaaattatcctgaaaaaagatgtaaattatttctataccctaagagtagaccaaatttaccattttttagggaagactaaatattatgccaggagatgccctatatgataatgcacacatraagaagttcttatccccatgtcttgaggaaaaaaatttcattcagcaaagtaacctgaacaagttctgtgagacagaatgagaaaatatgtgttctgcttagttatgggaattaattggctgtggaataggaatctttacagactttgttgcttctattggagatatgtc

SEQ ID NO: 378664 - DNA, 529 bp, Homo sapiens
tgtgctctttcagctttgtggtctgcagacagcttgtgtgaatcaactcaatagaccctctgccttatcacaagggcagtgggccagtgtgacagctttctgtatcccgaggtcttgcccagtgcaccagaaaaatcagatcacacgtggactcmaaggatgagtggaaggttattttgagtggtagaggtggctctcagcaagatggatggggagccggaagcgggggatggagtgggaaggtggtcttcccctggagtccagctgttcttggctgatgttcagacgcctcttccctccttctctgccatgccactctgccgatctccaccactctccgctgctgtgttcctctgctcctatcaatgttcagccacttgtgtctgtgcccaccaaggtcttgggtttatacgggcacaggataggggtgtggagggccaaaaggcaacttttggggcgtgaaaacaaattcctgtcctcacttagggacacaggtcttcaggcttgagggtggggtctttgctgggga

SEQ ID NO: 378665 - DNA, 661 bp, Homo sapiens
ctttttcatcttcccaaactgaaacttttcccctattcaacaataatttcccagccaggcatggtggctcaagcctgtaatcccagaactttgggaggtcaaggcaggcatatcacgaggtcagaagtttgggaccagcctggccaagatggtgaaaccctgtctctactaaaaatacaaaaattagttgggcgtggtggcgtgcacctgtagtcccagctactcaggaggctgaggcaggagaattgcttgaacccaggaggcagaggttgcagtgagctgagatcgtgccactgcactccagcctgggtgataaagcgagactccatctcaaaacaaacaaacaaacaaataaaaaaatatattttcccattcccttctttcttttgtcttatttcatttagcataattcctttcagattcgtccatgttgtaccatgtggcagamtgtaattcttttttaagactgaataatattccaccttatatgtgtatcacatttggcttatccattcatatgttaatgggcatttgggttgttttcaaattttgactattgtgaatgatgccactgtcaacatgggtgtacaaatttctgtttgagtctctcattttaattctttcatttatatacccagacatggaatttctgaatcacatg

SEQ ID NO: 378666 - DNA, 643 bp, Homo sapiens
ttgtatttattcagcttgtccttggtttttaagatgctgaggacagtcgcttgagactttcaacatcatagctggaagaagatgtgctcagcatggccatatcctcatcttactctctgtacttcccttaaactctgaagtagtgtggctctttctctaatcaataactcaaaaaattaatcatggttatactttcacggtagtcagaatttctcatgtaggacttgttgagtcacaaagagcagtgtgggttggcagaactgaacagacctcagaagccggcaagacaacgcccctcatrttttatagtacaaaaagctggtgcatagagggtgcagaggactagccagggtcacccagcaacaagtggtcagaactcttactccccactcttgcatctttccacttttgtagcacctgactcttagagcttcagttctatcattaataaaataagcaagatggattagataaatggatggctccattcagcctcatgagtctattttttcctttccttgtgtctgcttaatctttcaaggatgtcaaggacaccatccatgtgacatcatcagaggagcttttctatttatgcttaaaggtttgccacagcatgtatagatgacaattcccgggggaaaaa

SEQ ID NO: 378667 - DNA, 577 bp, Homo sapiens
tcagtcttttcctttgaaaactggaagtattttgcatgtttgttgtccatgttattcatttgagtatttgagtctacacaattttatgactctctcggtttgtttgttttttctttctttctttctttttttttttgttcccagggtgactcttctcttttcatgtagcttacttttctatatcatcctgttgactttttgtcctagatttttcttatgtcatggttttctgctccagtttagagaggctgtgcctccttgtatgttttgaaaagtcaaattgtttaattctcattgaaatgcaattatatttcatagatgaaataatgttcttttcagtcatcattgaatgatgtggtttcttttccagattgtatttttkccagtaggtagtaagagtgcttctcctggcataataaagtggtagtcagaaactcttctcagagctgcatggggatgtcaccttgatgtgtttctagctagtatgaccacagggaactgtccagggtactgaatgtgttttttcttttttaaatctctggcctccttgtatagagcattgcatcttcatggaatt

SEQ ID NO: 378668 - DNA, 577 bp, Homo sapiens
tcagtcttttcctttgaaaactggaagtattttgcatgtttgttgtccatgttattcatttgagtatttgagtctacacaattttatgactctctcggtttgtttgttttttctttctttctttctttttttttttgttcccagggtgactcttctcttttcatgtagcttacttttctatatcatcctgttgactttttgtcctagatttttcttatgtcatggttttctgctccagtttagagaggctgtgcctccttgtatgttttgaaaagtcaaattgtttaattctcattgaaatgcaattatatttcatagatgaaataatgttcttttcagtcatcattgaatgatgtggtttcttttccagattgtattttttccagtaggtagtamgagtgcttctcctggcataataaagtggtagtcagaaactcttctcagagctgcatggggatgtcaccttgatgtgtttctagctagtatgaccacagggaactgtccagggtactgaatgtgttttttcttttttaaatctctggcctccttgtatagagcattgcatcttcatggaatt

SEQ ID NO: 378669 - DNA, 600 bp, Homo sapiens
aatcccttctccccttcctaattagtatgacggattattgaaatgagattgttccatcacagtagagatgatgccattgcttttaattaaccatacagggatttgagctggtgggaaaaaaaaaacataaaaagagaaaaatccctaacatattcatttgcctggcttgatgactaaagaagtccaagaaatagcatagctgtaggcttacctttactcttgagttcctaawacaacaacagatttatacatacccctttgcgtatttataatggtgtttccatgacatggggctgatgaaaacatggacagaaagtgttagaatcacaaaattcttcagcaccaaccttgcttccactgtcttcttggagtacaccattcattcttcagaaagtttaaatcatcatgttggtaggtgatgagtcattttccattattcatgattacattcttgtacgcaaacaccctcaatgcgccagcatttgttttactcactgtgatagagaccccagagcaccacacttgtggctctaggcccttccaaagcattccaagagctccaggatgcatggaataccagcaataacctgggtccggggg

SEQ ID NO: 378670 - DNA, 600 bp, Homo sapiens
aatcccttctccccttcctaattagtatgacggattattgaaatgagattgttccatcacagtagagatgatgccattgcttttaattaaccatacagggatttgagctggtgggaaaaaaaaaacataaaaagagaaaaatccctaacatattcatttgcctggcttgatgactaaagaagtccaagaaatagcatagctgtaggcttacctttactcttgagttcctaatacaacaacagatttatacatacccctttgcgtatttataatggtgtttccatgacatggggctgatgaaaacatggacagaaagtgttagaatcacaaaattcttcagcaccaaccttgcttccactgtcttcttggagtacaccattcattcttcagaaagtttaaatcatcatgttggtaggtgatgagtcattttccattaytcatgattacattcttgtacgcaaacaccctcaatgcgccagcatttgttttactcactgtgatagagaccccagagcaccacacttgtggctctaggcccttccaaagcattccaagagctccaggatgcatggaataccagcaataacctgggtccggggg

SEQ ID NO: 378671 - DNA, 600 bp, Homo sapiens
aatcccttctccccttcctaattagtatgacggattattgaaatgagattgttccatcacagtagagatgatgccattgcttttaattaaccatacagggatttgagctggtgggaaaaaaaaaacataaaaagagaaaaatccctaacatattcatttgcctggcttgatgactaaagaagtccaagaaatagcatagctgtaggcttacctttactcttgagttcctaatacaacaacagatttatacatacccctttgcgtatttataatggtgtttccatgacatggggctgatgaaaacatggacagaaagtgttagaatcacaaaattcttcagcaccaaccttgcttccactgtcttcttggagtacaccattcattcttcagaaagtttaaatcatcatgttggtaggtgatgagtcattttccattattcatgattacattcttgtacgcaaacaccctcaatgcgccagcatttgttttactcactgtgatagagaccccagagcaccacacttgtggctctaggcccttccaaagcattccaasagctccaggatgcatggaataccagcaataacctgggtccggggg

SEQ ID NO: 378672 - DNA, 587 bp, Homo sapiens
gtgttgttcaaaggaaaaaaaaaaagcttcaattttgcaagatgaataagtcctagggatgtacagtacagccaagcatctatagttaacaatagtgtatcatatacttgaaaacgttttatgagggtagattttatgttaaatgctcttatcaccaaaaaagagggagggaggaaacttttagaggtgatagtcatgtttatgacattgcttggagtgmaagtttcatggctgtatacttacaaactcatcaagatgtatatattaaaaatgtatacgtttttatgtcaattataccttaattttaaaaatctgcaagaaagcaaatttgaacactgccaatataagctcacaactttgaatccctgtagtgttatgtgtcagtcatccttgcaccaaaaataaattcaaggtgacgcattccttagctagccaccccttcaaaacaaaacccactggataagggctgggggaaccactgcatctggagtctgtgtgagaggagagagagtgagaaatttacttcctggctcattccactctcttcttccttgctggtcaaagtacaccgtacagggggttaagtc

SEQ ID NO: 378673 - DNA, 499 bp, Homo sapiens
aggcctaaaccctgcgttcaccttctgtaacacacccttactgacatgagccaaggtgccctattctgtgtgttctgcctgcaacattatgaacccaattgtgtgtccctggcagagttgtgctttaggatattgatattacagtctcatcagagaccttttctctgccctcatcccaggtgaggcatgagtggcgggtcagggaagagtttggtggtctttcwctctgctttcctggtgctcagagcaaaggcgtcccccacctcttaccacctagtgttccatttctccatgcacccacccttctccccctttaaaaactgtaaagtgattgggacataagcattgctggaggacagctgcccccacacaaccagccaacaagtggagtttttaaactccatatttgagtttaaaaagtgatgtgggaatgggacaagccaagatgaaaggggttagaggaagcatatgtgaatgcaagacctccagacaatgggga

SEQ ID NO: 378674 - DNA, 340 bp, Homo sapiens
aggtttccaaaaaattaaaaagaactgctatatgatycagcaatctcaccactgggtgtatatcaaaaggaaatgaaattagtacattgaagacatacagcactccagtgtttgttgcaatactctttcacaatagccaagatctagaatcaacctaagtgcccaatgaccaatgagtggatgaagaatatgtcacacacacacacacacacacacacacacacacaaaatggaacagtactcagccataaaaaatgaaattctgtcatttgcaacaacatgggtgaaactggaggacatgatgttaagcaaaataatccagacacagaaagaaaaaaaa

SEQ ID NO: 378675 - DNA, 510 bp, Homo sapiens
tcatttaaacatttgtagttttaagcttctaagttttgtagtaatttgttataccataatagataacaaatgcatggtcagataacattttgtatgatttcaatctgttttaaatttggttaaactaaataaaaaagtaaagaaagacagaaagataaatttggttaaacttacaaaatgtgtttagcgggggccagataacttttgattttggtgactatcccatatgtrccagggaggagcttgtattttgctgctgtcatgacgttcatttgatcaaggtggttctcagtgtagttcgagtcttctatacccttaccgattttattgcctacttgttcgatcattcacagacagtactgatgtgtctaactacaattgtggatctgtctatttatccttttggctttattagtttttactgtatgtattttgaagctatattaattaataaaacacacttaatattgttatgtattcttgatgtaattattattttttaactctggg

SEQ ID NO: 378676 - DNA, 510 bp, Homo sapiens
tcatttaaacatttgtagttttaagcttctaagttttgtagtaatttgttataccataatagataacaaatgcatggtcagataacattttgtatgatttcaatctgttttaaatttggttaaactaaataaaaaagtaaagaaagacagaaagataaatttggttaaacttacaaaatgtgtttagcgggggccagataacttttgattttggtgactatcccatatgtaccagggaggagcttgtattttgctgctgtcatgaygttcatttgatcaaggtggttctcagtgtagttcgagtcttctatacccttaccgattttattgcctacttgttcgatcattcacagacagtactgatgtgtctaactacaattgtggatctgtctatttatccttttggctttattagtttttactgtatgtattttgaagctatattaattaataaaacacacttaatattgttatgtattcttgatgtaattattattttttaactctggg

SEQ ID NO: 378677 - DNA, 537 bp, Homo sapiens
accgtggcaagtctctctcataccaaagtcactagtcctgcctcttcctaaggctacattgttctttcaacatccatttctaccttctcagagtggcctcaagttctattaacagaaaaagttatccagactaacctaggaagtcctggttttgtgggagtcataactrttgcctgtctcactctggggatgaaattcaatgggcctgtattcaaggggggcaaggtaagagataccttaagtcgacttcctgactgttctagaggtctgagctctacctgagccccattcaacacagcttcccctgtgatttctgcttttaggtctcttgtctaaatgttggcctggtacttttgtgctccagatattggagtgtttttgtactctaaatttggacttagtttaactcattaccctagattcctctcatcttccaaatcactaagtcatttacctgtacccacaatagttgtaccacaactcgttttatgaagttcttacctactatttctactttgtatatttgctgctttatgg

SEQ ID NO: 378678 - DNA, 601 bp, Homo sapiens
gcctgatgtgtggtttcagaaggaagttaggggagaagcatactcaagataacaatagcactttctctaaaagataggatgcttactaactgctaccttcaacaagagtatttccatttcagtttaacaagagactagaacacaagccttactcgagcaggttcatcatacccmacctattcaacccaaatcagttagatcctaaagagtatacctggacatatcagaagctaggactctcatcttcatattagaagaatttagctccttccagttcaactgggatgcagccaggggagtttcagggctctacctcactgattctggcactaggatagcataaaactacacagctggagaacaccaattcatgttcatgccatgagcacctgctcaaaacaggaacaagctccagggtagctaagcatcctggcattcaatttcagcaatgtttccagggatttgaatacttcctgccttttaaggagaggaaatggctttaagaattgcacaaacattggtcaccccaaatctactttttaggatcatctgaaaactaagccacttataaaattgaagatcaattttgaggttcaattcc

SEQ ID NO: 378679 - DNA, 499 bp, Homo sapiens
aaaaagaacagtatcttttaataaaaagcaattatctgagcacatttatcttagaaactcatccttctttttctccttctgactttataccaatttctggatcaattctttgggggaaaacgagattaaataatcttaaaattatttctaatccttatatcagctgaccaaagttcagcaagtgtttttaagctaaaaagaaatgaagatatttatcatctgtcaccagtaaaaacaacaaatatcttgtcattcacttcacatatgctgaaatgacagatacacataagcaaaaataaaaaataaaaataagggtggaggaaaaggaagcattctgctttcctggtaaaatttctaggaagattaatatccygtttgaatgccatgctgctcacacatgattttgaaaagatagtttcctgctctacaacaagagtggaatcagctgttttaacttggggccctagagtgtaactctcaagttgcttagttatttata

SEQ ID NO: 378680 - DNA, 578 bp, Homo sapiens
tgagattccatttttacctagcggactggcaaatataggcagtctgacaatacactgtgttggcgaggactcctgggaacaggcactctcatacattgttggttaaatgattaaaaatgatacaacttctttggaggacaatttagcaatattaaattaaagatgaacatactttctgacttaacygttttaggactttatcccacagctgtactcacacttgcaagcaagggaaagagcgcgcgcatgcacaagagtgcacacacatcagcaaaagataaaaaaaagacccaaatgtcaatagggagccagttaaaagacgaaatggaatatactataatggaatataaaactgctgttaaaaaagaatgaggctattctatataatctaataggatataacttacaatgttaactttttttaagtaagatgcttaagtacacacaccttatatactatatattcagaggggaagggagtcagaacataaagacacatatacatagaccacttccaggataatatacaaataccactaacagtggttgcctttaggaagggaccttagtttttagtg

SEQ ID NO: 378681 - DNA, 518 bp, Homo sapiens
gccaaaaactatgtatgtacacatagacataaatatatcatttattacttatagaataatgcaattgaattattttgtctaaaaggcactttaagtatttcagatgctttgaggactgttgaaaaagtgcatgtgcaagtcgatcccaggtcctattgttttctccttccatctcaccattcagtgtcatagagtcccagccctgcactcactaagacttaagtgggggaattaattcagttctgtctcattaagtactgagcacaatggccaagcgcagttgctcatgcctgtaatcctagcgtgctttgggaggccgaggggggccgattggctgaacccaggagttcgagaccagtctgggcaacgtggtaaaaccctgtctctactaaaaatacaaaaattagccgggtgtggtgacatgtgcctccaatcccagctacttggggggctgaggcacaagaactgcttgaacctgggaggtggwagttgcagtgagcccagatcgcgccactgca

SEQ ID NO: 378682 - DNA, 429 bp, Homo sapiens
cagggaaatgtcttatagcctggggtcagctggaacagtggagggagtgtatcccataaccttgtagacctttaccttttgctaagggcaagtcacttaacctccagttacccatttgtgaaatggcccatcattcttcccctgcagggtgatagtgatgatgaaaaatgaggtgtaacagatactaaagggtctagcagagtgtctggcatatggacaactcagtaaatgcyagatccttctctaggtttcaatccagatagggtctagaagaagttctacacaaaattggtgctaaataaatattgatggaattgcaaaccctttcagaacctgtttggcattttgtagctgcagattaaatggtgtaaaagcctgtagccttgtgtgttggagctgtgactctggctctgttacactgatttctgt

SEQ ID NO: 378683 - DNA, 655 bp, Homo sapiens
agtgtgaattgctacaaccttttggaaaagcagatcatttctgtgaaagtttggagcacacgtgccatgtgagccagcaatcccacatttgcagccttgttttacattaggaaaaacattgacatgtaagaatctgtgtgtaagggtgtctgttgtaggatttttttcagtaaataaaccagaagcaacaaatgttcatcagtaaaatgaataaaataaggtacatccatagtatggattattttgtgagggtwgtgcataacataattaaaaataatacataaaataaaagctagttgcagagtatcatatgtatgttgcatgaccgtatttctgattttttatttttatttttatttttttgagatggtgtctcagtcgcacagactggactgcagtggcttgatgtgggctcactgcaacctctgtctcctgggttcaagtgattctcctgcctaggcttcccgagtagctggaattacaggcacccgccaccacacctggctaatttttgtgtttttagtagagacagatttcaccatgttggccaggctggtctcgaacttctgacccaagtgatccacccgccttggcctcccaaagtgctatgattacaggcatgagccactgtgcctggccttatttctgattttaa

SEQ ID NO: 378684 - DNA, 496 bp, Homo sapiens
tggtgacctgaccaaaagacttggaggcaggccaaggcacagaacccaggactccggcctcctggtatggggctctttgccactttacatccatccagttcacaggcacccacagccattccgtaactcataaggcaatggtcaactttaaaatctgcccacacatctctatatygagggaggtttagtttggtgagtgtcctcccccaagcttgaggcaaggctcacaaaacggagggctaattcttcactggctttcagaatgctgaaatctcattggcttttggaatattttgacaacttccccacccactgggcagtttgtccccattcacagccatttgcaaaaattaaaagtacaagctgcttagtggagacaaggtcagagtcagtgtcatcagcatcccaaatctgaaaataaaaccaaaatcaaatctccttaggggaaaactgtcaacccaaacacaaggcggtttaatacagaactgtgttgacc

SEQ ID NO: 378685 - DNA, 496 bp, Homo sapiens
tggtgacctgaccaaaagacttggaggcaggccaaggcacagaacccaggactccggcctcctggtatggggctctttgccactttacatccatccagttcacaggcacccacagccattccgtaactcataaggcaatggtcaactttaaaatctgcccacacatctctatatcgagggaggtttagtttggtgagtgtcctcccccaagcttgaggcaaggctcacaaaacggagggctaattcttcactggctttcagaatgctgaaatctcattggcttttggaatattttgacaacttccccacccactgggcagtttgtccccattcacagccatttgcaaaaattaaaagtacaagctgcttagtggagacaaggtcagagtcagtrtcatcagcatcccaaatctgaaaataaaaccaaaatcaaatctccttaggggaaaactgtcaacccaaacacaaggcggtttaatacagaactgtgttgacc

SEQ ID NO: 378686 - DNA, 625 bp, Homo sapiens
ttcattcaatacttgaacccctaactctcaacacatgacctaaaaatactgcaccatgagacactggtttccacttcaacattatgctcttccttagctcaagtctggaaaagacttccattccctcatccaaggctaacctctaaccagcaagtttccttcatcaatcattaagaattttttgtcgagtacctatcatgtgccaggcattcttgcaggcacttggggatacagcggcagagatgatttctcttctggagcttatattctagatgcagtgagatagacaataagtgagtcctgtatgtaatatcagggaatartaaatgatagaaaaataaggaagaagcttgagaacaggggccaggggatgccggcgtgacctcataagaggtgatcctggagagattcctaatgaagagaaaggtgagagagcgcccccaactttaagccaggaagaaacatccagcaagaagcatggagctggagaagccgggggtaggagaaccagattgtgacatggaagccagtggaagggttccaaagagaaagcaatgacctggccaaatgctgaggagagcctgtagaagatgacaactaaagagttagccactggattgtacca

SEQ ID NO: 378687 - DNA, 631 bp, Homo sapiens
gagtagtcactggtcagttccccaagggtygacttgcctgttgttgttttagtggcttcttggaatctgcctggaaggccttctgaggagtttgttggaattatgcatatacagtaatcagagttctgagtgtaggcaaaagtatctggatttcctagaaagtgaggggctgccggacagtctcttcatttgccaagggatattttaaaataacatgcttctgtatcggtggctgtgttctagagagctggggtcaccgtaagtctgatgatatcccagtgtctgtcacaggaaagtgaggtacatccacgtatctactgacccccagtatctggtgggatatctttcccacagaatttgcttcttaggagggtttttttttccttatagttcttttcatatataaatactaatcagtcaccaattcattacattttaggaacaggagagtctgtgaatgacatgaaaaattattaaaaggaatttggcgaaactattaaaggaatttacccactctaaagagagctgtacaggggttattgttcttgttaaacagagtagaggtcagttagtggaatgtggagagtttaaagtcattgctgacttaatgactagtgaaagaccaagaaga

SEQ ID NO: 378688 - DNA, 631 bp, Homo sapiens
gagtagtcactggtcagttccccaagggtcgacttgcctgttgttgttttagtggcttcttggaatctgcctggaaggccttctgaggagtttgttggaattatgcatatacagtaatcagagttctgagtgtaggcaaaagtatctggatttcctagaaagtgaggggctgcyggacagtctcttcatttgccaagggatattttaaaataacatgcttctgtatcggtggctgtgttctagagagctggggtcaccgtaagtctgatgatatcccagtgtctgtcacaggaaagtgaggtacatccacgtatctactgacccccagtatctggtgggatatctttcccacagaatttgcttcttaggagggtttttttttccttatagttcttttcatatataaatactaatcagtcaccaattcattacattttaggaacaggagagtctgtgaatgacatgaaaaattattaaaaggaatttggcgaaactattaaaggaatttacccactctaaagagagctgtacaggggttattgttcttgttaaacagagtagaggtcagttagtggaatgtggagagtttaaagtcattgctgacttaatgactagtgaaagaccaagaaga

SEQ ID NO: 378689 - DNA, 631 bp, Homo sapiens
gagtagtcactggtcagttccccaagggtcgacttgcctgttgttgttttagtggcttcttggaatctgcctggaaggccttctgaggagtttgttggaattatgcatatacagtaatcagagttctgagtgtaggcaaaagtatctggatttcctagaaagtgaggggctgccggacagtctcttcatttgccaagggatattttaaaataacatgcttctgtatcggtggctgtgttctagagagctggggtcaccgtaagtctgatgatatcccagtgtctgtcacaggaaagtgaggtacatccacgtatctactgacccccagtatctggtgggatatctttcccacaraatttgcttcttaggagggtttttttttccttatagttcttttcatatataaatactaatcagtcaccaattcattacattttaggaacaggagagtctgtgaatgacatgaaaaattattaaaaggaatttggcgaaactattaaaggaatttacccactctaaagagagctgtacaggggttattgttcttgttaaacagagtagaggtcagttagtggaatgtggagagtttaaagtcattgctgacttaatgactagtgaaagaccaagaaga

SEQ ID NO: 378690 - DNA, 556 bp, Homo sapiens
taagaagctgatatggtttgactatgtcttcacccatatctcaccttgaattgtaataatctccacttgtcaagggcagggccaggtggaggtaactgaattaagggagaagttcccccgctactgttctcgtggtagtgagtaagtctcacgagatctgagttcccctgcacaagctctttcgccggccgccatgtaagatgtgctattgcttttcctttgcctgtcaccatgatagtgaaggctccccagctatgtagaactgtgagtccagtaaaccttttcctttaaaaattacccagttttgggtatgtctttattagcagaatgagaacggactaatacagaagccaaataaaagacagtgaagcaacccagccattcctgatttctgaaarcctctgccacccctcggctggaggaaattacaccagaactaggggctgggatcactgaagttaagctggaacaaggtaggcccgttcagcaagaactagagccataaaggaaatgcagccactactagtgaagccacccaagaagtgaagaatgagga

SEQ ID NO: 378691 - DNA, 573 bp, Homo sapiens
cacacaagcagagatgggctcctcaacttttgataaggttgcagtccccataaacccatcaaaagttgaacatatcataaaccaaaaatacatttaatatacctagcccacggaacctcrtagcttagcctcacccacagttgggctaaatcctctaacaaaaagcttactttataagaaagtgttaatatttcctgtaatatattgaatactatactggaagtaagaaacagaatggttgtatgggtacttgaagtacagttattacggtactttttcaacttggttctaaagcagcatacagacagttgctgaacttgcgatgatgcaacttaagatttttcaacattgccttcaaatcgctgtaaagttggaaaatcttaagtcgaactatggcaagtcaggaactgtgtgtatgttgctttagatttctctgatgattcatatcaaacatacataaaggaactatgcctgaaaagttcaatactttttatcaggaaatgaccgtaactgcttagtgatttttaaaaattcattgataaatagagtcaaaatgtggagtggaccacagag

SEQ ID NO: 378692 - DNA, 436 bp, Homo sapiens
tacaatgatagattagacacatttgaagagagaagtggcaaatctaaggcaattacccagaagacaagaagtagaaaatataacaggttaagagtcatggaggatagaataatcacatttgaagagattatgattcagcatttttgaagaccactgaaaaatatcaacccacagatttaagaagccaaatgatctcaagaagaataaatataatatccctacctggacatattcttgtgaaattagagaacactaaaggcaaaaagaagttyttaaaaattgtcagagagaacataaattacctacagaaaagggagagggtgacaatagcagcagtgaaaccagaagccaatggaatatttttaatgtgctgagggaggagtaagtgtcaatttggaatctacccagcaaaaacatttttcaagaacaaggacaa

SEQ ID NO: 378693 - DNA, 602 bp, Homo sapiens
aagtcagaatttctcctctgtacccacccataaatgataatacaggccgtattttacctggtgctgtatttgtgtacctgtccgctgtcaaaatccaagcccttgaaggcaggcttccttcagatcttcattgccttgcacaatgcaagggtaggtacttccatcttaattgaatttttacttcccataaaaattcttcatggtgacttacattagtcatcattacacatcaccgtcagttttgtaagcacagtgtcattcaaggtattgtaaaattttgagtttgatgatgtgtgacagtttcaattattttagtacagccctaatgagaacaaggccgtagtattgattcccttcaaagttggcgtctaagtgaaggtcacattcacaaggagggcctaactgaaagcatgtggaagcatcattataaactgttgctaacacgcacaaataaaggctattaataggtattgtttttctttttctttttcttttttttttttttttgagtcactctcactccatcgcccaggctggagtgcagtagcmccatctcggctcactgcaacctccgcctctgtttttcagctccttagttaagc

SEQ ID NO: 378694 - DNA, 598 bp, Homo sapiens
tctcattcacagactgacacatggctcacagtcttccctgtctatctcaatttctgccattatccttgttaacttcaatatacatatgaataatccaaccaaaattccctttctttccactctctagacttttttcacttatgaaaccttctgctcccactcccgttatcctactcctttcactatctcctttcactraaaatagagaaatcgacaggccgtggtggctcacgcctgtaatcccagcaatttgggaggctgaggcaggcagattacgaggtcaggagatcaagaccatcctggttaacacagtgaaaccctgtctctactaaaaatacaaaaaaaattagccgggtgtggtggtgggtgcctatagtcccagctacttgggaggctgaggcaggagaatagtgtgaacctgggaggtggagcttgcagtgagccaagatcgcatgactgcactccagcctgggtgacagagtgagactccgtctcaaaaaaaaaaaaaaaaatagagaagtcatcagatgcttccaatgtcaaatatacaaatctacatgcatcagtacacattctctttttgttaactcctgcccct

SEQ ID NO: 378695 - DNA, 598 bp, Homo sapiens
tctcattcacagactgacacatggctcacagtcttccctgtctatctcaatttctgccattatccttgttaacttcaatatacatatgaataatccaaccaaaattccctttctttccactctctagacttttttcacttatgaaaccttctgctcccactcccgttatcctactcctttcactatctcctttcactaaaaatagagaaatcgacaggccgtggtggctcacgcctgtaatcccagcaatttgggaggctgaggcaggcagatyacgaggtcaggagatcaagaccatcctggttaacacagtgaaaccctgtctctactaaaaatacaaaaaaaattagccgggtgtggtggtgggtgcctatagtcccagctacttgggaggctgaggcaggagaatagtgtgaacctgggaggtggagcttgcagtgagccaagatcgcatgactgcactccagcctgggtgacagagtgagactccgtctcaaaaaaaaaaaaaaaaatagagaagtcatcagatgcttccaatgtcaaatatacaaatctacatgcatcagtacacattctctttttgttaactcctgcccct

SEQ ID NO: 378696 - DNA, 631 bp, Homo sapiens
ttttcttctgggggcttcttcttcttttgagtctgagtcttcctctgtggcccaggctggagtgcagagacacaatcatagccttgagctgctgggctcaagttatctactggactcagactcccaagtagctggactacagatgcaggccaccacatctaatttctttatttttgtagagatggggtgttgctatgttgccaaggctggtctcaaactactggactcatgtgatcctcttgcctcaccctcccaaagcactgggattacagccatgagccacagcactcagctttttatttctttttgatatatatggtcttaaaaataagcatttataatgattttttttgagacagagcctcactctktcacccaggctgcagtgcccggccacatttataatgattatacataaacatatgacgctaatgtaatgaagtgaatatgctggtactctaacggatgaaagtacaagataaaattgtaatactagaaaaagggcttggtttgtgaaaagaatcaaagctctgtattatagtgattatacatattctactacatctgaaggcactctaacatatgtgacatacctcagaagtataacttacacctgtacagattgggtatc

SEQ ID NO: 378697 - DNA, 567 bp, Homo sapiens
gtacgtggtgcctgtacaaagtaggtgcttaatatgtttttttttttttgaatgggcaagtaagagttatatttttaaaacatgcattggatcattaaccacttcctactgcctttaggaaaaagtccagactcctttgccagagccaccaggccatttacaacctggaagcagcagaccttttcagccttatctcttgctgtcacaaacaacaatccacaatctacagtatatgtttgcagtgccatgcttcatccatgctgctccttccatttgacattcttactgatttgtcagatgagaaagcttccattagccattcacagaagaatcacttctctatttccaaaacattktttgtacttccaggataatcacactggttcatttcactgtctatacttatctccccatctaggttgtacactcaagacagaggctctgtcttacttacatttgtatctttagggtctaatattgtaccactgaccattgcaaggactcaggaatgtgctctgaattaattaacaaggtaattaggccagtgccacagcctgagtatcacac

SEQ ID NO: 378698 - DNA, 565 bp, Homo sapiens
tgatggttagtacaacaatgtgatagctatcactttatgcaccattttaagattaatgggcatcatgatatgagttatagatatgaagttccaatgtataatttgagctgtgttgtgtattctgggccataatcatcacataactcagcatatgtatatataaatatatggaaaaacacaaacttgcaaaaacaatttgagacaatcccaaaagatagatmtcaaagaaagatttctttcttagttgaaacgctttcttagcctcctgttttcggataatgctcaaactccttagtggaccagacaaagcctcccatgagctggtctttcccacctcgctggctcatccccagcaggtgcccttcatttatctgcagaaccatgcccacatcctcccattgttcccccttttcacacttaacagatgttcgcaactagtctacttgtctctgtttggagcccttcgcctcttgttttttaaaaaaatttaaatgcaaaacagtgcagtgactaataagacaaccatatttaaactgtctacctggtattaacaaatgtcaacatt

SEQ ID NO: 378699 - DNA, 562 bp, Homo sapiens
tagtttggaaaaaatggcttctaaaaaacaggaaaaatatgattggaaaacaggtttagtatctgccccaggtggttagatatataaagcttacttatccagtgagtgtaagaaaccaaaaccaaaacaaacagaaagagtattaagtccatacagttgagatagaagtagaatatctgaccacagacttgtaggttgtattagttgacaacgtgtgcatctttttaggtaaatataagaattggtttgtgaattgattttttttttcaaaaaagcatcatggaggtgtaatttacataccataaaattcacccatcttaagtgtataattcaattcaatttaattcaaattttagtaaatttagagttatgcaaccattaccacaatctagtttcagaacatttyggtcatcccccaaaagatttcttacacctgttggcaaaaaatccttgctctctcccagagccctgggcaaccactaatacactttctgtctctatagatatgccttttctggacctttcaaataaatagaatcttataacacatattattttatat

SEQ ID NO: 378700 - DNA, 558 bp, Homo sapiens
tgttggctacactaatacataaggctttcctttcccatgtggttcctggctcctaacttcttgtgatacctcagagtatatccccctaaaatttgttttgaccacccaactgccagctagaaccaagactttgatatcctgggtggcaagatttaataagtagattttattaattcctagatgataaaacttaaatctcagatgcatttaaaaatgtgtcatgtattattttaggcatgtgagctatgaaataatggcaataatgatgtgtttaaaaccattaaatcatgtagctggctgaaaatgttccataaaatagagtgagagcaataactgtaggtcagagtgaattctgaaagatgaccacacagggaccaggcaggctttaggacatgaacaygctctgaggcagaaatcattttaatggaatttcctgaggttcacagaaaatttacgtagttcataaaacaaagatagtaagaaggtccagacattcaacagttgaagcagagttcaaacgggacagcatactaagacagtcctgccataagtcaatca

SEQ ID NO: 378701 - DNA, 534 bp, Homo sapiens
gctgtgccgggctttcttcacgtagcgtgttatcaataatggaagagttagaaaaggcaatgactttaaatatcccagggagacttcacccttctccataaagtgtaggtccttctccaaccctgctacatccctgcctgtagaacaccagcctcaatccaggggaattttgcctcatgtttttctgtggtagaaatgtgaattgctatatagtttgccctatcaaaggacctgtagggcytgagtgaaaaaaaaacatcagttccattatgcctatattcctcatctattcattcattcgttcattctttcaaccaatatttattgagaggctactatgtactggacattattcaagtgcttggaatacatgaatgaataaatttttaaatcttgccttcatggagcttatattctacgtaataggtgggttattctgtgtagatactaaagaggtttaaagttttatgatcatcttcttagctatttggcacccttttcaatggcatttttaagagatactaagagtctaat

SEQ ID NO: 378702 - DNA, 592 bp, Homo sapiens
ttttgaaaaactttcttttcctgggccttgttgctcaccatgtaacaacatcctcttacttttcctgtggtgggaaagtaccctgtagtactagcaaggtgcacccaggtagaggacaacaggaatagttatcctacttgctcaggcttacatttttacacatgaaacatagtttcttttacatgtttatttacttatttgttctcaggaagactgacagctgggtgatgtgaaagggacattatgttctgatatccttcagatagagaaatcctaaattgctgttaatttcttgtgcatattcagctgctggattgcatacatcacatcactagcaacctgtgcagawtggccaagggatggagtatgtggcattgggaacagagattgtccttggagatttctgctgtattccctgcaacttcaggaccttcttgctcttgaaagttgcagtttcatattggctgctggaccagtcctgtatgatgtgccacttatcaataaaatgaattggtttctccagggtgtggttatctcattatagttttaatttgcatttccctgataactaataatgttgaacattctttcc

SEQ ID NO: 378703 - DNA, 592 bp, Homo sapiens
ttttgaaaaactttcttttcctgggccttgttgctcaccatgtaacaacatcctcttacttttcctgtggtgggaaagtaccctgtagtactagcaaggtgcacccaggtagaggacaacaggaatagttatcctacttgctcaggcttacatttttacacatgaaacatagtttcttttacatgtttatttacttatttgttctcaggaagactgacagctgggtgatgtgaaagggacattatgttctgatatccttcagatagagaaatcctaaattgctgttaatttcttgtgcatattcagctgctggattgcatacatcacatcactagcaacctgtgcagattggccaagggatggagtatgtggcattgggaacagagattgtccttggagatttctgctgtattccctgcaacttcaggaccttcttgctcttgaaagttgcagtttcatattggctgctggaccagtcctgtatgawgtgccacttatcaataaaatgaattggtttctccagggtgtggttatctcattatagttttaatttgcatttccctgataactaataatgttgaacattctttcc

SEQ ID NO: 378704 - DNA, 531 bp, Homo sapiens
aataaaatgattgggaagtgtttgctctgcttctattttctggataagtttttgtaggaatgttactatatcctccataaatgtttgataaactatatcagtgaagctgttcgtacctggtattttccttgtggagatattttaaattatgaatttaatatctttaaaggtatcctcagccctgtttctattcttttgcaccagtttggtaatttatgtctttcaagaaatttttgtatttcatttaattttccaaatttattggcacaaagttgttcttaatatttccctgaccttgtaaagtctrtgggacttttaacaatgtcttgtcttttattttgaaatgggtcacttgtctcctctcctttcatcttgaagagtattgaacttatattatccataacagacttttaggaatgttggaaatattgggccacaccctagaagagggcatcaccttgagctagcagttttctgaggcaaacggcaaagctcaaagagggacacagctgtgagctgttagcagttaac

SEQ ID NO: 378705 - DNA, 569 bp, Homo sapiens
ctgaagatcatgtcagatgttttctcattaagacagattctgttttttgtgatatgacactgtatggagatgggctttcaggtgagaacaagaagggctaactacacacacacacaccccttacacttctcagtattccatgtgatgccaagcagtaccacgagtagaaggagctcgcctgctaccttggatgtttgtctyggtgttcttgacctttgtaccccttttcacccaatttccatagacctgtcacggtctccagtggttctcctgagattcatgtgttctagtgatgatgcaaggagatcagttagggtttgggaagaaaataaaatgaaaaaaacatacatgtacaggcacatgtacacacaaaaaattatcctttaaaattagctttttgcgggatatgttttacaatgtgcatgcaaggtagaattgccatataataaacactgctccgcaattacagcactagaattgtaaatattctttggaaggatctaattcatggatttccataccttgttatatttcagagaactggacactttaaaaatacagattcctag

SEQ ID NO: 378706 - DNA, 574 bp, Homo sapiens
gtgtgaggacaagtttctcaaacgtcaactgcacatataagaaggaggtggaattacaatcaacctagctgttgtttgttctattctgtttcattgttgtgctaacaaatacaaaaaccttttcagcttcattaagactgtaatttcctaggaagcaagtacctgcatgaagagctagttcactttcaactgttctgcttctctaatgaactaaggattatttcmatcctctcatttttattctactccactttggccccaattgttccttttccttaaggctatcagttcaacaatgctttcccctatactttatctactgatagccagcataacagccaacagactttcttaagttggcagaaatccaagtattgtcttcacagtttagacttgggtaggaatttaacacagaacaaatgcaccaggatttagaagagtccacgtgcatgctaatattctgaggatacatgatgagcagcttcagatggagaaatgagagaaaacttcttgctatttgcatttatgcttccaaaaggcttcatcctctggctcacataaagtttgacattaa

SEQ ID NO: 378707 - DNA, 648 bp, Homo sapiens
tcagcaacattcaggaagtagccatgcagacccaatgtctgtgcaaattagtaacagctttaggtaccagcatgtctttacgtaaatgattttaaaaaccattacctctttcacactggggtccagtaaatccgtaagtgcatgcacatcgatttggggccacacaccttcctccattgagacagccactttcacaaacagctgtaaaataaggagagagctgagacgctttacctgaaaataaatgctaatgaagtaacacttgtggtcctctggaaggacaacaataaaatgtctaaagtcaccctggtgtttgttttggacggtcactctacagttacacatactcagatattcctcagtccactcttaggtaaagctgcctggaatagatgagtttgtatctatgttaatgctgatggtctcattccgtgaagcatctgagcaatgctttcagtttaacctcgaaaacagtggtttctaagagatgtcactgaatgggaactgtgtgttagcaaagactcttttgcttatgatttacgtttaattgcaacagggctcccatgaggggaaatatcagcccctctgatgtcaccattacagaaatgtagcawgttcaattgcacaattaactgcaaacaacaaaat

SEQ ID NO: 378708 - DNA, 545 bp, Homo sapiens
ggatcacccacactgcggaggctgcctctcctctctccaggctgggctacacaaaactcaaccaatattcttctcccactgcagtgtgtggatggtgatacagtttggctgtgtcaccacccaaatctcatcttgaattctcatatgttgtgggaggtgggaagtaattgaatcatgggggcaggtctctttcccatgctgytcccataacagtaagtctcacaagatctgatggttatcataagggggagttttcctgcacaagctctttctgcctgctgccatccatgtaagacgtgacttgttgctccctgccttccaccatgattatgaagcctccccagccatgtggaactgtaagtccaataaacctctttcttttataaattggccagtcttgggtatgtctttatcagcagcatgaaaacagactaacacagatggtcactagggcattctctacatttttgtttatttataataacattattaatcctaataaatatatacacaaaagcaaaaattagaaacgccctgaataacgc

SEQ ID NO: 378709 - DNA, 576 bp, Homo sapiens
atactttgaataaagtattaagtgaaaaagtggtacaaaaactatatatacagtaagaactcatgtaccaaatatgcattacaagtctagaagatactatctggaatgatgaaatcacgaataattttactttttgtatttttaaacttttccaaattttctgtagggtatatatgctcatcttaaagtaacaaaaaaaaaaaacaaggtttttaaaaagaatgttcrtcttctgcaaagcacagggactggtagaaagtagatacaataaatggtgtgtgcaaatgaaccttcaaactgaacaccatgtgataagtacttcggtagcagaatctagattaggaaatgagagggatgcagataccaccaatcaagataaaggacatgtttagagagaatgatgaggctgagttttgaaatattttatttgagatgcttcctgaaaatccaagtgttgaagttcagcaagtgggtggaaggtatgtgtctggaatgaacaagaattctgctcctttggtggtgactagaaatcaaggagatcaggcaagcaaggtggtgaaggtaaatgagaggaaa

SEQ ID NO: 378710 - DNA, 576 bp, Homo sapiens
atactttgaataaagtattaagtgaaaaagtggtacaaaaactatatatacagtaagaactcatgtaccaaatatgcattacaagtctagaagatactatctggaatgatgaaatcacgaataattttactttttgtatttttaaacttttccaaattttctgtagggtatatatgctcatcttaaagtaacaaaaaaaaaaaacaaggtttttaaaaagaatgttcatcttctgcaaagcacagggactggtagaaagtagatacaataaatggtgtgtgcaaatgaaccttcaaactgaacaccatgtgataagtacttcggtagcagaatctagattaggaaatgagagggatgcagataccaccaatcaagataaaggacatgtttagagagaatgatgaggctgagttttgaaataytttatttgagatgcttcctgaaaatccaagtgttgaagttcagcaagtgggtggaaggtatgtgtctggaatgaacaagaattctgctcctttggtggtgactagaaatcaaggagatcaggcaagcaaggtggtgaaggtaaatgagaggaaa

SEQ ID NO: 378711 - DNA, 599 bp, Homo sapiens
tatgattgtactttgcaaatactaattcctttaaaacataaatcctttatgaggaaaattaagcttatttattcatttaacaaatgaagaaacaagggatgcagagtttcagtaattactccagggacataaactagtaagtggtagagttggraaatctagcttcatagctggagctcttaatcttaatattttactgctttacagttataataaatcttgtagctggtaaatttttttctttcataccttttataccttcgtttcccaagaatcttctcccaccattgctatgtggaaagactcaacatttattgatggcagatgctgttacaagccaagggaagcatcattgtgggaatgggattgatcagaagtgactttacagtgaaagtctattagggctgggcatggtggctcattcctgtaatcccagtgctttgggaggctgaggcaggaggatcacttgagcccagagggttgaggctgcagtgagctatgatcatgccactgcactctagcctgggcgacagaacaagatcctgtcttaaaaaaaaaaaaaaaagtttatcagtggtcaacaaactgaagaccaagct

SEQ ID NO: 378712 - DNA, 558 bp, Homo sapiens
cactcattggtttttagtgggaattctagtgctataaactcatttcagtacttcagagacagccaaatctcaacygcacgttcttggagaaacctgagatttcattatgaaagtgacaaaataaatctagaaggaaaaaaaaaaaatcccgtcaaccactcactacctcaccccacgagacattttagctgagctgctaacaagcagccacacagcaactgtttgctggggacttctgagaagatacgactcacgcatttgctaataagggaacaactaccatattccaaacaggtgaagaaaaccttcaggtatggcagattttctaactacatttttgtgacacttttattcattcgaaaacctacagtaagagacgcggagtgtaaaatgtgtgtttgtgttttgcttggacagacaatggctcctagcaattaatgctttcagtcacattaagcattaaataatgctttgtgacattacagtatttcccattacagatcaattttgtagcatttgttcataatcagacttgaaatgttacctagaaacaaaata

SEQ ID NO: 378713 - DNA, 624 bp, Homo sapiens
aacccagtctggctcagggccattctcctcatgggaaaacatatccgctagaagggaaggttattgttggttacaaaggaaagtgggaaggtaaacctcccccacccccataaaacaaacttgacctcctgagctttaggaaaggcgacaaccaatccagagacctaactcaaacagctggtaggcagyttcttggggataatgatgcagtaatttattcatgatgaaggccatgtggtggagtagaaagaactgagtttagaagccaaaagataaatcccggcttttgacttaattcagtgactgagcctgaagtttccttgtctgtaaaatggagatgataatttataaatcatggggctattatgatcaaatgtgccattttgatgtaaaagccctctacaacccaaactggcactacataagcgaaaactaataataatgactaacattgaacactatggtccagatactgtataaagtgttctacacacagttttcatttgattttcacataacaaccttacaaagtgagtgctgttataattcccattttacagatgaaaacaatgaggtaaagtcttacccaatgacccacagctcatatgagctggaggctgcaca

SEQ ID NO: 378714 - DNA, 624 bp, Homo sapiens
aacccagtctggctcagggccattctcctcatgggaaaacatatccgctagaagggaaggttattgttggttacaaaggaaagtgggaaggtaaacctcccccacccccataaaacaaacttgacctcctgagctttaggaaaggcgacaaccaatccagagacctaactcaaacagctggtaggcagtttcttggggataatgatgcagtaatttattcatgatgaaggccatgtggtggagtagaaagaactgagtttagaagccaaaagataaatcccggcttttgacttarttcagtgactgagcctgaagtttccttgtctgtaaaatggagatgataatttataaatcatggggctattatgatcaaatgtgccattttgatgtaaaagccctctacaacccaaactggcactacataagcgaaaactaataataatgactaacattgaacactatggtccagatactgtataaagtgttctacacacagttttcatttgattttcacataacaaccttacaaagtgagtgctgttataattcccattttacagatgaaaacaatgaggtaaagtcttacccaatgacccacagctcatatgagctggaggctgcaca

SEQ ID NO: 378715 - DNA, 624 bp, Homo sapiens
aacccagtctggctcagggccattctcctcatgggaaaacatatccgctagaagggaaggttattgttggttacaaaggaaagtgggaaggtaaacctcccccacccccataaaacaaacttgacctcctgagctttaggaaaggcgacaaccaatccagagacctaactcaaacagctggtaggcagtttcttggggataatgatgcagtaatttattcatgatgaaggccatgtggtggagtagaaagaactgagtttagaagccaaaagataaatcccggcttttgacttaattcagtgactgagcctgaagtttccttgtctgtaaaatggagatgataatttataaatcatggggctattatgatcaaatgtgccattttgatgtaaaagccctctacaacccaaactggcactacataagcgaaaactaataataatgactaacattgaacactatggtccagatactgtataaagtgttctacacacagttttcatttgattttcacataacarccttacaaagtgagtgctgttataattcccattttacagatgaaaacaatgaggtaaagtcttacccaatgacccacagctcatatgagctggaggctgcaca

SEQ ID NO: 378716 - DNA, 594 bp, Homo sapiens
cttgtatctctcaagcagctcaaacattctggaagctgtgattcctccaaagggaccagctgggagaggcatgtgcccacgccagcctcagtgtgggtgtgaattcctcagttccaaaaaggagcaattctgtctgatgggctgtttgtgccaaagcttaccctggcaactttcttggtattgaaaccctggcatgcggtgggggaaatatttcagtgtgtttcccagccctggggacctgttcccgtcctcctctgcttggaggaatatgccactcagagctgccacattaatgctgctactgaagccaaccactgacacctcaaatgacagcttaacacatgcatacacacactcttttctcatccccaaaatcacaatgcaaagagttgaaagggcgagggctccaattcacaactgccattttcccaagggtgcttcccaaaatgttaataggtactgcragggcctaagaggagactctgtgctcaaatgtgcctaagaaatcatggctcaaacaaaaaataaacaggctattgcagggcttctccaagattgtattgggttaatttgcactgtgaagggctagggggt

SEQ ID NO: 378717 - DNA, 573 bp, Homo sapiens
gctgctgtgaccatcatcaagaccgccatgttgctaaatccagtcaccaattctcagtcttcaacttaagttgctaacaacttcgttttaatatagttggcccctctttcctccttcaaacacctttcccgcttggtcttcaggacatcacactctccttgttctctttcttcttcactggctgctccttctcatttccctttgatgctttattttcatgtctctttcctcataatggtggaatgtccagagctttgttcttggatctcttctcttctttatctaaactcatttaccttggtaattgcatccaatctatggtctttaaatattatttatatgctgatgaattccacattatattttcatcctgcttcactccccagagctccaaattcatatatccagctgctcaacaccacctctacttggatgtataaaaactttcttaaactgaacgcatctaaaccaagctccccatctctccctccccacactgtacttcctagtcttctctaayttagcaaatggcaactttatccattcagttgcccagttcaaaactattagcat

SEQ ID NO: 378718 - DNA, 595 bp, Homo sapiens
cctctgtccggccatacccacacatttttatggttaatgtcttcacggtaactcttgatgtttattatttaattcacatcccatatgtgttcttcaatgttagacatgcaataaaatccagcattagcaaaaactaaaacaaagtctaaaaaccatcagcaaaaactaaaatcaaacaaaagtataaattaaaataaatactagagttaaagaagagcgttagaatgcaggtgtgccratggtgacagtgtaaacagttaccggagttgagcttcaaaactaacgtttagctccctagtagccagaatgaaaacggaaacacaacccgttatatgattcgattttctgtgaggagatgctgagttgctcaagggatgatgagcttttctctgaacctagaataaacagaattttgttatgcggggtttcacctactaagaaatgtagattgtaatgtcccttataaaagacctacagtaagcttagtgcagttttcgtctataagtcaagctggcaccttaatgcacaaaattggacctcactgaaaacagtgcttcgaggggccacataggttctgagggttccactgaatgca

SEQ ID NO: 378719 - DNA, 586 bp, Homo sapiens
acaatttatggttttagatgagtttactttgagagcaactaaagaaaatgaactcggttaaaatgtaaagtctgggtttttttaaagtgtgagcagcatactaagattataaatatgcatgtagatgatattaatgtccagatgtcagacaaccaaaccactatttgtattggcaagtgagagtcaacaaaattagaaaattggaaattagtaaagagaaacacacatttaaacaatgaagctgaaataatatagaatgcgagactgtcaaaaagttgcaacttctactattcatttatctgattccagtaactttttaaaaattctaaacaatatttcatacacagattatataagctataaagaacaagaaaataaacagccatgtacttacaacctggcttcagaaccacaacattaacagattcattgcagccctttgggcatttttccctgattccaaacctcctgtcccccggcccaccagtaaacactatcctgaattttgtgttttgttattgtggyagattatattgccagccccaattcttcaccctttactgtatccacaccttttcctatgtaa

SEQ ID NO: 378720 - DNA, 551 bp, Homo sapiens
gggactaggaaatacatttctaagaaagaaagatgttatagaccccatcttttatacccaccccctcagtctaactctaaagaagataaaaaataatgaytatcttcacaagggctcatgactaatgtcactttgctatcaaaatctgtatctctgatcgattttaagcattgagacaagattcaaatatttccaaagaaagaagcacaatgcacattgtggtcacttattcagcaacaacgagcactgcatccaaaactatctcacttcggaatgaaataaggtcagccacatgcatgggcatctcttccgctatggtatcgtagaaagtctcagtgtcatgaacaatctatttgtcttcttcagtaacagtttatatccacacctttcttcccaagtcgaccccctctgccaattctttattctaattgtgtgctgtctcacttatgattccacgtcctaaattacatcagtgccatttctgagtaccatcttgccatcaactgctgctgtcgactcctgtgaatatagttttcacaattggtaggtag

SEQ ID NO: 378721 - DNA, 551 bp, Homo sapiens
gggactaggaaatacatttctaagaaagaaagatgttatagaccccatcttttatacccaccccctcagtctaactctaaagaagataaaaaataatgattatcttcacaagggctcatgactaatgtcactttgctatcaaaatctgtatctctgatcgattttaagcattgagacaagattcaaatatttccaaagaaagaagcacaatgcacattgtggtcacttattcagcaacaacgagcactgcatccaaaactatctcacttcggaatgaaataaggtcagccacatgcatgggcatctcttccgctatggtatcgtagaaagtctcagtgtcatgaacaatctatttgtcttcttcagtaacagtttatatccacacctttcttcccaagtcgaccccctctgccaattctttrttctaattgtgtgctgtctcacttatgattccacgtcctaaattacatcagtgccatttctgagtaccatcttgccatcaactgctgctgtcgactcctgtgaatatagttttcacaattggtaggtag

SEQ ID NO: 378722 - DNA, 551 bp, Homo sapiens
gggactaggaaatacatttctaagaaagaaagatgttatagaccccatcttttatacccaccccctcagtctaactctaaagaagataaaaaataatgattatcttcacaagggctcatgactaatgtcactttgctatcaaaatctgtatctctgatcgattttaagcattgagacaagattcaaatatttccaaagaaagaagcacaatgcacattgtggtcacttattcagcaacaacgagcactgcatccaaaactatctcacttcggaatgaaataaggtcagccacatgcatgggcatctcttccgctatggtatcgtagaaagtctcagtgtcatgaacaatctatttgtcttcttcagtaacagtttatatccacacctttcttcccaagtcgaccccctctgccaattctttattctaattgtgtgctgtctcacttatgattccacgtcctaaattacatcartgccatttctgagtaccatcttgccatcaactgctgctgtcgactcctgtgaatatagttttcacaattggtaggtag

SEQ ID NO: 378723 - DNA, 554 bp, Homo sapiens
tggccagacctaggtcatccccaatcctggaatctggcaaggccacaygaactgggtcctgaattatctgatagagcagaggtatcttgaactgctcactttaggactgcctagtgagagacacataacatttctcttttatttaagccagtgtgtttttgggtttctttgttctagcagcttagcctgcatgctaacataccctgtaccaaggaagcagtgtgggaaaatggactgattatttagagatctgggatctcattagttctacaatttgctatgatgtgaccagtttcttcttgtgtaaaataagccgtgcggattgaatctgggatgcaggaaaatggaattcatcttgagcagaatggggaaaataatcgtatttacagtcactcctctgtatctgtgggttctgcatctgtggatgcaaccaatcatggatcaaaaatattcgtgagaaaaacaataaaaaataacaatactactataaaaatggtaagaaccaatatagtattacatctatttacatagcatttatgttgcattgggtgtta

SEQ ID NO: 378724 - DNA, 554 bp, Homo sapiens
tggccagacctaggtcatccccaatcctggaatctggcaaggccacatgaactgggtcctgaattatctgatagagcagaggtatcttgaactgctcactttaggactgcctagtgagagacacataacatttctcttttatttaagccagtgtgtttttgggtttctttgttctagcagcttagcctgcatgctaacataccctgtaccaaggaagcagtgtgggaaaatggactgattatttagagatctgggatctcattagttctacaatttgctrtgatgtgaccagtttcttcttgtgtaaaataagccgtgcggattgaatctgggatgcaggaaaatggaattcatcttgagcagaatggggaaaataatcgtatttacagtcactcctctgtatctgtgggttctgcatctgtggatgcaaccaatcatggatcaaaaatattcgtgagaaaaacaataaaaaataacaatactactataaaaatggtaagaaccaatatagtattacatctatttacatagcatttatgttgcattgggtgtta

SEQ ID NO: 378725 - DNA, 416 bp, Homo sapiens
atacttatctacaaggatgttcatctcagtgttatttataatggcaaaaaaagaaggtaggaaatgaaaaaaaatatgtatacaaggctaagggattgcaggtgtttgagaccagcctagccaacatggtaaaaccccttctctactaaaaaaaaaaaaaaaaaaaaaaaattagccaggcgtggtggcgggtgcctrtagtcccagttacccgagaagctgaggcatgagaattgcttgaagctgggaggtggaggttgcagtgagccgagatggcaacactgcactccagcctgggtgacagagagaaactccatctcaaaaaaaaaaaagactaagaaattggacaatatattagaatacagccatatgatggtctggagtaaagatgattaataaatgtattgtagaagaat

SEQ ID NO: 378726 - DNA, 574 bp, Homo sapiens
atagtccacaaaatttccccaatcttgctaaagaggttaacaygtaaatttaaggaattcacagaactcctgcaagacactatgcaagacaaccattcccaagacacatgatcatcagattctccaaaataatataaaagaaaaaaattaaaggcagctagacagaaagggcaggtcacttgcaaagggaaccccatcaggctaacagtggacctttcagcagaaatcttacaagccagatgagattgggggcatattttcagcattcttaaagaaaataaattccaactaaaaatttcttatcctgccaaactaagcttcataagcaaaggaaaaaataaaatccttttcagacaagcaaatgctaagggaatttgttaccactagacctgccagaggtccttaaaggaatgctaagtatggaaatgaaagaaagatacctgtcaccataaaaaaacacacttaagtacatagccaccagcactataaagcaactacacgatcacatctaaacaacaaccagctaacaacatgatgacaggatcaaatcctcacatatcaatattaattgaat

SEQ ID NO: 378727 - DNA, 496 bp, Homo sapiens
acctagactaataaaacaagttcttagagacccaagaagagacttagataaccacacaataatagtggragacttcaacaccccactgacagtgctagacaaatcatcaaagctgaaagctaataaagatattctggacttaaacttgacacttgaccaattggacctaatagacatctacagaatactccatccaacaacagaatatacattcttctcatgtgtaaacagcacttactctaagactgaccacatgttcagctataaagctagtctcaacaaattcaaaaaaaatgaaatcacaccaatcacactctcagaccacagtacaataaaaatataaatcaataccaagaagacctctcaaaactatacaattacatagaaattaaacaacttgctcctgaatgagttttgggtaaagaatgaaattaaggcagaaatcaaaaaattctttaaaactaatgaaaacagagacacaacacaccagaatttt

SEQ ID NO: 378728 - DNA, 499 bp, Homo sapiens
acaagatcgagaaggctcagcctggtgtttaagaaccatctttgagaggtactaagtattatgatgaagaacgaggttttcaatttcagctgcatgcttggaccagcaacttgacccacacgagccttatctgtaaaaagggatatgaacagtaagtacctgcttctagatgtatttgaggattaacctctggaggacctcaagayggagcaaatttgtccccagaaaatatcttgatgtagaaaggatactgattttgaagcctgaactcttgggttcaaatcctgccacagggtgctcttcctccgtgtggccttaagttctccaagcctcagtttccttgctataaaatggagcacaaacacccacttcacagacttagatgaagaccaaagcaaatgagataaatgtacacgaaaaggttttctaaagtggaatggcactctgctaatgttcagcactataattaataagccagcgaagagtgttctgtggcagg

SEQ ID NO: 378729 - DNA, 530 bp, Homo sapiens
catcttacatttacaacaacccagttcatatcaatgccaacttaattccttttctttttcttttcttcagagacagggtcttactctgtcacccagtgcagtgagggtgcagtggcataatcatagctcactgcagcctygaactcctgggctcaagtgatcctcctgcttcagtctcccaaataggtggaattacaggcacatgccaccatgtctggctaattttaaaactttttgtagaaaccaggtctcactatattgcctaggttggtcctgaactcctgggctcaagtgatcctcccacctcagcctcccaaagtgctgagaccataggtgtgagccactatgcctggccttaatttcaatagtatacaaaattgttcctccatatagctctgtcccccttcccatgttgttattgtcacaattgtatgtttatacattatgtgcccattaacatagatttataattattgtttcttatagatgtcttttaaataagataggaaacaaggagctacaaaccaaaa

SEQ ID NO: 378730 - DNA, 632 bp, Homo sapiens
ttataattttattgtacatttaaaatgcagattttaaaaactcaaattgtgctttttagtaactaataatttaagaactctttctgatcctcccctacttttccaaccttcttttcttgcctaacgttaggaaaaccaaattgaagatgcctgcattttgaacaggttgaacttgtggccttggctataattgtcacttcataatctatttttgattttaatcttattattataactttctttttacagactggtgaattttcagctcgtttccttttgaagctgcccgtagatttcagcaatatccccacataccttctcaaggtaaaaatatatgattttcagtatgagaatataagtgagctttttaagtaattatttaactcaatatttgtatgactggtttgtcagcattttgttcagatgatgaattctattaaaaatatttcttacatgaagttccattgagctgttttgctrcctaaaagctaaaatagtaactgtgaaagtcatttagaagtgagttttccatattaaaataaaattattataagtgaattaaactttgggaaaaatcgcttttatttaataatgttactggaatgaaagactctcatataaattacctaata

SEQ ID NO: 378731 - DNA, 403 bp, Homo sapiens
taaagttttaagataagactattgtgtttcgttcctatatgctttatgaacttaaaatatttttatggagtctgtaagctgctattaaaattgtattaacttttggcttttattccatagtataattatccttgattacagactccataagaggtagtgtacrgaggagctgtttatttcacaaaaaacttgacataggattctagaacttctaaggataaaggctgttatttttgagataatttaaacccaaataaatattattttagaggaagattacagttagggtttttttgaggggaggggacaactatcttctgttttgaagaacaaatactcttcattgtgggttgttgtgacacccagaatttctagcaataccatgtttgatcctatctcttta

SEQ ID NO: 378732 - DNA, 358 bp, Homo sapiens
aaaaatctaagggaaattcagaacatgtgatgagtgaaaataaaaacacaacacagcaaaatttgtaggatacatctaaaacaccacttagctggaaatttatagcattaaacaccaatattaggaaaaaagaaagatctcaaatcaatgaccatgttaataaactaygaaaagaagagcaagtgaaagtaaaagaatatttaaaatctgaatggaaatcaataaaacagaaaacagaaatacaacagagaagatggatgaaaccaaaagctggttcttccacaacatgagtaaatgtttaccacttttttctttaccactagccagactggcaaagaaaacagttgcgggggagaaa

SEQ ID NO: 378733 - DNA, 420 bp, Homo sapiens
agattgctggatgctacagaaaacaattcttacttttrtagaagcaactctgccactcaattagcaactcatgctgagtcctcaatttggacaaaagctctctaaagcttcatagttagaactggagatttgttgccttcttctctcaagaaagcacttaaaatctaagtacccactctaaaggtggtgtccttccatttcacaaaactacaagtggctttgggttattcaaattcctcaagttatcttgagattcagaactcacgaacacagagccacattgagcccaaggcactcctctggaaaaaaccatctctccttcttctgcagggctcaaagtacttcacactgatagtgtatactgtgtgcaaattctcccaaggaaggcagaccactcacacttaatgacaaaatgccaag

SEQ ID NO: 378734 - DNA, 420 bp, Homo sapiens
agattgctggatgctacagaaaacaattcttacttttatagaagcaactctgccactcaattagcaactcatgctgagtcctcaatttggacaaaagctctctaaagcttcatagttagaactggagatttgttgccttcttstctcaagaaagcacttaaaatctaagtacccactctaaaggtggtgtccttccatttcacaaaactacaagtggctttgggttattcaaattcctcaagttatcttgagattcagaactcacgaacacagagccacattgagcccaaggcactcctctggaaaaaaccatctctccttcttctgcagggctcaaagtacttcacactgatagtgtatactgtgtgcaaattctcccaaggaaggcagaccactcacacttaatgacaaaatgccaag

SEQ ID NO: 378735 - DNA, 493 bp, Homo sapiens
ttcaatgcttaatattaaaagcgttttgatctttatttagtagtttcgtggtgttgtaaccagaaacatgccctaagaacttaactcttgtttatatcaattaacctatggtaaaactggtttcattacatatgaaattaaawgaggagttactgtacatgatttatcaagtcatttaaaataccaacttctactgaaattatagtgctagccctataaaagtaattccatttttagaaccagctaggaccttctagctgtgctagttttgtttctctataccaatttacttacaaacagcaaaagccagaaagatccatctggatccacttcctttattaatggaagcgataaccaccaaccataaacaaacaattgaaacattataataaatttctatttatgaagtagttattttataatttgtctaatttccacacatagaattaaacaatttaagtgtattttaattgtcaccaatttggcaagtact

SEQ ID NO: 378736 - DNA, 549 bp, Homo sapiens
acttccccctgcctctttctgacacttctgcaacctgtaattagtgcaggattcatctcgtttacaaaaataaaaataaaaccttctctcctgtacctgagtccggcctagctcttcccacttcctgctcgtgtccacctgcttctcaggcaggcgccgtccccgcccacgtccaggctgtccaggctttcccgtgtgctcctcctgccacggctgctgtggtctccccacagacactgataccttcagggacttcagggacccagggacctgtttcagcctttggcagtggcgtgggcctatcccatccctcttgtttcgccagcttttgtttggcctttggtctgacttggagctgctgctttgatgcctcattttccaggctctccctgcctgatcctgaagggctaaggggccccagagcccttcccttcacctccctttcactttaggggtgcttcctgggccactgggtcattcccacggctgcagccaggcccrtcctccttctggacacccccctccccttgggcaccacaaaccagggac

SEQ ID NO: 378737 - DNA, 610 bp, Homo sapiens
aatcagcccaaattcccatcaatggaagactgaataaagaaaatatggtacatatacaccatggaattctatgcagccataaaaaggaatgagattatatcctatgcaaggacatggatggagctggaagccgttattctcagcaaactaacacaggaacagaaactcaaacagcacattttctcacttatatgtgggatctgatcaataagaacacatggacacagggaggggaacaacacacactgggacctgtcatgttgtctgggcggcaaggtagggagaacattagggaaaagagctaatgcatgctgcgattaagtacctaggtgatgggtcaataggtgcagcaaaccaccatggcacatatttacctgygtaacaaatctgcacatcctgtacatgtattccagaacttaaaaaagaaatatggtgctttttaatgtgctaccttttttaaaggagaaatattatttgacttgtttgtcttttatactttagtctcattttccgttatatggtacagaaatgataggtggtcccttcattttaagggagtgatacagaatgttcctcatgccactgagtgattaaagctccaaaagcataa

SEQ ID NO: 378738 - DNA, 563 bp, Homo sapiens
aaagaagtaggttttaaaatttctaaactgtttgctaaaattagtcatactttccagttttaaatgaggtctgagttcatgttattttgccattacatttgaaaatatttttcttagagtccatcctatttttcctacaaggaagcactctcctatttttctccctgttttgctggaatcattttaaaccccacccctttaggaamtctctacccaacttaattaattcccttttttacttttctaatttctctagtgctttgcttgaactatactatcaaattattagaaactatttcttagtatcctgaatagagaagtaaaacattgaaataacttcacctaattaaaatagcttcttaaaggaagatctttaggatcaagtgggctagaagggaactttgtgggctaagatgtgtattgttagccttttgaggacttacttagtgttcagacttcttaaaatgctgtctatccaggagatggtctttaaaccagaaaaagataaaaaggtacattgaaagcggggagaccaatgagaaattacttaatgggtacaatgt

SEQ ID NO: 378739 - DNA, 563 bp, Homo sapiens
cttaatgggtacaatgtatattatttgggtgatgggaaccctaaaacccagatttcaccactaagcaatgtatgcatgtaacaattgtacttataccccttaaatttatacaaaatttataaaagtcaaggtaaatagttgtagagagaaaaaaatttaataactggagaacaaaccattctccrgagtgttttatttagattatataaaagcatacaatattttttgttttcatttttcagtaattcaagaaaaggctataaactatgttatggaattgggcaatagggagaggacagtacttgaggcagataaaatgattgcagagaggtctgtttgaagttttgtgttttttttcttcatgtatttcatgcaattatagaatagtcttacgatataatctgtgattccagtgatgacagttttgtaatgaattataataaatgatatattgaattgtaatgaaacacttaaaacaagattatggcattatttagattacatataatcttagctataatatttttgtgtttatgactcacaatcttgaattactacagatt

SEQ ID NO: 378740 - DNA, 563 bp, Homo sapiens
cttaatgggtacaatgtatattatttgggtgatgggaaccctaaaacccagatttcaccactaagcaatgtatgcatgtaacaattgtacttataccccttaaatttatacaaaatttataaaagtcaaggtaaatagttgtagagagaaaaaaatttaataactggagaacaaaccattctccagagtgttttatttagattatataaaagcatacaatattttttgttttcatttttcagtaattcaagaaaaggctataaactatgttatggaattgggcaatagggagaggacagtacttgaggcagataaaatgattgcagagaggtctgtttgaagttttgtgttttttttcttcatgtatttcatgcaattatagaatagtcttacgatataatctgtgattccagtgatgacagtwttgtaatgaattataataaatgatatattgaattgtaatgaaacacttaaaacaagattatggcattatttagattacatataatcttagctataatatttttgtgtttatgactcacaatcttgaattactacagatt

SEQ ID NO: 378741 - DNA, 551 bp, Homo sapiens
gtcttttttgaaacattcatgtatcaaactatatcagtttcacacaaaaaagcaagaaaactaagttgggaaacaaatgtattagatgtattaaattgtaaaaatacacctakaaatcaaagtttgcaggagaataagagatttcaggggtaaaaattggacttaaaatggtatttgaccacaactctctttgcacaaatttaaaaatgaccatttttcttttatcatgactatttaaatttgaatgtatgaattgaattagtaactaatggccttactaactgtatttcaactttggttagttgaaatatatatgtgacatttcaaatatttagctgaacaaccatttgtttattttgaacatgaagtgcaattgttctgctcaatcattactatgatttacataatttagagaaaccactgacagaaaatgttgacgtagaatttttttcccatgactattttatttctgtgtaaaatatgggcttggaagtatattagccagttatgactaactgaaactgtcatccaaatagtagattatgtaaata

SEQ ID NO: 378742 - DNA, 551 bp, Homo sapiens
gtcttttttgaaacattcatgtatcaaactatatcagtttcacacaaaaaagcaagaaaactaagttgggaaacaaatgtattagatgtattaaattgtaaaaatacacctagaaatcaaagtttgcaggagaataagagatttcaggggtaaaaattggacttaaaatggtatttgaccacaactctctttgcacaaatttaaaaatgaccatttttcttttatcatgactatttaaatttgaatgtatgaattgaattagtaactaatggccttactaactgtatttcaactttggttagttgaaatatatatgtgacatttcaaatatttagctgaacaaccatttgtttattttgaacatgaagtgcaattgttctgctcaatcattactatgatttacataatttagagaaaccactgacagaaaatgttgacgtagaatttttttcccatgactattttatttctgtgtaaaatatgggcttggaagtatattagccagttatgactaactgaaactgtcatcmaaatagtagattatgtaaata

SEQ ID NO: 378743 - DNA, 512 bp, Homo sapiens
atctatactatgggaaaacatctctctaggggtagttaaagacaatccaaagacttattttttagagaaaaataaaaaacagcacttccatgatactcaggtatggtgctaaaatgaaacaaatcatttactttaaactcttttccagctagtttggatcctaaagatgtgctgttcaactgctaatgtttccaccaaaatttttacccttctttagcagagacagatgagttytaaattattttcaaaaataaaaaggctctgtaaaatttggttttcattttaaaaaacgcttgcacaaaagtggaaaaaaatgttcaaaatgtaattatagttaagatcaagtaagtaccataaaccctgttatttaataccaagtttagaaaattctcaaatgttaaggtggttgacattgtacagtatgtaaattaagtgtatatgcatgcacacaaatctaatttcaattaatgatacaaaactagacagtctttcaggttttcagacaggctgta

SEQ ID NO: 378744 - DNA, 600 bp, Homo sapiens
taagaaagggtgaaattaattccaagtttcccctaaggctcttctctccttataaccacctacatttcaattgattttctctgatgcaataaagaattaacagctctgatgacctttcagaagagtataatgcatctttatctactcgtgaagtgtaaggaaattgtcgccctccctactaagatacagccagaccttcagagcctgacaaggaggagaaaccatctacctgtttaggagtcactcacctctaagccccagactctgtaattacatggctcactctcttcttgttaatctcttgttaatgtttttctgttaccaacatataaactttggctgtgggggyggtggggggtgaaataaggtttaattatttgcagacatctaaaatgaggagcagattttactaaaatttagggtgtcacttctgatttaagagtgatgtgaaaattgatgtaatgacatttaggatttgactctccctaactttggcccacttccgtgaggtggagactgcataacctctgtagcctgagacggttttcctgtctatagataggaattctctatgtggccagactataacccaacttaaca

SEQ ID NO: 378745 - DNA, 393 bp, Homo sapiens
taactaaaatagaatggcctgggtactaatccaaaaaaaaaaagagatgaattgtagtactgcactagctacatagcattactgaaaggaggaacactgaactcaggagaaacacaagcataattcaacaaaatgcggagtccagaagcctctggamcccccacactcttggcactcaagcaggatcctctctgaaaggaggtggaaatatgcttctaccccctttcagagatgatcctgcttgagtctcaagagtggcaagcccatataataatggaatataataaaaataggggcaaacaggccaaggattaaccagtaggaatgcagtggcactctgctacacaacaagaacttatatttggtaatcaattagacatagagggaaaggtt

SEQ ID NO: 378746 - DNA, 586 bp, Homo sapiens
ttattgtgaactttatggaggaagatgattataatctgttttattgtgttttaaactttaayaaaggattaaaaattaaaaatagaaaaataatacaaaataaacatgaatagtaatacatttttagtcaatcccttctcacaatatttgaaatgtgtaatgataaaatgaattttaagccagaaaaggcacaaactgatctctaatgtttctggagataacacagtaaaagcataatattacccaacaatcaagattgttttaatgtccaaaaacattttactgacagaattatactgaaaatctaaatgatgaattattaaagagtaaaactcacttatcattttttactgtttaaagataatatttaacctaattccaggaacttactgtgacacactcttctatataatcagtagcatgcattgactttctgctccttttactccactgattttgggattcacattattaactgcctggtacttttcttttttaagtgcaatgtgttatgatgcagagttaatttgaaaaataccttctgaatcttaccagtacttactcaagcaggaaaacagaaaaataa

SEQ ID NO: 378747 - DNA, 486 bp, Homo sapiens
gttttgttttacctctggtgaataactrtcagaaccatttatcaaatgggtatgttgtattattcttaagttaatcttccaagcagaggttgtagatctaccaactgtcagttaaagttgtttctccttctatcatttaattatactggactattgggatctcacacttggtgtgacttatgaattaatcatccagatttgagaagtaactgtcctttgtatctcctggaatacagaaatcagaccatctcctagagagggggttggaagaggaaattagaaatgggaatgggtcactgaaaaaaaaaaaaaaagaataattccactgttcttttttgagcatgtgttaaactacggagaaagtgtgttcttgttttgtaactaaagagtaaagagtttttggattccatatttaaatgccctagagatgcttgttagcaggaagctttcaagaactaggcagagatcttgagattaagttgggct

SEQ ID NO: 378748 - DNA, 486 bp, Homo sapiens
gttttgttttacctctggtgaataactatcagaaccatttatcaaatgggtatgttgtattattcttaagttaatcttccaagcagaggttgtagatctaccaactgtcagttaaagttgtttctccttctatcatttaattatactggactattgggrtctcacacttggtgtgacttatgaattaatcatccagatttgagaagtaactgtcctttgtatctcctggaatacagaaatcagaccatctcctagagagggggttggaagaggaaattagaaatgggaatgggtcactgaaaaaaaaaaaaaaagaataattccactgttcttttttgagcatgtgttaaactacggagaaagtgtgttcttgttttgtaactaaagagtaaagagtttttggattccatatttaaatgccctagagatgcttgttagcaggaagctttcaagaactaggcagagatcttgagattaagttgggct

SEQ ID NO: 378749 - DNA, 604 bp, Homo sapiens
ctgggctataggagtaattggggtgacactgaccatgyaactggcacatataccatagctctgttatcctctatatcctagatattcttgaaatgaaagcaaagcaccatagcctgtcctcatctctgctttgacatttaagagccacaactttgttcatgcttagagtaaatatcaatgaggaattgagtttaacaacatggacatcaatgaggaatggaatttttaacaactcttctgaacagtcttatcaggcaggtaatattattatctttattttatagttagggaaacaaaaggagaggttaaataacttcttgtaggtgctaagtgatttgtagtgctcaggatcaaaatttcattggttcattctttcattcattcattcatacattcattttgtgctttctatatgctggtcactatttaaattgcttgggatcaaccaaggaacaagacagaaaatatccttcctcttctggagcttatcttctactggggcaatggcagtaggagaaagaaccatccaccttatagattagagaggaattcctcggaaatactaagaaattactcatggaaggaaatactagaatgaatatac

SEQ ID NO: 378750 - DNA, 501 bp, Homo sapiens
ggaattcctcggaaatactaagaaattactcatggaaggaaatactagaatgaatatactttatgtgaatggggggcatgtggggacttgaagtttgaatatcagaaagtgaatttaattaaaattagaatctggtacccctgcaaggtgatgtttcaagcacaagaatgttttgtggaggtaatgcatgcattacttttcatgttaaattacatatatacagagagtaatgtgtgtgtgtgtgtgtatatatatatatacatatataatgtgtatgtatgtttatacatgtgtgtgtttatgtatgtgtgtttgtgtgtgtatatatatatgtatgtatgtatatataaatcaacctaagttcctttctacgaatagcttttctgaagaagaggagcrcacacaagaaacctaaaattggggtaggccacaaaattggagaaggatggactatatgttctggtataatagttgtcatgtagagacagtaagtgatttttt

SEQ ID NO: 378751 - DNA, 501 bp, Homo sapiens
ggaattcctcggaaatactaagaaattactcatggaaggaaatactagaatgaatatactttatgtgaatggggggcatgtggggacttgaagtttgaatatcagaaagtgaatttaattaaaattagaatctggtacccctgcaaggtgatgtttcaagcacaagaatgttttgtggaggtaatgcatgcattacttttcatgttaaattacatatatacagagagtaatgtgtgtgtgtgtgtgtatatatatatatacatatataatgtgtatgtatgtttatacatgtgtgtgtttatgtatgtgtgtttgtgtgtgtatatatatatgtatgtatgtatatataaatcaacctaagttcctttctacgaatagcttttctgaagaagaggagcgcacayaagaaacctaaaattggggtaggccacaaaattggagaaggatggactatatgttctggtataatagttgtcatgtagagacagtaagtgatttttt

SEQ ID NO: 378752 - DNA, 518 bp, Homo sapiens
caaataagttgggacctcagccctacaaccacaaagaaagaaattctgccaaaacacacagaggacctccagccttcgatgagaaccataaccctatcaaaaaccttgatttcagctagtgagaccctgagtaggaactccggccaagctgcaccctggattctaacctacagaaastttaaggtaatgcatatatgctgctttaagttagtaaatttgtggtaatttgttgcacagtatgcatttaaccggaattaatatataatacatttgattaatctaaaatcaagttattagatacattaagagaaggaatagtaggattcaagtgtctagacttcttagaatttgtgtctaaaatatagaggtaatttcttccaatttcagctttccccatgcacagagttagaaaagcatacaacttatttagagaacatcaggtggatattattaaattgccatattgcttatttgaaagtagttgtgaaacattactggaaacaaacaaaaaatagttt

SEQ ID NO: 378753 - DNA, 588 bp, Homo sapiens
ctttaagttagtaaatttgtggtaatttgttgcacagtatgcatttaaccggaattaatatataatacatttgattaatctaaaatcaagttattagatacattaagagaaggaatagtaggattcaagtgtctagacttcttagaatttgtgtctaaaatatagaggtaatttcttccaatttcagctttccccatgcacagagttagaaaagcatacaacttatttagagaacatcaggtggatattattaaattgcyatattgcttatttgaaagtagttgtgaaacattactggaaacaaacaaaaaatagtttaatgttatgtccaggaggactgtcaatggagtttgcatattactcagcattaatgtaagccattgaacgtttttgagtggttggagaggctgattggaattatgcagaagaaagattgcctttccatagattaggagaggaccatgaggctgttgtaatacaccatgttaaatcatgtgctatgaaccttcatgaagataatagtaaaagagtaatgagcagatgttaaagccagagagtttgaattctaaggatttgaggccaaatgga

SEQ ID NO: 378754 - DNA, 526 bp, Homo sapiens
ggatattattaaattgccatattgcttatttgaaagtagttgtgaaacattactggaaacaaacaaaaaatagtttaatgttatgtccaggaggactgtcaatggagtttgcatattactcagcattaatgtaagccattgaacgtttttgagtggttggagaggctgattggaattatgcagaagaaagattgcctttccatagattaggagaggaccatgaggctgttgtaatacaccatgttaaatcatgtgctatgaaccttcatgaagataatagtaaaagagtaatgagcagatgttaaagccagagagtttgaattctaaggatttgaggccaaatgkatatgtgcttttgcagtctaagattatagtttttaagcctgagtatgattatggtgattgtagagccgttaagaaaagtatgtaagtcacaaagtaatgagtttgaagatgctgtatttagtctggataaatgaatgatttccaagcatgtcacattttaagtaatgagatggacaagtgg

SEQ ID NO: 378755 - DNA, 599 bp, Homo sapiens
tttgaattctaaggatttgaggccaaatggatatgtgcttttgcagtctaagattatagtttttaagcctgagtatgattatggtgattgtagagccgttaagaaaagtatgtaagtcacaaagtaatgagtttgaagatgctgtatttagtctggataaatgaatgatttccaagcatgtcacattttaagtaatgagatggacaagtggtgggaaatgagcaaaaattccctaaaaaggggagatttgttgcagaaatagatttgggttatcaggatgtatagtcttgacaggtgtccccttcaagggaaagaggatgaaataaaagtagagaatataaaaatacacaagtgggaaaatgttacattcagaagacggtaacttaacagtaaaarttgaaaaagctgtattattaagacaacttgaacagatacattgagagacagattttttttaaggaaggtaatgacaagttattccagtgggtacaatgtgatgaataatgataaaaaacctttgaatttggttactgagatgttgatggtgaacttcaaaaacagtttcagtgaaataataagaaaactgcacataaactttg

SEQ ID NO: 378756 - DNA, 544 bp, Homo sapiens
attcctaacgttctccaacttctttctggcactgagcatgctgtcatttactgtatcaaccaagttcctttctgtttggcttcagttcgggtttatgcaatgggagatgtattcgtttgctatcctgccataagagagtacaacagattgggtggcttaaataataaaagtttattttcttacaattttggaggctagaaatctgagatcaagttgttggcagggttgatgtttttctgaggcctgtctccttgccttgtcatgggatatcttctgtcttacatggtcttcctctgtgtgtgcctgtgtcctaatctcccctacttataagggcaccagccatattggattagggcccaccctaatggcctcatttccagttacttctttaaagactctatctccaaatacaagtactgagggttaggacctcagcayatgaattttgggggacacaagttagcacatcacaggaggtacatgtaaaagatcagagagacatgttgggtaattttccccttggctatgtattgtcttcccttag

SEQ ID NO: 378757 - DNA, 617 bp, Homo sapiens
tgtaaacatctcatttccagggtcagtgacaaatatcattaggaatcttaggcttatgattagtgaygttaacctttgagaaatttttttaaaatatgagaattaaaagacagagctacactataaatatctaagatttaactaaaagacaaattgttacagaaagtagtaactgatacaactactggcataatagtatactcattggaccagaaatagaagagcttactcagagctctgattccaatgtgatgctttactacttccagctctgtgactctgggagaggtccttgcccatctagaaaatgccactgtactgcctattattaaagctgatgtgaattaaatgaaatggtgcacataaaagagctcagaaactatgttctatttagtgtaggtaatcattgatttggacatgtaataatattataatcatggaggtaaaaatatttgagcagtgagatagaaaccccattgcctagctcaataaagttaagagaattggcaaaaataaggttagcatttagaaatgaaccactgcacttgaaattgatgttacttaaggattaactcagagtaccaaaacataaaaaagacatgctatgatccaaatgt

SEQ ID NO: 378758 - DNA, 617 bp, Homo sapiens
tgtaaacatctcatttccagggtcagtgacaaatatcattaggaatcttaggcttatgattagtgacgttaacctttgagaaatttttttaaaatatgagaattaaaagacagagctacactataaatatctaagatttaactaaaagacaaattgttacagaaagtagtaactgatacaactactggcataatagtatactcattggaccagaaatagaagagcttactcagagctctgattccaatgtgatgctttactacttccagctctgtgactctgggagaggtccttgcccatctagaaaatgccactgtactgcctattattaaagctgatgtgaattaaatgaaatggtgcacataaaagagctcagaaactatgttctatttagtgtakgtaatcattgatttggacatgtaataatattataatcatggaggtaaaaatatttgagcagtgagatagaaaccccattgcctagctcaataaagttaagagaattggcaaaaataaggttagcatttagaaatgaaccactgcacttgaaattgatgttacttaaggattaactcagagtaccaaaacataaaaaagacatgctatgatccaaatgt

SEQ ID NO: 378759 - DNA, 481 bp, Homo sapiens
tgtctagtgctgaaggctattgtttagattattttgtcctacgtgttgttcccttgatgcagtactctyccccttttcctacagatatggcttcctgtgagctgaactacagtgattgttgtctctcttctggatctagccacccggtaagtctacctggctccaggctagtgctgggggttgtcttcacagagtcctgtgatgtgaatcatctataggtccctcagccttggataccagcacctattccagtggaggtgacagcaggtcaggggttgtgcaatggactccatgagggttcttagctttggtggtttaatgctttatttttgtgctggttggcctccttccaggaggtggcactttccagagagcatagctgtggtagtatggggaggaatgggtggtgggcggaaccctagaactcccaagattatatgtcctttgttttccgctaccagcgggggcagggaaaggccat

SEQ ID NO: 378760 - DNA, 481 bp, Homo sapiens
tgtctagtgctgaaggctattgtttagattattttgtcctacgtgttgttcccttgatgcagtactcttccccttttcctacagatatggcttcctgtgagctgaactacagtgattgttgtctctcttctggatctagccacccrgtaagtctacctggctccaggctagtgctgggggttgtcttcacagagtcctgtgatgtgaatcatctataggtccctcagccttggataccagcacctattccagtggaggtgacagcaggtcaggggttgtgcaatggactccatgagggttcttagctttggtggtttaatgctttatttttgtgctggttggcctccttccaggaggtggcactttccagagagcatagctgtggtagtatggggaggaatgggtggtgggcggaaccctagaactcccaagattatatgtcctttgttttccgctaccagcgggggcagggaaaggccat

SEQ ID NO: 378761 - DNA, 566 bp, Homo sapiens
tgtgggcactttttggtttcatatgaatttaggaattgttttttctaattctgtgatgaatgatggtggtattttgatgggaattgcattgaatttgtggattgcttttggcagtatggtcattttcacaatatcgattctacccatccatcagcatgggatgtgtttccatttgttcgtgtcatctatgatttctttcagcagtgttttgtagttttccttgtagaggtctttcagctccttggttaagtatattcctaagtattttaattttttwtgaaggtattgtaaaagagagttgagttcttgatttgattctctgcttgatcgctcttggtgtataaaagagctactgatttgtgcacataaatcttgtatccagaaactttgctgaattctttcttcagttctaggagctttctggaggagtcccttgggtttccaaggtaaaagatcatacctttggaaaacagtgacagtttgacttcctctttacagatttggatgccctttatttctttctcttgtctgattgctctggctaggacttccagtactatgttgaa

SEQ ID NO: 378762 - DNA, 566 bp, Homo sapiens
tgtgggcactttttggtttcatatgaatttaggaattgttttttctaattctgtgatgaatgatggtggtattttgatgggaattgcattgaatttgtggattgcttttggcagtatggtcattttcacaatatcgattctacccatccatcagcatgggatgtgtttccatttgttcgtgtcatctatgatttctttcagcagtgttttgtagttttccttgtagaggtctttcagctccttggttaagtatattcctaagtattttaattttttttgaagstattgtaaaagagagttgagttcttgatttgattctctgcttgatcgctcttggtgtataaaagagctactgatttgtgcacataaatcttgtatccagaaactttgctgaattctttcttcagttctaggagctttctggaggagtcccttgggtttccaaggtaaaagatcatacctttggaaaacagtgacagtttgacttcctctttacagatttggatgccctttatttctttctcttgtctgattgctctggctaggacttccagtactatgttgaa

SEQ ID NO: 378763 - DNA, 515 bp, Homo sapiens
ctgttgctgtgttaaataatacaaggaacatatgttcctatctctattttaacagcgtttacaccaagcaaaaataacttcaatgcctactccaggagatacctcctcctggaagaaaagactgtgaactaggcattatccttataaagatgacaacttttttttttttttcctgagacaggggctcactctgttgccaaggctggagggcagtagtgcagtcatggttcactgcagcctcaaccttccagacaggtgcatgccaccatgcctagtaatttttctgtttttttgtagataaagggttttaccacgttgtccaggctggtctcaaactcctgagctcaagcaactcaccacctcagcctcccaaagtgcagggattacaggtgtgtattagtccattttcatgctgcttatraagacatacccaagagtgggtaatttataaagagaaagatgtttaatggactcacagttccacatggctagggagacctcacaatcatggtgga

SEQ ID NO: 378764 - DNA, 591 bp, Homo sapiens
aaaacaattttgagaataaagctaataattaaaattaatgccagtaaaattttaaaaattaaatatttgaattaaaaataatttgaatccaacattttccttcaaataaaaattttattaaattaacagcatgatgatatcagctcatttggcctgtttagaaggctaattggctacttgtggaagatagtaactgctcagcaaaatttcattccyactaaaccacctacatgggaaaagaatactttcccattcaattgatattgggctagacaatatcatatcctttggccaatggaatatgggcagaagtgacaatatgtgtgacactgtgtatgcaagttctgagcactgcatgtttctacttacctatctggaagcttctgaccttcaccataagaagatcaggccccagggagaccctatttctctgggtagacccaaggataagacattttgagcaggtcaattattacacacacgagtataaaacaaatatgcattactatgtgccctgagatatttccaatacactattcagaaagtatagtaataactgatatattactcaaaataacaactaaatatata

SEQ ID NO: 378765 - DNA, 588 bp, Homo sapiens
gcttctaatcccagatacttgggaggctgagatgggaggattgcttgagaaccaggagttttgagacctgagcaacatagtgagaccctgtttcttaaaaatatatatatataagcctggatacagtggctcacgcctgtaatcccagcactttgagaggccraggcaggtggattgtttgagcttaggaattggagaccagtctgagcaacactacaaaactctgtacaaaaaaaaaaaaaaaaattagctgggtgtggtagcgtgtgcctgtggtccaagctacttcggaggctgaggtgggaggatcgcttgagtccaagaagtcgaggctgcagtgagttgtgattgtgcctctgcactccagcctgctaagtgacagagtgaaatcctgtctcaaaatatacatatacatatatatatgttatatataaaactcttctgatggtattttatatatgtgtgtatatatatacacacacatacatattttatatatatgtaataccatcatataaaataccatcacatgtgtttttgtaattatatgccagcattaatttcatgtttgaaattagacattaaaag

SEQ ID NO: 378766 - DNA, 588 bp, Homo sapiens
gcttctaatcccagatacttgggaggctgagatgggaggattgcttgagaaccaggagttttgagacctgagcaacatagtgagaccctgtttcttaaaaatatatatatataagcctggatacagtggctcacgcctgtaatcccagcactttgagaggccaaggcaggtggattgtttgagcttaggaattggagaccagtctgagcaacactacaaaactctgtacaaaaaaaaaaaaaaaaattagctgggtgtggtagcgtgtgcctgtggtccaagctacttcggaggctgaggtgggaggatcgcttgagtccaagaagtcgaggctgcagtgagttgtgattgtgcctctgcactccagcctgctaagtgacagagtgaaatcctgtctcaaaatatacatatacatatatatatgttatatataaaactcttctgatggtattttatatatgtgtgtatatatatacacacacatacmtattttatatatatgtaataccatcatataaaataccatcacatgtgtttttgtaattatatgccagcattaatttcatgtttgaaattagacattaaaag

SEQ ID NO: 378767 - DNA, 586 bp, Homo sapiens
ctcttttccgtgttctctcctccaatctttatatttattctagtcaactgactctttggatgatggaaatgttctgtatyttcaccctcaatagggtcatcgctatatttaagtggctattgagcacgtgaaatgtgggtagtgcgaccaaggaactgaaattttaatttaattttaactaattaaatttaaatagctacatatggcttgtggctaccctactggacagtgtagttctacagcatagtttataggaatcccctctaccctggagagctgattcacagaagcactgacatctcttctgagctcaagtccaagattttcagttgctgctatccagaaacttactatctcctcaaagccaatatgattaaaatgtacccatacctcttcaaagcaaacataccttttgatacctttatatctattaaaaatgccaccattcaaacttaagtttcttaatctccttgctctccattctctatgatatttattggtctaacactcatactgattcttcccttggaacaactcttacatcactgctgtgggacattccaatcccattaacctgacagtttag

SEQ ID NO: 378768 - DNA, 550 bp, Homo sapiens
tggtggacatgtaaattacttcagccactgtgaaaagtagtttggagatttctcaaagaacttaaaacagaggtaccattcaacctagcaatcccattactgggtatatgcccaaagaatayaaatcattccaccaaaaagacacatgcactcatatgttcatctccacactgttcacaatagcaaagacatgaaacccaccctatcagtggtggtttggataaagaaaatgtggtacaaatacaccatgaaatactatgcagccataaaaaagagcaaaatcatgtcctctgcagcaacatggatgcaactggaggccataatcctaagcaaattaatgctggaacataaaaccaaataccacacgctctcacttgtaagtgggagctaaacaccgagtacacatggacggaaacatgggaacaacagatactgcagactactagaaggggaagggagggaggagagtttgggtgggaaaactacttattggatgctatgctcactatctgggtgacagagtccatactccaaatctcagcatcataca

SEQ ID NO: 378769 - DNA, 550 bp, Homo sapiens
tggtggacatgtaaattacttcagccactgtgaaaagtagtttggagatttctcaaagaacttaaaacagaggtaccattcaacctagcaatcccattactgggtatatgcccaaagaatacaaatcattccaccaaaaagacacatgcactcatatgttcatctccacactgttcacaatagcaaagacatgaaacccaccctatcagtggtggtttggataaagaaaatgtggtacaaatacaccatgaaatactatgcagccataaaaaagagcaaaatcatgtcctctgcagcaacatggatgcaactggaggccataatcctaagcaaattaatgctggaacataaaaccaaataccacacgctctcacttgtaagtgggagctaaacaccgagtacacatggacggaaacatgggaacaacagatactgcagactactagaaggggaagggagggaggagagtttgggtggraaaactacttattggatgctatgctcactatctgggtgacagagtccatactccaaatctcagcatcataca

SEQ ID NO: 378770 - DNA, 489 bp, Homo sapiens
catggaacccttcaagtggaaatctccataatttctgacccctattccctgctctatgggtgcatttgggtggtggtaaggaaaggctgctccagcggtagagttttaaaatcccggaacctgcctgagtctccacacttctgtggtctcctccaacatgaagscttcatgatttgacttttcttggaaatcaagacctttggtcatttcgttgttcccatcactgtcattattgaccacagtccctttgttgaagccattcatcatctggctcttctcatttcccctataaaatttttcagtattgaaaaaaaaattaaaaatacaacctccaaaaaatgtctcctgcaagttgggagaccaatctgtatgccgtaagatattagtaaaatatttagagaaagagccaaaaaaaaatctttggcatagaaattataagttaatttgcataccttccccactgcagtctgaatcaaaaagcatggtttt

SEQ ID NO: 378771 - DNA, 479 bp, Homo sapiens
cctggctatgaatttgactctgagtttcaaagcaacctctgaattagtgaaatctggtgagttacagacgttaggaggagaaatagctcccttctagcactgaaagcatccagtgagatcccgcatgtaacaaatgcttatttccttctcattcctcttttccatgaaatggcaggaagtgccagatccctttaaagagctaccacaagtgactgtctgccayagtatttcttccctgccttcccctctgcacatcagacacacagtgtgtacacagagacacagagacaccacactcacaccccacactgcagggagcattccagagctgactactaaggcttggggtctaggtgctccctagttccctcagttttcaccccggtcactatttacccgtggagacagacatcccagataaatcttctgacatcatcaagagccaaaaaaaaaaaaaaaaaaaaaatgtgtaactgttg

SEQ ID NO: 378772 - DNA, 548 bp, Homo sapiens
aatattagagtaagaaaggggaagcacgcaagaaagatacaaatatgatatggtattgtcaaggtagttaaaaatatttgtaaatggatatcaatattgtaacatatttgctgaaaatgaggacatgtagtagatagcaaaatgctgttttttgctttttcttttttttttttttgagctcttgttgcccaggctggagtgcaatggcgcaatcttggctcactgcaacctctgcctcccaggtttgagtgattctgctaccttagcctcccaaagagctgggattacaggcaccaccaccacacccagctatttttatttatttatttatttwttttttatttttagtagagatggagtttcaccatgttggctaggctggtcttgaactcctgacctcaggtgatccgcccaccttggtctcccaaagtgtaaaacacattttatttgctttcaaactgtccctttaaactttatttataaagaacatcttatgacttttctgggtactgttaggcaatagagacctttgcattcatgctaaacca

SEQ ID NO: 378773 - DNA, 429 bp, Homo sapiens
agtaatgcatacacaacaaaactaccttccaagtctaagcacaaaataagatagtaagaaaaccacacatgaagagaattccstactattggagagtcactagagaaacttctaaaagacatttttaaataaaaaggatggtctcagatgcaaaaaaaaaaaaaatgctgagcaaagaaaatggaaaatgtgttagaaaatgttcaccaaagatgacttactacaactataataataatgataatgtctacaatgtaatacaaatatgaagagaacaaaaatctattcttttgtattttctcaggaggacagtaaaagggtaaagatattatttaacttcagccttaagttacatatttggaaaattttttagggttattattaaaataatagaattagagtttaaaacttacaaactagaaggaaaaa

SEQ ID NO: 378774 - DNA, 545 bp, Homo sapiens
attctaggcacagaggatacaacagtgaaaaaacagaaaaaagcccttgcccttatagagcttacattcttgttggatgaaagcagtcaataaacagataacaaaggatacagtaggtcataggtgctatgaataaaaatacagcagggaacgtcaaggtggaagaaaaagcatgaataggaaaggattactgctaaagtaacatatgagcgatgatctgaagggcaggatggaaccagccatccagatacttagaggaagagaattcccagcactgggaacaggtagtgcaaaggctgtgatgcagaacatgcttggcacattcagggaacaccagtgaagtcrgagtggagaagtgagtgggtgaggcggacagtggtttgagaagatgtcagatccaggtcacttgaaaggggcggtagacatagatcatgtagaagtttaacagacatagcaagaatttgactttgactctagatggcatgccattggatggctttgagcagagagcaacacgatgtgaactaattactgtttttgtagaa

SEQ ID NO: 378775 - DNA, 618 bp, Homo sapiens
acggcaccagaatcctcttggggaaggaagaaaaatgtctttgctagaagatatttatatatatatatatataaatatatatatatataaaaaatatataaatatatatatttttatatataaatatatataaatatatatttttatatatatatatatatatwtttttttttttttgagacagagtctccctttgttgtccaggctggagtgcagtggtgtgatgtcatcccactgcaacctctgcctcccagtttcaagcggttctcctagctcagcctcccgagttgctgggactacgcatgcaagctgccacacccagctaatttttgtatttttagtaaagatggggtttcaccatgttggcctggctggtctcgaactcctgaccccaggtgatccacccatctcagcctcccaaagtgctaggattacaggagtgagtcactgcagctggcctagaagagctattttgaacgtgcccttgggataggaagaaagtccctgaggatctgactataggtaggtgctcaagtgctctaagggtgaaaacttctctgcataacagaagaagaatttagtgctaaagagccaatgagaatgatggagatgaggcag

SEQ ID NO: 378776 - DNA, 516 bp, Homo sapiens
acacttgctaattcagctaacagctcgcttctccccttctccccactactcactgtggagagagcttccagctaatagcttagaatctcccagactaaccaaccattgatggaaccaggtgctatgtgattgtaggaatttatttgttgctctgaatgttaactaaaagtaatgggcttcttattttgtccttttccttttgtgttatagacggcaaagactgtttctcatcagtctcatatagctaaattagatttatctctcatgctgactgattaaaagggttaaattctgggcacgttgtcccctgaktcctctgaaatccatgtcagaatagaagtgctcattaccagactcgatgaggagctccttttccagaacttctctctgctacactctaaggaccaagcacctctgcctaaattccaagcaaccatggcctgtggcagtcttggaacttttgccctctggcatgggtagaactagcgtcaattgggtaattcaatccctgagttc

SEQ ID NO: 378777 - DNA, 614 bp, Homo sapiens
ttaatggaatgtctttggagcaaaggagatttcaaaaccaccagtttgttagatttgatgatcagctctgcaaaatgtttaaagaagatttcttactcatatcttataagttaagactataaatggtttaaatgggggaggatgtgacaggattgaaaatcttccccttcctttgtggctatgagaattcacactgagcaacagggaagagaaggaactagaacttggaatgagcctgtgtgtgggccctcattgttccaggatttacaaagggctacgctgtcatcatattaaataaatggctcctgctccttgtgccagcttaattgccaccttggctcccgaacaaagaaatcacaattgaggcaaaacatgttttgctattgaaggcaaaacctccttagagcaattttgggggttgtttttccatttaattttttaacttgcagaaatagccctctttttttcwgttttttggttttttttgttttcttttttttaaatgatgtacacttgtgctgttaagtttcagcatggaatacaggctttatgtatttaggcagtaatgctgagttagatattggtaccaaaaaaaatgaaagaaagagaacaag

SEQ ID NO: 378778 - DNA, 494 bp, Homo sapiens
acgcacaaccatacctatatttaatcatctagtaaactatattaaatcttctgtaaacttcagataagcctgtttaaattgggggtgggtcgtattgtagcataccaaatggttcatataccaagtatatatttgtcatactatgtggaacagtattatatttaaaactgaagtcttatttcatgtargttgtaccaaatttgtggtggtaaacattgtatttaggtcattcacaaagagtacagaaatacagattagccatatttggtctatagtgccattcagtgtaataggtacacaatacatctcatattaaagaaaaaagagtcttttcaaaagcctgtaagggtctgaataaaggttttagaaatgtgtcataacagctgaaatctaagagatttggaaaaagtgggagaagttaaatattgcaaatgcatagagctaagactttttcattgaaagttgggtagttccaacattcatgtggaaaatct

SEQ ID NO: 378779 - DNA, 504 bp, Homo sapiens
cttgctggtggccagccccatcctgaggccatctaggggttcttccctaagtaaccttattagcataaacgcaggtaggattgaaaggggcctcttayaaataacaaaagacacttttttctttgagattcgcctgccttggcctcccaaagtgctggggattacaagcgtgagccatctcgcccaggcacaaaagacgcttctgtcactcagcaaattttaaaggtcttatgagttctgtgccagaaacaagggacaaaccccaaccatgcgttttatgacactgccttctataagaagcagagaggtgctttagtagagacagggtagcaaatggcaagagatgaggtctgagagctaagaggaccaggtcaagaaggaatgaagttaaagaatttctgctttagattcctgaatatttctctatggtagatgctaaaaatggatgtctcaggttgaaatttaaattctgataggctcacctaagttgctacaatttgaact

SEQ ID NO: 378780 - DNA, 504 bp, Homo sapiens
cttgctggtggccagccccatcctgaggccatctaggggttcttccctaagtaaccttattagcataaacgcaggtaggattgaaaggggcctcttacaaataacaaaagacacttttttctttgagattcgcctgccttggcctcccaaagtgctggggattacaagcgtgagccatctcgcccaggcacaaaakacgcttctgtcactcagcaaattttaaaggtcttatgagttctgtgccagaaacaagggacaaaccccaaccatgcgttttatgacactgccttctataagaagcagagaggtgctttagtagagacagggtagcaaatggcaagagatgaggtctgagagctaagaggaccaggtcaagaaggaatgaagttaaagaatttctgctttagattcctgaatatttctctatggtagatgctaaaaatggatgtctcaggttgaaatttaaattctgataggctcacctaagttgctacaatttgaact

SEQ ID NO: 378781 - DNA, 435 bp, Homo sapiens
cctgtctctactaaaaatacaaaaattagccaggcctggtggcgggtgcctgtggtctcagctactcaggagactgaggtgggagaatcrcttgaacccaggaggcagtggttgcggtgagtggggagattgtgccactacactccagactccagcctgggtgacagagggagactctgtctcaaaaaaaaaaaaaaaaaaaaaaagaatagtcagggaaaggtgttattcatgtatttatctctctaatcacttgtatttcagaaagatctggatctgggtgtctgcttttttttttttttttttttggatgggatttcaaatgtcatcggctgcagaagagggtgggccccagtacataaagccaccagaagtggatgggcttctgcgtataaagctattgctcttggcagctctgtctgaaggaggaggaca

SEQ ID NO: 378782 - DNA, 545 bp, Homo sapiens
taagtaattaattttctcacagtctttctgtgagatggcctcaacccacacttggagacggatttgaactccacaacagcctgggggtggctgggtttgggatacaggcaggagccattgtctcaagggagaggttggagggtcctgggttaggtgagacttgggggatcattgcattcatctatctggttccacagaggacacattctcaagtaaatcattgcatttcaggggccaataggtcaggcgaatcccaccccatctaggcagcattgcttggaaggtggttcaggaccagagcggtcattttgaccatgcccgtgccaggataaaaggctggggcagatgatctcttggaaccttctggattccagcccagaaggcgctggtccagagctttcacttctcacccagcaaaagtgcaaaccacagaactctcagtggccacaataatggcyacttgcggattatggggagactccctctagccactttcttccattcggtcaaaaggattggagaactcaaccttgggataacctggg

SEQ ID NO: 378783 - DNA, 484 bp, Homo sapiens
aattcaatattaatatctaaataataggtcctttaaaaaatcaaaacactatttttatatcttaaaaatttacatactaattaaaatgaacaagtgtctatttagtcttcaagcagtcctatttttgatatatatttcttatattttggtgtcccagagtcaaaataagctctataaacgttgtatttgagtgatatatcctttaaatcattgaaatttaaaaatctcccttcatttcttacttttatttgttaaataaaacaggttaactgttcattgtactttttcattcttgggatttttctaattgcatacccctattgtttcctttaatatgagactctaaccttcatatttcatattaaaattagaarcttattaagattctgtctatatttaaacattctagaagtaaatgtagtagattgcccatttaaattttgaatagtactatttgcacaattatttacatgtttacaaattg

SEQ ID NO: 378784 - DNA, 646 bp, Homo sapiens
actggactgggaaagagttagccttttttctttcaatagcacccacactttctagcacagtgtctggcattgagtaggcatgtggttgacacctgcagtgagtgtccccaacacggctccacttcactgacccaaacccttatgacctgttgctctcagtatatttgccctgtttctcctcaatagaaagacacctgtttcaacttgcctgcctctaacatgcactcccataggacactggactgtcacarggcactggattcccatggggcactggattcccataggacactggattcccatggggcactcagcccgggacctggtgagaaaatttatctgggcctcagcctcttgaaagcacttaattaccatatgcttatcaaccacctactccaagctgtgaattagacctggagctcatcctcagggggagcaagtgtggcagaagacaaaacaggaaccacaaagaactgggaagtgaggcagaaggagctagagcctgatatgcagggaaagggcagaagggctgtgcaggaagccagagttgggggtgagagaaaaggtgggctgtggtagcttggacatggagcagagagatgctgacaggggtgtgtcaggcaggagaagcagcaggaacaaaagc

SEQ ID NO: 378785 - DNA, 630 bp, Homo sapiens
tgctcactgctgctggtgtgtcactgcttctgggccctgttaggtgacaataaatacatttatatgtattattatatgtaacaatttgtatctatctattcaagtctccaacttgaattcattaccacatggatcattctagcatcttctcttgcttatctacaacctcacataacaacagcaaaaaccctggctrcgactatctgctatccatttacttaattgttttgttcctcagtatgtattgtgatgggaccatataacatgaatggaacacataacatccatggaagttgccacataaaattaatcatcagaacatatgttgtggaatagaattaaaattagagggaagatggattggagacagggctgacttgcagctcccactttgaagaacagaacatcatatggagactcacactgtgaacttttgctccaggaaccactgcagaagcataccatgaaaacagaaagaaatcacagattttttgaaaagagaagaaggccattgcaaattccacaagacagatgaagaactccagtcacaaaagacataaaccgttgagagctttatgaccccagccatcacctgagaaacctgaatacttatcctggccaacttagggc

SEQ ID NO: 378786 - DNA, 589 bp, Homo sapiens
ctgccacctccaccagtcataaaaagaaatcaaataatggcattcatagcagcctggctaaarttggagaccattatcctaagtgaagtaactcaggaatggaaaaccagacattgcgtgttctcacttgtaagcgggagctaagctatgaggactcaaaggcatacaaatgatataatgaagtttggggacttggggagaagggtagaagtggggtgagggataaaagactacacactgggtacattgtacactgcttgggtgatgagtgcaccagagtctcagaaatcaccactaaagaacatttccatgtaaccaaacaccacctgttcccccaaaactattgaattttttaaaaacacatcttgcagaatagaaaaaaaaatttaaattatggtggaatatttttgtgggagttcccagatatctggtaaaacatttttcagggtgagggtgtgtctgtgagtatgtttctggatgagattaatgtttgagtatatatactgagtaaagcaaattgccttacttatgtgagtgggcctcattaaattagttaaagggaagaatagaacaaacaggttagtaagag

SEQ ID NO: 378787 - DNA, 589 bp, Homo sapiens
ctgccacctccaccagtcataaaaagaaatcaaataatggcattcatagcagcctggctaaaattggagaccattatcctaagtgaagtaactcaggaatggaaaaccagacattgcgtgttctcacttgtaagcgggagctaagctatgaggactcaaaggcatacaaatgatataatgaagtytggggacttggggagaagggtagaagtggggtgagggataaaagactacacactgggtacattgtacactgcttgggtgatgagtgcaccagagtctcagaaatcaccactaaagaacatttccatgtaaccaaacaccacctgttcccccaaaactattgaattttttaaaaacacatcttgcagaatagaaaaaaaaatttaaattatggtggaatatttttgtgggagttcccagatatctggtaaaacatttttcagggtgagggtgtgtctgtgagtatgtttctggatgagattaatgtttgagtatatatactgagtaaagcaaattgccttacttatgtgagtgggcctcattaaattagttaaagggaagaatagaacaaacaggttagtaagag

SEQ ID NO: 378788 - DNA, 589 bp, Homo sapiens
ctgccacctccaccagtcataaaaagaaatcaaataatggcattcatagcagcctggctaaaattggagaccattatcctaagtgaagtaactcaggaatggaaaaccagacattgcgtgttctcacttgtaagcgggagctaagctatgaggactcaaaggcatacaaatgatataatgaagtttggggacttggggagaagggtagaagtggggtgagggataaaagactacacactgggtacattgtacactgcttgggtgatgagtgcaccagagtctcagaaatcaccactaaagaacatttccatgyaaccaaacaccacctgttcccccaaaactattgaattttttaaaaacacatcttgcagaatagaaaaaaaaatttaaattatggtggaatatttttgtgggagttcccagatatctggtaaaacatttttcagggtgagggtgtgtctgtgagtatgtttctggatgagattaatgtttgagtatatatactgagtaaagcaaattgccttacttatgtgagtgggcctcattaaattagttaaagggaagaatagaacaaacaggttagtaagag

SEQ ID NO: 378789 - DNA, 589 bp, Homo sapiens
ctgccacctccaccagtcataaaaagaaatcaaataatggcattcatagcagcctggctaaaattggagaccattatcctaagtgaagtaactcaggaatggaaaaccagacattgcgtgttctcacttgtaagcgggagctaagctatgaggactcaaaggcatacaaatgatataatgaagtttggggacttggggagaagggtagaagtggggtgagggataaaagactacacactgggtacattgtacactgcttgggtgatgagtgcaccagagtctcagaaatcaccactaaagaacatttccatgtaaccaaacaccacctgttcccccaaaactattgaattttttaaaaacacatcttgcagaatagaaaaaaaaatttaaattatggtggaatatttttgtgggagttcccagatatctggtaaaacatttttcagggtgagggtgtgtctgtgagtatgtttctggatgagattaatrtttgagtatatatactgagtaaagcaaattgccttacttatgtgagtgggcctcattaaattagttaaagggaagaatagaacaaacaggttagtaagag

SEQ ID NO: 378790 - DNA, 568 bp, Homo sapiens
tggtgctcaagatgagtggacagagttcctcctgcccagctcccagtggcctcatacaaggccttatttaatttgcacagcaagcctagaagtaggtcttactttaacagtgggaaaactgcaattcagagaggtaaagacacttgcccagggctacctaggtaatcaggagtgagtcaggacccaggactccaaagtctgagctgcaaatcccaacaccagcccccgccgtgtggagtccagtgtggagacaggggaagcaaaacgggccttgtcctgggctgggtctctaggcacccagtcaggctcaggaggacagggcagcccagaagcagctccacggagtcctgggccttcctgcttggtggccagggccagaacagggttgtcctcacaatgtgaggtgatgcaggagacctttcaatgtggcaccagagctgatgrgcaggtgggcacccctgaaggccctggtcttcacagagtttggaagttctactccctccctcctctccaagttctaagttctactccatggcctggagtagacagatgctctgtccttgggagc

SEQ ID NO: 378791 - DNA, 488 bp, Homo sapiens
ttgaagtcaaggcccagcatgaagacatcgccaacaacagcagggctgaggctgagttctggtactaaaccaaagtgagacatcaaggtcaagttcattaaacaagcacaaaaaaccgagatttcaaaggcaaacaagataaragccatgtcctctcagatgtcccagtctgatagggtcaagggatctgagttcagcttggggctcaccctatgttacctgggggaagcatgtcaggacctggggaacagccagataaaggcaggaggtggtcagtccctctgccaagaggaagatggacacacctccaatgccctgtatcagagagaaaagggacagctggacagttccagccatcagtgccaacaggaggaacagagagggagggtggggacaagaggaaagtttaaccccttgtggaggaggctggaggatccagagaagaaaggcggaactggctggggcccaggggctggagggcaaagtct

SEQ ID NO: 378792 - DNA, 618 bp, Homo sapiens
tgaccacaggcatgcaccaccatgcctagataatttcttcttttttgtaatttttgtagagttaggktctcactatttgtccaggctggtttcaaactcctgggctcaagtgatccttccacctcaacctcccaaagtgctggaattataggcatgaaccactgcactgaaaccccagttaaagttgaactacagataaacaacaaaaattcatacgtcctagtatccgtgcctttcatgtgtttctacagtttctcaggattcatcctgtgggagggagataacagccccagctggttcgccatcttgccaggacaaaatactaatagtgattaattctgaggagtatgaatttgggtaattgctattttcattttcatacttttctgctacataaagatcaacatcctactttttccaccattgaaatgccatttttattacatgctgaattcatacactttatcttctgtgtcattgatctctttgtctgatcacaccactgtgattactagatctttatattacatgctgctttctctattactttagggtcagtctctggtgccttattttgtccatttggtgaggtcttttccatgaacatcctcgatgctc

SEQ ID NO: 378793 - DNA, 618 bp, Homo sapiens
tgaccacaggcatgcaccaccatgcctagataatttcttcttttttgtaatttttgtagagttaggttctcactatttgtccaggctggtttcaaactcctgggctcaagtgatccttccacctcaacctcccaaagtgctggaattataggcatgaaccactgcactgaaaccycagttaaagttgaactacagataaacaacaaaaattcatacgtcctagtatccgtgcctttcatgtgtttctacagtttctcaggattcatcctgtgggagggagataacagccccagctggttcgccatcttgccaggacaaaatactaatagtgattaattctgaggagtatgaatttgggtaattgctattttcattttcatacttttctgctacataaagatcaacatcctactttttccaccattgaaatgccatttttattacatgctgaattcatacactttatcttctgtgtcattgatctctttgtctgatcacaccactgtgattactagatctttatattacatgctgctttctctattactttagggtcagtctctggtgccttattttgtccatttggtgaggtcttttccatgaacatcctcgatgctc

SEQ ID NO: 378794 - DNA, 618 bp, Homo sapiens
tgaccacaggcatgcaccaccatgcctagataatttcttcttttttgtaatttttgtagagttaggttctcactatttgtccaggctggtttcaaactcctgggctcaagtgatccttccacctcaacctcccaaagtgctggaattataggcatgaaccactgcactgaaaccccagttaaagttgaactacagataaacaacaaaaattcatacgtcctagtatccgtgcctttcatgtgtttctacagtttctcaggattcatcctgtgggaggragataacagccccagctggttcgccatcttgccaggacaaaatactaatagtgattaattctgaggagtatgaatttgggtaattgctattttcattttcatacttttctgctacataaagatcaacatcctactttttccaccattgaaatgccatttttattacatgctgaattcatacactttatcttctgtgtcattgatctctttgtctgatcacaccactgtgattactagatctttatattacatgctgctttctctattactttagggtcagtctctggtgccttattttgtccatttggtgaggtcttttccatgaacatcctcgatgctc

SEQ ID NO: 378795 - DNA, 561 bp, Homo sapiens
ctgcttaccttgtcgatgaaggaggcgaacttattgttgagggtcttgatctgctcgcgctcctcggcccgcacccgctggatggtggggtcgatttgcaggtgaagaggagtcaggagactctggttgacagtgacctcttggatgcctccagggggacacacggggaagctggggccactgaagcctcctccaactccacccccatagccaaatccactgttgactccaaaccygttgctggccctgccaccaaagccacttcggcagctgctgccacacccattgatggagacccgcttggcaccccccaggttgtagaggctgcggcttccaaagctggccccagcactgctgatccttcccaggcccccactccctgctgcagagcgggccacagagacagagctgaagcgggagcggccagctgccggggtgatggccgaggtggtgctgaagcccctgcggctgccagactggaaggtgatggaggactgccgagacatggtgggtgaggaaggccggcgagaaggcacctgaggtgggctggtacaggcagtg

SEQ ID NO: 378796 - DNA, 577 bp, Homo sapiens
ttctgttgtggacactccaggggccgagtgtggagaaggtaattctgttgtggacactccaggggccgagtgtggagaaggtaattctgttgtgatggcacctgagacatgctggccagaaatgctttgccgtcttcactatttgtgctggggtggccgcacttcctcaatgtttggtgtgtctaataggcactgcccagcctgcctcagatcttccaccttacagccccctttgtgcctgtagtcagaagcaataattgctccccaaagggcactacaggtgccagctgatctgaacaaactgccaaggtgcaggactttggacatctgcttgcaaatggccacactcacctgatccgctcctgyccactgccaactcaacagccacttcacatgggcccaaatttgatgggcagacgtagagcctgtgcaggtaggcagacaacctcccctctcagtccatttcagcaggaaagtggtgtgctgtttttattcaaactcaggcttaagaaagtgtgatgaaactgtcctgtccctccgtaatccagcccttcagacacacccaacaggtgtgcat

SEQ ID NO: 378797 - DNA, 557 bp, Homo sapiens
gtacaaggtagacacacagacacatatgtcttcagaacattcacaaaacagcaatctgcaagagtgtggtgctgcctgggtgtgtcaggatacagaagtgaaggagcagaattagtctttaaagcctggaggagccctagagatgaggaaactggggtcagagaggagaraagaactgtcgaaggccacacagctgtttggtagctgggccagaactcctgatcccttctgctgccccacattagccctgaggcttctccatgttagagagcacagcaagaaacctccctgttgcctgagaggcacaggtggggccctcctcgaaggagggtgttggtgagatgccagcctctcaggggccctcccagggcaccctgacaggagactgaagaattccaggtgtatcttggccattcatctccaacctttttgtttgtttgttttttgctttttgttcttgtttttgagacagggtctggagtgctgtggcacaattacggctcactgcagcctcaacctcccgggctcaagctatcctcctaccttggcttcccaaa

SEQ ID NO: 378798 - DNA, 538 bp, Homo sapiens
cagcagtgagggaggcacagtcccagcatggtgacaaggaagtgagtcattaagagaggttgtcactttaggggtaggtgcagggtgtgcacggggagctcatgatacctgggaggccatcaccccattggtggccaggctgtggccatgcagcctggtggccaggcctttgctgttcactgcaactccaaaagagctcagaaagcacacatcatacagatcccatatttcatggatgaggagtgtgaggcccagagcctgagaggaaccttagagtaaaactgcaataggacagttgtctcctgtcccccagaacagtgtttgccccrtgccacactgatctgtgtgctggagcagatggttaagtgttctccctgagttccgcccactaggggcttgggctgtggggaagatagaaccgacacatgtgaagcagacatcatgtaaaatggtatataacagaatttaaaaatatacgccgggcacaatggctcacgcttgtaattctggcactttgggaggccgaggtgggcagatc

SEQ ID NO: 378799 - DNA, 538 bp, Homo sapiens
cagcagtgagggaggcacagtcccagcatggtgacaaggaagtgagtcattaagagaggttgtcactttaggggtaggtgcagggtgtgcacggggagctcatgatacctgggaggccatcaccccattggtggccaggctgtggccatgcagcctggtggccaggcctttgctgttcactgcaactccaaaagagctcagaaagcacacatcatacagatcccatatttcatggatgaggagtgtgaggcccagagcctgagaggaaccttagagtaaaactgcaataggacagttgtctcctgtcccccagaacagtgtttgccccatgccacactgatctgtgtgctggagcagatggttaagtgttctccmtgagttccgcccactaggggcttgggctgtggggaagatagaaccgacacatgtgaagcagacatcatgtaaaatggtatataacagaatttaaaaatatacgccgggcacaatggctcacgcttgtaattctggcactttgggaggccgaggtgggcagatc

SEQ ID NO: 378800 - DNA, 584 bp, Homo sapiens
aattattttctttttcattatttctcaagggtacatatatatgcggtaagattgcttagattttggaagtcagtcttcacctttctgctgtcaggaaagttctggggagaatgtgaggaagtgccaatgtgagaaacttcccatattgctgggggaasttttggagatgaacacagttggataccaatacagcaggatccagaaacaccagtataatccaagaaaatttcttcagtgatacgagaatcttagagttaggaagataattgtcactcatggaggtaacaagtactgaagtggcctggggacaggacaagtcaatagaccaaccttgaaccttattctgagttttcccttctccattcatagaagttaaaccaggacagttcacaccaaagagaagaataggaccatctcttctgagcaacatggatttggtttctttggatctctatcagagccttaggcttgctatctgtggatctctaacagagccttctcctatgagaaggaggaaatttttttcttctactgtcttcactcttcaaggaataagcatctgagttttggcctgagtctttgag

SEQ ID NO: 378801 - DNA, 584 bp, Homo sapiens
aattattttctttttcattatttctcaagggtacatatatatgcggtaagattgcttagattttggaagtcagtcttcacctttctgctgtcaggaaagttctggggagaatgtgaggaagtgccaatgtgagaaacttcccatattgctgggggaagttttggagatgaacacagttggatrccaatacagcaggatccagaaacaccagtataatccaagaaaatttcttcagtgatacgagaatcttagagttaggaagataattgtcactcatggaggtaacaagtactgaagtggcctggggacaggacaagtcaatagaccaaccttgaaccttattctgagttttcccttctccattcatagaagttaaaccaggacagttcacaccaaagagaagaataggaccatctcttctgagcaacatggatttggtttctttggatctctatcagagccttaggcttgctatctgtggatctctaacagagccttctcctatgagaaggaggaaatttttttcttctactgtcttcactcttcaaggaataagcatctgagttttggcctgagtctttgag

SEQ ID NO: 378802 - DNA, 584 bp, Homo sapiens
aattattttctttttcattatttctcaagggtacatatatatgcggtaagattgcttagattttggaagtcagtcttcacctttctgctgtcaggaaagttctggggagaatgtgaggaagtgccaatgtgagaaacttcccatattgctgggggaagttttggagatgaacacagttggataccaatacagcaggatccagaaacaccagtataatccaagaaaatttcttcagtgatacragaatcttagagttaggaagataattgtcactcatggaggtaacaagtactgaagtggcctggggacaggacaagtcaatagaccaaccttgaaccttattctgagttttcccttctccattcatagaagttaaaccaggacagttcacaccaaagagaagaataggaccatctcttctgagcaacatggatttggtttctttggatctctatcagagccttaggcttgctatctgtggatctctaacagagccttctcctatgagaaggaggaaatttttttcttctactgtcttcactcttcaaggaataagcatctgagttttggcctgagtctttgag

SEQ ID NO: 378803 - DNA, 584 bp, Homo sapiens
aattattttctttttcattatttctcaagggtacatatatatgcggtaagattgcttagattttggaagtcagtcttcacctttctgctgtcaggaaagttctggggagaatgtgaggaagtgccaatgtgagaaacttcccatattgctgggggaagttttggagatgaacacagttggataccaatacagcaggatccagaaacaccagtataatccaagaaaatttcttcagtgatacgagaatcttagagttaggaagataattgtcactcatggaggtaacaagtactgaagtggcctggggacaggacaagtcaatagaccaaccttgaaccttattctgagttttcccttctccattcatagaagttaaaccaggacagttcacaccaaagagaagaataggaccatctcttctgagcaacatggatttggtttctttggatctctatcagagccttaggcttgctatctgtggatctctaacagagccttctcctatgagaaggaggamatttttttcttctactgtcttcactcttcaaggaataagcatctgagttttggcctgagtctttgag

SEQ ID NO: 378804 - DNA, 603 bp, Homo sapiens
ttgttccactgtggtccagggaagccaaaatattggacactcctgctctaaaccatgtttttgcaactctgagcatcgtgactggttctctcatgtgtttgtgtcatgccataggtaggatctatgtctcctaagcagcaggtacccactaagggtaggaaatgatagcctcctctccctggttttgataagttccaggggattttccctaatataatggttgatggctgcctgacgacctgacaaggaaatgcttctctcctccattgtccctcaccatacctgcttcttgacgtggtcgatctcagatctcagcctctggatcatgcggttgatctcagcaatctcctgcttggtgttgcgcaggtcgtccccatgtctgcctgctgtgacctgcagctcctcgtactgcagcccagaggtggagagagagacagtgtctacgggttcttacctgggagcgatgactttcacttgtgtatcatgcrtgtcatgaagtggacctaaaggcttctcctcaagaaacttgaggaaaagttgatattatgtggttggtggatactaaacactggagtcacagaccatcctcattatggcaccact

SEQ ID NO: 378805 - DNA, 554 bp, Homo sapiens
gggtggggacagggagagggaggaggctagtcagggttttcattctaggcgtggaagaagcaagagaccaaggacccatctctggaaatgggaaagaggccgattgtacctcagtagaggctctagtgcccatccttgttgctctttcatcctgcttcatgtacaaagcacaaattcaaagagaaaaatattaagcatttcaagacatgactagagagcataaaactccaagmgtgaatctctttttagtgattgtactgttgtttaatgcctatgaagtagtcttggttcttagtatctggagtcactgttctaggtaggtagatactattatccccatagaaccaagaaaccataacacagagaggcttagtaactgactcaatgtcccaccactagtagccagtgatcttagaagattattttcatcttaagtatgaacaataactatgcacttgaattattacattatttagcctaaatatatttaacaaatctttttcaatctgtagtatattacttgtgcacacacatagtaatatatgtaaatatat

SEQ ID NO: 378806 - DNA, 554 bp, Homo sapiens
gggtggggacagggagagggaggaggctagtcagggttttcattctaggcgtggaagaagcaagagaccaaggacccatctctggaaatgggaaagaggccgattgtacctcagtagaggctctagtgcccatccttgttgctctttcatcctgcttcatgtacaaagcacaaattcaaagagaaaaatattaagcatttcaagacatgactagagagcataaaactccaagcgtgaatctctttttagtgattgyactgttgtttaatgcctatgaagtagtcttggttcttagtatctggagtcactgttctaggtaggtagatactattatccccatagaaccaagaaaccataacacagagaggcttagtaactgactcaatgtcccaccactagtagccagtgatcttagaagattattttcatcttaagtatgaacaataactatgcacttgaattattacattatttagcctaaatatatttaacaaatctttttcaatctgtagtatattacttgtgcacacacatagtaatatatgtaaatatat

SEQ ID NO: 378807 - DNA, 449 bp, Homo sapiens
gctcattatccaaatctgattcaaaaactatttctaaaatcaaatgtctaaacagaagccaaaaattattcatacaccatgaagaaaaaaataaaaattaaacctaaggtgacttcaatgtgagccaaatkgcataatgaacctataaaatgcttagtgaaatgcagtcaggcttgtagatgtgtttaccaaaagggaatgttctgctttcatatttattatgatctttcactgatttaaaactcctatatactgaaactcagcaaacatctttaatttacataaagcacagcattttttaaaaaaaactaatataagaatggatttaaaaagcagtttattctattgtgccagtctcggcaattagaaaggagaaagatgttattgagcctaaagaatatttgataaagagtatatcaatacatttccttaagagttaataatactgc

SEQ ID NO: 378808 - DNA, 584 bp, Homo sapiens
atgatgttttaagtcagcatgatgtaataaaggaggaaaacacaaaaaaatagaaaaatcctgttgttactagacacattgttatttctttctaagctgtttatctgatttgagacacagtgctaataatatgactaatctacttaatataagtattaggaaaattagaaaaaatatgttatctatgattgctttgtaagtctctggcttaaaaaaaacacctatttttgattactttatttttctggattaaaatcaatttgtcaactcctcttacattaattcattcttcaatgtccaacttattgtgtgctcactatgtgtcagtcatatggtacagctacrtatctacaggattctactggagagatggagttaggagttagtaaagacaaaaggcaataaatacgtggtcacccagagaaagaacttgttatggttccagagtcccttgcttcatcactgatagaaatatactatagccaaacttagcatccacctgcccattcagccaccacataggccacacaggctggcttaagcatgagtgaggcaccagcctgcagagtgcctcggctccaggg

SEQ ID NO: 378809 - DNA, 584 bp, Homo sapiens
atgatgttttaagtcagcatgatgtaataaaggaggaaaacacaaaaaaatagaaaaatcctgttgttactagacacattgttatttctttctaagctgtttatctgatttgagacacagtgctaataatatgactaatctacttaatataagtattaggaaaattagaaaaaatatgttatctatgattgctttgtaagtctctggcttaaaaaaaacacctatttttgattactttatttttctggattaaaatcaatttgtcaactcctcttacattaattcattcttcaatgtccaacttattgtgtgctcactatgtgtcagtcatatggtacagctacatatctacaggattctactggagagatggagttaggagttagtaaagacaaaaggcaataaatacgtggtcacccagagaaagaacttgttatggttccagagtcccttgcttcatcactgatagaaatatacyatagccaaacttagcatccacctgcccattcagccaccacataggccacacaggctggcttaagcatgagtgaggcaccagcctgcagagtgcctcggctccaggg

SEQ ID NO: 378810 - DNA, 585 bp, Homo sapiens
tagttaatttgcaaattttcatctggactgcatagattcatatttacagttacattttatggcagtgagaagaaaagaaggctggattgatcaaacrtaagaccaccttgatgtgaaaacctaattctcctttcaaatacatagctagaaagttcagagatgtttaaaatctttaagttagtgctgtagacagtgtaaggggatcaaagttatagcttaaagtattttctttgattaggaagatactggattccaaatgctttacatatactcttttacaataattgataatattaataccatttctccacaactgccaccaccaacaacaaaagtgtgtgatattgtatatttccaaactaatacaagtatataacacagatacagtttgagtctatctctccctggctttaatcctcatcattttcaacaacttcaatagtgctcaaaccattctgccaaagcacaaaggtcctcaggaaatactttaaactctgcaataatgatagtagtagtaaattataattaacttgattttactctctggtcatttttatatgtataattctcttcaatattagattt

SEQ ID NO: 378811 - DNA, 585 bp, Homo sapiens
tagttaatttgcaaattttcatctggactgcatagattcatatttacagttacattttatggcagtgagaagaaaagaaggctggattgatcaaacataagaccaccttgatgtgaaaacctaattctcctttcaaatacatagctagaaagttcagagatgttwaaaatctttaagttagtgctgtagacagtgtaaggggatcaaagttatagcttaaagtattttctttgattaggaagatactggattccaaatgctttacatatactcttttacaataattgataatattaataccatttctccacaactgccaccaccaacaacaaaagtgtgtgatattgtatatttccaaactaatacaagtatataacacagatacagtttgagtctatctctccctggctttaatcctcatcattttcaacaacttcaatagtgctcaaaccattctgccaaagcacaaaggtcctcaggaaatactttaaactctgcaataatgatagtagtagtaaattataattaacttgattttactctctggtcatttttatatgtataattctcttcaatattagattt

SEQ ID NO: 378812 - DNA, 585 bp, Homo sapiens
tagttaatttgcaaattttcatctggactgcatagattcatatttacagttacattttatggcagtgagaagaaaagaaggctggattgatcaaacataagaccaccttgatgtgaaaacctaattctcctttcaaatacatagctagaaagttcagagatgtttaaaatctttaagttagtgctgtagacagtgtaaggggatcaaagttatagcttaaagtattttctttgattaggaagatactggattccaaatgctttacatatactcttttacaataatygataatattaataccatttctccacaactgccaccaccaacaacaaaagtgtgtgatattgtatatttccaaactaatacaagtatataacacagatacagtttgagtctatctctccctggctttaatcctcatcattttcaacaacttcaatagtgctcaaaccattctgccaaagcacaaaggtcctcaggaaatactttaaactctgcaataatgatagtagtagtaaattataattaacttgattttactctctggtcatttttatatgtataattctcttcaatattagattt

SEQ ID NO: 378813 - DNA, 569 bp, Homo sapiens
tgttgataagaaaatgaataatgcatccattcctgatgaaattttccagacaaaataaatacaatctcagaagaaaaaaaaaagctatttaaattggtagtttttaatggtaaaataaaacaaaccttaccaaaatcacattattaagcaaacataccctgtactgctttgtagagtacttacatattttgattgccacttataaattacaatttttttgttctattctgyctctattgacaaaagttttgggttaaattcagttggattataaagctaaaaaggggagcaaatgttttaaaatgtcctctaagtttaaataactcaatttagaaaaccataaaatctcatttacatcaaacattttcaagctgcaagtggatattaaggctgtttatttcaggaatattcaataaaggtgcaaaaatcctggcagttttcaaagaaaagaaatagatataaatctttggagcacattcttacaaagacgttaaaactaacaaaacaggtgactgcatcattctgaaattcaggtcatttgcaattttaataaaatgtttttatataaa

SEQ ID NO: 378814 - DNA, 569 bp, Homo sapiens
tgttgataagaaaatgaataatgcatccattcctgatgaaattttccagacaaaataaatacaatctcagaagaaaaaaaaaagctatttaaattggtagtttttaatggtaaaataaaacaaaccttaccaaaatcacattattaagcaaacataccctgtactgctttgtagagtacttacatattttgattgccacttataaattacaatttttttgttctattctgtctctattgacaaaagttttgggttaaattcagttggattataaagctaaaaaggggagcaaatgttttaaaatgtcctctaagtttaaataactcaatttagaaaaccataaaatctcatttacatcaaacattttcaagctgcaagtggatattaaggctgtttatttcaggaatattcaataaaggtgcaaaaatcctggcagttttcaaagaaaagaaatagatataaatctttggagcacattcttacaaagacgttaaaactaacaaaacaggtgactgcatcattctgaaattcagktcatttgcaattttaataaaatgtttttatataaa

SEQ ID NO: 378815 - DNA, 608 bp, Homo sapiens
taactctttgtgtcacttttaaaatattttcaacaattctttgacggtcttctctgtaaaaggtggagcctaattctcttcctcttgagtgtgggctacacttactactcatttttaaagtataaaataaagtacaagtgatggtgtgagactttggagagtaggaataaaaggcccagcagctttgttctttcactctttcttggattgctcatgctgggtaagctaaacagccatgtcaagagagccctgaaacaactctatgaagagaaccatgtagcaagggatggaggccatctgcaaatacttatggtagtaagccatcttggaagtagatcctcagccacagtcaagctttcasatgactacagcccttgctgatctctcaattgaaacttgatgagggtctctcagtcaaatctcaactaaaccatttccaaattcctgacacatgaaaactgttacagaataaatgttctctgttttcaaatattgcactaagatttgaggttttgtgtattgcagcaatagataaacactactgtagcttggataagtctagttggagaggtaagcacaggatataatgggagcttggaagtgcatca

SEQ ID NO: 378816 - DNA, 607 bp, Homo sapiens
taagtatactctttttcactaaaatgtctcatttttgggaatttctcaggataaaacttcatggaaaatattactgaaatgtaccagaaagcaacggtattgacactaaaccaaagataacatgtagtgatgggcttttgctcaagaccgattagagttgcacaattaaattaaaagcaacattttttttttttgagatggagttttgttcttgtagccaaggctggagtgcaatggcrcgatctctgcttactgcaattctcctgcctcagcctctcgaaaagcaaccatttttaatagctcaaaaggagcaaccttacccaagagaagaaaaaaaattaaattagacacttctgtgtgtaacaatcagcctctggctagatgtttgaattctgtcgattttttgaccacaacatacttacatttttaaagtgtctgtgtttcctcatctgttaacggaacaaaatatttaaaatcaacctttcttgcacaacatcatggcttccctgaaatttgaatgaccttacttttgcttatgcttagattttaaacctaatgtattcccaaattctccttagtaccttaaattttctcttagatctctcaa

SEQ ID NO: 378817 - DNA, 607 bp, Homo sapiens
taagtatactctttttcactaaaatgtctcatttttgggaatttctcaggataaaacttcatggaaaatattactgaaatgtaccagaaagcaacggtattgacactaaaccaaagataacatgtagtgatgggcttttgctcaagaccgattagagttgcacaattaaattaaaagcaacattttttttttttgagatggagttttgttcttgtagccaaggctggagtgcaatggcgcgatctctgcttactgcaattctcctgcctcagcctctcgaaaagcaaccatttttaatagctcaaaaggagcaaccttacccaagagaagaaaaaaaattaaattagacacttctgtgtgtaacaatcagcctctggctagatgtttgaattctgtcgattttttgaccacaacatacttacatttttaaagtgtctgtgtttcctcatctgttaacggaacaaaatatttaaratcaacctttcttgcacaacatcatggcttccctgaaatttgaatgaccttacttttgcttatgcttagattttaaacctaatgtattcccaaattctccttagtaccttaaattttctcttagatctctcaa

SEQ ID NO: 378818 - DNA, 557 bp, Homo sapiens
ttatgtagtattactgattatttccttttgccttaggctcttagatgccccaggagatactgtcttaatttaaaatattgatatgtttttcatcatgaacctttagtatttattttgaattttaaaaacattgtattaaaataatattcatctcaattactttttttttctcattcccttaaattttgcacttgggcaaggtcttcattccctttagcctagtctcagtatgacggaagaagataacgtatcaggaactgaaatgtgaatgttcaaaaattgggagtcaagaaaaatatagagtttgtagtgttttcatagagtccccaccacatatttcaaaggatttcttaggtactggcaaaattcacttatcttagagaayggctagatttgttgtgacacagaggaaagaaattcctattttattcttagatttgctacttgtaaatatatgatttttgacaagtcacttaagctctttgagcctcagttttctgcaaggtggcaaccataaagcacatgtcacaggttgttgtaaagatcaagtaggatga

SEQ ID NO: 378819 - DNA, 500 bp, Homo sapiens
gtgcctatctgtcttgttgaaacaatgaaagagcgagycatgtaactgtcctccacctggcctacattcagatgtgtcagattccgactagtaagccgtgtgtcctcagacatgttgagtaaaccctgccaaggccagaatgatagtccagcttaaattatgaatctgcagtcttgtaagccaaatacatgctttttgttttaagagactgagtgttggcatagtttgttacaacaaagttattatgccattagaaaactgatacgctatgcctggaacccaaacacagcagcctcacagaactttgtacatatttaaaatttaatgagggttgaataaatgtattccagattatgtgtaaggatgactacaacacactcccaaactagtttgaaagagtaagcaaagggaactagattctttgagcatctgtaatatgccaagtaaggtgatgcaaaatttaatgtttgatcccatctactccttgctacaatacgtga

SEQ ID NO: 378820 - DNA, 639 bp, Homo sapiens
ctcattttatttataaattacccagtcccaagttctttatagtggtgtgaaaatggactaatataccattcgtgaacatggaacattttttccatttgtttgtgtcttctctggtttctttgagcagtgttttgtatttctcattgtasagaactttcatctccctagttagctgtatttatggatattttattctttttgtggtaattgtgaacaggattgcttttctgatttggctctcacttttgctcttgttggtgtataggaaagctgccttcctcctgatctggccatgtgaaggcatgtcttgcttcccttttgccttctgccatgattgtaaaatttatgaggcctccccagtcatgctaaactgggagtcatttaaatctctggaattacgcagtctcaggtatgtctttattagcagcacaagaacaaactaatacagtaaatttgtaccaggtagtgggtcgctcttataaaggtatttgaaaatgtggaagcaactttggaattaggtaacaagtagaaattggaacagtttggagggctcagaaaaagacaggaaaatgtgagaaagtttgtaacttcctaccatcttggagggctcagacaacaggaagatgtgggaaagtttgt

SEQ ID NO: 378821 - DNA, 639 bp, Homo sapiens
ctcattttatttataaattacccagtcccaagttctttatagtggtgtgaaaatggactaatataccattcgtgaacatggaacattttttccatttgtttgtgtcttctctggtttctttgagcagtgttttgtatttctcattgtagagaactttcatctccctagttagctgtatttatggatattttattctttttgtggtaattgtgaacaggattgcttttctgatttggctctcacttttgctcttgttggtgtataggaaagctgccttcctcctgatctggccatgtgaaggcatgtcttgcttcccttttgccttctgccatgattgtaaaatttatgaggcctccccagtcatgctaaactgggagtcatttaaatctctggaattacgcagtctcaggtatgtctttattagcagcacaagaacaaactaatacagtaaatttgtaccaggtagtgggtcgctcttrtaaaggtatttgaaaatgtggaagcaactttggaattaggtaacaagtagaaattggaacagtttggagggctcagaaaaagacaggaaaatgtgagaaagtttgtaacttcctaccatcttggagggctcagacaacaggaagatgtgggaaagtttgt

SEQ ID NO: 378822 - DNA, 582 bp, Homo sapiens
tgaccaaaatgctgaaagtaatatggactataaagtccaggctgaggtggtctcagatagagatgaggaacttgttgggaattggagtaaaggtcacttttgctatgtaaagagattgacagcattttgcccctgccctagagatctstgggactttgaccatgagagagatgatttagggtatcaagcagaagaaatttctaatcagcaaagcgttcaagaggaggcagagaataaaagcttaacaaatttgcagcctgatgatgcagtagggagaaatttgaacctactgtagaaatttgcataagtaacgagaagccaaatgctactctacaagacaatggaagaaatgtctccaagtcaggtcagagaccttcatgggagcctgactaattacaggcctggagatgtaggatgaaaaaatggttttctgggctgggcccagggccccagtgctgtgtgcagcctaggggcttggtatcctgcatcctagccactccagctgtggctaaaatagactaaggtacagctcaggccatggcttcagaggctgaaagccccaagtcttgacagcatgcacat

SEQ ID NO: 378823 - DNA, 582 bp, Homo sapiens
tgaccaaaatgctgaaagtaatatggactataaagtccaggctgaggtggtctcagatagagatgaggaacttgttgggaattggagtaaaggtcacttttgctatgtaaagagattgacagcattttgcccctgccctagagatctgtgggactttgaccatgagagagatgatttagggtatcaagcagaagaaatttctaatcagcaaagcgttcaagaggaggcagagaataaaagcttaacraatttgcagcctgatgatgcagtagggagaaatttgaacctactgtagaaatttgcataagtaacgagaagccaaatgctactctacaagacaatggaagaaatgtctccaagtcaggtcagagaccttcatgggagcctgactaattacaggcctggagatgtaggatgaaaaaatggttttctgggctgggcccagggccccagtgctgtgtgcagcctaggggcttggtatcctgcatcctagccactccagctgtggctaaaatagactaaggtacagctcaggccatggcttcagaggctgaaagccccaagtcttgacagcatgcacat

SEQ ID NO: 378824 - DNA, 582 bp, Homo sapiens
tgaccaaaatgctgaaagtaatatggactataaagtccaggctgaggtggtctcagatagagatgaggaacttgttgggaattggagtaaaggtcacttttgctatgtaaagagattgacagcattttgcccctgccctagagatctgtgggactttgaccatgagagagatgatttagggtatcaagcagaagaaatttctaatcagcaaagcgttcaagaggaggcagagaataaaagcttaacaaatttgcagcctgatgatgcagtagggagaaatttgaacctactgtagaaatttgcataagtaacgagaagccaaatgctamtctacaagacaatggaagaaatgtctccaagtcaggtcagagaccttcatgggagcctgactaattacaggcctggagatgtaggatgaaaaaatggttttctgggctgggcccagggccccagtgctgtgtgcagcctaggggcttggtatcctgcatcctagccactccagctgtggctaaaatagactaaggtacagctcaggccatggcttcagaggctgaaagccccaagtcttgacagcatgcacat

SEQ ID NO: 378825 - DNA, 566 bp, Homo sapiens
acacaaagtacaagacaaaggcctctgtactcttccttctcctttccccaagcagaaagaatctgtcctgggtctggattgcctggagtccagctttctaaatctcttagggatttagaaataaacaaaaaaacatgtctttcctaatttttaaaagttgtcatgctttctcttccttgcttattacagagctctgcagcagtcacttaatttgcagttgaccatttggtaggaagtattttggcccagtggtgtagcctctctctcccatccacaaagagtggcacagtccagagggctcctgctattcatcaaacaggctctgcttttagactcagtttttagagccaccccatggggaagagcaattgttcatcgtggtcccaagggaaggcatcagtttggctgtgacggtccctgaattgcatgcataattgttccaggggaagtattataggaccaatgaaaagaaatctgtgctgtattattttgtagctttcaactggttggatataaaacaaaacraaaaataaattacgtacttgatgcaaaattagagcatttaa

SEQ ID NO: 378826 - DNA, 529 bp, Homo sapiens
cctctgtctttcaaacttttgatttttttttttttttgagatggaatctcactctgttgcccaggctggagtgcagtggcgtgagcttgactcactgcaacctctgcctcccaggttcaagtgatctcctgtctcaggcycctgagtggctgggattacaggagtgcatcatcacgcccagataatttttgtatttttcacagagatagggtttcactatgttgtcccagttggtctcgaacccctgacctcaagtgatctgcctgccttggcctcctaaaatgctggaattacaggcatgagccactgtgcccggcttaataattatttcttaaagacaagtttaaacaattgtgtatatgagtttctagttgtttaatttggtgttcctgaggggagataaccactggaggattctattctgcaatcttgttttgcctcatctcaataaacatttgaatctttattacgttatttattattactaaatctttaatgactattgaattatttgaatctttattaaagg

SEQ ID NO: 378827 - DNA, 545 bp, Homo sapiens
ttttcgaaaaccaaaacccacaaagttgaacttttatctttttcaaaaacaataaaagattactcactaactttacaggcaaatacaaattacagtgaaagtagctagtatttttaaagtacaaaagcatccccatagatcacaaaaatataaaaatcatataatgaaagaaactacatatttctttttctgcataagaaaagaaaaattaggaaatcaatgacataattaattaattgtcataatataaagaaaatctaggctcacatagtatttatagagttattcttcagcattttatctgagtttgtaacatttaaactttcactacctccctaccgaaatgtatagaagtattcaaagcaagtcaccttcaagaatgagktgtcgtgaattaactgttttagaatttactacaaatatatttctagcctaacttttggcacggagtgtaaaagtaatacagctcatacaaactcacttggggctctggttgtcattcccatcaagggcttcagtaaacctagaatatacaaggcacagtg

SEQ ID NO: 378828 - DNA, 578 bp, Homo sapiens
aggcaaagaaattggcaacaggcataccaaagttgattaaactgataaattaaaattcattagatcaagtacattgttttgtctgttattcagaagagagtttttttttttaacaagattgactaagctgcttataattgtaggtttttaagtacctacacataaaaaatttacctggattgtttaaagtaaataacatttatttcatgatccctagattattagtrccttgaaataaatagatggaattttagggtatatctttcaggaatataatcatttatagtaaaatctgaatgtaactgtttagtcttgtataaaaactccatattatattggaattatccattgctaaatgttatatcatatcatatatgtttagctttgtctgactgaggaagcattatttgatcttaaataattgtgcatttcttaataaatatgcaatgaatacattttagtactaaaaatatactattatcttacattaaggtttttatatctaggacataaaataacaatttctgatctatgatagtcaaacaacaaggaaaagataacagaatatggatcacagt

SEQ ID NO: 378829 - DNA, 562 bp, Homo sapiens
atgatagtcaaacaacaaggaaaagataacagaatatggatcacagtcatttaactactgatgaggttagagctactgtcttgaaaaagcttaagtgaaactagaaagtaatggtttttggcaagaggttaaagaggtaagggaagcattttcagccaagataaacagattatttaagaatccagaaaaaccatggaaaccccttagaaaacttctagttcagggatgcagtattcccacaggcccatgacagccattactcaycatccacagtactcctgatggctcatttcatgcagaagtgaacttagaatcgcatatggcaccaggaagcaattactaattgattgttgcttgcaatcactatgcttctagttgcagttcatgacctacccgaactgaagaggagactgaggcctggagaagctgcatgatttaccaaatacttgactgctcaaaaacggaagaactgtggctagaaagccatctctcagagctagcacaattctagttttcttgctaatgctatgatattcttgccaataagtgaggttgtttgtcc

SEQ ID NO: 378830 - DNA, 562 bp, Homo sapiens
atgatagtcaaacaacaaggaaaagataacagaatatggatcacagtcatttaactactgatgaggttagagctactgtcttgaaaaagcttaagtgaaactagaaagtaatggtttttggcaagaggttaaagaggtaagggaagcattttcagccaagataaacagattatttaagaatccagaaaaaccatggaaaccccttagaaaacttctagttcagggatgcagtattcccacaggcccatgacagccattactcatcatccacagtactcctgatggctcatttcatgcagaagtgaacttagaatcgcatatggcaccaggaagcaattactaattgattgttgcttgcaatcactatgcttctagttgmagttcatgacctacccgaactgaagaggagactgaggcctggagaagctgcatgatttaccaaatacttgactgctcaaaaacggaagaactgtggctagaaagccatctctcagagctagcacaattctagttttcttgctaatgctatgatattcttgccaataagtgaggttgtttgtcc

SEQ ID NO: 378831 - DNA, 564 bp, Homo sapiens
acgaaagtcatacaaagataagtcttacaaaataagaaatctatagaccaatctcctttatgaatactgatgmagaacttctaaaccaattactagcaaacctaattcagtatcatattaaatggattatatttcatgaccatgatttttcctgaaatgcaaggatgattcaacatatgagaatcaatcaatcaatgccatatgctatattaacagaatgaagaaaacaaactgtgatcatctcaattaatgcaggaaaatcatttggcaaaattcaaatcctttcaggataaaaatattcaacaaactacaaaatacttcaacacaacaaaattcttataggcagaacttacattgaacatcatattcaacattgaaatattgaatattttcctctaagattaggaagaaggcaaggatacttgcttttatcccttcaattcaacatagtactggatgttctaaccagagcagttagacaaccaaaaaaaaaacagacccttcaattaaaaagaaatagtaaaattatctctgtttgcagatgatataatcatatgtgaaaaa

SEQ ID NO: 378832 - DNA, 510 bp, Homo sapiens
acagtactgactggacctaaaggtgctgtggggtccccagtattctagcccacaggaaatactactgcccagggaaatgacagtacagtacaccaaaaagacagcccctggcaaaaagagatccaaagcacgtgctttccagagcctgagagttacctgtgtggggctgtgagatgtggccttgcctccagcaatggcacaaactctgtgcttggccttgtragtggagaatatgatacctttccactggtgctgtagtttctgtgctcaggctcacacatatagcacgagacctcccctgccccttcacaccctcactgtagacacaactgccactgatgctgccaccagaagaaggggaagaagagctggagggctgcctgtctagatatgtgagtagcaactctacacccaatgatggtgtggcttctgtgcctgagctcacacacgaaggccaagatctctctctccctctctgcagtgctggggtgctcctgccacagagccaga

SEQ ID NO: 378833 - DNA, 490 bp, Homo sapiens
aacataacactgaatttttttattcacatatgtttattttaatatttgcttatgattatttctctcttggctgccagtttgaaattaactgatacttcttcagtcctataaagtgttctaagtatattcattaaattcagatcaatggagatttataaaacatactgaagtatttaaattaagaaggccagccaacagggcataaagttgaatgagttaaaacactatagaaaargaaattacaaaatcatcttcagaagtcttgtcttacaataagcctaaccacaaagatgtgaaaactaaaaagaagaacatcagaaatgtctagcaagctgtttgattctttatatattagcataaacaaaattggcaatgatataaacttatttctaatatttagacattcagaaattagaaactcaagtaaatagttgaggacagagtagagcagtatttttcaattcttttgaccctgaacttacatttacaa

SEQ ID NO: 378834 - DNA, 596 bp, Homo sapiens
ctttcttattaaaattttttcatgctttgcagatgtctcatgttttacaaatccaatttttttttaaattgagcgcttatawaatgcttagcaatgtgttgggaacttcagttaaaatggtaaaaagctgctaattatatttggtaaaatataccattattaaatattatattaaaattctctttagatgtaacgaaaaagctggtttgtatttcaaaggtgtgtatatgtgttgctattctgtttttgcattaattgacttgaattcaattaattttgctatagtctaatgcttttaaaaagaaggattgatgtcaaacataaggaatgacctcctattggcagaagttttattggatgaaagaactgggaacaatcctcaaaatgtagagttcagtgttacagaaacagcactggtaaaatagatgtttggggtattttttgtttgttttcttttgttatttgtttagctataataacttgcagtaaggttttagaagcagttcagagttagctattgtaacaactcctttttcaaaattctgataagttaaattttttatctttactgtaataaaggatgtatccatttaaat

SEQ ID NO: 378835 - DNA, 596 bp, Homo sapiens
ctttcttattaaaattttttcatgctttgcagatgtctcatgttttacaaatccaatttttttttaaattgagcgcttataaaatgcttagcaatgtgttgggaacttcagttaaaatggtaaaaagctgctaattatatttggtaaaatataccattattaaatattatattaaaattctctttagatgtaacgaaaaagctggtttgtatttcaaaggtgtgtatatgtgttgctattctgtttttgcattaattgacttgaattcaattaattttgctatagtctaatgcttttaaaaagaaggattgatgtcaaacataaggaatgacctcctattggcagaagttttattggatgaaagaactgggaacaatcctcaaaatgtagagttcagtgttacagaaacagcactggtaaaatagatgtttggggtattttttgtttgttttcttttgttattkgtttagctataataacttgcagtaaggttttagaagcagttcagagttagctattgtaacaactcctttttcaaaattctgataagttaaattttttatctttactgtaataaaggatgtatccatttaaat

SEQ ID NO: 378836 - DNA, 622 bp, Homo sapiens
ttttttttgtcttttctaatataagcttttgaagctataaatgtccacctacagactactttagtaacattccacaattttggtgaatttttcattaccattcagctaaaaatactctctarttttaaaaaattttatcttttaccaatttgctattttaaagtgtttttttgtttgtttgtttctacatatttagggattttcaaatttctttttccgttgcgttactgcttactcttttcttgtttacattgcttctgatgacatatctactgccatccttatcttttttcctctttgcataacatgtatttttgttctctacatacttttagcatttcctcttctgtttgttttttcatgcttcttgtgacggggttttgtacagattctgggatccctatgtttattttttctgcaattgaaaaataatttttcaaaaatattttttcatacttcctccctgcttaatatcccaattactgaatagtagtctgcctaaagttgtcctacagctgactgatgcatttttcactgtttttgttacttttttactgtgttttagtttggataatgtctattgttaagtcttcaatttcatatccttttattttgccgtgtc

SEQ ID NO: 378837 - DNA, 622 bp, Homo sapiens
ttttttttgtcttttctaatataagcttttgaagctataaatgtccacctacagactactttagtaacattccacaattttggtgaatttttcattaccattcagctaaaaatactctctagttttaaaaaawtttatcttttaccaatttgctattttaaagtgtttttttgtttgtttgtttctacatatttagggattttcaaatttctttttccgttgcgttactgcttactcttttcttgtttacattgcttctgatgacatatctactgccatccttatcttttttcctctttgcataacatgtatttttgttctctacatacttttagcatttcctcttctgtttgttttttcatgcttcttgtgacggggttttgtacagattctgggatccctatgtttattttttctgcaattgaaaaataatttttcaaaaatattttttcatacttcctccctgcttaatatcccaattactgaatagtagtctgcctaaagttgtcctacagctgactgatgcatttttcactgtttttgttacttttttactgtgttttagtttggataatgtctattgttaagtcttcaatttcatatccttttattttgccgtgtc

SEQ ID NO: 378838 - DNA, 622 bp, Homo sapiens
ttttttttgtcttttctaatataagcttttgaagctataaatgtccacctacagactactttagtaacattccacaattttggtgaatttttcattaccattcagctaaaaatactctctagttttaaaaaattttatcttttaccaatttgctattttaaagtgtttttttgtttgtttgtttctacatatttagggattttcaaatttctttttccgttgcgttactgcttactcttttcttgtttacattgcttctgatgasatatctactgccatccttatcttttttcctctttgcataacatgtatttttgttctctacatacttttagcatttcctcttctgtttgttttttcatgcttcttgtgacggggttttgtacagattctgggatccctatgtttattttttctgcaattgaaaaataatttttcaaaaatattttttcatacttcctccctgcttaatatcccaattactgaatagtagtctgcctaaagttgtcctacagctgactgatgcatttttcactgtttttgttacttttttactgtgttttagtttggataatgtctattgttaagtcttcaatttcatatccttttattttgccgtgtc

SEQ ID NO: 378839 - DNA, 622 bp, Homo sapiens
ttttttttgtcttttctaatataagcttttgaagctataaatgtccacctacagactactttagtaacattccacaattttggtgaatttttcattaccattcagctaaaaatactctctagttttaaaaaattttatcttttaccaatttgctattttaaagtgtttttttgtttgtttgtttctacatatttagggattttcaaatttctttttccgttgcgttactgcttactcttttcttgtttacattgcttctgatgacatatctactgccatccttatcttttttcctctttgcataacatgtatttttgttctctacatacttttagcatttcctcttctgtttgttttttcatgcttcttgtgacggggttttgtacagattctgrgatccctatgtttattttttctgcaattgaaaaataatttttcaaaaatattttttcatacttcctccctgcttaatatcccaattactgaatagtagtctgcctaaagttgtcctacagctgactgatgcatttttcactgtttttgttacttttttactgtgttttagtttggataatgtctattgttaagtcttcaatttcatatccttttattttgccgtgtc

SEQ ID NO: 378840 - DNA, 593 bp, Homo sapiens
ttcataggcaacaatacgaaagaatcattaaaaaaacaatagcttctgcaatatttatttaaattattatttattataccgcatgtattggtagtatatctgtttgctaggcctgccatcacaaaataccataggtaggatggcttaaatgacagaaattcatttttttttaaagttctggaggctaatagtctaagatcaatgtatcaaggagtgatgattttttytgagggccatgagggaagtacctgttccgagtctctgtccttggcttgtagatggcctttttctccttatgtctttacattgccttcttccttacgtccagtttccttttcttataagaacattaatcatatcagattaaggcccactacaatgaccacgttttaacataatttcctttataatgcccctctcttcaaacataatcagattttgaagtaccagaagttagaacattaatatatgagtttttggtgtgacacaattcagcccctaacagataatgaattataaattacattttctgtgtctaccttttattgataaaaaatttacatacaataaaatacatccattctcaggtatag

SEQ ID NO: 378841 - DNA, 593 bp, Homo sapiens
ttcataggcaacaatacgaaagaatcattaaaaaaacaatagcttctgcaatatttatttaaattattatttattataccgcatgtattggtagtatatctgtttgctaggcctgccatcacaaaataccataggtaggatggcttaaatgacagaaattcatttttttttaaagttctggaggctaatagtctaagatcaatgtatcaaggagtgatgattttttttgagggccatgagggaagtacctgttccgagtstctgtccttggcttgtagatggcctttttctccttatgtctttacattgccttcttccttacgtccagtttccttttcttataagaacattaatcatatcagattaaggcccactacaatgaccacgttttaacataatttcctttataatgcccctctcttcaaacataatcagattttgaagtaccagaagttagaacattaatatatgagtttttggtgtgacacaattcagcccctaacagataatgaattataaattacattttctgtgtctaccttttattgataaaaaatttacatacaataaaatacatccattctcaggtatag

SEQ ID NO: 378842 - DNA, 593 bp, Homo sapiens
ttcataggcaacaatacgaaagaatcattaaaaaaacaatagcttctgcaatatttatttaaattattatttattataccgcatgtattggtagtatatctgtttgctaggcctgccatcacaaaataccataggtaggatggcttaaatgacagaaattcatttttttttaaagttctggaggctaatagtctaagatcaatgtatcaaggagtgatgattttttttgagggccatgagggaagtacctgttccgagtctctgtccttggcttgtagatggcctttttctccttatgtctttacattgccttcttccttacgtccagtttccttttcttataagaacattaatcatatcagattaaggcccactacaatgaccacgttttaacataatttcctttataatgcccctctcttcaaacataatcagattttgaagtaccagaagttagaacattaatatatgagtttttggygtgacacaattcagcccctaacagataatgaattataaattacattttctgtgtctaccttttattgataaaaaatttacatacaataaaatacatccattctcaggtatag

SEQ ID NO: 378843 - DNA, 560 bp, Homo sapiens
actgtgctttctcacaagcctgagggcaacaggggcaagggctgtggaggaacaaaaatggtagcctgtctgctacctctgggagctccattccagggaagggcagagctgctctcaagtctgagagttcaggtgatgctgggggggccatgctcagttctcaggccagtgggtcttatatagctaggtgcactgaaggcaggcctgcaatcaatctgttgctcatccctgtggatttggtccctatcctaagggtgtgagagggagcctgacctcccctgttgtcagggagttgcagccactggtgccccattgcctggggatggggatccaaggytcttgagactttgtgtgttcctcagtggtggctctgcccagactctatatagctctctgtgtcagtctggaggcccagattggtgggaagttacgagtgatctcctgagcccagggttgcaaaagtttgtggcagaagtatgggtcccagggacattcattgactgtttccccatggtgaggggcctcctctggctccacaccactcctcagtgggaagttgc

SEQ ID NO: 378844 - DNA, 327 bp, Homo sapiens
gtctgtgtacttctttcttccgtcgctaggccagagtctgtgggacagactcggcatactctgatggaggatctgagactaaattaagaatcaaggggtgctctgttttttgcaatatgaacttaaaagccaagaacctggcattgcttctttgcatgacccagtcagatcacacatcgttgcattttcctgtctccctcaaagttattctctgccttggaatcctgccaccaaacctcagcttgaggagacagatttgaatattacctgctctctgccttgraaacctgccaccaaacctcagcttaaggagacagatttgaatgt

SEQ ID NO: 378845 - DNA, 571 bp, Homo sapiens
gcccctgggaattctctaacccaccagaaattggccacttcttggaggaggatgagaaatgagccacatcgttttattaatagatgtgaaaaccaaaaggaaagcaggtttcattagccgtggggggagaaaagaagcatatacttcaagaataaatacatgtgagtttaagatatcagcagacattccccccctccctcccaccccccaccccgtcccccacctaccatgcccaagggcttagctccctaacctgagctaattagggctgctgmagcttaagatctacccttctcgacaaagtagccaatatctcctggggaaaatgatctcacaaagcaaaataaaaatacatttgaaaagcacaactattttaaataaaaacaacttacgggttacatatggtgccaaagaagaaacattagaaccgaaagagatgataaaagttacaattaataatagatataaaaaaacctagttaaaataaagaaaaaatcaaacaaatagcatgaattagctaaggaatagattcaaaatgtgaaaaaccggattgagaaaaatctctcaaaag

SEQ ID NO: 378846 - DNA, 571 bp, Homo sapiens
gcccctgggaattctctaacccaccagaaattggccacttcttggaggaggatgagaaatgagccacatcgttttattaatagatgtgaaaaccaaaaggaaagcaggtttcattagccgtggggggagaaaagaagcatatacttcaagaataaatacatgtgagtttaagatatcagcagacattccccccctccctcccaccccccaccccgtcccccacctaccatgcccaagggcttagctccctaacctgagctaattagggctgctgcagcttaagatctacccttctcgacaaagtagccaatatctcctggggaaaatgatctcacaaagcaaaataaaaatacatttgaaaagcacaactattttaaataaaaacaacttrcgggttacatatggtgccaaagaagaaacattagaaccgaaagagatgataaaagttacaattaataatagatataaaaaaacctagttaaaataaagaaaaaatcaaacaaatagcatgaattagctaaggaatagattcaaaatgtgaaaaaccggattgagaaaaatctctcaaaag

SEQ ID NO: 378847 - DNA, 613 bp, Homo sapiens
aaaccaattttagaagaagaggaatgtgtgggaagaagactgtgagagctatgtttctttggagttgattctcttaggctttagtcggggactcataaagttgcctttcatcttaaatatgaaaaatatagcaagttcaccccatctatcatcagttccagggaggcatgtgtttatgaaaagagtttattaactggatgtcactggattttctggaagaaaatatggtattctcaatttaggaactctctgttcatttatgccctaactagataaaatctgcaatattaattttggtaaacagaaactctaactctacattggacagagattcaacctattacctcacctttgaaaataaaataaaaacatctctttcctcaggcatasaaatttgcaaggtacaaatgtctttataactgccatcaagtataacactcagcctaatccccacgatacaaaataagtaaactggggttcattcaggctaaaaaatgactattcaaggtcacttaaagctagaattttaattcagttcttcagacactgctatggtctaaatgttttgtgtcccaccaaaatttacatgttgaaatcctgagccccaatgtga

SEQ ID NO: 378848 - DNA, 606 bp, Homo sapiens
tatcctgcatcagaattatctatgatgcttgttaaaaaaaaaaccccagattcccgtattccatttgacactgattaaatcagaatcactgggatttcctaaggggagtcttctaagtgccaatttgagaaccacttgccaggctattgaaattgcttaatagagatgaaacacaarccacctggattgcagtggatgaaatatggccagggctgctattaaaggatgatttcaaagatgagagaggacttgttgggcaagaatattgactactctctgtggctgctgtgtctgacattaccacatttagaaatctgagagtccttaggatatacctttgaactttttttttttttgagacagagtctggctctgtcacccaggctagagtgtagtggcgtaatatccactcactgcaaactctgcctccggggttcaaacgattcttatgccttagcctcccaagtagctgagattacaggtgcatgccactgcacccgggtaatttttgtatttttagtggagatggggttttgccatgttggccaggctggtgtcaaactcctgggatcaagtgatatgcctgcctcagcctcccaaagtgct

SEQ ID NO: 378849 - DNA, 548 bp, Homo sapiens
agtcaaaattattcttttgcttaggagattcaggcagtgaacccttccagggcttatactttccaaagcaatgattgagagtagtctcagtcctcacttgagtcctcgtactgatcatcttttcagggtagcaatacacatgccttagagcagaaaatatcttctttaggagttttttactggggcttaccaatccataggtcccagtttcaatggtgactatagtgttttggaaatgtgcctggatcatcatattaatggttccttatatttacataaccttttagagtttgcaaagggctatgcacaccrgcttgtgaatagaggtatccttaacttcattttgtaagtgagaagctgtctcagaaaggctatttgattactccctgcccatgtcaccagattcaaggtggtttaaattagaactcaggcttttaaacttattttttatcgtttttttttcaatatgaagggatgttcttcatcatctaaagtagtcctaatgtctgcaaactgttacccagagagaaaaacagagatagttttga

SEQ ID NO: 378850 - DNA, 607 bp, Homo sapiens
gccttcgcatcaagccacttttattcagcataatgcttttgagattgatccatgttgttacatgtatcagtaatttgctcctttttgttgctgaatagtacttcattaaatgcatgtaccacagttagttttctcatttgtcagttggaggccatttgggttgtttcaggttctgaggaattgtaaataaagctgctataaacatttgtgtcctggtctttgtgtggcatatgctgtcatttctcttggatgaatacctargagtgagattggtgagtcatatattaaatatacgcttataagaaactccttgtttccaccagccatgtatgagaatccccaaggggagcttatctttattgaggtgcagaaagaagatttatggaagacttttttggcctgtcatcacgtaagctgagacccaaaagagagaagttactgtagcaaaacagggaagaggagttagtaaggcaaacgggctgaagaagagcattccaggcaaaaggattcgcatgggcaaaagttagcaaagatgcttttaaaaataaggatgccaagtgtccgttttatgtgacaatatgcaaattcctggtgatatttgcaggag

SEQ ID NO: 378851 - DNA, 578 bp, Homo sapiens
tcagttttctgcatattctccatcagtcttgagtcatcttgttaataaatggagttcactctctggctgtctctcctacttcgaggctcagagaaccgtgagcaatgaaatggattgaagacccagtttccctgtttctccagggtgttaagtcttattaagccttagctaacatcagccttcatagtccctgcggcgcacctcacytctgcccagtggtgtcccagagaggagaaagtggagcaccacaaactcttgctaaagtgggttctttaatcagaaacaacccatcttcagttccgcagcaccttcaccacctttggagtggtggaaatcagaaggcactagtcctagtgttgggccagaaatgtcagacgctgcccagtgttctgaccatcccaaacccagtttccctgttccccaaggaaccttgcacatccttgagaaaattttcttatcagcactacctatgaacactagatgactgacaaatctgcctcagaaaagtccagtcacacctatttccatctacctgcaagttgtccccaggtgggggaataaaagcatcccatagatag

SEQ ID NO: 378852 - DNA, 362 bp, Homo sapiens
ttttttgaaagattagtttaatatatgggaagctcctggcataaaactgcaggaggctgaccactaattcaggatctggggtgtctgggctggaaaggacctgcgtgagcatagaattcaagcattttaggttttaactctkatcagaacattgccctcatttatgggtggcctgggactgtattttggctttatcagaaagaaaactgcttttgattagtaatgtctgctataggcatagaaatcacaagtgacagtatatgtgatacatatttgatgtccctgatttagccccagcctgtcattatacagatgaagaaactgaggctcaaagctttcggactcatcccagctttcacaga

SEQ ID NO: 378853 - DNA, 579 bp, Homo sapiens
ggactgcaggcgatctccatcactgccaggaaaggcccatttgcaggaacaaagggcctcatctgtcctgtcaggaccaagaactcactcatcaactgcaactgcaggacgcccccctctgccccaccaacccccgcccccagggtcaggctcccctctggctttgccttactccagcctcacctctyttccctagagctgtgggaactctaggcaaaaactgagtcattgacacaggggagagaccactggaggtggggggggccgatgtccctggactagcaaggccagcgtggtgtaatggacaggagaatgaatggaaagctacagacaggaaagagaaccccctctttagccaatggctgcaaactcctcctccactcaaccttctgacagagctacttttaaaaagtggaaaataggctgatttgttcttcagtctttgttcctttcccaagttcctctgtggagtgtgtgccagaaaggaaaaccagctccatctgcccagggaaaaagagaaaaggcagggccaggggtctggccactccatgcactggagacaatgacatccaggcaaca

SEQ ID NO: 378854 - DNA, 628 bp, Homo sapiens
ttggggggcttgctcccaacatgtcccccttatttgatttgcaaatcaataaaagcaagggcagctttgtcatggtgagctacttcttgcaggagtcaggatccacatctgcagactacataaagacaaacaacatagattaaaagcacaatcatcattgaaatcacagagcttccaagtgtttttattgggttactggctgctaatctgtctgcagctcctttaaggactccagttcctggcattaaggtcaggtgtgcctgggatactttaaatatttgttctttaattttgcaatatccaaagacaagtttgtagagtgtccttctagatgcttttttattcttttccaaattttgatctcattaagtgcatttaatagtttccacaaatccttatgttaagctcctagagtgggccatatcatttgaggttgaggtgccactataccgacatggttccagataataggaactcttgccatacttctattatttctaccatctgaccgttttgttcagattatctgaacatagcatgaccgtgggacrcggactgagaggagcaattcaagctaaacatccccttaggggaccagttaataatgattccataggaattgttgtgc

SEQ ID NO: 378855 - DNA, 579 bp, Homo sapiens
catctcaaacccaaaagtgttccagggccaggcagacagaataactgggtgaagcaggctgagtggaaggggttgagaggtgggcagctggtagttcatcttggacagatttttatcgttagtgaatagggcatgtgatatggtttggctgtgtccccacccaaatctcatcttgaattgtagcytccataattcccacatgtggtaggagggacccagtgagagataactgaatcatgggggctgtgtcccccatactgttctcttggtagtgagtaagtctcatgagatctgatggttttataagggatttcccctttggcttagccctcattttctctcttgtctccctccatgtaagacatgccttttgccttctgccatgattgtgaggcctccacagccacatggaactgtgagtccactaaacctctttttctttataaattactcagacttgggtatgtctttatcagcagcttaaaaatggaatcacacaacattaaataaatgagggggagagaaaagtggggacactgattatcaagatggctgagatatcccaagaggctacaatca

SEQ ID NO: 378856 - DNA, 579 bp, Homo sapiens
catctcaaacccaaaagtgttccagggccaggcagacagaataactgggtgaagcaggctgagtggaaggggttgagaggtgggcagctggtagttcatcttggacagatttttatcgttagtgaatagggcatgtgatatggtttggctgtgtccccacccaaatctcatcttgaattgtagcctccataattcccacatgtggtaggagggacccagtgagagataactgaatcatgggggctgtgtcccccatactgttctcttggtagtgagtaagtctcatgagatctgatggttttataagggatttcccctttggcttagccctcattttctctcttgtctccctccatgtaagacatgccttttgccttctgccatgattgtgaggcctccacagccacatggaactgtgagtccactaaacctctttttctttataaattactcagacttgggtatgtctttatcagcagcttaaaaatggaatcayacaacattaaataaatgagggggagagaaaagtggggacactgattatcaagatggctgagatatcccaagaggctacaatca

SEQ ID NO: 378857 - DNA, 605 bp, Homo sapiens
ggattactaaccaagaggattgcaattgtcctgtaagagggaatcactgggacaacattgggccactgcaaactaaatctgtgactcagtttcctattctgaaagtgagaaaaataatagagcctatctgacagggttattggaagaactgaatgaggtaggactttaaaagtgtttggataaggccttacatgaagtaagttcaaaatagctgttaactattatttattattgttattcataatctacttcacctgggtttgccgtctttggctcacagcctggagtttctttgctgttctctgtctttcctggctcagaaacacagtgagtttctctttcctgctgaccctgggataccccccaaggcttccctgaaggtcctgcctttgtgcctgagtctctgcttctgatgtggttctgcagaagcaaactagggcatccccagcctsgtggacacctccatgctgagctcagcgctgagctttgagggtgagtgactgactccctggtcggcacttttattgtggtttcctgattggttcaggatggctgggcctttgctaccccatccccaagtggatttccagtcctgccagaggcga

SEQ ID NO: 378858 - DNA, 565 bp, Homo sapiens
tcaaattgtagactcttttagtacacacagaactgtctacatcggaaagcaaatactgacatatttgatgtagttcagatatttgccccctccaaatctcatgaggaaacttgatgtcctatgttagaagtggggccgagcaggaggtgtttgggtcataggggtggattcttcatgaatgscttgacgaagttctcatggtaatgagtgagtttttattccattagttcctgaaagatctgattgctaaaaagagcatgacaccttcctcttctttctctttcttgctctctctctctctcacattgtgacatgttggctccccattcccttctgccatgattggaaccttcctaaggccctcacaggaagcagatggaggtgttgggcttcttacagtctgcagacctgtgaaccaaataaacctcttttctttgtagatcacccagaaatatgtctctatagcagcacaaaaccaatcagcacattaaaagtcatgcatagactatgttcagtgaagtatactagattaaatccttgaacaaaaaagaacaatcatggaaaa

SEQ ID NO: 378859 - DNA, 565 bp, Homo sapiens
tcaaattgtagactcttttagtacacacagaactgtctacatcggaaagcaaatactgacatatttgatgtagttcagatatttgccccctccaaatctcatgaggaaacttgatgtcctatgttagaagtggggccgagcaggaggtgtttgggtcataggggtggattcttcatgaatggcttgacgaagttctcatggtaatgagtgagtttttattccattagttcctgaaagatctgattgctaaaaagagcatgacaccttcctcttctttctctttcttgctctctctctctctcacattgtgacatgttggctccccattcccttctgccatgattggaaccttcctaaggccctcacaggaagcagatggaggtgttgggcttcttacagtctgcagacctgtgaaccaaataaacctcttttctttgtagatcacccagaaatatgtctctatagcagcacaaaaccaatcagcacattaaaartcatgcatagactatgttcagtgaagtatactagattaaatccttgaacaaaaaagaacaatcatggaaaa

SEQ ID NO: 378860 - DNA, 494 bp, Homo sapiens
aggtgataaaggaacatgtttagggtcatgtagccaataaaggacagaacctagatgcagcacagatacctataatgccgttgctttcaaacactagataatggttcccttgcgcagctcttaaacccacagaacagtacacaccccacagcatccctctcaaaccttgggacctccagtccttacactgcttactttagtgcaggcatacctatgtgtccggcttttaaaactcataaccctgggctcatgggggccaggtcctttctttttaagcttcttttcttgctgtttcaaccttctgttgtgggatgttgctaaagaaaaaaagtgttcatgacacttgttaaagatggcaaggaagactattcaaggtcagggactaggatgggaagtatagggaccaytgcaatggggtcttacagtgggggagacagactggtctcaactctgactccagcaagtgtaagtggagatttatagccaaggagcaa

SEQ ID NO: 378861 - DNA, 494 bp, Homo sapiens
aggtgataaaggaacatgtttagggtcatgtagccaataaaggacagaacctagatgcagcacagatacctataatgccgttgctttcaaacactagataatggttcccttgcgcagctcttaaacccacagaacagtacacaccccacagcatccctctcaaaccttgggacctccagtccttacactgcttactttagtgcaggcatacctatgtgtccggcttttaaaactcataaccctgggctcatgggggccaggtcctttctttttaagcttcttttcttgctgtttcaaccttctgttgtgggatgttgctaaagaaaaaaagtgttcatgacacttgttaaagatggcaaggaagactattcaaggtcagggactaggatgggaagtatagggaccactgcaatggggtcttacagtgggggagacagactggtctcaactctgactccagcaagygtaagtggagatttatagccaaggagcaa

SEQ ID NO: 378862 - DNA, 529 bp, Homo sapiens
gttgttgtttccatttcacaggtggttaaactaaattttagaggggcaggtgattttcccaatatctcatatcttcatatttcttccttcaaatagatcttccaatgatcttagttgatacttggagttctaagcttgaacatttagacaaggctttccccataccttcccagatgttctgctacataatactatgtggtgtttacttagaaaactagtcaacttgtcatcatattacagatataagggagaagagtatttcaccttaccactgagggagagaaattgtgagtcatctacaaaagaaaagggactttgggagctggggttctggtgcaactactgtgtcgttgtatgtgagaggtggagggcatgtgtgtaaagaaccattgcataattttttgggaattttcctcyagtacaaatctcatagcactgagcacagttccaagtacacagcagcaatgaacaaatgtgcttgctgaattaaagatacttaactggaagaggagctgaaaacaaaaccaac

SEQ ID NO: 378863 - DNA, 618 bp, Homo sapiens
tacatgttagccctttctaccatgtgaggagacagcaacaaggtgacatcttttgaagcagaggtcaagctttcatcagacactaaatctgctggctccttgattttggacttcctagcctgtagaactataagagataaatttctattgtttatgaattagctagtctaaggtattttcttagagcaggaggaagggactaagatgggtacttactaatctataatggaccccaggaagacaaagataagtacaatgtatttttccctctaggaactcttagtttagcaggacaggaggacatgcctgtggataagtgccttttgaaactggttccacctgacractgcagtcctggctaaagtgagcagagtgtgtggaacagaagccatgccccttatggaccaggcttaactaggctgattcaaatctatgtgctttagattatgtaggtgagcatgctgggagaattttaccaacagttcttcctatttttgatgctatccagaaagttctgtcactatttggaaaatagaattttgtgtagtagttaagaatataaacactgaagtcaaaagaatctatgcttatgttgtgtataaaatgcacagaaaagtg

SEQ ID NO: 378864 - DNA, 566 bp, Homo sapiens
acagacgtagtcatttttcaaaaatcaatttttgttactatagaccaagtatttcattcacccatttattctacatcaattgatcaattcattcccttatttctgcatttattccccattagtttaatattccctgattacctggtaagcataagttgctggactagactccatccagatacaaaagatgtctacctaagtaagacatgcttctgctctaaaaagtgtttatcatttagctaagagtggagagtccaaatatctattcagcacctggtctgtttcacgcatgagctacttgcttttccatttgatatcttatgatagccctagggaggagatcgcattatctccattttacagatgaggatactgagttcagatagtttaagtaaactgyccactcttactctgtttgtaaatgctagagatgaggagataaaatgtgtgtaaagaaaataagcacatcaaaagggagaaatcaattatcttatgagtcagtccagataaggggtacagagggttagtaaaagaagaagttactttcagcccaaccgggtaaagac

SEQ ID NO: 378865 - DNA, 554 bp, Homo sapiens
tcaggatggctccttctggagatctttaccagctaattatccagagtgcttccttgtggaagagaaattgacctttggaactctagggtgcagagctgagcccaaggggcaatagtcatgcataggcaaatttctggtaagtacaaggaaggactttgttaggatggcatttgttttcccaaggtgtattaaaggagaaccatacatctaagaacagataatatgctagygcctttcttatctctactaggtttgattctctgatcaaagacagaatttttagtaaagaaagggttgtctgatttccagtggtcaggagagttaggaggatgttttagcacatgcaaactttttttctgtaaagtgctagataaaaaacaaatgaatgtggctgggatctaataaaacttagtttgcaaaaacaggcagagggcagagtctggcttatggactgtacttggtcaactcctgttttggcagatggtgaggaccccaccactgagattattcaagtagaattgggggtttgcactaaaatgatcttcttaagagat

SEQ ID NO: 378866 - DNA, 554 bp, Homo sapiens
tcaggatggctccttctggagatctttaccagctaattatccagagtgcttccttgtggaagagaaattgacctttggaactctagggtgcagagctgagcccaaggggcaatagtcatgcataggcaaatttctggtaagtacaaggaaggactttgttaggatggcatttgttttcccaaggtgtattaaaggagaaccatacatctaagaacagataatatgctagcgcctttcttatctctactaggtttgattctctgatcaaagacagaatttttagtaaagaaagggttgtctgatttccagtggtcaggagagttaggaggatgttttagcacatgcaaactttttttctgtaaagtgctagataaaaaacaaatgaatgtggctgggatctaataaaacttagtttrcaaaaacaggcagagggcagagtctggcttatggactgtacttggtcaactcctgttttggcagatggtgaggaccccaccactgagattattcaagtagaattgggggtttgcactaaaatgatcttcttaagagat

SEQ ID NO: 378867 - DNA, 566 bp, Homo sapiens
agtgagcctgaaagtttcaatgctctaatcacatgattggttcccctggaaaccaaccccatcctgagctatccaggaacccaagaaaagtcaccccattagaacaaaagatgcttctgtcacccaaggaacttaggagctctgtatcagatgttcctacaactcaggaaattacaaaggccttaggagctctgttttagaaactggtgtcaaagaccaaacattagaagacaagattctcctagcacctatatccacaagggttttagcagctttgtctcagcaactggaggtagagaccaaatagatatttcttgttatatcacagtatcacattcttctctctttgactgtcatcacacctccaggcagcatttcatctgagagtcccytctgtgtttgatagcagaatcatgtacctcagcgtctctaagcctgagtttgaacacttgaaaatgaggttgagcatctccaccttgtcagcttttgagagtcctcgtgatgtggaggctttacaaatgttgctagtaaataagagaaatcttcctcagactgtgggcagctca

SEQ ID NO: 378868 - DNA, 604 bp, Homo sapiens
atttttcttttctactttgaaatattgtgtctgtgttgttttctggatgtgtcaccattctgaaacaaaccatcaatcagcagagctttgtgtggggtctgttttcaaaaacaagccaccatgagcagttcctgacttgtagtgcttcccagggactcagtctatgtcttaaacacttctttcttcttcccatgtctccttcagtcttcaggcagacttgccaagttttctctttcttgggccagtgtgctttttccccagctcattctctgactttctacccaaagagtcacttaaaaaaattttttttcttaagggacctagggttgtatcctcttgaatagtgctattggtagtaaccaaagatgcagcactgaataagccactcccttctagacagaactactcatcctcaatctcaagtaccacatcttccaacaggccttccctgaccccctctgtctaaattaggtcaatctctcaccaccacaattctattctctctcatggagctcatgttctygtccttcataaaaaagaatcatcaccagttgtaattatattcttatttgtgtatttatttatgaaatagccctcttctcca

SEQ ID NO: 378869 - DNA, 598 bp, Homo sapiens
ttcagccacaccacacacctcagtccctaagacatgttgtcctctctatgaccttagcacacactgctgtcttgtgactgaatacctggcaaactccaatctagtcctcaagatgaacctcagcaattatatcctctggggtgtcctctccagtcccttccccactcttggcaaaggtaaattgtctttcggtacctacctttaatagcatataatatagtaactgtaatatgttgtttgggggaacagtgtttatagatytgtttccttaccctagaccatgagcttcatgagagcaactgtatattatttgaaacatgcttactctatgaatggatcaagtgttctccacaatttgatttttttttttaacatacagggtctcactctattacccaggctagactacggtggcccaatcatagctcactgtaacctcaaactcctgggctcaaatgatcctcccacttcagcctcccaagtaactaggactataggctcacaccaccatgcctggctaatttttatttatttatttatttatttatttatttatttatttatttattttgtagagatagggtctctacgaaatatt

SEQ ID NO: 378870 - DNA, 579 bp, Homo sapiens
acaaatgcagcaggtgagaactttcattcttttcacctactgcacggcaggtggatgatctacctgggccattgtmcaagaggttttttgtttgttagtttgtttcctaattgcatcacccagattattagctagttgttccttccaaattcatgtcatccttcgatcactttttcctgcattcattttcacatcacattattcagcaagtatttttactgatcatctactatgtaccagagacattgtatatgttttcccagaaattagtcaaaataaagcaaataataagacagaccttaggatagagctgctctcactttcagctgaggttgattagtttataacattccttgactgctgttagctaaaagtccttccaacttcaatactatctagaacgtatacctccatcttgtccacaagaatatcatgatatcacatttcaagcccccaattaatttgaggaacaccatttatatttcttctttagctaccaacctaaagaccctttaaaaaaaacaacactggtagtctaacttaattcctgatttatttctgcaagtgcatgctggttcc

SEQ ID NO: 378871 - DNA, 456 bp, Homo sapiens
aaactcttctacgtcagatcatcactattaggctctcatgaggagtgtgtcacccagatcacttgcatgtacagttcacaatagggctcacactcctgtgagagaatctaatgttgccacttatctgacagtaggcagtaattactgagcattactgtaatgcttgtttgcctgttgctcacctcctgctgtgtggcctggttcttaacaggccatggacaagtaccagtccatggcctaaggtatggggacccctgccttagtggatcctcaaaaaaatttctggaataaataaaatgaaataggggagagcagacaataattatcatgctattttcatgagagctgaaracagtaatgcagaagtcagaaaggaaaatccatgtgaggggaaaggtcgatgccacttctctccagccttgccttttcctcactttcattccaagggatttagat

SEQ ID NO: 378872 - DNA, 503 bp, Homo sapiens
aagtccccaagagtggcctggcagcagtccacaccacctggcaaattgtggctttgagaggacaagttgccacctgctgccttgccttcatgtggcacttggtctacataggtcttagaggctgggtaagtgttgaaaagtcaaccttagtagtttaaaaagtgccaataaaacttaaagtttgaaaaaaaggaaagaaatgtttcatattttcttctattactcttttgtttaaatctcttaacaacgagaatgtattcaaataagacttttcacttttaaaaaaccacatatttaacacatacttttaaaatggcatagacagtcatcttggcaaataagttggtcttctggaaatctttccaatttgggctttggagggyttttggtcagtgatgtgaccattattctagtctcctgaactagatctcctttattccatgagttaaaaattgagggggaagaaagggcctagaaaacaatgataacccaatagcaatgaa

SEQ ID NO: 378873 - DNA, 510 bp, Homo sapiens
tctgaaggcataaatgcatgtacttaaggcaagacacggagtgattagctagaaacacatccattatttttgctgtccaaattgttctttccataagatgatttgtgaggttgatgtccttgtgacagcaattttctgaaaatattaaataaggctgagtcccttttaaaaatcaagagcatgattcatacatatttgtgaaatgtaagtaccttttctctcttactgctgcaaactgctgacagcaatgtattatgrgacccctcgtcagttgacagttgaagtggaaatattgttgtaagtaatgaatttgttgatagctgttccattacccagaatgaatatttagattagtcatgtgcaggctgtcatgtcagagctaccaggagcttttccttttatctaatttactcttaattcctcagtccccatctcaccatgttatatcctattgagtgtgtcaagggatgattagattgagagatgcaaggttttgttattgacacaatt

SEQ ID NO: 378874 - DNA, 510 bp, Homo sapiens
tctgaaggcataaatgcatgtacttaaggcaagacacggagtgattagctagaaacacatccattatttttgctgtccaaattgttctttccataagatgatttgtgaggttgatgtccttgtgacagcaattttctgaaaatattaaataaggctgagtcccttttaaaaatcaagagcatgattcatacatatttgtgaaatgtaagtaccttttctctcttactgctgcaaactgctgacagcaatgtattatgagacccctcgtcagttgacrgttgaagtggaaatattgttgtaagtaatgaatttgttgatagctgttccattacccagaatgaatatttagattagtcatgtgcaggctgtcatgtcagagctaccaggagcttttccttttatctaatttactcttaattcctcagtccccatctcaccatgttatatcctattgagtgtgtcaagggatgattagattgagagatgcaaggttttgttattgacacaatt

SEQ ID NO: 378875 - DNA, 445 bp, Homo sapiens
tacaactttcagagaatacttcaaacaaagcaatcctaagtgctttcacttaaagacactgcacacaggagagagaaaacccattttcaacttaaacaattcaaaaagtttggaagattttcggcgacactccacagagctaccccaaaatgggcctccattttcagatgtgcatccaagtgcatcacatatttcamttccctgtgggcaatgccagaggagacaaaggaagggggagagaatgttccatgcatttgcaaactgtcagggcatatcatttgtcctctaaataagtgtttactaagcatccacatgatttttccttgtcccctgcaaggtgcaaaaattgtagggaaaatgaatttctggccaggctttaagtgaaataaaaatccaaacatgttaagtcaagatgccaggaacagctcatcactcatcattacag

SEQ ID NO: 378876 - DNA, 516 bp, Homo sapiens
ttgcaaactgtcagggcatatcatttgtcctctaaataagtgtttactaagcatccacatgatttttccttgtcccctgcaaggtgcaaaaattgtagggaaaatgaatttctggccaggctttaagtgaaataaaaatccaaacakgttaagtcaagatgccaggaacagctcatcactcatcattacagtgcatttgtggggctgtaatttctttctcacccgttgtggtgtttgcttcttttcacatttcctcaggctggcccccttggaagtcggcaggtcatttcccccccttcatgctctaatagatttcactctcaagatctcacacaccaccagctctggactgctgtgtttagggttagcaaagcagtaggaaaacgcttgcagacagagaacggtgatttctttttcatccaaagaaaaatgagagtttgaagatgcttatcacacccagatttggggaaataaaaagaaatcccaaatcctttcttctccacaaaatacattttt

SEQ ID NO: 378877 - DNA, 509 bp, Homo sapiens
cttttggatatatacctaggagtgaaaatctgggtcatatgataacttgatatttaacctttggagaaaccatcaaaccatttcctgcagtggctgtgccacttcacattcctccatcagtacctgaggagtccagtatttctacatccttgctaacatttacttcccttttttaaaggtatggccatccttcccctccagtcttattggcctctatcatgtcacatgcccactcctaaattaattatttgcaaagtgaaggatattaccaaaattgccttaaaccaatcaggaccagggccctgggtagggtytacattaccctaaaggacatggctgcaaggaggacagttagatacctgaacaaaatccagacattccagccagaaagaaaggatgggacgaggaagaataaagggaagctaccatcaatgtttgcaacagggtggctttaaaaatagaaatgcccagaccagagattttgattcacttggtctgcagcagtgggt

SEQ ID NO: 378878 - DNA, 582 bp, Homo sapiens
tggtttgaggtgagggcagagtaacagagacttcagggctcaagctgttaaccaaagatatactgcctctcaaaaatgggagataagattcaaggagaggaaatatttacattcacaaggaatgtttgaaaagaataaatcaaagcaggatgatgaagtgaggagagaatataagaggacaaaattcctcacttccccaccaaaaacaacaacaaaaagagtcttgctgagcaataggttaaacagcttttgttctcttataaaactgtgagaraagaagaacatcatggcattaagaacacagtgtgacagatgaggcaaaatgtctccatgcagagaagggtacaaaaaaaggaacaaagctgtctggcaggtgaaaagacaaagactatagggagagaaagaggcaaatagacaagagggagtgaaccgagaaacagatcagtgggacggagattgagtaatgggagagattgaatggggaggagcaaaggtgtctgtagagagaggggcccagtcaggcattgggcagatgtgtgctggagtttcctcttcccacattcccagacccaaactggggag

SEQ ID NO: 378879 - DNA, 586 bp, Homo sapiens
ggagtgaacactacatttagccagggaataactgcataagcagggagaaagtgccttggaaaacaggaggggcagtgccccaacccttcctatggctttcccctcctcttgccctgcatcttctgaaaggactgtaatgagggaagccrtggccagtgttgattctgtgagtagacagaaatggggacaagatggtccgtcaccatgtagggatggatgggccaggaaactcaagcagtatggccatgacatgggccctaaggagctaggtattggttataagtctatccagctcaacactggactcccagacagtttgcctcccaaaagtccttggaaagctcttgccatatccagttgtgcagtagagtggggagtacatcataatgtctgtttctgaaaatagggtgaagaaacttttccataccgctctttaatccaggaaaaacactaaaaatgatgggggggggaggtggtgtgcagggtagggatggcataaatttaaaagaaaattgcagaccacagatggatccatcttgaggtactcgttatagagcgaaatcctttaaacatggtcagtggcaga

SEQ ID NO: 378880 - DNA, 586 bp, Homo sapiens
ggagtgaacactacatttagccagggaataactgcataagcagggagaaagtgccttggaaaacaggaggggcagtgccccaacccttcctatggctttcccctcctcttgccctgcatcttctgaaaggactgtaatgagggaagccgtggccagtgttgattctgtgagtagacagaaatggggacaagatggtccgtcaccatgtagggatggatgggccaggaaactcaagcagtatggccatgacatgggccctaaggagctaggtattggttataagtctatccagctcaacactggactcccagacagtttgcctcccaaaagtccttggaaagctcttgccatatccagttgtgcagtagagtggggagtacatcataatgtctgtttctgaaaatagggtgaagaaacttttccataccgctctttaatccaggaaaaacactaaaaatgatgrgggggggaggtggtgtgcagggtagggatggcataaatttaaaagaaaattgcagaccacagatggatccatcttgaggtactcgttatagagcgaaatcctttaaacatggtcagtggcaga

SEQ ID NO: 378881 - DNA, 586 bp, Homo sapiens
ggtagctcttattattatagggcacatgaaaatgtgagaatcagtgatactattgatctcacaccatagtcctttgtttccagcttatttatgaaataatatcagaaataaattactcctgctcctagagctccccatgaaactagagaggtgcgaagaatcaaggacaggtgcagtcaaayccagagaatgaacaaggcttggtttcaagaagagctttcctaagaatttagcgattctctaccttgtcactattgacatgtttgacatttagggctggatttttttttttttttaagacaaggtcttactttatcacccaggctggagaacagtggtgagatcctggctcactgcagcctccacctcctgggcttaagtgatcttcctacctaagccccacaagtagctggaactacaggcacgtgctaccacgcttggctaactttttgtagatacagtgttttgccttgtcatccaggctggtctcaaattcctgagctcaggtaatccacctgccttggccttccaaagtgctgggattataggcatgagccaccgcgccatcctggatattctgtacata

SEQ ID NO: 378882 - DNA, 589 bp, Homo sapiens
ctttttgttgttgttcaagcactgttctagcaacaacttttttctctacctttttaccattttatttcattttcattctcttagccattttcatagcttgctccaaagactctatattttcagtcaaatctattctcctttgaaattaagtctttatttctaagcagatttttttctaaaattgtattcctaagtttagtcaattctccattccyattttcctttttatctatttctttttgaatgcctggattttgtgtaaggtgttttatcatatctgccaatgcttcttttaacaatatataattcactttgaggtgttatgatgtactattcttctgtttttctgcttgttttgtttttagagagaatttcatatgtcctatactctattcattttgaattactttatattcccaaaccagcaattactgtcatatgtaaaaactgttgtatacagagataatctggatgaaaagaacccttatgctggtatggtatagtttatttaattagtggtgcatttgaatggtagaatggaatgaagagttgatatgttttcagttttgtgattctcttttgtttctac

SEQ ID NO: 378883 - DNA, 589 bp, Homo sapiens
ctttttgttgttgttcaagcactgttctagcaacaacttttttctctacctttttaccattttatttcattttcattctcttagccattttcatagcttgctccaaagactctatattttcagtcaaatctattctcctttgaaattaagtctttatttctaagcagatttttttctaaaattgtattcctaagtttagtcaattctccattcccattttcctttttatctatttctttttgaatgcctggattttgtgtaaggtgttttatcatatctgccaatgcttcttttaacamtatataattcactttgaggtgttatgatgtactattcttctgtttttctgcttgttttgtttttagagagaatttcatatgtcctatactctattcattttgaattactttatattcccaaaccagcaattactgtcatatgtaaaaactgttgtatacagagataatctggatgaaaagaacccttatgctggtatggtatagtttatttaattagtggtgcatttgaatggtagaatggaatgaagagttgatatgttttcagttttgtgattctcttttgtttctac

SEQ ID NO: 378884 - DNA, 565 bp, Homo sapiens
agcttggtgtggcaatttttataaagagtaatatcaatttgatccaaatataaaagaaatttgtttgacctacagtcttagtgcagataattatatgacttcttaaggctttttgaaatgttaaaaatagctcctaaacttttatccacttttcaggaccactagaattttggaactaccagattttagataaaatytaatccagtctcataatgaaaaaaaaaaaaaaaaagaaacaaaaatccagaaagatcaaatcagtgatagtggcatagtggcatagtggcagggcgtagaacactggttttcccatcttccagatcagtattttttttccaccagatcatgtggtctcaccaacaaaaacaataaaatgtgtatcacttcttattcaaatctatttagttcttgagttcacatagtttgaagaaaaagttcagatagcaatggatattgcagaatctgaatctgtttggttcttgaattttcaatagcaaggaatttatttgaaaatttatgtgaacttatttaattcctgagtttagatattttatgagaggttaac

SEQ ID NO: 378885 - DNA, 595 bp, Homo sapiens
aaactaagagctattaaaagaagaaaaaattgcagagaaaagggaacccatgtgcactgttggtggaaatgtgaattagtacagccattatggaaaactggatggaagttcctcagaaaaactgaaaattgaattactgtatgatccaacaatcccacttccgggtattcacccaaaagatttgaaatcagtttgttgataaaatgtctacactcccatgttcattgtagcattattcacaacagctgaatcatggaatcaagctaagtgtccagccgcagatgaatctgaaaaaagaaaatgtggtgtgtgtacatatgtgtatgcgtacacacacacatacaatgggatactattcagccttaaagaaggaaattctgtcatttgcaacaacatggatggaattggagaacattatataaagtacagtaagccaggcacagaaagataaatattgcatgtcttcacttayatgtgaaatccaggagaatcaaattcaagaagcagagagcagaatagtagaatacaagaagtacagagtagaatacaaaggctgggggtatgggaaatggggaaacagagtcaaagggtacac

SEQ ID NO: 378886 - DNA, 541 bp, Homo sapiens
cggggcccgtgtgaacgacgcccaggcttcggaggctttctggcctgggcccaggcgacctcgggtaagtccctgacttctccgaacctcagatccctatgaagtgagtcgcgaaggtgaacaaggctggagtcacggtgcgccgagcccgagggccacggagggcccctgagggagggtgggccggggcgggcgagaggcggcggccggggccgggagcgcttaccgtgcggtaggtgcggctcagcgccaccaccagcttcgcctggttctggtgcggctgctgcgccagccgaaaggcctccttaatcgacagcagcctcctttccgctcccatggctctggaaccctgccgggacgagtcctgcccgcgcwcggctacagcctgccagcccgccaacccagaggcagcgctctccgagtagtcttctatgacagccccagggagtatttaccgctcgaacgttcaaataattcccgcgagagggggaaatcccgcgagactgccgtaagcgctttgggagaagagagcgggaagcga

SEQ ID NO: 378887 - DNA, 575 bp, Homo sapiens
attacttcttttaacaaaatttagtaccaggtactattctaagtgcttaaccagtattatcttgtttagtcctcataacctgcctaacagtgattactgttattacttccatttcgcatatgagacaactcaggctcaggagtaggtactttccacaggccattcagtgagaaagcactggagcaggattggagcccaggtaattgaactccctcaactaggtcaggagcccctggggagcaggtaggtcrtggttagctttgtttcctcaccaggctagcccagtacttggccattaggagtgtttattaggtgaacaagcacagtagtgaaacctgttgatggaccataatttgattagcctgtttccaaattttacggtattgtactgctacaaatatattctgtaaattagtttgatttcattggggttatttggggtaaattcccttaaatgaaatgactcaagaaatacaagcagttttatagataattgcttacatcactctcccgaaatttggcatttatcattccaacggctacttttaggtgcactgattttatcatcgcttcct

SEQ ID NO: 378888 - DNA, 648 bp, Homo sapiens
atgacaagtataaaatatctattggtggtctcttgaaacaactaagatgaaagatttaagattaaagacatcaaagtgcctaaatcatgtaaactgattgttgagtgttctaatgattcactgtgaattaccttctttggggggaatgcttaaagatgtttaaggtaaccagccaggtgcaatgggtcacacctgtaatcccaatcctttgggaggccaaggtaggagaggagcctgggcaacatagygagacaccctccccccgctgaaacaaccttcctcctctaccacccctgcccacacaatacatttttctttaaagttagtttgttgtggcggtgtgttgcttgagcctgagagctgtgatggtgccactggactccagcctgtgtgacagggtgagactgtctctaaaaataaataaaacaaggtaatcaaaggttttgttttacagatagacacataccattaccaatgaatggataaataaaatgtgatatatctacacagtggaatattatgcagccttatggaatgaatgatacatgttacaacatggatgtgataatggcaggaggcaggcaaatgcctaggcagatggggcaggtccctggtgaaatcccacctccaagccaaagacagttaaag

SEQ ID NO: 378889 - DNA, 580 bp, Homo sapiens
tacagtagaactgtagaacctctttcaaaactgaagtcaattctctcaaaccctgccactgctttatcaaacttactatgtaagtttacataatagtctaaatcctttgttgtcatttcaacaatattcacatcttcactaatagaatccatctcaagaaaccactttcttcacctgcattcatggatttaaaaaaattaagataaaacaacaacaactaaaaaaaaacactttctttgctcatccacaagaagccactcctcatccattcaagttttatcaagagactgcagcaattcaatcatatcttcaggctccctttctatttctcttcctatttccaccacatatgcagttatttcctccacaaactgtgaacccctcgaagtcatccatgagggctggaatcaacttcttccaaactcctcttaatgctgatattctgacctcctcccatgagtcacaaatgtacttaatggtgcatcctttccaggttttcaacttactttgcccagatggatcrgaggaattactaccaatggcagccatagccttacaagatgcatttcttaaatagtaa

SEQ ID NO: 378890 - DNA, 555 bp, Homo sapiens
acttaaatgcatttggctggaaaagagaggagagaaatagaatgtcgactgaagagtgagcagggatgaggagtggagaagagggctttgtttgtaggtttaataagagaaactagtgtgtatgtttaatagccagtgggcaatagccgaattctaggaatttgtcccttaratttactcacatatatataaggggataaacacacgtgtgtgagcagcaatggtttaaaaacaacctaaatagcctggttcagagcactggttaaatgaattctcttgtccatacaatggaattattgcagccattctaaataaaaagagctttctacagttcctgatatgggatcatctccatgatttatcaggctgattttgcaagatgcagaacaggatatattattgccattctttgtattaaaaacaagaggatagatgttccagaggtatcctacactgatatttatttttttaaaccacacacactgaaagaatgatcaagaaaattgctgctaagatggggaactggggaataaaagtgtgggtaaatgttttttt

SEQ ID NO: 378891 - DNA, 554 bp, Homo sapiens
ctggctgccaacagggaccgagttcatggttgattccagtgaaactctataatcactgcagttctcaaaaccctatctcagcccaccaatgccgacacacacaccacaggccagctctctcctgaagcacttgcacactcaggaggaacctggtgtggtttgacaaggctgtacacaggggttgttagtcacaaatgccccaatttctgcatccaggccctgtgttctgatcacaccagggtctttcatttctttgctctcaaaaacctagagtgcacatgtttgtgaaaaagtaatttacttttcacagataaagccttcctgcatgtatttctttttgtgtgccattataacctattcctctaagaaaggtgaatatccaatttaggattgtcaggaaaaaaagaaattggaaaaacacagacatgtcsccttagtatatgtaaaccaagtctcagatctccacaggaagcctctccctgggggtacaagcccagcacagggtggaccacaggacttagccactcggggacttctgctagggcaggtgcacc

SEQ ID NO: 378892 - DNA, 546 bp, Homo sapiens
tcagatgaacagtatttcctgtgaccagtaaaaatatcacgaaagcccttcaattttaataaggacatttaaaagcctttcttttaggattatgtgattaaatctaaaccataaagacccaayctatacttctggtctagaaaaataaaattagtacaacttctgagttctagcatgttttagactaatggatcttactgcagtaaaacagaaaaaaatactcagaattattaaaaaatacggtgagagtaatttttgtgcacaaaatgaacaattaaaaactgattatacaaatttaaaaaaaaattgaaaggtggcactgaaagtttcctgcctgaaaagccttcaggatgagagtattataaaaagttagcactgtgcacctgactttctacactgcttcaatatgtgaccttggaaatgtcatgtaatttctctcatttctagttctgtaaaatgggaatgtccacctgttctcctctcaaggacaattacacagataatcagattaaaaatttggtatttggtgttctttaaaaaaagaaa

SEQ ID NO: 378893 - DNA, 451 bp, Homo sapiens
aactccactgctaaattctccccaaagcctgaaactccctatgaarctactggactgtatgcgatccaacagttacaaatagcacagctccaagaaccccgaagataaaaggctgccactttcctgcaacccaagtccaagtaaaaggcaggaaggtccctgtaaaatggaccagaaagaaatcaacaggcgatgactatggaaaagaacgtagatttcccagtctcccagtctgcaaaaattctagctctccctcgggaatggcactgctcctctttccttacccctttgccctttctctacagacaacatccccactctattgtaaagcagtttgaccacggaacccttttgctgaggccggatttctacagtcttctgaaaggggaaaacgcattcaaagaacacacaccctaccaagcgcccatggcgcggggcccccgcgggcgcc

SEQ ID NO: 378894 - DNA, 522 bp, Homo sapiens
acatagggggttctctggcttgtgaaagaacaatgctgccgccctccttggctccaagggcttccagaccagaaagtagttattcctgaaggacttggcacccttcctcccaggcaaggaggagggagagccttcctgaagaagtgatgctgtgggccctgtgcgggggctcacacctgtaatcccagtgctttggaaggcygaggcaggcagatcacttgaaccaggagttcaagacaagcctgggcaacatggtgaaaccccatctctacaaaatatgcaaaaaattagctgggtgtagtggcacactccagcctcccagctactcagaaggctgaggtgggaggatcacctgatcccggaaggtccaggctgcagtgagctgtgattgtgccactgcactccactccagcctaggtgacagagtgaaaccctgtctcaaaaaaaaagtaatttaaatattgttttaaaaaagaagtcatgctatgtaagtcttgtccaggaaatgtctcctccagacca

SEQ ID NO: 378895 - DNA, 571 bp, Homo sapiens
tttctggttcttgccatgctctttgttggaggtgctcttcagcagctctccatcaccagccagttggtgacaagaggccatcagaacacatctggggcacacacagcaatgaaccaccaaggggctccttccattctctttcctccaggtcacaccttttaatggggtgcagttggtaataagttggataatatttaaagcacatgcctgttttttacttattaaaaatattgaatgtgacaaagttgtaaaaacaaacaaaaatgaacaaacaaaaartattatatggcattaaattcatcccccaaggagcttctgttctaggaagacaccttctcccccaggctcctgtggcttgccatggacaaggggggaataaactgtcctgttgctctctctgactctggagtccagggagtcctgcctgaggattctgaggaagttgtgacttcaaggattcacctgcctcttttagctaggagagtaggagacctggtctaaatcatttgtgtttaaaggaagtgtctccgcatctgagtttcagctgctctagcgtttgtgattttgccaa

SEQ ID NO: 378896 - DNA, 571 bp, Homo sapiens
tttctggttcttgccatgctctttgttggaggtgctcttcagcagctctccatcaccagccagttggtgacaagaggccatcagaacacatctggggcacacacagcaatgaaccaccaaggggctccttccattctctttcctccaggtcacaccttttaatggggtgcagttggtaataagttggataatatttaaagcacatgcctgttttttacttattaaaaatattgaatgtgacaaagttgtaaaaacaaacaaaaatgaacaaacaaaaaatattatatggcattaaatwcatcccccaaggagcttctgttctaggaagacaccttctcccccaggctcctgtggcttgccatggacaaggggggaataaactgtcctgttgctctctctgactctggagtccagggagtcctgcctgaggattctgaggaagttgtgacttcaaggattcacctgcctcttttagctaggagagtaggagacctggtctaaatcatttgtgtttaaaggaagtgtctccgcatctgagtttcagctgctctagcgtttgtgattttgccaa

SEQ ID NO: 378897 - DNA, 643 bp, Homo sapiens
ttattgtgaaaggtaattaccaaatcaaaataaatactaagagaaattttggtgtgttgaaagatgatattaatgaccaaaaaaataaaaaaatagaaataaagaaatgcttggattgtagaggtttaacaattgcctggttttcttaatgcatacattaatgttggtgcttgtttttcataaacagatgtgatcagacagttgcactgacattgggtggaacataaaagtgtggaaagctggtacaatcaaactttacttggttgrtgagcatgttgaattttggagctcatatgaatagatccctgagtgaaaataaatgctgacttagtaatttaaaactatccctacacttgagcttgatacaaaatttagttgctgtttactggctttgaaaattttctaggcctatgagagtctaagaaattacaaccatgaaaaatgaacacataggaatcgacttgataaggacttatgatagattttagagttagtttaattgtggacctattcatgatttagtagtgagatatatatgcttagacataagatgccaactaaaattatatttgaaatgtgaaacaaaaaaaatattaattggttaaggagatccattttattatactgacaattatatgtcatt

SEQ ID NO: 378898 - DNA, 520 bp, Homo sapiens
ttttataattttaggtacatgtagaaaccataagtggaacactgtattaactgaatatcattgagaaacttcaagcaaacatgttactgatataaattaaagaataattgaaaaggaaaagacctccttccttttttccccaaaaggtaaatgtgttttcttatagctttaactacttgctgtaaaattaaatgcttttaatttctgatacaagggagcagaatacgatgttaatattttctgtatgtcttttgatattaataatgcattgaaaatatctgcaacattaaaattctttctgtgggctttttgtgaatgctattatgtcaagccattaattgtgcacttttccaaaagcaggcaaccyatcctgctagctcttgaatcatattgtgaaagcataattgtattctgtgcattcttggttgacattaaaatggtctgttagttgtgtctagcagaatgtcttcctttctgaattatgtatttagataaacttatccaacaacttcagagcaac

SEQ ID NO: 378899 - DNA, 551 bp, Homo sapiens
cctttacttattccacttgtwcagaacctatatatttctaaaggctctgttaaatgttctattacttttcttctgcttaaatcactcaagtaatgcttcttgcatccttcactgttcatgtctacagctagcttctgtcagcaaattgacattacgtcaatagcagtaccttccatggactttgcttcaatattttaatatctaggttattgctattaaaaatagtatgaattaaaaataccaaaggaaaaataaaagacaaattgcaaacaaatatgacaagcatattaaatattattaatttaaaaacttctacaaataagaaaacacctaacaagtaaatattaaagaatatacattagtaattcactagcatatttaaattttccatcataaaatacaaaatgcttcaagaagattgacaaattaacttttcaacaagcaaattatcttcttttttataatcataaagaatgtgtaaagaaactgacactgtgatgtaatgctggttcgaatagaaattggaaagcaacctcgcattgtgaaaaagc

SEQ ID NO: 378900 - DNA, 567 bp, Homo sapiens
ttgtgattatattttatacatgcagttaatatctgcaatcagttggctctaagtaaaggagattaactcaataatgttattctcatgtattttgaccattgagctaatctttggattatccaacagtatccagaaaacttttgaactgtatatactcactgtaacagaattcttgtttacaggatttacactggaatgaatacaaaataaaacacatactataaatccaayagaaaatttagtttcataattctcatatttttatgaattatattttttgcataagtattatgttgtttaaactgtattatgaataaactttcatcaactataattcgtcatttcaaagagtctttcctcttggctatacattgcaattttctccttgagattaataatgccttccatattctctatttattttcagttatgtattttattttacctaccttgttcacttccagagcattgtgtcttcctaagtattacccaccatcacctatcattgaagctatcatcagatgacaccacccactgcaactgctcctcttaattatttagagattc

SEQ ID NO: 378901 - DNA, 567 bp, Homo sapiens
ttgtgattatattttatacatgcagttaatatctgcaatcagttggctctaagtaaaggagattaactcaataatgttattctcatgtattttgaccattgagctaatctttggattatccaacagtatccagaaaacttttgaactgtatatactcactgtaacagaattcttgtttacaggatttacactggaatgaatacaaaataaaacacatactataaatccaatagaaaatttagtttcataattctcatatttttatgaattatattttttgcataagtattatgttgtttaaactgtattatgaataaactttcatcaactataattcgtcatttcaaagagtctttcctcttggctatacattgcaattttctccttgagattaataatgccttccatattctctatttattttcagttatgtattttattttacctaccttgttcacttccagagcattgtgtcttcctaagtattacccaccatcacctatcattgaagctatcrtcagatgacaccacccactgcaactgctcctcttaattatttagagattc

SEQ ID NO: 378902 - DNA, 574 bp, Homo sapiens
aaaagaagaaaagtttttttttggatgggtgataggacactttgctccaatatcctaaggattgcactgtgattctcctataaagaactgccagtcactccaaacagcatccctatgtgccattgatactttatctgtcactgaatctgctggatcatatggtccaagcagcagagcagcttgcacagcaacctgtatgagttggaaatccttctcttattctggaatccacttaaaactggcagcttattgggccactcagtaaataagccaaagtaatacacccaaatgaaaaacattttttttctccaaaatctagggacacactaagcatcatgccttttttttggttgtgtggggccagacacaacaacttatccttcaccttagaagagatatcttgacatgctgcataccactgaagcccgagaaatttcactgaggtagaagggccatagttttttgttagatttatttctcaccctctgacrtgtgtagatctcatcaatctgtctacagtagttgctacctcttgttcactacatcaaatcaacataatttcatcaatgtgatg

SEQ ID NO: 378903 - DNA, 549 bp, Homo sapiens
accctgggctctgtggatgacatgattgatggtggcaggaggcagacaggctccagggcagtgatgtggtttggctctctccactgaaatctcatcttgaattgtagctcccacaattcccacctgtcacgggaggggcccaatgggaggtaattggatcatgggggtgggtctttcctgtgttgttctcatgatagtgagtgagtctcatggagatctgatgattttataagaaggaattcccctgcacaagtcctctctcttgcccactgccatgtaagaagtccctttgctcttcctttgtcttctkccatgattgtgagccttcccaagctatctggaactgtgagtccattaaacttctttttctttataggtcacccagtctcaggcatgtctttgtcagcagcccaaaaatggactaatacaggcagaaatgggcaggtccctggttaagctccaccttcacaccagggatggcctgaagcatcaggactgagctgtcacttccaggtggaatctgtggactggagtgagaacttatggtta

SEQ ID NO: 378904 - DNA, 621 bp, Homo sapiens
attatccccatcaaatgtctgtagtgcttctgaaaagaaacacaggctgaatgacccttacatcttgaacacaactgctttaagattttaacttcttggggcattaagaaaaaggtagacatcaagtttactattttagccaaaatgctgagatatatccaattgtcaacaatttaggagaataagcctgaaaataaatcctgattgaaagaatgtaaaactatgagtttactgtgcaaggagacttcaaaaagattatggaaaatatatattatggaaaaactgtgcatggattttgaattttttttgtatcaaaataaacttgtaccagcttttgataacatgtctaaataagatttaggttgaggcagtaagaaggataagagaatcagtttgaaaagcatcccaatcagagcaacattaattctgctaaaattaaagaaagaacagacatctaacttacttaacttacggtgagacttggatggaagaatggtgaaatcactaatgytttacaaaaactttaatggggataatgccctattagaaattagtagtttccaaatcaataacttgttttaagaagggacaagatgatgttgaagatgaagcccacagcag

SEQ ID NO: 378905 - DNA, 574 bp, Homo sapiens
ccatgacatcactagaattacacacagttttcactcgagataatgagtgtgatatacggttcagagagaaagaggctatggctcaakaacattgaagggaaaacagaagcattacataagatccactgaatagttgctattaccacagcaaattctaacaattgttagaatcataggatgtctctaattctgttaagcaaaaagcaatattcaaaatagatatttctatgatcccagaactatattctatgagtaatttcatgatgggagacagctctaaattgtttatatttttaggttctggtttctgaaaaattggcacagtgtatgtgaaatactgacaaggctaaaaccaaaattttttgttttcctgtcatttttttccccacacttccctagaaaacagaaattatctactattttccttggttaacaatgtcaatgtgtgtataaactatattatgcactgggtgtttgtaatataatagagaagaaaaatttgcttttactttttaaatgcttagatattggtgttaatgtctcagaaagcttacagaatgaataggccagatgc

SEQ ID NO: 378906 - DNA, 574 bp, Homo sapiens
ccatgacatcactagaattacacacagttttcactcgagataatgagtgtgatatacggttcagagagaaagaggctatggctcaagaacattgaagggaaaacagaagcattacataagatccactgaatagttgctattaccacagcaaattctaacaattgttagaatcataggatgtctctaattctgttaagcaaaaagcaatattcaaaatagatatttctatgatcccagaactatattctatgagtaatttcatgatgggagacagctctaaattgtttatatttttaggttctggtttctgaaaaattggcacagtgtatgtgaaatactgacaaggctaaaaccaaaattttttgttttcctgtcatttttttcccyacacttccctagaaaacagaaattatctactattttccttggttaacaatgtcaatgtgtgtataaactatattatgcactgggtgtttgtaatataatagagaagaaaaatttgcttttactttttaaatgcttagatattggtgttaatgtctcagaaagcttacagaatgaataggccagatgc

SEQ ID NO: 378907 - DNA, 561 bp, Homo sapiens
gttccctaacctttattcttgrcttctgtgcacttgcaggaccaacaacacatggaagctgccaaggcttggggtttacaccctctgaagcaatggcctgagctgcaccttggacctttttagccaaagctgaagcagctgagaggcaaggccccaagtctcaggcttcacacagtagggggcacctggacctagcccaggaaactatttttcccttaatggcataccctcccatcacaggcccagaagcctaggacataacctggaggcattttcccctttgtcttggtgattagatgcagcacccccagggggaactttgcccctcccatttgggcacaaccactgaagacttcctcatctttgccacataaaagccccagaacacagccccatttctggcaaccctctttgggtcccctctctttgctgagaacttttctgttgcttaataaaactttgctctacattattccttctctggtgtctgcgtgctttattcttcttggtcatgggacaagaacttagacctagttgaactgaggagcgattaggctgcaa

SEQ ID NO: 378908 - DNA, 561 bp, Homo sapiens
gttccctaacctttattcttggcttctgtgcacttgcaggaccaacaacacatggaagctgccaaggcttggggtttacaccctctgaagcaatggcctgagctgcaccttggacctttttagccaaagctgaagcagctgagaggcaaggccccaagtctcaggcttcayacagtagggggcacctggacctagcccaggaaactatttttcccttaatggcataccctcccatcacaggcccagaagcctaggacataacctggaggcattttcccctttgtcttggtgattagatgcagcacccccagggggaactttgcccctcccatttgggcacaaccactgaagacttcctcatctttgccacataaaagccccagaacacagccccatttctggcaaccctctttgggtcccctctctttgctgagaacttttctgttgcttaataaaactttgctctacattattccttctctggtgtctgcgtgctttattcttcttggtcatgggacaagaacttagacctagttgaactgaggagcgattaggctgcaa

SEQ ID NO: 378909 - DNA, 561 bp, Homo sapiens
aggtgagattagtctactactaagttcatgaaaatggtaggaggaggaatacagaaaatgacattttgcagtttcagataagagtcactgattcaaggttgcatttgtcctttagattgattataatcctcaacataataatatgtccaatgggctatatatatgtgtgtgttgatgtgtgatctctacccatgatatcatcaaacctaatctcattaaacaagaattaaaaaatwtaaataatggtcattttaaccagggtatcactggatgaaagcaaggcagcagtaatatcaataaatgacttagctcaaatataacttctttggagactttccagatatctcccagccagaaatacttcccctctggggaaatcatgtttattatagtctgagtgttcaaatatgtatttattatttgattaacatttatatatgtgtgaagagattgtattttagtaatccttaattctctcagtgccaagcctggggcctttatgttatatgctcaacatgttattagtaaaacacaagttttcattgttttatatctaataaa

SEQ ID NO: 378910 - DNA, 494 bp, Homo sapiens
aaataactgactctacattatttttgaattgagtatttgtgagtcagctatcagagttagagcactgatagttagcttctacaacagaataaactatactaacaactgccatacaaatagaaaaatattagatcagatcccaaatcattacttcttttcctctctgcctatattgccatgattttgcaattgcatatttctctggtaattgaacatacaacatgtgaatttgaatttgaacttgaatttgcagaatatcaatttcgtctcctaaactcacagatgacaattcctactttacagaataacattaagtattaacaagatgtaatgtatgtaaatacaatttacaaagtgtgaatsactactaaaatgtgagaataaattttacaagcaataataccaatctctcacaatttgtacttaactaacagttgtcaaaatgaaaagtatgcataaaatgaacatataatgtgtctttatggtctgaccac

SEQ ID NO: 378911 - DNA, 425 bp, Homo sapiens
ttttttttttttggtgtttttgggtggggaggggaaggctgagattcacttagagtacacggctgctaactgccagtgacaaggaaagcctaagtacctctgatttgcctggggctgtactcccacacagcctcgggactacttccaataacttccaacactctctaattgggaaagtaattctcatggcacaattttatcagggaaacaaaacaaagccaaaatggtaagataaaaatgtgacaataaattctattataactrttactccaaattatagtaatatgcaaattatagggctttcacttgaacaacaaccacaatagccagcaacaagaactacagcctatcctggtatatctctccctgcaaaatacaaatttataactaatgaggcagacataaataaaaatgccaagtcagtc

SEQ ID NO: 378912 - DNA, 611 bp, Homo sapiens
cataaatgcatgaatgagtatctgctattgaagacttacctacttttggatttatgctttctactaggatcaagtgatagataaataacagagcatgacatataaatatgttaatatagatacatatgttaacactgtatctttaggggatcttagcccatccataaataaataacatttgaaacaaaggcataacagaggcaaaattgatttgctttagaaggtcatcttcctctcattcmtcaaggctacaaatgtagctttgccttctgtctcaaagccatttccatggttgtgtatctgaaatgtacatatctgtctcctgcgcatcctgccccacatcatgcctggaccatctctggaccacaaaacattttcccaaaaggtctctttgattccagctgtcatgggctgtcaggatgaacttcctaatatgctgataagaatatgtcaatcccctgcttagaaatctctaggtgggggattgactactcacaaagtaaacttctcatttacaagtaaaattagaatcccttaaggtgtcattcagtgctctcaatcatctgctttcaatgttcccttctggcttcatctcctctggtctccaccac

SEQ ID NO: 378913 - DNA, 616 bp, Homo sapiens
aatattgcaagaactgtaaagtattcagcatagtttccttctagagaactgagaccttgtcacaagcaaggtttactataagtagaagatctaataacaaaaataaaaggaatttagaaaggaaattgatgattaattgtcaaggagctatagggtcaaaaaggagacctctaaaagtaaagatattcgggattcagaaaggttggggggaaaggagaggtattctattattgtgcttaaagactacacagttgcaaattacatattaaagattgtattaatagaaaacagttattgttaaatgaatagttatagtgaataaaagtaagattttgataagagataaatatggaaatgattaacagcagttaactagattaattaatgtcaattaaatatactgaattcactgaagcctttacataaatcagaactcttttttttttcatgaraaattcttgtaatgggttggagtgtttttgttaaacttgattgctcctttcactcagcaactctgatcttgttgagcagttgtgataaggccagctgcatctgaaatgagcatgtatcagtattgtaacacctttaggtctatcacccctacaaaacccttgtc

SEQ ID NO: 378914 - DNA, 611 bp, Homo sapiens
ccaacaggtgctagaaatgtatcacctgaagtttttattgtcttaccagaattatggatttgacaaatcaaacattggttacaaaccatttaattaattttagaacagtcatcccatcactttttaaaatcatttttatcattttatttatttcatgatgagtcatagagtgcagagcttttaataatggaaaaattgaagactcaggaaggaccaggcagctgcccaggctcctcacacttaacattggacttacatcaccttaaataccagttttatttctacaacttaggggtatagcactgttgattaagtaggttatcataggtaattggacttggatcaattttgtggagttcattcaaattgcatatctaatcaagtttcatactggctgacttagcatgaaaatcccccaaagyatttccttggtattcaatgtattcttgtcctgcttgatattgggttagcagttttataaaactaatcagtctttttcattaaagttctgggaatttttacccaattcaatggtataatccgatttctaggaatttcatgtaatttctagaacacatattaataacacgttgatgtaaatataactcaaa

SEQ ID NO: 378915 - DNA, 533 bp, Homo sapiens
tttttcattaaagttctgggaatttttacccaattcaatggtataatccgatttctaggaatttcatgtaatttctagaacacatattaataacacgttgatgtaaatataactcaaaaaaggtttggtattagttattatttgacaatgctgcccatataatttaatatgtcgaataagcccagttagtttactataactctttataaggagagatacccttttgagatattccaagagaccatttggaaaatcccaaagttaatttgaggtcaaaaaataatttagaatttaatattggaaatttgtcaaaaaaaatcaaggttttaaaacagctgattaaaatagaatcacaggtcactgtgaaagcaatagtcatttatttaattaaaagacttcaaaggcaaattcagaaagatacataattgtagaaaaaccttagcgctttcaatagacakgactcagtttcttaagtgatcaaaagcctaataaagacaacatgaagcacaggaaatcatcttggtaaaacacag

SEQ ID NO: 378916 - DNA, 627 bp, Homo sapiens
cctctaaatgatagaaatatgtcatactttgtaaatctttatatgttatgaagtcctggactgagaacaactttttaaaaaaattaatgcctgtggtgctttttcgtcctcacaaaatgtctgtcgctcttctatttgtgaagtatcacttacaatcatagcatgtcatatttggaagacacagtagagaccatcagatccagtaagttttaaccagggaaatctttttaaaacatatgctaagccccttgctcatggatttaggcttagcaggtgtatgagggggtgaggagggatgagtaatctttgttttttcagcttctggattttttaaaaatytaggactaaggaagggctttttaagtaagtcacaacacttaaaaaatataagagaaatgcaccatttgacttcataaaaattagaaattaatacaaacataatcaaaacatcataatcaaagccaaaagaaaaatgacaaactgggggaagtatttgcaaaagtgattttccataataaagagctcttataaagcaacaagaaaacaaatttccactcaacctcattcataagaactgtacattaaaacaataaaataacattgttatgcatctgattgccaaagatt

SEQ ID NO: 378917 - DNA, 627 bp, Homo sapiens
cctctaaatgatagaaatatgtcatactttgtaaatctttatatgttatgaagtcctggactgagaacaactttttaaaaaaattaatgcctgtggtgctttttcgtcctcacaaaatgtctgtcgctcttctatttgtgaagtatcacttacaatcatagcatgtcatatttggaagacacagtagagaccatcagatccagtaagttttaaccagggaaatctttttaaaacatatgctaagccccttgctcatggatttaggcttagcaggtgtatgagggggtgaggagggatgagtaatctttgttttttcagcttctggattttttaaaaatttaggactaaggaagggctttytaagtaagtcacaacacttaaaaaatataagagaaatgcaccatttgacttcataaaaattagaaattaatacaaacataatcaaaacatcataatcaaagccaaaagaaaaatgacaaactgggggaagtatttgcaaaagtgattttccataataaagagctcttataaagcaacaagaaaacaaatttccactcaacctcattcataagaactgtacattaaaacaataaaataacattgttatgcatctgattgccaaagatt

SEQ ID NO: 378918 - DNA, 650 bp, Homo sapiens
agtatttctgtttcctcaggctggcattcagtcttcgacaccatcctgttctttgggaggtgatcttttgttggagagctccccagtgtctgttgttatgtttgagactgacttgttccagactagtgggctgggaagacaagactgcactaagtgatacaacatgaacagaatgcttgtaacattttcccatcttttttctccctcctctccaccgagatttcagaaaactccttcctcttgtttcttccccctatattctcatccatmtataaaagctcaggagtactgaacttggaattgtagtcacagggaaggaagtgtcaaccaagtcgcaacgactgcatgagttctcactcttcttcatccacctttccactccatttcctcctaacctttccatctggactcaattttcatgatttaaagcatatattctattttactcattcatgtcactttcttccccatagacacatcatagatggatggctcacttactggcatcagtaggaatttttccattcagaacacagatctctgtttttctgggaagagaaagtcaaaaatttagcagctaaataacatggatgctgtggttgcatcatgttcagcaattatggcaccacagccctgctccctaattaagc

SEQ ID NO: 378919 - DNA, 638 bp, Homo sapiens
tcagtaggaatttttccattcagaacacagatctctgtttttctgggaagagaaagtcaaaaatttagcrgctaaataacatggatgctgtggttgcatcatgttcagcaattatggcaccacagccctgctccctaattaagccaacaactagtactctatttggggccctaatttctttcctttctcacggtgtcaaaaaaaatgtcctccaacagctccttttgaaccgaaaattattatgctttcgtctcaaagccaaagacaaatttattttggaaagtttgaatcaaattttctgagttactcatgaagagaaaggtcatgaaaatgcaatatttttaaatttggttttttaaaaaagtttctcagcttttggaattcactccattcaaaaatcacttctttaaaaaaataaacttgaattttttatgccctaggattcccataacaaaatagttggaagctgttcttgaaagaatacttaaaatgctaaagtgcatgagcagcctctctggttatgtatcagttaattcactaattcataatactaattggtcatgtgttattaatagttatgcatattcttggctagcaatacagataatacaaatgggggcaattccacagtaatgcat

SEQ ID NO: 378920 - DNA, 531 bp, Homo sapiens
tggctaaacgtactaactctactttcatggtatttgatgcctttatctctcacccttcttcactggtatgtctactgcacgggttcagaatcccagtaaacagttgagaatggaactcatgggcataaggtcatttgatatgtctggatacacaggcctgaagcctgattccaacctsaagtcatgactaagcgatgggtggtggagtcactatcaaagaatctccacagtggcaatgatgagccagaggatcctaagaacctctgaaatgagtcagttttaaggaatgtctggttgagaaatctcatttttcctgggagctgtcttacatggcctcgtcgtctaagaggatccacatggtctgagaccctttgccagggtagaatggggtaatttctgaaatcactggggaataggaatgatatgttagataaactgaagggaacactgaggacaaggagcttttgttctaccttctgtttcagatctagcacggatggagccctgaagtttctgaggctccccaaagga

SEQ ID NO: 378921 - DNA, 606 bp, Homo sapiens
ttctagttagtcaaatgattttagaagaatttgaataagagtaaaaatcacagattgattgcagaaccagcacatcacttgattgcttctctccatttatattttccagctcacacctgaattccatatggttttcacggccatttaataaaatttgaaaaattgctttctctctcctcccctctcccccaaagagaaaactayccaaagagaaaaatcagtagccctatgtaccattcatccattcatttcatcttttgttgattttataggaaagaagctatatgagtgcttagctttaactttataattaaaattcagaatatggtacaattatctctgtgttgtgttaatgcacatgtctgtggtttttcaggtaatcgatcatttaaatttgacaaccgtgatcaattccaaaaatatttgtactctccatttccctacttatttcccatattcctctgtccctgaaaaacagtctgttgttataaaggagaacccatatgagcatttggaaccctcctaccctgagggtgatggggaagtctgtactttcatttttattttacttttttgtactttgcactttacagtgtgattcaaagt

SEQ ID NO: 378922 - DNA, 504 bp, Homo sapiens
tttaaaccaaaatttaggtaaatataaatggagagggaggagagcaataagtccagactcccacagaacatttggtgcatgtcattctcctgatctcaacattttttcccccagtgctttctattcaggcctgttgctccaggatttggggtccagtcccagtttctcttatgatgcccaagagtcatgcatgccccagtcagacatgcattctcattgagtctgcatgaagccttgcacatcctatgtgagaccactctcatgcctcttgcttttcagtaatgcactttcttctcatttcccattctttacatgctctctccttttgggcctaatataaagcttccattcttggtgcaatcatgcctgcagtactgcatggtgtggctgtactctctttccatatcttacagcacctatggtctctaccatyaatttggaatacaccacgcttaccctggcattgtgatctatcttgtaatatgtctatttttctctccaatg

SEQ ID NO: 378923 - DNA, 441 bp, Homo sapiens
ctgaggttgtccctctcagtggaacatttaataatttctttaacagtttgatgatctccactcaatgtcctaaaagagatatcaaggaaactccggatgaggataagggatgggaaatagcattgaacccatgttttttggcatttcattctccctgacaaccctgcaaggtggatggaattatcttcattgtatgcatgaaaaatcaaaaattcagttgtyaaattaattgtccaaggtacacagagacaattcaagcctctctgttttttatgtctgttgtcctatgctatcactattgcaataagaaagcctgcactgttctgataactgggtcaatgtctcgtcaaaactcctcatttcgttccaacaggaacattgccagcactttcccccatgtgtggtgctgtggcatttctacagatttgggaagtgggagtg

SEQ ID NO: 378924 - DNA, 566 bp, Homo sapiens
aaatggacacatgaggacagaccttcatgctttcatttgaaaacatttatttatcacaccttatatgtcactaatatggtttggctatatccccgccccgccaccaaaatctcatcttgaattcccatgtgtgtgggagggacctggtgggaggtaactgaatcatgggggcaggtctttcccttgctgttctcgtgatagtgaataagtctcgcaacatctgacggttttaaaaacaggagttctgctgcacaagttctstctctctgcctgctgccatccatgtaagatgtgacttgctcctccttgccttccaccatgattgtgaggcctcctcagccatgtggaactgtaagtctattaaacctgtttcttttgtaaattgctcagtcccatggtaattcttttgtaaattgcccagtctttatcagcagcatgaaaacggattaatacagtcatgtactgagctacaaggataaataagacacaacctggttttctgagggcttacaactggtagggaagagagagatctaagtaaataaaatctatcaatcagtaagatc

SEQ ID NO: 378925 - DNA, 538 bp, Homo sapiens
cttcaccacttctaccccccgccccccacaaatccaactggctatgaattggatatcagtgtaggcagagacacatcataaaatatttttggattgtgtggtgctatttggtatatattgcctatcttgttaggattgggtaacagtccaaacaggaagactcagggaaaggtggggagtaatggtataggattaaactgggggtaagttaggactcaggactcacttcccgccttgcttcctgccatggtcaggactcagggcagcagaaaccaacaaagtccaacagagagaagccaacttagaaactggacaaggtattcttcaggcatgaaatatctcctacttttgggacacagataattaagaacccagcctcaggtctttcaagttcttacttttctgtcaccaaatcccaaagtcaaagcaatttctccctatacttcacagatgctgtccaaggttgcatcaaagtcaacaagaaaygtgttctctgtcttctgacagtgaccattgtgagatagcaggatgttctcat

SEQ ID NO: 378926 - DNA, 599 bp, Homo sapiens
agatgccttttagcttttagcaatgtgtgtgtgtgtgttcatgtgtgtaagtaaattcatcttggtatagatatagaattgtgaatacaaggtatttgggtcaccacagacaactctctgttcactactcatactgcaacaggcattgctaaaatgattactgccctttcgcctgtggagcctgaacatagcttcagaatcctacttaacacagtgctccagagagccatacaaactgagcagagttggctcactttgacatcttttaagaaaagagactagttagcaatgaaaggcaagagattttgggtctcatctcaactatatttttagaaactaagtcacttacactatctgtgtctcaggtttttctatacaaagtagggctaattatattttttgatcacttgccagagtgtgggtaaaatgagaacaaaagagttaatgagyttctgataagctaaacatgctgaacaattgtaatgtattatttttatggtataggcacatgaacataaaaatatgagaaataaaacagcagaagcgacaaaatgaagactatcctaaaataaagagccaagctgaatgtttcccagaat

SEQ ID NO: 378927 - DNA, 456 bp, Homo sapiens
actgtaacactcaccgcgagggtccgtggcttcattcttgaagtcagtgagaccaagaacccaccaattccagacacaatattgcaaacaatgaggagcctctgaagaatttttaggagagaaagtaacatgatcagattctcacttgcatgctggcaatgatgtgctgggtgaattgtgagaataaaactggcgagagaagtgaggtagtgaaggatgcttgatttagggcacaggcagaagagatgaaaaggaagtggtggtggagggataataggagataaaattgaygggaggtggtgactgaagattagagggcaggaacaatgtgagcaataggaggacaagatggtttttgaggtttctaattggaaaagagagtgtggtggtattaaacactgagataggaaacacagaaaagattttaaacaaagatcgtgagtacagatgtgtaca

SEQ ID NO: 378928 - DNA, 594 bp, Homo sapiens
tttttaggagagaaagtaacatgatcagattctcacttgcatgctggcaatgatgtgctgggtgaattgtgagaataaaactggcgagagaagtgaggtagtgaaggatgcttgatttagggcacaggcagaagagatgaaaaggaagtggtggtggagggataataggagataaaattgacgggaggtggtgactgaagattagagggcaggaacaatgtgagcaataggaggacaagatggtttttgaggtttctaattggaaaagagagtgtggtggtattaaacactgagataggaaacacagaaaagattttaaacaaagatcgtgagtacagatgtgtacacaatgactttgaggaacttatcagttgtagctatagtccakacctcataagagaggtttggagaaatacctgggaatcacaaagagggcaataaaagctgtcgacattaatagtgtcactgttaagaacacaggctctgctgtcaaaagactcagattggagttgcttctctcattgaccttgtgcaagttttctaaatctgaaacgtgctgttaataatatctcttataaaccactaaagaattaa

SEQ ID NO: 378929 - DNA, 594 bp, Homo sapiens
tttttaggagagaaagtaacatgatcagattctcacttgcatgctggcaatgatgtgctgggtgaattgtgagaataaaactggcgagagaagtgaggtagtgaaggatgcttgatttagggcacaggcagaagagatgaaaaggaagtggtggtggagggataataggagataaaattgacgggaggtggtgactgaagattagagggcaggaacaatgtgagcaataggaggacaagatggtttttgaggtttctaattggaaaagagagtgtggtggtattaaacactgagataggaaacacagaaaagattttaaacaaagatcgtgagtacagatgtgtacacaatgactttgaggaacttatcagttgtagctatagtccatacctcakaagagaggtttggagaaatacctgggaatcacaaagagggcaataaaagctgtcgacattaatagtgtcactgttaagaacacaggctctgctgtcaaaagactcagattggagttgcttctctcattgaccttgtgcaagttttctaaatctgaaacgtgctgttaataatatctcttataaaccactaaagaattaa

SEQ ID NO: 378930 - DNA, 594 bp, Homo sapiens
tttttaggagagaaagtaacatgatcagattctcacttgcatgctggcaatgatgtgctgggtgaattgtgagaataaaactggcgagagaagtgaggtagtgaaggatgcttgatttagggcacaggcagaagagatgaaaaggaagtggtggtggagggataataggagataaaattgacgggaggtggtgactgaagattagagggcaggaacaatgtgagcaataggaggacaagatggtttttgaggtttctaattggaaaagagagtgtggtggtattaaacactgagataggaaacacagaaaagattttaaacaaagatcgtgagtacagatgtgtacacaatgactttgaggaacttatcagttgtagctatagtccatacctcataagagaggtttggagaaatacctgggaatcacaaagagggcaataaaagctgtcgacattaatagtgtcactgttaagaacacaggctctgctgtcaaaagactcagattggagttgcytctctcattgaccttgtgcaagttttctaaatctgaaacgtgctgttaataatatctcttataaaccactaaagaattaa

SEQ ID NO: 378931 - DNA, 616 bp, Homo sapiens
gatagacaccatattgattgatggtagagagcttgcaaagaagaaaatgtccaattcacatttagttatgtgacaaaaatgtcacattaaatattagatgtcacccccaatattaaaatattggggatggaaacaagctcacattgcttgatgagtgaaagagaaaggaaagtagacaatgagtatagattactgtttttagaaggttgtctgtgaagaggaaagatacraattagtaacagtcagggtatttacttatttaaattgattattttaatgaaaatagtttttaatttgagagatatctgaacatatttatacattgaccagaaagagccaatggagaaaacaaaacgatgtatataggcaagaagggactcagaatcactgatggagcaaaaggaaacaaggaaatgtagagcgcagcaaagcagaaggccttaggaagagcaaagtgcttcgctcagtgagtacagagatgccagacctaatgggtgcttgagttacctttattgccacttgaagaattcctaggctatcaaagaattactgaattccacgttgagagagtgctaactacattaggatacagaacactatgaccatctgggaaata

SEQ ID NO: 378932 - DNA, 601 bp, Homo sapiens
tggggtgttgtatggacttgcattaaaacaggaaattgagacaggggaacacgttttccttctgtgtgtcagaacattataatgtgcatgcatatagataccatcattatgtgggaactgagtcaacataccaagtcagccctgatgcttgttatagctttcctctttcatcagttcaaagctccagtccaacagaacatataataaacacacaatagcttcagtatgaagaggatcaagatgaaagaaaagtgccaatattctatcttcctaaaaggaaatttgaatgtgagaaagcgaatatgtaatttaattttwaaactgattctaagtaaagatattgagaggaatgactccctaaactaggaatgaggaacttattctaatgtgaccatcgactctaagttgtttgcatgttcaatgtgtttccttctctattaaaaaacaaaacaaaaaaatcaatgaatactactaacttccagccacagggaactgagaatcatgactgatgtaacaactatcaagtaccatgcaatccagttttgaatataaatggcaaatattagatcaataattccatgaaaccacagtcaccaattac

SEQ ID NO: 378933 - DNA, 412 bp, Homo sapiens
tgctggccagtctcccccagtccattgggatgccagcctaytttttgtcctggttattttcactttagtttccaacgctcctggatactaagcttgcttgcatatgcttccagagttgctttctaagaccaagtgaagccttgacttagtgtttttgcaatcacttcatgctaaaaactattattcccccaaatccctaaaatatgacacacatttcttttctcagactaggcccctggacacctgagctcactcaggaggaaaaaaaaaaaatcactttatcctctggacttgaattaggttgctgggtcatctcaagtggaggtcattcctttctattgctgttgtcacaagccctgctcctgctaccattaggttgtgtgcagtttcttatgtattgtgttttctctcc

SEQ ID NO: 378934 - DNA, 597 bp, Homo sapiens
catttatgtatattgatgtatataaaatatttatagaaccacccatgacctgtggaaatttaaaacaacttgctaagtacaaggagaaggaactagtgcataaattattctgtggctgactccacttaggtcgagaagtagctttttatccgtaggtcatgattcttgggaggtttacatgactgcactcagcatctaatctaatgggaaaatgttggtraaacaaaagggtaaggaggagattcatatttgtaattcttacctacaagactgataatggttcagtggtgaaaacaggctagttgaaagatttggtgactacaggctgttttatgcaggatggttcatatcaaattgctgcataatttatttctaaatatgagagtttaagtcactgatgtaggaaatacatatcctttaatcattttgtcaaagctaaatcatctgttctcttataattggaaaaagggaccattaaccatgaaattttggacatgcagaagtgtgtgtccaacatgctattgagagaaatgtaggtggaggtggcattttagacgaatatctatttcttgtggaagaactggcctgactaaatat

SEQ ID NO: 378935 - DNA, 597 bp, Homo sapiens
catttatgtatattgatgtatataaaatatttatagaaccacccatgacctgtggaaatttaaaacaacttgctaagtacaaggagaaggaactagtgcataaattattctgtggctgactccacttaggtcgagaagtagctttttatccgtaggtcatgattcttgggaggtttacatgactgcactcagcatctaatctaatgggaaaatgttggtgaaacaaaagggtaaggaggagattcatatttgtaattcttaccyacaagactgataatggttcagtggtgaaaacaggctagttgaaagatttggtgactacaggctgttttatgcaggatggttcatatcaaattgctgcataatttatttctaaatatgagagtttaagtcactgatgtaggaaatacatatcctttaatcattttgtcaaagctaaatcatctgttctcttataattggaaaaagggaccattaaccatgaaattttggacatgcagaagtgtgtgtccaacatgctattgagagaaatgtaggtggaggtggcattttagacgaatatctatttcttgtggaagaactggcctgactaaatat

SEQ ID NO: 378936 - DNA, 360 bp, Homo sapiens
cttttattataagaacacttaatatgaaatctaccctcttaaattttggagtgcttaatatattgttaaccatagacactatgttgtacaggagatctctcgaacttgtttatctagcgtaactaaactagcatatctcggacttatttatctagcataactgaaacgttacaacctttaaataacaatttctcatttctcccaccctcagccccttacaactattactgtgttctytgcttctacgagtttggctattttagatacctcgtaagtagaatcatgtagcatttgtccttctgtgactgccttagttcacacagaataatgtcccccaggttcatctggttgtcataaatg

SEQ ID NO: 378937 - DNA, 533 bp, Homo sapiens
catatggtttggaaatatttctactattstgtaggttatctcttcatactgctgtttcttttgctgtgcaacagcttttcagtttgatgcatcccatttgtccatgtttctttttgttgcctgtccttttggtgtcatgtctaaggaataattgccaagaccagtgtcaagaagcattctccctatgttttcttctaggagttttacagtattcggtctaatgttaaataagtctttagtccagtttgaattgacttttgtgtgtggtataagatagggatccaatttcatttctgggcctacagatatctagttttcccaactccatctcttgaagagactatcctttctctgttgtgttcttggcactcttgtcaaacatcagttgatcatatatgtgtaggtttacttctggactctctattctgttcctgtgacttgtatatcttcctttataccagaaacatagtgttttaattattgtagaattgtaatatatatttaaatgaggaaatatgaagcctccagttttg

SEQ ID NO: 378938 - DNA, 632 bp, Homo sapiens
atctgtagtccatatattttaaaatgtagctagcagacaggacattaraacaattgttatatctgtagtccatatatttcaaaatgtagctaaagcaaagactggacatatatttaaaaaacacgcaaatcaaacttctaaaaatgaaaactacaatgtctgaaatgaaaaatacagtggacggtttttatggcagattagatattgtagacaaaatatttgtgaatttaaaggcatagcaacaactgctatccgaaagaaacacagaaaaggaaaaagcaaggaggaggaggaagacgaggaggacagggaggaaaaaatgctatacagcagtgaggtatgggacaacttcaagcagtctaatatatctgaaacgcagggccagggaaagagaagtagatacttgaaaaaatcatgtctgaagtttccaaacttgatgtaaacttagttaaaacccagcaagataaagaataagaaaactgcacaaaggcacatcataatcagatcccttcaaactagtaataaagcgaaaaatcagaaaagcagtcagagaaaaaaagatacattatgtacagaaaattaaagaaaaaaacaacagcagatttcctgtcagaaataatgcaaaccagaag

SEQ ID NO: 378939 - DNA, 496 bp, Homo sapiens
agaaaataaattgctcaataaatggtgttgggacaactagccatttataaaaataaaaagctggatttctattacattccttttccaaattcacttccagaaagattaaagatttaaatgttcaaaataaaaccataaaaataccagaaaaatgtgagcaaatatttttgcaattctgagctagggaacttgatatgataatagaaagattattccacttaactacaaaaaatgttaaacctgtacaatgaccaaaaccaagtacttgtcaaaagataaatgacaaaccacaaaaaatactacagtatagaattattatctttaacatataaagtgctcctccaagtcactaagacaaaaacaaataayccaatagaaaattggtctaaggacaagaagaggcaattcacagaagaaatataaatggtcaactgatatgaaaagatattcaatttcaccaaaaactatgaattgaacaataagatgttttcaccag

SEQ ID NO: 378940 - DNA, 567 bp, Homo sapiens
ttttctcagtaagaggaggccccagaactgtgactccatctggtaaagatttgggagattcaaattgaaagtcataaggcagaataaagctcttaattgacaggtagttgaacgaggccagcactttggcaatagcaaattctgaagatcatgtaagcaatattatttgttacaggcacattcaatcggaggcagtctcatactatgtttagaaacacatgctgtttttagtcaggacaggactccttgtctgaggcatctgaggaggtttctaagaaagacacaataaaataaaacaggcaaacaattgaagcaaaggaaagaaggaaggggaaaagggcagttgggaaggaaaaagaggaaggacgaaaaagcaaccaagaaagacaaaggtcggcaggagtcaaatgaagacaacacagaacactggcaaatatratcaacttcaacttgggcattccctgttctgttgcagccgccctccttgaaataccttcttcacttagcttccagaacatcacatccctgttttatccccaacctcactagatgttccttctcagtctt

SEQ ID NO: 378941 - DNA, 563 bp, Homo sapiens
gcttgaccgcaaccacccagctaagctgctcctaaattcctgattcacagaaacaaggaaataataaacatgtattgttattttaagccactagtttctgaagtaatttcttatgtagtaataaataactaatacaataatcacataacaataattactgaaaacatttattgatgcttaaaatgtgttaggaaatgtgttaatcacttttaaatatagcctcatttgttattactatgataacttcattttttacttgagaaacccgacactaaaggggktaatttgcccaataccacacagctaaatggcagagctgaaattccaaatccaggcaatttgtgacttcaaatctagcattcttactccccctattacactgtttcccaataaagtgaacacttaagcaatgaagtagtagcattagtaatggctgacttgtataaagcagttaagcacttatctagataaggattgagacaaacttgaaagcagtattaccaccctggaaggcagattatagtatctcctttctaaagtgagtttaagattgtaagtgattt

SEQ ID NO: 378942 - DNA, 553 bp, Homo sapiens
tcatcaataagacataaacacacccaataaaaaatctgacaaaggacctggacgtctcaccaaagaagatatacaratggcaaatagtcatatgaaaagatggtcaacatcatatggcattagggaattgcaaaagcaatgagatatgatagcaaaactattaaaataactaaaaatccaaaacactggtaaaactaaatgctggtgtgaatgtggtgcaacagaaacagggagccagtctataaaggctacatactgtatgattccaactatatgacatgctggaaaaggcaacactatagaaaatgtaaaaaaaaaaaaaaaaaaaaaaatcagtgagtgataggatttcagcagggaggggcgggaggaataactgcagtgcagggtatctgtagggcagttaaactattctggtatgacactgtaacggtggacatgatgttatgtacttgtgaaaccaaaacccaatgatctgtacaatacaaagacttaaatctaacgtcaactatgaactttagttaataataatgtatcaatactggatcatcaa

SEQ ID NO: 378943 - DNA, 553 bp, Homo sapiens
tcatcaataagacataaacacacccaataaaaaatctgacaaaggacctggacgtctcaccaaagaagatatacaaatggcaaatagtcatatgaaaagatggtcaacatcatatggcattagggaattgcaaaagcaatgagatatgatagcaaaactattaaaataactaaaaatccaaaacactggtaaaactaaatgctggtgtgaatgtggtgcaacagaaacagggagccagtctataaaggctacatactgtatgattccaactatatgacatgctggaaaaggcaacactatagaaaatgtaaaaaaaaaaaaaaaaaaaaaaatcagtgagtgataggatttcagcagggaggggcgggaggaataactgcagtgcagggtatctgtagggcagttaaactattctggtatgacaytgtaacggtggacatgatgttatgtacttgtgaaaccaaaacccaatgatctgtacaatacaaagacttaaatctaacgtcaactatgaactttagttaataataatgtatcaatactggatcatcaa

SEQ ID NO: 378944 - DNA, 487 bp, Homo sapiens
tctaggtttgttaaatatgtaattcagaggcaactccaggcttatatttctacgactgctttctaaatctaattattttataaatagtcctgttgctttaattcactttttaccctaacataattaatcaagtttaactttgaaatctccatattttatgtgagaactcccaaggctatccacttttattttcctttgtaaatttattgttgctcagcctatttcattaatggcagctttaattataatattttattatattttcaaagtgcatgataatggtttaycagtctggttagtacatcagagatttctattgggagctatcagagatgttaacatccaacaattttaccaaagtgtaattgttatagacgtcttaacatgaatttacgcaacaaaaatatgtttaatgtggagaacagtgagatgcatatttgataattcactgcagtctgcatcatcatctctatattccaaaatttcg

SEQ ID NO: 378945 - DNA, 487 bp, Homo sapiens
tctaggtttgttaaatatgtaattcagaggcaactccaggcttatatttctacgactgctttctaaatctaattattttataaatagtcctgttgctttaattcactttttaccctaacataattaatcaagtttaactttgaaatctccatattttatgtgagaactcccaaggctatccacttttattttcctttgtaaatttattgttgctcagcctatttcattaatggcagctttaattataatattttattatattttcaaagtgcatgataatggtttaccagtctggttagtacatcagagatttctattgggagctatcagagatgttaacatccaacaattttaccaaagtgtaattgttayagacgtcttaacatgaatttacgcaacaaaaatatgtttaatgtggagaacagtgagatgcatatttgataattcactgcagtctgcatcatcatctctatattccaaaatttcg

SEQ ID NO: 378946 - DNA, 436 bp, Homo sapiens
tggaactgtaagtccagttaaacctctttttttgtaaattgcccagtttcgtgtatgtcttcatcagcagtgtgaaataaactaatacacatgcttagcactttttctttttttgtttgtttttttgagacagagtcttgctctgtcatccaggctggagtgcagtggcatgatcatggttcactgcagtctcagactcytatgctcaagcaaacctcctgcctcaacctctagagtagctgggactacaagtatgcatcacaatgcccaactaatttacatttttttttgagacaggtcttattatgctgcctaggcttatctgaaactcctgggtttaagccatcctcctgccctggcttccagaagtgctgagattacaggcctgagccaccacacccagcagcatcttttcttaaaagctcctattttattt

SEQ ID NO: 378947 - DNA, 618 bp, Homo sapiens
ccttcctcacgtttaaaaatgggattaaatgggatactatttagccacaaaaaaagaacaaaatcatgtcctttgcagcaacatggatacagctggaagtcattgtcccaaaaaattaatgcagcaacagaaaatcaaatatcgtatgttgtaacttatagatgggagctaaacactgggtatttgaggacatgaagatggcaacagtagacactggggactactagagggaagtgagtaggagagatgaggacaagggttgagaaactaactattggatactatgctcagtacctgggtggcaggatcaatcacatctcaaacctcagcctcatgtaatatacccaggtaacaaacccacacatgtaccccctgaatctaaaataaaagttgaaattattaaaaataaaacaaaaatgtagtaaataaaaattcctgagataatccaattatacattttctaaacccattttagatctaagaatgcacataggttgaaagtgaaaggatgtaaaaggatatttcatgcaaatagtaaacaaaagagagcagaggtggctatactaatatcagamaaatagagtttaagtccaaatcatttaagacaaaaaaagacat

SEQ ID NO: 378948 - DNA, 620 bp, Homo sapiens
ctactctgcccactatgtctcaaatactgtaccaggcactaggaataccatggtggataacacagatgyaagtcctgctctcacaaagattgtagtttaagtggagttacagaaaatcaattgcaatgcaatatggtaactggttgcatttcaaagcgtatttattgagttattttcagatacaacacctttgcattagttgtgtagtcacccaccatagggcctgggctgtacatagctgtgattctccctcagaggctgtaattgagcttctctgcatcaaattttgtcacatcaataaccttttggatgctacctaaggcagatttaaaatgtgactgccaattatttggtgctcctgtgatcagggagtgaggtctctatctcttcccattgaatcaggtgggctggcagttttggccaatagagtatgatggaagtgatgctatgtgacctcaaagtcagctttcactttgctcactggaacctgcacacttggagccctaaagctagcatgtaagaaggtcaacttttctgagacttctaagctaacagggtcacatgtagatgtactggtcaacagtcccagctgggcccacctttcagtacttcagcccaaa

SEQ ID NO: 378949 - DNA, 620 bp, Homo sapiens
ctactctgcccactatgtctcaaatactgtaccaggcactaggaataccatggtggataacacagatgtaagtcctgctctcacaaagattgtagtttaagtggagttacagaaaatcaattgcaatgcaatatggtaactggttgcatttcaaagygtatttattgagttattttcagatacaacacctttgcattagttgtgtagtcacccaccatagggcctgggctgtacatagctgtgattctccctcagaggctgtaattgagcttctctgcatcaaattttgtcacatcaataaccttttggatgctacctaaggcagatttaaaatgtgactgccaattatttggtgctcctgtgatcagggagtgaggtctctatctcttcccattgaatcaggtgggctggcagttttggccaatagagtatgatggaagtgatgctatgtgacctcaaagtcagctttcactttgctcactggaacctgcacacttggagccctaaagctagcatgtaagaaggtcaacttttctgagacttctaagctaacagggtcacatgtagatgtactggtcaacagtcccagctgggcccacctttcagtacttcagcccaaa

SEQ ID NO: 378950 - DNA, 609 bp, Homo sapiens
ctccaagtttctaaattttaataattctaaccactgcactttgtttcctagactctggggatgatactttagttcatttttccttttctccaatatctagttataaattttttacatttaattccttctgttaaaaaatactggtgtcattttaatctattgactgatacacagactgtcaaagatgactcctctccagaattggtaatagttccatcatcacaagagttcacccttggcttccttggacttgccacatcatcataacaggagctttagacctgcactatacagtagaacctactatgataatgaaaatgttgccattggcactgcccaacatgatgacctatagcctcctgtggctgttaagaacaaaagtgtgactggtgtaagtgagaaactaaatttccagttttatttattaattttaattttatataattaatcttactttaaataactacatttcactrgtggctatggtattgaacagtacagctatataagcctattcttatctctctcatttactagaatttgttctatttttctattaattatgttgtggtctgtcttaccaactgtgaactctttgaggcatcactg

SEQ ID NO: 378951 - DNA, 527 bp, Homo sapiens
gttagctatccaagtatacaaatgggtgccaaaactcttcctagcatccactgtgccaacccagccagagtcatggcacaaagttactgagcccgaagttacaatatgatgtaaacatatcctacagcaccaagaaccagaacaagatgggtagtagaggagaacggtttaaaatgtatgagccaagtgctggcctatggaaagttcttccagtcaaaagagctatgaaattataaagtaaatcattcagctttcattgatgcctactcaaaatgaaagtgcttccaagccaggaaatataccaattaatatattcaacttccagaaaatcattattttttatcytgtttcttaaaggtagctctcaaaattaaattaggcctctcaccacaagccttgtgttcttccctgctgtacccaacaggggcacggatgtgctgaaagaatggtgctagacctgtggggacctaacatgcaggagaacaaggacacagagggaaacacgtggacagagacaagggccctta

SEQ ID NO: 378952 - DNA, 385 bp, Homo sapiens
gtccataggaataactgagtagatgttggttagtagatgaagtactttatgttatattttgggccgtgaaaatcaaaatgaattttcttataaaagacagaaaccagaaaactaatctgagttgttctattacaatttactcttttttcaaggatgaagcaaatgaagtgaagaccttctgtgctgtatctatgactccttgacacttttctggtattcaacagaacacttaaaagcagttggcaatataagaraaaaatgtgtaggtgattctgttgcatttatttttatccatcatctttaatgaatggtttcttattttcttacatgtaatatcaaactcacagcataaaaattcctagggataaattagtcgagcatgacc

SEQ ID NO: 378953 - DNA, 430 bp, Homo sapiens
gagagaataaattttcaatgtcctatataagtatggtgaacatttagtggcatttgtcctgtttggctccctcgcaaccaaacacccttattactagagaaarccttccccaggtgattcccgatgctccctaaaggcatccttacctccacttttaaagccacaagacattctttcttcttcccactggcacacagagtaaaggaatgtggcaggtccacccaaaaactccaacccagggcttgcctcctgagtgtcagacacaggactgacacagacagctagaaaattattctcagcagtagtggcaggttggaaggtatagctatgttgaggatccaatcacagaaagattaactaacaacacacagcagtattaagtgccaaggagccactctaggcaatcaacagtgggaattcttaaacagaa

SEQ ID NO: 378954 - DNA, 384 bp, Homo sapiens
gtgttccaagacctaaactagtttgtccagttggtgagcactgtggtggtggcttcctggtacagcactaagagctcaagctctagagttaaatcaggttcaaaatctagctgtaccacttgtctggctggcaaacttattgaacctttgtaatcacccatttcctcatataaaataatcttgcattctttggaatgtatctggctacaagtaactgagcacctgattggaagtrgcttaaagagtaaggacataagtgcattatctcaacacaaggcttgacaacaagcctgggtggaggtggttccagagttggtttagcaaaactaggttcttgttttcctcagagatgactgtcagagaaagatgtaaaaagacaggaag

SEQ ID NO: 378955 - DNA, 514 bp, Homo sapiens
acctgattggaagtggcttaaagagtaaggacataagtgcattatctcaacacaaggcttgacaacaagcctgggtggaggtggttccagagttggtttagcaaaactaggttcttgttttcctcagagatgactgtcagagaaagatgtaaaaagacaggaagcatagagggggacttttccttttccatctgtttttttttttgtaaggcaggaaaacctttctaaaagatcccccagcaaaaatgtcctctgrttccatgggccaggcctgggttccacgtttatgcttcagttacaaagaatgctgggaaatgtagaatatgtcatttgcagcctttgtcaagtggaggtcaaccctgcccacaaggaaaggggaaggaagtagattttgagcaggcaatcaacggtgtctctgccaaaaaaatctagctcagaggatgatgaaagtcaaatgaatatatatttatttatttggctgaagttaatttatagcagttattatatgccaggc

SEQ ID NO: 378956 - DNA, 555 bp, Homo sapiens
gtccttgaaaggatcagatggattttaagtattccctttaggactagtgttccattattggaatgctaagcatgtgggaattatttacattctactgctcaaggtcatcaccaaggtttgattgtaaaaattcaaaaaattgcaatctcaggcataaatgggttaactaggtgccacaataaatccaacacgttttttaaaaatacaacaaaacccaggatccagcaaagtaaaactcacaatgtccatcacctaatcaaaaattaccagagatgyaaggaagcaggaaaatatgaccatatccaggagaaaagtcagtcgctagtaacagagcaagaaatgacagagatgatgtaatcaagggacaaacatgttaaaataggtattgtaagtatgctccaaatgtttaggaaggtagaagaaaatatgaatagaatgaggagagaaatagaaggtgtaaaaagaatcaaaggaacttcttgagatgaaagctaagtatctgaaaattttaaataatacactagattggaaaattactgaagaaattatcagtaa

SEQ ID NO: 378957 - DNA, 544 bp, Homo sapiens
ataataaaatgtattgatataggaccttaccatccaccccgtagaactttgaaaatactttaaaagcatgttttttccaagaacaatttacagggtggatattcaactaaagacttgtgtacttaagacacaaaatgttactgagacaaattctagtaattattttataccagaagtatttaatattatcttccactgtatagagtaaaaactactatgttccactaagtttcatcaaagttcctaagaaatgttaggaagaacagcagcataatcccccaaggcctcaggactgccttttcattcaagtatctcctagaaatttccactgaagtaaaatgactgctttgccccagaaagacaaagtagagccttataaatgagcaaacccttatgtacttaagctctggctagattatgtaacaagagatattacaagacaagcaagactygttgggattctgaatcaaatgtaatgaaagtggtgtagtgtttactgccaggtttagttctcttaaaacaccaaaattatatatggaggagg

SEQ ID NO: 378958 - DNA, 544 bp, Homo sapiens
ataataaaatgtattgatataggaccttaccatccaccccgtagaactttgaaaatactttaaaagcatgttttttccaagaacaatttacagggtggatattcaactaaagacttgtgtacttaagacacaaaatgttactgagacaaattctagtaattattttataccagaagtatttaatattatcttccactgtatagagtaaaaactactatgttccactaagtttcatcaaagttcctaagaaatgttaggaagaacagcagcataatcccccaaggcctcaggactgccttttcattcaagtatctcctagaaatttccactgaagtaaaatgactgctttgccccagaaagacaaagtagagccttataaatgagcaaacccttatgtacttaagctctggctagattatgtaacaagagatattacaagacaagcaagactcgttgggattctgaatcaaatgtaatgaaagtggygtagtgtttactgccaggtttagttctcttaaaacaccaaaattatatatggaggagg

SEQ ID NO: 378959 - DNA, 577 bp, Homo sapiens
ccagacatcaaatctgctggtgccttaaccttggacttctcagcctccagaactgtaagtaataaatttctgttatttataaattacccagtctaaggtattttgtgatagcagccaaactgactagtgcatagtataaaaggactgggtttttgctttcaatggtcaaggactgccaagactaatcctgatggagtgataagaaagarggcagcatcttcaaattgggtcccttgaggtctaggtcccacagaggtgactcaggtgccaaggaagatgagcagagggctttgctgaagcatgctaggtcccccactcccttttcaaccacagcagctctgtgtttagccctttctatttattatgattctgccaaatatttggtttggggggggaaaaagtttcagcagtttaaaagaaacggagaattaaaaaccatctaaacagtagaaggatcagatagaaaaatctagatttgaacaccaacattgccacctactaactatgtgaccttgggaaaataatcaacctccatgacctctggactcttcagttataagttactaccacatacctt

SEQ ID NO: 378960 - DNA, 538 bp, Homo sapiens
tatgggtaatgttcctgtaactaacactgtagatgtttataatcttttctatagtctttttgtggctgaccatgtatagctgatgggctgctcatcagtcctggcagattttcccatttaaccatgcagggaagaaggaagaggatttctctatccccgagggttaagctctgcaaaactgatgatcatccaagaacaccaatgaaacaaagtcaaaatggccaagcacagaaagtgaataactcatcacttgaattgaggattattaaaattgaccacactctccattgcaaaacattgtaatagggtggatgttaaagaatgtttcctattatataccaagttctaatttaaaaaatacacacatatatagtaggctaagtagatttgcaggtacatgttgccagagtcttggagtgaatacagtggaatgaakaaaaatctgggctatggatactctcattttacagaacacctttaagcttcgtagcttaccaagtaaatattaaaattcctaaataagagatgtggaatcatt

SEQ ID NO: 378961 - DNA, 548 bp, Homo sapiens
tcatgtcccagaaagggtctcccaagcccattattgggtctggcctgagagtgaggtctaatcctgagagtggtcagcctagctttgcaattcaccaagaaccacaggggaccagtaaatatcaaaggtatcagtgtgggacaggtaccagccctaagggatggatcagctatttttgaaatccccattgcaaaattataactgagacrgtgaaagagatctgacctacccaactccttcttgcttctaacctccaagctgtctttgtttattccttggagtaggctaaactaacttcgggaagaatttagtttatagtttaaaacaaagacaataacagcactttcccaaaacaaactccttcttacctggggactagactgcctttgtaggattaacaaattagccataagattagaaattatagtttaggagtcttgcagctggaggctacaagattcttatcctccctaaactgcttctaggatcagtagttgagatattttgcagaccctgcacttgatggatcagttggcaccacccagatc

SEQ ID NO: 378962 - DNA, 594 bp, Homo sapiens
tgcctggcactgtggacttctcatatgtacctgaatgaatgaatgaatgaatgaatgaatgtctttaggcaagtccctcaacttctttgagcctcagtttctgcacctataaaataaggactaatggcatctcgttgcaggctaactctgaagatgaatcaaaagcagctgttacagtgcctgtcatgaagtgcttggtaagcagtcacagttattattgtcttgtaattgttayttattaagttataaaaaactgaggagatactggcttttcatctcttcagttggctggaggctattatcagtgatctttctaagccacacatctagctgtcttccctggctctgacagacctcagtaatctggtcccaactttcttttccatctacatctcctatgactcctcacccccaattccagttgtaccaaactacagaccatcacccactgggcctttattcactcaacctcagctcagctcaccgctttcccattctcaggttcctgctcactcttcaaggcccatctttaatgtcatctcctctgccaggccccactaggctcccacagcacagctcacaccagccttccac

SEQ ID NO: 378963 - DNA, 600 bp, Homo sapiens
actagtgttaccctgctgactggcttggggtgggcttgtcaaccatgctgtccatttgaagtaccctctctgccaaccaaagtatttggttcaagaatgggcagacagggccatcagcgtcttccctggaaatgtrtggccactgctggcatactaaaaatgggatatgaacctgggggtactggtggaccatcttgtctgtcatgtggagaggccctggattaagaatgaaaccaagatgagacaaactgagtggggaactgaggaaagggataaaggcctaactacacgggttgggctctgggattctgcatggttgggtttgccatttatcagcaaataaatgccctctttgactcagcaaatttaagttggatttttatgatataaaattgagaatgccctgctaaagcaagcagtcttcttgacatttttctgttttctttattagatgtaaaagccttcaggaattacttgcattcatttgtttatccatcaaacatcaaatctgcccccatatcaggcaatgtgctaggcactgcagctccaaagatgaataataactcatgattcctagtctcaaaatactcacaaactagt

SEQ ID NO: 378964 - DNA, 546 bp, Homo sapiens
tcaaagttatcagaaacctgtattcaagagcacctgttagagtcatatagccaataataaaaccacctcttaagaggaccaacacaagacaacaattgtctgtggatgacaaaatgttttagggcagccatagtcaaagacacaattgacaagtaaattcrttacctctgtggcacacaataatttaacataacagttattactgataatgtacactaagtcatatcagaattataggagttttccataattttgtaacacataccaataatatatttaaacaaatacagcccaaagaaaaccaagcaacatttcatatttgacaatccttcctatagcatttatatgccaaataaataagccatatatgtcattttttggactttagggtacctattaataatatcttacaggattaattaggtcagaaaaagacagtttataatttgattttggaaagtttgtcaaatatcaaaggtttaaaacactttatagcacaaaataggattacaggtcttgtaaaataagtcattcatttaaccaaag

SEQ ID NO: 378965 - DNA, 546 bp, Homo sapiens
tcaaagttatcagaaacctgtattcaagagcacctgttagagtcatatagccaataataaaaccacctcttaagaggaccaacacaagacaacaattgtctgtggatgacaaaatgttttagggcagccatagtcaaagacacaattgacaagtaaattcgttacctctgtggcacacaataatttaacataacagttattactgataatgtacactaagtcatatcagaattataggagttttccataattttgtaacacataccaataatatatttaaacaaatacagcccaaagaaaaccaagcamcatttcatatttgacaatccttcctatagcatttatatgccaaataaataagccatatatgtcattttttggactttagggtacctattaataatatcttacaggattaattaggtcagaaaaagacagtttataatttgattttggaaagtttgtcaaatatcaaaggtttaaaacactttatagcacaaaataggattacaggtcttgtaaaataagtcattcatttaaccaaag

SEQ ID NO: 378966 - DNA, 546 bp, Homo sapiens
tcaaagttatcagaaacctgtattcaagagcacctgttagagtcatatagccaataataaaaccacctcttaagaggaccaacacaagacaacaattgtctgtggatgacaaaatgttttagggcagccatagtcaaagacacaattgacaagtaaattcgttacctctgtggcacacaataatttaacataacagttattactgataatgtacactaagtcatatcagaattataggagttttccataattttgtaacacataccaataatatatttaaacaaatacagcccaaagaaaaccaagcaacayttcatatttgacaatccttcctatagcatttatatgccaaataaataagccatatatgtcattttttggactttagggtacctattaataatatcttacaggattaattaggtcagaaaaagacagtttataatttgattttggaaagtttgtcaaatatcaaaggtttaaaacactttatagcacaaaataggattacaggtcttgtaaaataagtcattcatttaaccaaag

SEQ ID NO: 378967 - DNA, 503 bp, Homo sapiens
acaggtcttgtaaaataagtcattcatttaaccaaagtgataactcaaggatttttttaaaaaggcaaaaaccttccttctttgagagataagacttaattttccaaatgataagmcccaatgcaaacagcatgaagccaattaattttttcaaaattttataaacaattataaaatgttagccttgatcataagatgtagcttccataagccttttataacctttattaaggagttggttaatgcttcaagaaaaccttgttaatctgacacagaggcccatatgctagtcttgcatcagtatgtctttgacattaatggttaatttatagagaaactgaatttattttatctcttaaaaatcggcccttataatttcacactctcacctcttctgcaatacaccctgggccttgaggagttgaatggctttaatttctggtcctgtgtgtctcaggaatgcagtttattttgattgggatcttttggtttttttttttaga

SEQ ID NO: 378968 - DNA, 503 bp, Homo sapiens
acaggtcttgtaaaataagtcattcatttaaccaaagtgataactcaaggatttttttaaaaaggcaaaaaccttccttctttgagagataagacttaattttccaaatgataagacccaatgcaaacagcatgargccaattaattttttcaaaattttataaacaattataaaatgttagccttgatcataagatgtagcttccataagccttttataacctttattaaggagttggttaatgcttcaagaaaaccttgttaatctgacacagaggcccatatgctagtcttgcatcagtatgtctttgacattaatggttaatttatagagaaactgaatttattttatctcttaaaaatcggcccttataatttcacactctcacctcttctgcaatacaccctgggccttgaggagttgaatggctttaatttctggtcctgtgtgtctcaggaatgcagtttattttgattgggatcttttggtttttttttttaga

SEQ ID NO: 378969 - DNA, 406 bp, Homo sapiens
taattttccaaatgataagacccaatgcaaacagcatgaagccaattaattttttcaaaatkttataaacaattataaaatgttagccttgatcataagatgtagcttccataagccttttataacctttattaaggagttggttaatgcttcaagaaaaccttgttaatctgacacagaggcccatatgctagtcttgcatcagtatgtctttgacattaatggttaatttatagagaaactgaatttattttatctcttaaaaatcggcccttataatttcacactctcacctcttctgcaatacaccctgggccttgaggagttgaatggctttaatttctggtcctgtgtgtctcaggaatgcagtttattttgattgggatcttttggtttttttttttag

SEQ ID NO: 378970 - DNA, 503 bp, Homo sapiens
acaggtcttgtaaaataagtcattcatttaaccaaagtgataactcaaggatttttttaaaaaggcaaaaaccttccttctttgagagataagacttaattttccaaatgataagacccaatgcaaacagcatgaagccaattaattttttcaaaattttataaacaattataaaatgttagccttgatcataagatgtagcttccataagccttttataacctttattaaggagttggttaatgcttcaagaaaaccttgttaatctgacacagaggcccatatgctagtcttgcatcagtawgtctttgacattaatggttaatttatagagaaactgaatttattttatctcttaaaaatcggcccttataatttcacactctcacctcttctgcaatacaccctgggccttgaggagttgaatggctttaatttctggtcctgtgtgtctcaggaatgcagtttattttgattgggatcttttggtttttttttttaga

SEQ ID NO: 378971 - DNA, 570 bp, Homo sapiens
atacggccaccaccacaccaactttgtgtgtgtgtgtgtgtgtgtgtgtgtgtttgggggggggcagaatttagccactttagaggccttgttccccataatttgaaattttccttcagatttgatcaagtcagatagagttaatcagaaccagtgggaaaaagaccaaaacaacaagaaaaacagaaacaaacaacaacaacaaaacaagcaaaacaaatgatggcacaacatatatgataactgagcactctyatggtaaggagaatttatgacaaatttgttgttaatcttaactttagctaagacaaaccctaattcaattacttacctagggattggtctcagactgaagaccgctctctaccattctaggagcaggaaaaaatactaatctttcatgttggaagcaagctcaagctccataaaggagtaacctgccttccataatcatggaaacaggaaatcttgccttccttattggaagcaaataaaactccaagaaagaggagatgtacagcaaaacaaactttagatctctatcaaattttgggagatcagggattctat

SEQ ID NO: 378972 - DNA, 503 bp, Homo sapiens
caaaatccaaaagactttaaacagaaaaggggggaaatgtgaaatgaaaatattttggggtccccaaatcactaagttaaagggaaaaatcaagccgggaacttcttagggcagacctgcctcccattctattcaaagtcacccctctgctcactgagwtaaatacatacctgattgcctcctttggagaggttaatctgaaactccaaagaatgcaacaatttgactcttaactacctatgacctggaagtcccctccccacttcaaattatcctgccttttccagaccgaaccaatattaattttacatatgttgattgatgttttgtctttctaaagtgtatgaaaccaacctgtgctctgaccaccttaggcacatgtcatcaggacctcctgagtctgtgtcacaggtgcgcgtcctcagccttggcaaaataaactttctaaattaactgagacctgtcacatttctgtattttgatattgggggtagtttcatggg

SEQ ID NO: 378973 - DNA, 503 bp, Homo sapiens
caaaatccaaaagactttaaacagaaaaggggggaaatgtgaaatgaaaatattttggggtccccaaatcactaagttaaagggaaaaatcaagccgggaacttcttagggcagacctgcctcccattctattcaaagtcacccctctgctcactgagataaatacatacctgattgcctcctttggagaggttaatctgaaactccraagaatgcaacaatttgactcttaactacctatgacctggaagtcccctccccacttcaaattatcctgccttttccagaccgaaccaatattaattttacatatgttgattgatgttttgtctttctaaagtgtatgaaaccaacctgtgctctgaccaccttaggcacatgtcatcaggacctcctgagtctgtgtcacaggtgcgcgtcctcagccttggcaaaataaactttctaaattaactgagacctgtcacatttctgtattttgatattgggggtagtttcatggg

SEQ ID NO: 378974 - DNA, 513 bp, Homo sapiens
gcaacagtcaccatttctgtcagttaacacctgttagatatcagatgttatattatacaatattatcacagcccagtgaaaccaatgctgggaaagttgactgacctgggccgttatcagactggcaaagatgaagaagtttgataacattatgttgtcaggagtgcatggaagttactctcaaacattagtgtggtgattgtaaatgggtggaacctgcttggatggcatatgatgcaatctgtaaaaatatttaaatagcacataccttttgacccagaaattccacttctaataatttatcctacagataagatgggcacatagatgcagagatatatgtgtcactgttgtcatraagcacagtacagtcaattgtagcagcaaaagactggagatgcacctgtgtgttcactggtaaggaaccagttaaataaaatatcagtattcatgttttgggatattacaaaaatgttcaaaagaatgaggcaaatctatatgtgttgacattag

SEQ ID NO: 378975 - DNA, 591 bp, Homo sapiens
gtgtgaccaaggcctctgtgattttttaaaacttcccatgtgtttccagcgtgcatcaagattgataaccactgagctaatccacactgaggtgttagcagctgaagaccatttattagaattcctttacagcaggcacaacgcctgaagccaaagaactatgtgaaagagcagtgttggagacactagggacagctctttcaggaagacagttgggggaaatggactatttctggcatcactcaaattttactgtatctggctagtcctatttctagggatgctctgggggcttaggaggaagaacaggcaggcaaagtcattccatttgctccctccacccccttcaaaactctaacacagtggttctcagcatttggctccattagaatcacctggaggtgatcacggaactagattgcagggcccggtccccagtttctcattcagtagggtgaggtgagtcctaaaagtgcatttctaacaagtgcttctgaggcaggagaatagggtctataggcagggaacttagggcccattcrtgctgacttcctaaagctgaatcaagagaaaacaccaaggtctggggca

SEQ ID NO: 378976 - DNA, 622 bp, Homo sapiens
cattaagcaaacattctgattaatagaaagctgccatatgttctatacatgccttgttaatttagacagattccagaatcataaatcatacattttggagagttgaaagagatgttaggatttaagtcaacataccttctcagtgtctatatccygcagtcaccatccctgccttgtttatctgacattacttcatgggaatccatccccaaggctgtccattccacatcgggcagcccagagagttaaaaatgtcttccttccaatgagccaagatctttctctctgcagcctcctactttgacccctgggtctaatccatcttccagttaccttcaaatacttaaagacagtgttcctgtcttccccaagtcttcccatgagctctcagctctgtgattcctttcaccagttgagcatcagctccaactctctccagttttgtctatatccctctcaaagtatggtatccagaactgacctccatactccaagggatgttctgatcaagaaaaagaacaaagcaatcctcccaataatgaattgggatacagatgtatctgatgccacctgatatgtctttgtggatacagatgtgaagtccatttctgagtgcacgcat

SEQ ID NO: 378977 - DNA, 554 bp, Homo sapiens
attcataatatataaaaactgccacttttcaagtcagatcattttggaagaatgtcaaaagagaggggtaagacagagattaaaatcactttcaggatggctgtacattttcagggctttaaaggtttactgtgtggccagcctggaggctgtaatgtctcttgtgtgattgaggagctgagaggtgattaaaggacttaagccaaaagggctgcctcccagtgtgttcgaagaagaaaaataccattaatcataataatgatgtgtgtttatagaaggcctttcatctgtgcctctcaaagtgctttaaccaccattaattatacctcccagtgcacctctgaggtagataaaaattattatacccattttacaagtgaataaaggcctacagggygagtaggagtgaattatttggggtcacacataaaccagtggcaaaggaagcaattcctgtcccgggtcaggactgagattaccctattcttgggtgccctcctctctgaaggatcgggctttgagagagaaccaaagatgcttttgtgatgccacct

SEQ ID NO: 378978 - DNA, 512 bp, Homo sapiens
cctgtagtcctagaatctcttctgccactttgctgatgggtctttatcccttatgtcttgattttttttaatgagtctctaacaagaggtgtgtagtttatatgttcataaatcataatattttggctcaaataattcattaatttgttcatatattgtccctccctccctttgacagttttttagtattggctttttgctgtgtgcagagctgggtagcagagaggcaaaaagcagccccagaccttggggaggtcagaaatgagtgtggataacaggcagaataaataacagctgtaacacaatgtggtaggtgctataataaggctcatgtaccaggtaatggaatcataaayccaaaatcatagagccatctgtcatttatttaacaagtattaatatttagtaggtacctgttgaatgccaggcactatgctgggtgttgggaatacgatggtgaggcaagacagatcttaaagagctttcaagcctagcttatatgtcttgtaaat

SEQ ID NO: 378979 - DNA, 572 bp, Homo sapiens
tatgtactatgatagcacagtctatgacaaggacctgaactctttttatagtgtttctccccaatttctgttcatcaaagcagaatcacctctgccctcacccacttccccagcttgtaacctgcgaatccagaggcttctctctcgttgccttattccttcctaagagccaggtagcytacctgttactcattcagctacattctctcactaggtggggctgacttgaataaaattatttttgattaatagtgtattttaattaaagatacattttacttattttaattttaatttttaaattttttaaattttttgggatggagtgcagtggtatgatcttggctcactgcaacctccgcctactgggttcaagcaattctcctgcctcagcttcccgtgtagctgggattacaggcgcatgtcacaatgcctgactaatttttgaatttttagtagaaacagggtttcaccatgttggccaggctggtctggtacttctgacctcaagtgatcctcctgcctcagcctcccaaagtgctgggattacaggtgtgagccactgtgcctgg

SEQ ID NO: 378980 - DNA, 572 bp, Homo sapiens
tatgtactatgatagcacagtctatgacaaggacctgaactctttttatagtgtttctccccaatttctgttcatcaaagcagaatcacctctgccctcacccacttccccagcttgtaacctgcgaatccagaggcttctctctcgttgccttattccttcctaagagccaggtagcctacctgttactcattcagctacattctctcactaggtggggctgacttgaataaaattatttttgattaatagtgtattttaattaaagatacattttacttattttaattttaatttttaaattttttaaattttttgrgatggagtgcagtggtatgatcttggctcactgcaacctccgcctactgggttcaagcaattctcctgcctcagcttcccgtgtagctgggattacaggcgcatgtcacaatgcctgactaatttttgaatttttagtagaaacagggtttcaccatgttggccaggctggtctggtacttctgacctcaagtgatcctcctgcctcagcctcccaaagtgctgggattacaggtgtgagccactgtgcctgg

SEQ ID NO: 378981 - DNA, 572 bp, Homo sapiens
tatgtactatgatagcacagtctatgacaaggacctgaactctttttatagtgtttctccccaatttctgttcatcaaagcagaatcacctctgccctcacccacttccccagcttgtaacctgcgaatccagaggcttctctctcgttgccttattccttcctaagagccaggtagcctacctgttactcattcagctacattctctcactaggtggggctgacttgaataaaattatttttgattaatagtgtattttaattaaagatacattttacttattttaattttaatttttaaattttttaaattttttgggatggagtgcagtggtatgatcttggctcactgcaacctccgcctactrggttcaagcaattctcctgcctcagcttcccgtgtagctgggattacaggcgcatgtcacaatgcctgactaatttttgaatttttagtagaaacagggtttcaccatgttggccaggctggtctggtacttctgacctcaagtgatcctcctgcctcagcctcccaaagtgctgggattacaggtgtgagccactgtgcctgg

SEQ ID NO: 378982 - DNA, 542 bp, Homo sapiens
ctattgtaaatgggattattttctttttcagactgtttgctattggcatatagaaattctactggtttttgtatgttgattttgtatcctgcaaatttactgaatttgtttatcagttctaatgtttttttggtggaatctttaggtttttccagatataagataatattgtctgcaaacaaggataatttacttcttcctttctgatttgggtgctctttctttctcttgcctgattgctctagctaggacttccagtattatgttgaataactgtgttgaaagtggacattcttgtcktgttccatatcttagaggaaaagctttcagtttttccccatttagtatactagctgtgggtctgttgtatatggctttttttgtgttgaggtatgtttcttctatacacagtttttttgagggtttttatcatgaagcaatgttgaattttatcaaatgcttttccagcctcaattgaagcgatcacgtttttttgtcctttattttgttgatataatgtatcaaattagttgatttacatg

SEQ ID NO: 378983 - DNA, 626 bp, Homo sapiens
tttattatttcttttcttttactaattttgggtttaatttgttcttgcttttctagttctttaagatgcatcattaggttgtttttttgaagtttttctattttttttaaagtagatgcttattgctataaactttccttagtactactttarctgtaacccatagattttggtatgttgtgtttccattttcatttgtttcaagaaattttttgattttcttcttaatttcttcattgacccactggttattcaggagcatattgtttaattactatgtatttgtatagtttccaatgttcctcttgttattgatttctagtattattccactgtggtcagagaagatacatgatatgatttcaatttttaaaaaatttcttaagacttgttttgtggcctaacatagggtctatccttgagaattatccatatgctgaggagaagactgtgtattctgtagctgctggatgaaatgttctgcaaatatctattaggtccctttggtttatagtggagattaagcccaatgtgtctttgttgattttctgtctggaagagctgtacaatgctgaaagtggggtgatggggtctccagctattatgttttggggtctatctctctc

SEQ ID NO: 378984 - DNA, 529 bp, Homo sapiens
cgtatttactaactcctccctgtctccacacaaaaaaagggggcggggatgcatcaggatgcctatctttatgatttagctccgagcttagcaccatgaacagcagctgtggtgcctagagtccracagggcctcagttgttctttcatcctcagaattggggggtggatgcagaggtgggtcagggattaggcttgaatccccaaaaccaatgtgtattgggctttccttccaaaagggactcccagcatgcgttgggagaagaggacacagcctcccctgacctctgcaggaggcacctgccccacaggcacaggcatggggccgctcccaggcttccacctgagcaccctgtcctgtttgcttatttgttcatttattcatgcattccctcatctgctgagcactctgtgccatgctatgggctagggacacaaaatgagaagattccattcctggctaaggtcctctatgaacttcatcttgaaacgtgtcttctgttccccaccttacctggtggttttcaggc

SEQ ID NO: 378985 - DNA, 529 bp, Homo sapiens
tgctactcaggcaggctgtaccaggatggtgcctcagctgctgaaatactgaaatagttcatttgggttggtgaatagatcctgccaaaattccctgaatggcctttgctgttctgttaccttaaacccacctatctccaacattttcttgattcaactattctcctaaactgtgttagtaaggacaggggtttccatcgccatgcagtgyggtgttcagagcctggtctgggtggttaataccagtatcttaccacttattaaataagtcgaaaatatccttctcaaaaagtcggtctcctcaatgcttccttttgattccaagttcccagaagactggttgtacttaatattcactccccatagagttcccagtgttttcctggcttgacaatcagatagtgaaactaacatccctctttggcattttaaaattgcttcagattctctacactctccctaggtgatctcatttaaatggcatctttatgttaatgactctcaaatttatatcttcagcccaaacatc

SEQ ID NO: 378986 - DNA, 614 bp, Homo sapiens
gtaagcacgagtgaaaagtctcaaagggaagggaggaaaaacagaggaaacgggcagggagtcacaggctgacacttcgcggttctttacaacctcggtctttctcttgtccttccactctagggcttgaaaccttccctccaggattgactctgatgcccctagaccctgcctacaagaggtgccacctcccatgcagacctctgggtgatgctggcacagggctagtccatctcccatgcagatctctgagtgatgctgacacagggctagcctatctcccatgcagatctctgggtgatgctgacacagggctagcctatctcccatgcacatctctgagtgatgctgacacagggctagcctatctcccatgcagatctctgagtgatgctgacacagggctagcctacctcccatgcagatctctgggtgatgctgacacaagcctagaycatctcccaggcagatctctgaataatgctaggtcctttttgaagaaactgagagagaaagagaggggatagagaggagacagaatgagagtagacagaggaaagagagagcgtttccattttggcatctgggccaagaaatgcagccatataaaactg

SEQ ID NO: 378987 - DNA, 543 bp, Homo sapiens
  misc_feature (1)...(543): n = A,T,C or G
nnnnnnnnnnnnnnnnnnnnnnnnnngaccttgttttatagacaaaagcatgagtgttggagggttcacacaggtggtctagcattttgcaactagtgttcattacaggcaggctctgctaaccctgaccccaagctctttmatacatactcccctaccccaggagagagaggccatcattgagggaagaaagaaatggaaaaatgacaaagttgcaattatgggtcatgtcatgattgggattaattggcccaggtgaagttattacttgttcatgcaaaattttaatttctactttggccacggatgtgacccaaggataacctactgaagcaagatttattataaaaacaaacaaacaaaacacagcacagggaggactataaccgcaaaacagcagagaggcatgggggccccattcctcttctctctaagggagtgaacaaagaatggcaagaaggccagcagcttcaggcctcctgagtcaccctcaaaggcaattttgctcaccatttcataaaatctccagccataaattgtgtc

SEQ ID NO: 378988 - DNA, 543 bp, Homo sapiens
  misc_feature (1)...(543): n = A,T,C or G
nnnnnnnnnnnnnnnnnnnnnnnnnngaccttgttttatagacaaaagcatgagtgttggagggttcacacaggtggtctagcattttgcaactagtgttcattacaggcaggctctgctaaccctgaccccaagctctttaatacatactcccctaccccaggagagagaggccatcattgagggaagaaagaaatggaaaaatgacaaagttgcaattatgggtcatgtcatgattgggattaattggcccaggtgaagttattacttgttcatgcaaaattttaatttctactttggccacggatgtgacccaaggataacctactgaagcaagatttattataaaaacaaacaaacaaaacacagyacagggaggactataaccgcaaaacagcagagaggcatgggggccccattcctcttctctctaagggagtgaacaaagaatggcaagaaggccagcagcttcaggcctcctgagtcaccctcaaaggcaattttgctcaccatttcataaaatctccagccataaattgtgtc

SEQ ID NO: 378989 - DNA, 546 bp, Homo sapiens
attatatggtttgagtggtgctattttacctggcaaatgctcactgacatttattgaaattgatgccttagttttacaagccaaagtggtcatacagtcacacttgcttaattaatgcttcctaataaagaagcaaaatctgtttgtgcctgaaattgtgcttggtgctccaggaatagtcaccataacaaacactaggaccttgtgatacaaaamcagaaaagggtgagtattagatgtggttattagatgggggccaggccacctcagatatggtggcttaaacaagatggaattctgttcccttctcacctgacagttcagattatacaagagaaagaggcagtgcataaatagaaggagctacagaattactattcctatttatagcaagattgaaccagataaatcataagtttcttgtgtaatgagtccagcaatacttcccaaaggcaagtcaatttgcagaggttggtgaaacctggatcagaggtgagaacgggacaaataagaggaagaattttgtttagcattttagactatttc

SEQ ID NO: 378990 - DNA, 628 bp, Homo sapiens
ggcaatcaagtaatctgcaaatgacagttttacttcttcctttccagcatgaatgccttttatttcttcttcttgcgttattgtattagctagattctccagtacaatgttgaatagaactcatgtgaatggagattcttgtcttgttcctgatttcacagggaaagctttcagtcttttatctttagatatgctgatagctgtaggttttctatacatgctctttatcagtttgagaaagttctcttaatttgctgagaggtttataaaaattaggaacagatgttacagtttgtcaaatgctttygtctttattaagataatcatatgtttttcttattttagtttgttaatatgatgaagtacattggttgattatttttaatgttaaactagccttgtattcctgggatagattacatggccctgatgtatactttttatagatttttgaattcaatttactaacagtatgttttttagaatttttgcatatctatttatggaaaataatggtctgtagttttagtttttcataatgtctttttccagttttgtttttaaggtaatgctgaccttatagaatgaattgggaattattccttcctcttcaattttcttgaaagag

SEQ ID NO: 378991 - DNA, 584 bp, Homo sapiens
agacttgagctctttctatgacatcattctgccttcctgataaaatttagcattatactgacttccattaggctaatggactattttggctccagaggcagcgtgttatagtggttacaacttccaactgtgaaacaggctgcataagttctcattccgtctctaccacttactatctgtaagatcttgggtaaattacctagcctctctctgcctcaagtgtttcattgatcaaataaaggtaatgataaggacttaccaggtaggggttttctgagggctaaatgactagagaacttagatgaatgtttgatccatcataaatactaaattattattattatcatccttgccttccttgcttatacctagaaataccttcttatctagagttaatggggattgttttactttcctatgaaaaaytattgcacattaaatcaatgattttagaactagaaagagcaatagaaaaacatatttttaaatacttaatattatctctacaaaaaaaaaaatctcctgacaaattaggataagtgaccccgggaaaccagagtaactcagctaattagtagcagtgt

SEQ ID NO: 378992 - DNA, 608 bp, Homo sapiens
tagaaaaacatatttttaaatacttaatattatctctacaaaaaaaaaaatctcctgacaaattaggataagtgaccccgggaaaccagagtaactcagctaattagtagcagtgttattactggaacccaggagactgcaagatttctctttcctttatgttacaatgctacccttattccgctcagattttatcttagcacaattgctttggtgtcaagaagatatgggataaattcctggttcctctagcttctggctggaaggcctgtgcaagtwaccaaaccattcagagtctcagttttttcatctgtagcatggggataagagtgcctccttcattaggtttttgtgatcataaaatgagataatgcttatactagattaagcacagtggctgacatcctaagagctttgtaaatattaaatatgcatggtgactgacagcactggctttggagtcaaatatgagtagatttgagctccacgtccatctaccagacttgtgtgaatttggtcaagttacttaacttccctaatcctcaccttcatctcatgatctgtacattaaggattgtattgccaatatcttagggtttctgtgagga

SEQ ID NO: 378993 - DNA, 609 bp, Homo sapiens
cacggctttgttctcctgtccagatgctgagccagctgcagggtggccagggcgcctgcacccctcaccttctctgcttgtctgatacgtagctggaggcttctctctttgtctgcccatctgkctcctggcaccaggaagtaaaattattattattttttccaaatgaaaggctttgaatcacagctgttaattaccagatgattattaaaaacacatattgcctactgaggtttgagaagacaactcaagcgtgctgtctggccctactctcaggggctctcagcctcaagtcatgtacacatttctttaaagaacacaatgtggttttattatacccgcagacaaatgcaaataagaacggaagtgaggagagcccagaaccctgttgaaagttaataaagacttttcccgctgcacctcacaccccataatctcaagtagtttatcgtagcccactgcaggtcttggattacctccatttcaaaacccgcagcccctccgatggtgctaaggcctgtgccccagtgatgcctgagaaaagaaaggaacgacaaggcccggcagaagggcactcataaattatagacctcagctgtcatgctgggg

SEQ ID NO: 378994 - DNA, 609 bp, Homo sapiens
cacggctttgttctcctgtccagatgctgagccagctgcagggtggccagggcgcctgcacccctcaccttctctgcttgtctgatacgtagctggaggcttctctctttgtctgcccatctgtctcctggcaccaggaagtaaaattattattattttttccaaatgaaaggctttgaatcacagctgttaattaccagatgattattaaaaacacatattgcctactgaggtttgagaagacaactcaagcgtgctgtctggccctactctcaggggctctcagcctcaagtcatgtacacatttctttaaagaacacaatgtggttttattatacccgcagacaaatgcaaataagaacggaagtgaggagagcccagaaccctgttgaaagttaataaagacttttcccgctgcacctcacaccccataatctcaagtagtttatcgtagcccactrcaggtcttggattacctccatttcaaaacccgcagcccctccgatggtgctaaggcctgtgccccagtgatgcctgagaaaagaaaggaacgacaaggcccggcagaagggcactcataaattatagacctcagctgtcatgctgggg

SEQ ID NO: 378995 - DNA, 612 bp, Homo sapiens
gcctaatgtagagtcgaggtcagagtaataacaacaataatgatagcagcaaacacttactaagaacttacctgctcagccaggatccctctttaggtgtwcattagtatagtggaatgtaaagacgtgagtggaaaaaaccaacaagcaagcaaccaattgcacagcagacaccagctgggtggcatccaatccaatttcattctgaccaccatctacctggagatagagtcagatcctacctgttgagggctctcagtcccacaagactgtttccccacttctaatgcctgtggcaagcctatgcatctgaccaacctgctacaaatcaggaattccatgaccttgtccttgggtttgattgttttgctactatggctcacagaactcaatgaaacatttacttgcatttaccagtttattataaagggtattgcaaaggatacaggtgaagcaatgcataggatgaggtacaggggaagaggcatggagataccattccctccctgggtgatccaccctccaggaacatatccagaagctctttgaacctatctttttggatttttgtggaggcttcattacataggcatggctgattaaaacccattt

SEQ ID NO: 378996 - DNA, 612 bp, Homo sapiens
gcctaatgtagagtcgaggtcagagtaataacaacaataatgatagcagcaaacacttactaagaacttacctgctcagccaggatccctctttaggtgtacattagtatagtggaatgtaaagacgtgagtggaaaaaaccaacaagcaagcaaccaattgcacagcagacaccagctgggtggcatccaatccaatttcattctgaccaccatctacctggagatagagtcagatcctacctgttgagggctctcagtcccacaagactgtttccccacttctaatgccygtggcaagcctatgcatctgaccaacctgctacaaatcaggaattccatgaccttgtccttgggtttgattgttttgctactatggctcacagaactcaatgaaacatttacttgcatttaccagtttattataaagggtattgcaaaggatacaggtgaagcaatgcataggatgaggtacaggggaagaggcatggagataccattccctccctgggtgatccaccctccaggaacatatccagaagctctttgaacctatctttttggatttttgtggaggcttcattacataggcatggctgattaaaacccattt

SEQ ID NO: 378997 - DNA, 480 bp, Homo sapiens
tgagcagctggcagagaaggcccagctccagcggagccctgctttccaacccacgttgccacagcactcagaaatgggaacgaaacagacagccacagaatactacatgaatgcagacatgtattccttagcaaaaataaataaatgtataagaaagaaagaagaaagaaagaraaagaaagaaaggaaggaaggaaggaagaaagtaagagagagagggagagaaagaaagaaagaaagaaaggaaagatttgagagcaatttttttctatttttccttctttggttcattttgcttaaaacctccgagcccactttttgccaaaggggatgagggtggagtgggtactggacgtggcaggagaagagcttttggggcgccttctgttatcttggagtgaggcagctgatgtgatattttaatagggaactcattttaatagcctacaaatgaggagtcagagacaattaaaattcatt

SEQ ID NO: 378998 - DNA, 565 bp, Homo sapiens
gatccagaggcacgggcaaggattctgcctctgccatccctagctctctagctttataaatcatggcttatgtgtttattcttcaccaatgtccaatactcatatttctggaaaagtatattcctcaaccttaccatcctcattacagcaagtagtgggctccttaatgctgagggccttgttatttcttcatttaatggtgtgtccatggggtcctagggcatgagggcctagacaaatgcaaggctgtctctactccatcagatggaaggccaggaaagccaagggaggggtggaaataggggtggaggggtagatgtgtcatggwtggaccccagtgcaaaatgaaaatgtaccaccctggttttaaaagtatcaagtatttcatgatggcaatagcagagcattaaaccaaacatgggcccttctgagcttgaggccctatgcaactgtgtgtgtcacacaaccatggctcctgtccttggtgggaaagacgtggctccctttcccacagtttcctgctgccttctctcagatgctcacaaatagcccaaaccgccctcag

SEQ ID NO: 378999 - DNA, 564 bp, Homo sapiens
tgtaagcttggtggaaggtttcagagcaattttggaacaacattggaacaacagaggaaggcaaagtcaatgamaccaaggctattgactattttgtttaaaaatgagacgacggaagatgtcaggaattggaggtccttaacactattggatttgggctttaacacacttgtgggaattgtacagtgagtccagcagtcgtagctgacagaatgatgcacaaggacccagaccatgcaataaaacgatggaagatcatgcgctgcttagtcaccctaagtgaaagtgcagggcaaaatgaagttggaacacagtcaggttactaaccactcctggataaagacattgtatttcacaagacagtatgtgactttagatggctaggttatgagtttgaagcaacgtattagccataccagaatgtaagcagtcaggaagaaaagaaaatgttaaaagatatggcaaagaaatccattcaactttttgctgtgtgcattcataatttatttctgatttaaaaatgcatcaatatgagactaatgctgaaaaggagctacagaaaat

SEQ ID NO: 379000 - DNA, 564 bp, Homo sapiens
tgtaagcttggtggaaggtttcagagcaattttggaacaacattggaacaacagaggaaggcaaagtcaatgacaccaaggctattgactattttgtttaaaaatgagacgacggaagatgtcaggaattggaggtccttaacactattggattygggctttaacacacttgtgggaattgtacagtgagtccagcagtcgtagctgacagaatgatgcacaaggacccagaccatgcaataaaacgatggaagatcatgcgctgcttagtcaccctaagtgaaagtgcagggcaaaatgaagttggaacacagtcaggttactaaccactcctggataaagacattgtatttcacaagacagtatgtgactttagatggctaggttatgagtttgaagcaacgtattagccataccagaatgtaagcagtcaggaagaaaagaaaatgttaaaagatatggcaaagaaatccattcaactttttgctgtgtgcattcataatttatttctgatttaaaaatgcatcaatatgagactaatgctgaaaaggagctacagaaaat

SEQ ID NO: 379001 - DNA, 616 bp, Homo sapiens
tactcaaacatgagagtcagtcccttgcctttaattcactaatggagtggttttcaaagtgtaatacccaaaccagcaccattaacagcaactgagaagttgtaaaaaaaatgcagactctctggttccacccaagactcagtgaatcagaaactcttgggttgggacacagagtctgcggtttgcaagcctttggagtcattctgattcactactccaaaccctccacaaatccaaagctgtgctaggtaggaaatgttttcatagaggcatttgtgggttacctagaaggatcacacctcatgccaccctgcaaacaaataaaacataatggatggacattcctccttgtagaaatgccttttccctgcccctgtccccaccaaggagtatttctggctactgcactggtttgcttctctccaaggcctcctttttacccccttcttctctctccttattctctcaaaaaaccctagaagaaaacctaggcattaccattcaggacataggcatgggyaaggacttcatgtctaaaacaccaaaagcaatggcaacaaaagacaaaattgacaaatgggatctaattaaactaaagcgcttctgcaccgcaaaa

SEQ ID NO: 379002 - DNA, 618 bp, Homo sapiens
aattttcttcttgatttagtggaagcagtcagagcaaaactggcctgaacattggctgcaaagcttcctcacagaagttcaactatagtgggcaagtggctgcctggactccacggctcagttcaccaaaatccgtttacaggagaaagggcctcctcagcgcagtctcagagatggagaatctcccttatgcagaaaagacttcctgagctgggtatgctggttattgttggcawctgttccatgcattggtgctgctgggcggacctctcccccaagcctctatctgtacacgctattgtgtatctgaagccctactagtcttggtagagcagagtggttatgaagaggcaggagctttcaaattcaactatctctggcactttttaactgggtgattgatcttgggcgcatttaactcaaactctctggacccccacgtattcatctataaactgaagataattaaagaacctgttttatccccccgtcatgagaattaatgagataagctacagcaagttcttgttacaatagaaagtacaaaatccagcttgcattttgttacttactaacccaatttgttatttattcacccaattgtctgagctaacttct

SEQ ID NO: 379003 - DNA, 550 bp, Homo sapiens
tcatggactatcatccacttccctttcacctatctggtcaccatgtgtattggctgagaacctagaaaggcttaaactacatgcwccgcctccccccacccaaacacacacatacagagtttactatctacggtgtttctgctgaacgaggcgattaactccttgaccttatggaactctagtgtgacctcggagaatagatagaatcttgttatcttgtaatgagttttatggcttatttcagtacatctcagccatgtttctctggtgattaaggcaattatcagcccatgcattttaggattatgaataatggagctctctccaggtgatggaaaggccttgggaacgttcagaccactttttatcccgttcaatacttattcccatactccctccccgatatgcataaacagacactgcattctgtttctggacgcaccatggtgccctttctaccctttacttggatatgattatcacagcaataacttttagatttaattgatgtaagtaaatcccctgtttaccattcatgggtgccacgcac

SEQ ID NO: 379004 - DNA, 570 bp, Homo sapiens
ctgttggcaaaaggagtttttttcatattcttctagaatatgaaggaatgagaagtcggtgtttttcgtttttgttcagtaaagctttcctgggcacatggcctgtgggacggcatttgttggtaactcactcagcacaccccagctaaatacacttagggtgtaggatgagattttccattagtgataaggtagcaatgggaaacaaagaactaaagccttctggaaaaagtggaaacatttaggttggtggattggcactcaaacaattcatctagtgaaggccagatatttgtttgtttgttttacttagatggttcctctacaaggaagcattatttccgcacaatgtttcccctgtgcagccaggtgactgtgctgtacttagcctggrctgtggtttatacaccctcattgagagcatccgctatgtgccgtgattctacatggtgttctgggctgctctggggagcacaccctttgaccccagggagctctgatacagcaaggctgtattgctgaggaaggctgtggacagttgtctgtacatgaactggtattttctctgcc

SEQ ID NO: 379005 - DNA, 570 bp, Homo sapiens
ctgttggcaaaaggagtttttttcatattcttctagaatatgaaggaatgagaagtcggtgtttttcgtttttgttcagtaaagctttcctgggcacatggcctgtgggacggcatttgttggtaactcactcagcacaccccagctaaatacacttagggtgtaggatgagattttccattagtgataaggtagcaatgggaaacaaagaactaaagccttctggaaaaagtggaaacatttaggttggtggattggcactcaaacaattcatctagtgaaggccagatatttgtttgtttgttttacttagatggttcctctacaaggaagcattatttccgcacaatgtttcccctgtgcagccaggtgactgtgctgtacttagcctgggctgtggtttatacaycctcattgagagcatccgctatgtgccgtgattctacatggtgttctgggctgctctggggagcacaccctttgaccccagggagctctgatacagcaaggctgtattgctgaggaaggctgtggacagttgtctgtacatgaactggtattttctctgcc

SEQ ID NO: 379006 - DNA, 558 bp, Homo sapiens
gagctgtcctcaggacagccacaacaaatgccagctcagccggcatgtcctctaaggttgcaggtggaacaagtggagcacaaagcatcagaccaatgtctgcagttccaaagtggggagtcagtgtgcaaatgctggcgcctgcgtgtctccacggttactgacccagataccatgctttccctggggcagtcacctggacttgacctagtcaggtacagcatccacaaggaacagcatgagcagcatgtacctatgagtcaagtgctaggtgtgtatgkctgagttaatacatcatccatttgtggcttctcccactgtgtctgcctttaagatgtgaactcaaattctctgagcacattcatgatactaaggccttcagtagtcttcctggagagagaggctcttaagaaacagggcagcagacaggcaggcaatcttatgaatacaacgtggaagagggaaggcaaggcacgaccaccccagattttggaagcagtctgtgaacatatctgggtctgtgttattcagcagcccattgctgacttcacttatagg

SEQ ID NO: 379007 - DNA, 558 bp, Homo sapiens
gagctgtcctcaggacagccacaacaaatgccagctcagccggcatgtcctctaaggttgcaggtggaacaagtggagcacaaagcatcagaccaatgtctgcagttccaaagtggggagtcagtgtgcaaatgctggcgcctgcgtgtctccacggttactgacccagataccatgctttccctggggcagtcacctggacttgacctagtcaggtacagcatccacaaggaacagcatgagcagcatgtacctatgagtcaagtgctaggtgtgtatgtctgagttaatacatcatccatttgtggcwtctcccactgtgtctgcctttaagatgtgaactcaaattctctgagcacattcatgatactaaggccttcagtagtcttcctggagagagaggctcttaagaaacagggcagcagacaggcaggcaatcttatgaatacaacgtggaagagggaaggcaaggcacgaccaccccagattttggaagcagtctgtgaacatatctgggtctgtgttattcagcagcccattgctgacttcacttatagg

SEQ ID NO: 379008 - DNA, 606 bp, Homo sapiens
ccctactttgctctgagattggagtgggcactgaccacagggagaagccaggcagtgagagcaggtgcttctgagcctgctgcaggtagsgagggccttcctggacccccaagagcacagagatgcctgggtctggagctgcagcagagtggctacagctgcacccaaggagctcccgccccacccactcagaaggagcagggcttccacttgtcccagctcctgctggctccatggagcatgaacccccagctgtgcttcctcacagcctgtggcaggtgttccaggttctcgctgtgcccctctctacccattcctccgtgccctaccacattggcacgcagctcagcccagccccatcacagtggcttccagggtcgtgggctccagggggcctcccaggggtggatttgaggattgtctccttcccccccaggccctccccacagtggcggtggatgatagtagtgacgtagggccagggtctggaggagcagaggctctgggcaagggagtgggtcccacccagctgcgagaggttggattgggggcagctcagtcgactgccttagggatgcaaagcacaggagacccaccactgccact

SEQ ID NO: 379009 - DNA, 606 bp, Homo sapiens
ccctactttgctctgagattggagtgggcactgaccacagggagaagccaggcagtgagagcaggtgcttctgagcctgctgcaggtagggagggccttcctggacccccaagagcacagagatgcctgggtctggagctgcagcagagtggctacagctgcacccaaggagctcccgccccacccactcagaaggagcagggcttccacttgtcccagctcctgctggctccatggagcatgaacccccagctgtgcttcctcacagcctgtggcaggtgttccaggttctygctgtgcccctctctacccattcctccgtgccctaccacattggcacgcagctcagcccagccccatcacagtggcttccagggtcgtgggctccagggggcctcccaggggtggatttgaggattgtctccttcccccccaggccctccccacagtggcggtggatgatagtagtgacgtagggccagggtctggaggagcagaggctctgggcaagggagtgggtcccacccagctgcgagaggttggattgggggcagctcagtcgactgccttagggatgcaaagcacaggagacccaccactgccact

SEQ ID NO: 379010 - DNA, 525 bp, Homo sapiens
ggcacttcttattgcacttatttgtccatgtgtaattccttctccaagactgcattcctagaaagcggggccattttaaatatttcacctcttaggacccagtacatgatacattgcaggcacttaaaacctgtttgttgagtgaatgattgaccaggtcctgttaaagggcagagttcggtagtttcctgagcaatagaaaaccattcaaatctttagtacaagatttgttcctagttagctcatagcttatagtcaggctactggcttccctgatccttagaagttggagattggaatagagcctcccaagattccrtacagctctaacacactctatcctcattgtcttctacatagatttttaattttttttaagttctgctatattatgctaacatggaatatattattttggcaccaatgaaaatattgtttcttggaagtaggatacagatttaaagtgattacttgttattttttgtttgttttagctaaagtcaatatcccaacatttacagaaac

SEQ ID NO: 379011 - DNA, 475 bp, Homo sapiens
tgttgttttcctagatccccctcccacacaatccttggtgagaaaaataaagttattgattcacttatggtaaacgtcttaccctgggtccctccaaagcccagcctgtgacaagagctagtgtgcatgtgctgtattttgggttgtggttccagggcaccagagtaggagccaagaaagcggcaatggctagcccagggtgcaatggcaagctggtcaccactgtggggcatgggagctggacacatggagacaggatagaggggggcatttatccaataactcctcccatccttcctggtcaaggggtgccccatcacatgttgacaccctcttatttacacattgtttctgacaagtcctgggacaaawagtgggagcaaacactgcaactcaacaagatgtggtcaggttatacctgtgcaaagccaatgacattggcagtggctggagtacagctgaactgggaggctgg

SEQ ID NO: 379012 - DNA, 588 bp, Homo sapiens
gtgaatgggattaagactcttataaaataggcttcatgcagcattctactcttttgccctttcaccttttgccacatgaagtcacagcattccatccctccagaggctgcagcaacaaggtgctgtctttgttttttgtttttttgagacagggtctcactctgtcacccaggctggagtgcagtgacacaatcatggctgattgcaacctctgcttcccaggctcaagtggtcctctcacctcagcctcccaagtagctgggaccacaagcgtgagccaccacacccagctaatttttgtgtttttcatagagccagggtttcaccacgttgcccaggctggtctcaaactcctgggcataagcaatctgcctgtcttggcctcccaaagtgctgggagtaaaggtatgagccaccacgccaggccaaggcttcatctttgaagcagaaagcagctctcaccagacagccaaacctgctggtaccttaatcttgaacttcccagactccagaactatgagaaaacaaatttcagtcttttataaattrttcagtctcagatattttgttacagcagcacagaacaag

SEQ ID NO: 379013 - DNA, 516 bp, Homo sapiens
ctgtgctttcttctagaagtttttcgattctaccttttatattgagatttataatacattttgaattgatttttgtttttgtggtatgagatgaaatccaaggatgatttttttctatatgtatatccagttgttccagtatggtttattgaaaacaatgtcctttccccattgaatttatttggtagtttgtcaaaatctattgaacacstaaatatgtctctgttcctagactctctaagctattccaataccacactatcctggttattatgaacttataataaatcttgaaatcaggtagtgtaaggccttcaacttcccttacttccttcttcccttccctttcgtctcttccttctttccctttccttccttccttccttccttccttccttccttccttcctccctccctccctccctccctccctccctccctcccttccgtccttacttgctttcttctttcctttcattaatcactttcaaagttgttttggctattgtaagccct

SEQ ID NO: 379014 - DNA, 570 bp, Homo sapiens
tttatgtatctattgtagatttttttctttgtagttaccacaaggcttatgtaaaacattttgtagttaaaacaggctattttaacctgataacaacttaactttgatctcataagaaaagctctacacatttacagccaactccctgcctacattttattttattttttaatgcaccatttgcatctttttatatcatgtattccttcataaattattatagcttttattatttttaaatagttttgacttttaaccttcatactgaagatataagtgatttacacactaccattatagtatttgagtattctgaatttgactttgtacttcattttaccaatgagttttatatttcagatgttttcatgttactaattagcatccttttctttgagcttgaagaactccctttagcatttcttgtaagacaggtctggtgatgatggactcccttagcttttgtttgtctggtaaagtctttatctctccttcattgttgaagggaatgtttgctgkgttcaatattccttgttagcagttttttttttattacttctacaattttaa

SEQ ID NO: 379015 - DNA, 632 bp, Homo sapiens
ttgcaacttggtattgacagttaccatgtcatattagtcatttgggacgtacaataggtttctttacatgtcaattcagtctttatggtaaatgctaagtatttaagggattctccccaccatttatgaactaattctgagaacaaatagagtaaaatcaagtgtctagttttttattgtattyttttttcaaaaatacaccctttctcctcaaaatgttaatctggatgtggaggggaaaagtcagaaagcattaatattttgaagatagaagggacaacacttagcatgctatttggcacccagcaagtgtggtagctgtaattattgacagggtcaaacataactagaagacccctctgaaaagtaccagggatatcagaggaacactgccttgattttggaggacctggagcaatcttgacaggctctggcaggtgaacgactttcagtgtcatggctgaagtacactctgggtaacagctgaaatgaagagtttctatctttctttggctttattccacctctcgttggcttattctcttcatgttgggtctggatcccattcttgtaggcatctattctttctcttattctagattatctgtctataattcaatacctaccaaggt

SEQ ID NO: 379016 - DNA, 632 bp, Homo sapiens
ttgcaacttggtattgacagttaccatgtcatattagtcatttgggacgtacaataggtttctttacatgtcaattcagtctttatggtaaatgctaagtatttaagggattctccccaccatttatgaactaattctgagaacaaatagagtaaaatcaagtgtctagttttttattgtattcttttttcaaaaatacaccctttctcctcaaaatgttaatctggatgtggaggggaaaagtcagaaagcattaatattttgaagatagaagggacaacacttagcatgctatttggcacccagcaagtgtggtagctgtaattattgacagggtcaaacataactagaagacccctctgaaaagtacmagggatatcagaggaacactgccttgattttggaggacctggagcaatcttgacaggctctggcaggtgaacgactttcagtgtcatggctgaagtacactctgggtaacagctgaaatgaagagtttctatctttctttggctttattccacctctcgttggcttattctcttcatgttgggtctggatcccattcttgtaggcatctattctttctcttattctagattatctgtctataattcaatacctaccaaggt

SEQ ID NO: 379017 - DNA, 590 bp, Homo sapiens
cagtctgtccttcacatagttgccagagtgatccttttaaaatgtartacatatcatgtcactgctttgctccaagctttcaggggttcttcgtttcactcaaaataaaagacagagttcttattatgccctataaagtcttacgtgcacactcccactcccacccttttacttttctgacctcatctgcttctctctttcttgcttattttgctttaacgccagtggcatccttgtttctcagacatgccaggcaggtactctcctgctgcagggcttttgcactggctgtccaccgtgccctggaatgctcttcccccagacagctgcatgttttccgccttacttctttcaaacgtttttctcagataacaagtttttaatgaggcctctaatgatcacagagtaaaatttcaacttgtcttttacctcccaaatattcttgatactccttactctgatctgttagtttccctaacacttattatttaccatactgtataattcatttacttatcatttgaattgtttattgtttgtctctgctgctaaaaagtaaactgcatgcgggcagggatttttgaatgctt

SEQ ID NO: 379018 - DNA, 590 bp, Homo sapiens
cagtctgtccttcacatagttgccagagtgatccttttaaaatgtagtacatatcatgtcactgctttgctccaagctttcaggggttcttcgtttcactcaaaataaaagacagagttcttattatgccctataaagtcttacgtgcacactcccactcccacccttttacttttctgacctcatctgcttctctctttcttgcttattttgctttaacgccagtggcatccttgtttctcaracatgccaggcaggtactctcctgctgcagggcttttgcactggctgtccaccgtgccctggaatgctcttcccccagacagctgcatgttttccgccttacttctttcaaacgtttttctcagataacaagtttttaatgaggcctctaatgatcacagagtaaaatttcaacttgtcttttacctcccaaatattcttgatactccttactctgatctgttagtttccctaacacttattatttaccatactgtataattcatttacttatcatttgaattgtttattgtttgtctctgctgctaaaaagtaaactgcatgcgggcagggatttttgaatgctt

SEQ ID NO: 379019 - DNA, 590 bp, Homo sapiens
cagtctgtccttcacatagttgccagagtgatccttttaaaatgtagtacatatcatgtcactgctttgctccaagctttcaggggttcttcgtttcactcaaaataaaagacagagttcttattatgccctataaagtcttacgtgcacactcccactcccacccttttacttttctgacctcatctgcttctctctttcttgcttattttgctttaacgccagtggcatccttgtttctcagacatgccaggcaggtactctcctgctgcagggcttttgcactggctgtccaccgtgccctggaatgctcttcccccagacagctgcatgttttccgccttacttctttcaaacgtttttctcagataacaagtttttaatgaggcctctaatgatcacagagtaaaatttcaacttgtcttttacctcccaaatattcttgatactccttactctgatctgttagtttccctaacacttattatttaccatactgtataattcatttacttatcatttgaattgtttattgtttgtctctgctgctaaaaagtaaastgcatgcgggcagggatttttgaatgctt

SEQ ID NO: 379020 - DNA, 500 bp, Homo sapiens
ctctgcattgtttcttcttgtagcctcctggcctaccatggttgcacacataatgtgcttagtaagcccttgctaagtgaatacttgtggcactgaattgagcccatttgttcatgacaaatatgattactttcgtgactttatgttttgtatttatgtaactttaatgaaagctgaagagctctttctaaaaatcaaaatacctgctttcttctctagtcataaggaaaggtaagagggtggagaggcatggaaaaaatggtagttctgtttaactttgaataactccaaattatcctgagagggtccttctccagcctatgatgaagtgtgccacagaggaaataacagcattttgaagaacctggacatcctgaatgcttcttgatgatgagagtttaaatttttagtttgaagtattgcgaattcarcatttagcagagacactcatattcatatgacagtcctgagaaacatttccaaggcagataaagattaag

SEQ ID NO: 379021 - DNA, 430 bp, Homo sapiens
ccatggcaccaaaataacaacaacaacaacaaaaatctgggtgaggtagggcaagaagctttagtccattagakatgttaaaccaaactccattctcttttgccttcatgtattcttcaccatacatgaatctagtctgtctgtacacgtttagctaccttttagaagctcttattacggcaactttccacaaacaagcaatcctcaaaagctctaatcaaagttgaaggtttgctgcattggaatttgcttctgactgcacaacacatttaaatataatttgagatgtagacatttgtgcccagccaatatccattgacttcaaaaaaaagttgtaaaatcgtaagtacacaattaatgataatatgagatacacttctagattaacatttacttgaaatctttccaaaatacttttgagaccattatt

SEQ ID NO: 379022 - DNA, 430 bp, Homo sapiens
ccatggcaccaaaataacaacaacaacaacaaaaatctgggtgaggtagggcaagaagctttagtccattagatatgttaaaccaaactccattctcttttgccttcatgtattcttcacyatacatgaatctagtctgtctgtacacgtttagctaccttttagaagctcttattacggcaactttccacaaacaagcaatcctcaaaagctctaatcaaagttgaaggtttgctgcattggaatttgcttctgactgcacaacacatttaaatataatttgagatgtagacatttgtgcccagccaatatccattgacttcaaaaaaaagttgtaaaatcgtaagtacacaattaatgataatatgagatacacttctagattaacatttacttgaaatctttccaaaatacttttgagaccattatt

SEQ ID NO: 379023 - DNA, 334 bp, Homo sapiens
tcacaaataaccactaaagaccttacttacgtactaaataccacctgttcccccaaaacctaaggaaacaaaaaattttaaaaagtaccttatggccaccagcgcattgctgatgttgcgtgtcatctacaacagaattggattagagttattttctggagaattttgagaacctggcttgatggataaatgtagggaatcactgaggagtattcacagtatgtcttccttaggtcctttcaaagtcagtcaatccaayaggtcactgttacaggacttttcctacaatcacagtttttaatgcagtctttcttctacctaagaaccttgtgga

SEQ ID NO: 379024 - DNA, 497 bp, Homo sapiens
agaagccctgaagtcatagttctcaaaagtttctaacccatgtttccattataaaaaattaccccagggagattctaatttgtatccacagcaataagatttttgttgaggctttttttcctgcatttatattacgaaatcatatatcaccccctaactttaattagatattaccactaccaccaccccagggcacattcttccaccttgagattcacagcctaaagaattcatttctttctttrgtgacattatatcaacaacacaaataaagatggagtgcataactggattatattatcatctaacacatttacactgataaacactcaatttaacaataagccataattatatacatttgcaaataaaacatattttgctatgctcggttttataacatgctatattctgattatttagactaaggaaaataaagcatttactgtgttatgaaggaagacaaaaagcaagagtccgagatttccatgtaggtc

SEQ ID NO: 379025 - DNA, 641 bp, Homo sapiens
aatttgtgatcaaatcgcatgctttattgaagaactaagaaaaaagagcaatggaaaggatttcattagaatgcgttttccatgtggctgcttgaaaaaattagagttcttcgctaattcacaattaatcttttgttcttgactggagtcacactggttctttgcaaattatgaagaaatagaagttgtgcgtggtgtgatttccaaggattccgacagtgagatttccgagggcraagtgcctgagatgaattgagatagcaaattgatcattattacagtctaaaataaaagccttatcctgagacattgagttaaagtaagacaaaacaacaacaaaaaatgaacaaatatgtaaacctggaatgtggttagttaaaagtgtactgagaagacagtacctactcagttctggggggcctagccaaaggcatatcagacctataactcatcagataccagaggtttcaatgaactacaacaaacatattaaactaaattattcttcttaaaatgattttaactggactctggtgagtcctgattcctcttgggtactctacttcatattctagatcagaagagaacaaccattggagcggagagccatctggctcatactacaggatttttgggagcca

SEQ ID NO: 379026 - DNA, 641 bp, Homo sapiens
aatttgtgatcaaatcgcatgctttattgaagaactaagaaaaaagagcaatggaaaggatttcattagaatgcgttttccatgtggctgcttgaaaaaattagagttcttcgctaattcacaattaatcttttgttcttgactggagtcacactggttctttgcaaattatgaagaaatagaagttgtgcgtggtgtgatttccaaggattccgacagtgagatttccgagggcaaagtgcctgagatgaattgagatagcaaattgatcattattacagtctaaaataaragccttatcctgagacattgagttaaagtaagacaaaacaacaacaaaaaatgaacaaatatgtaaacctggaatgtggttagttaaaagtgtactgagaagacagtacctactcagttctggggggcctagccaaaggcatatcagacctataactcatcagataccagaggtttcaatgaactacaacaaacatattaaactaaattattcttcttaaaatgattttaactggactctggtgagtcctgattcctcttgggtactctacttcatattctagatcagaagagaacaaccattggagcggagagccatctggctcatactacaggatttttgggagcca

SEQ ID NO: 379027 - DNA, 597 bp, Homo sapiens
accctcttgcctcccgcttgggaatacattgggcccactgaataatctatccctatcaacaactttgacttaatcatctgcaaagcccttttcactgcataaggtaacgtattcacagattctagggatgtggacattgttgaggtgccattgctctgactaccacaaattctgagctcctcaaggccaggggcagcctcttgcccactcctggatccccagcatgtcrcacagcgcctggcccaagtaagtgctcattagctgttttatcaatgaacggatcagttaatgaacaagggtatcaggggggtggggggctgtcttcctactcagcaaaaaagcactggtcctggaaaaacactcaccccatgtttgaggagctaaagtcgtgggtgatgaacgggtgcaaggcaaccaatgacagtgattattggcctcacgtgtctcagcattacagtgggcaggcaagtgccttcagaagaaacaggtctctctcaaagctactggctgctgctcagcctggccccctacccctcaggggaagcctgcatagtccagcaggtctgagaggggtgagtggccttttgcctgattgtg

SEQ ID NO: 379028 - DNA, 597 bp, Homo sapiens
accctcttgcctcccgcttgggaatacattgggcccactgaataatctatccctatcaacaactttgacttaatcatctgcaaagcccttttcactgcataaggtaacgtattcacagattctagggatgtggacattgttgaggtgccattgctctgactaccacaaattctgagctcctcaaggccaggggcagcctcttgcccactcctggatccccagcatgtcacacagcgcctggcccaagtaagtgctcattagctgttttatcaatgaacggatcagttaatgaamaagggtatcaggggggtggggggctgtcttcctactcagcaaaaaagcactggtcctggaaaaacactcaccccatgtttgaggagctaaagtcgtgggtgatgaacgggtgcaaggcaaccaatgacagtgattattggcctcacgtgtctcagcattacagtgggcaggcaagtgccttcagaagaaacaggtctctctcaaagctactggctgctgctcagcctggccccctacccctcaggggaagcctgcatagtccagcaggtctgagaggggtgagtggccttttgcctgattgtg

SEQ ID NO: 379029 - DNA, 545 bp, Homo sapiens
agcagctgcagtagcagcagttgctaatataataatagctgagactaaaaaagcaattaaagtggccagaaatctttttttctgagtatgagacagtgcttttctaaacagctgcagggttgaatctccttcccagctccaggytaaatttacaggcagccaaaattctgcacgccattttaagatcatgacataggttatatttaactatgtaacatttcgatgagacaggcatgtagcatactaactactggaagagactttactactataaaaggattgattctgctctatattaggaacactttgcccaaacaaaagtatataagagtgcgtagtacaaatcacaactatgtcagtaacattattatggaaacagagggtataattgccactgctagtaatatactcatcatgtgaaagaacccattcaaaaaaaggaagttctaatctccaaatttgggtatgagcagggcttaaagcttgtttcccttttagttgtaatattggtcctgaaagcctgtactctgaccaggtgatagact

SEQ ID NO: 379030 - DNA, 566 bp, Homo sapiens
ttacaaaaaaaaaaaaaaaaaaaaagcttagaaaaaggcctagaatgaaaaatgatattaacagtggctaccttgggaatagaagttaaaaaaagtgtaatagcttaatgcccataattatagcttccaatctggggctgagaaaaatggcctctcataccactctgaccctattctactgaaagaaaaaataggaggacccctttatctgaaatatgaaatacaatttcaatttcttctcttaccagtccctgaaagcagattttcccctggggaaagaggagaatccacctgttttttctcagcgggttttgataagcagagtggtatctttgtgccagttactgttcttttttcttgagatggagacttgctctgtcactcaggctggagagcagtggcaggatctcagctcacggcaacctttgcctcccaggttcaagcgattctcgtgcctcagcctcctgagtagctgggattacagacgtgcgccatcacacccmgctaatttttgtatttttagtagagacggggctttgccatgttgaccaggctggtctcgaaca

SEQ ID NO: 379031 - DNA, 595 bp, Homo sapiens
gctgaattcagttttttggaaaagtttgagaggaattggtgtttgttctttaaatgtttggtggcattcgccagtgaaactatcaggtcctgggcctttctttgatgggagacttttgatcactgattcaatcttcttactcattacagatctattcagattttctatttctttgggacttagtcttggtagatagtgtgtttcttggaatgtgtccaattctcagtgctttcctatagagcaagatatgatataggcctggctttccagctgtgagcttgggcaagccacatagtcggttctctcggggcatctgtgtgtagcatgagctcccaccccacctgctgcttcatgggggctgtaggggagaatgcgagggtccatggaggtggcccactgggcctggcagcgtctcccaggacatgcaggttggccagggtgtttgagaagccagcagaagacaccagacaacctggcttcctccagtggccaggcctgagcagctgtctgtccrtgggtcactgcaggggccagggaaccatgccagggcccggctcatgaagctcctaaaataagggccctggaaggagaaggg

SEQ ID NO: 379032 - DNA, 664 bp, Homo sapiens
taacaatgtgatttatggtgacaatgttgggttacagcctatcagctgtagacgtctggaggggctaagtactaaagttcagccatgaaggtggtcgacatgtctgtgcaaccaagctccaatataatcaaggctcagttgagttccctgattggcaatacactgaatattatcacacatcattgtatggagaagatactgctttccatgacaccactgggagaaaacaacaggaatctctgcacttggagctctccttgtctttgccccatgcaactcttcccttgctagattttcatctctattcttttgctgtaataaaccatagccatgagcataacagctttcattgagttatatgagggctaccagcaatcactgaacctgaggatgatcttggygactcccttgaaatctcaattgatgtcagaagtaagggccatcttgagaactcctgaactctgcagagggactcttatttccactttaaagtaaaagaatgtaaatcaggtatgttaatgcactagaaactggcaaagccaggattaccatatataggtagaatccagggaatatattgggaatgcatttttaaggtgggtgtagaataacggtagaaggaatgtaaagttggatcaggctgaaattattcatatgaacctat

SEQ ID NO: 379033 - DNA, 475 bp, Homo sapiens
tgtggccatctctgtcaccgtgtgtctcaccctgcatctctttgcctgtctttctctctgggtctctgcctcagcccttcctcatcactactgaacacaccccgtgagggtgggtggggagcacccagaaaaaggaaggactttaagctcaatgtgtgtgcatgtgagggggtgcctgtcattgcacagcactctctgcaggacatccctccaccctggggagacacagggagggctggtttcagctgtagctgggtgcacarttgaggagggaggaaggagaaggggaaacaagaaaggaggggaaggtggccgggcacggtggcccacgcctgtaatcccagcactttgggaggccgaggtgggtggatcatctgaggtcaggagtttgaaaccagcctggccaacatggcaaaaccccgtctctactaaaaatacaaaaagtagccaggcgtggtgctgcgcgcctgtaatc

SEQ ID NO: 379034 - DNA, 622 bp, Homo sapiens
aaaggtgagggtatacaaagaagcaaagataaagaattatcacaattatacctatcatatgtattctttttttttaacctacagaaactcaaaagtgagcaaaatgcaaaattgagtcttcatctttttttattctcaaaattaataaaaactggagaaaaaaactaaatggtgactaggtgagcaagtgcaactgaactgatgttaaggtgttaaaacgtgagtcaatgtttccttggtttaagcaaatttaagagagttcagcgggccacagactcactgatgcgaaggtacccaaattctgtcatacatgtgaacttcatgcattatggcctctttacataagggaaaattattttaaactgaatattaaaaataccaaaaggtaaaatggatgtttaaagcrctgtttactcccagaattaaatgtcctctaatatttaactccagcttaggcattcagcaaaacaatacttggaaatattttttatttaatcaggtatataaatatcatgtaaaggaaatattactttgatgtgccatgtgctacactaagaactatttttacataatcacattcaaccaatggcatttgataaactataatattttcagttcctat

SEQ ID NO: 379035 - DNA, 528 bp, Homo sapiens
tagaacaaaaaggcagaggaaaggcaaattcattcactgtattctacagctgggacacttttcttcaactaatcttggacatcagaacttcgggttctatggcctttggactctaggacttgcactagcagkcccccaaggttctcaggctgttagcctcagaatgagacttacattattggcttccctggttgtgaagcctttgggcttggaccaagccgtactatcaacttccctgtttctttcacatgcagatggcctatatttggacttctcagcctccataatcacatgagccaattgccctaacaaatcttgtgttaagccattcttgtgttgctataaaggaataccagaaactgggtaatttattttttaaaaaaggtttaattgtctcatggttctgtaagctgtacaggaagcatggtgctgacatctgctaggcctcttggggaacctcagggagcttttactcatggtggaaggcaaagggggtgtcagtatatcacattgcaaaagaaggagtaa

SEQ ID NO: 379036 - DNA, 578 bp, Homo sapiens
aagttaggggcaccaatctcctgttaagagaaaaatcctcatataacttttgactttcctaaaacttaactactaatagcctactcttgaccaaaagccatactattaaaataaagtcggttaacacatattttgtatgttatatgtattttatactctctttccacaataaagtaaggtagagaaaacatgttattaagaaaatcataacaaagagctaggtgtggtgcctcacgcctgtattcccagcactttgggagaccaaggtgggcagatcatttgaggtcaggagtttgagaccagcctggccaacatagtgaaaygctgtctgtactacaaatataaaaattagccatgcctagtggtgaacgcctgtaatcccagctactcaggaggctgaggcaggagaatcacttgaacccagaaggcagaggttgcagtgagccaagattacaccactgcactccagcctgggcaacagagcgagactctgtcttaaagaaacaaacaaaaaaagaaaatcataagaaaaagaaaatatatttactattcattaagtggaattaggtcatcataaa

SEQ ID NO: 379037 - DNA, 599 bp, Homo sapiens
cattgggcagttacatttctagtcagggaaattaggaaggaaaatgaaataaaaggcatctagaaagaaattagtgaaactataatygcagatgacataatcttgaatatgaaaaatcctaaggatttcactaaaactattataatgaataaagttcagcaaaattgaaagacacaagatcaacatacaaaattaattgtacttctatatacgtggcatgaacaatcagaaaataaaattaagaaaacattttgaaagaaacttaagaaggcctaaataaatggaaagacatcttgtgttcaaggattgaaagacttaatattattactattgcaatactccccaaagtgacctacagattcaacaccatttccataaaaatcctaactaattttgccaaaattgacgaggtgaccccaaaattcacataaaaatgtaaatcatccagaatactcctcctcctctcaaaaaaaaatatttaaaaaggtaaaacaaagtttttgtcacaaatggtgctggggcaactgtatatccatgggaaaagaatgaaattgagtccctacctcacaccacatacaaaagttaactcaaagtggatc

SEQ ID NO: 379038 - DNA, 597 bp, Homo sapiens
catagactggatggcttaaatgacaaacatttatttctcacagttttggaggtgagaaagtcccaagataaaagttccggcagatttggtgtctgatgakgacccacttcctggtttgtagatggccaccttcttgttgtagcctcacatggcacagagcagaaagaaagagctcatgtctcttattttcgtaagggcactaatcccattcatgagggttccactctcatgacctaattacttcccaaaggccccaccttcaagtatcatcaaattggggataagtttcaacatatgaattttggagtagacacattcagtccacagcagagtctctttagcaatctgagtgtccacagaattctgctcatttcttatagcttttgtcatattgtgtggtgttttatctgttctctctctctctctttctcctcctctctctctggactatacaaccttcaagggctgagaaaaattctaattcatttttctattcctagtgttttagcacagtaactagcatatagatcataattacatctattaaatgaacaaattacaggaaaaaaaacccggatggaatatggtagcaaaaaa

SEQ ID NO: 379039 - DNA, 597 bp, Homo sapiens
catagactggatggcttaaatgacaaacatttatttctcacagttttggaggtgagaaagtcccaagataaaagttccggcagatttggtgtctgatgaggacccacttcctggtttgtagatggccaccttcttgttgtagcctcacatggcacagagcagaaagaaagagctcatgtctcttattttcgtaagggcactaatcccattcatgagggttccactctcatgacctaattacttcccaaaggccccaccttcaagtatcatcaaattggggataagtttcaacatatgaattttggagtagacacattcagtccacagcagagtctctttagcaatctgagtgtccacagaattctgctcatttcttatagcttttgtcatattgtgtggtsttttatctgttctctctctctctctttctcctcctctctctctggactatacaaccttcaagggctgagaaaaattctaattcatttttctattcctagtgttttagcacagtaactagcatatagatcataattacatctattaaatgaacaaattacaggaaaaaaaacccggatggaatatggtagcaaaaaa

SEQ ID NO: 379040 - DNA, 565 bp, Homo sapiens
atcctgttgggctttacaagaacaagtttttggttatcttgattgagtatgtttttagtattttattttatttcagttttatctttattaatacttccctacttcccttctgctgtctttagttcttttcatctttctaggtttttttttttttttttcacagtttcactctttttgcccaagctrgagtgcaatggcacgatcttggctcactgcaacctccacctcccaggttcaagggattctcctgcctcagtatcccaagtagctgaaattaaaggcatgctactacacctgactgatttggggtatttttagtagaaacgggatttcaccatgttagccaggttgatctcgaactcctgacctcatgtgatctgcctgcctcagtgctgggattatgggcatgagccaccgcacctggccttctgtctagttttttaagtttggttcttcacatatttttcttttgaaacttaatgaaaacttttgacaaattattccttacagttctactaacttgtatgagaagttctagaagttatattacttctattattatgct

SEQ ID NO: 379041 - DNA, 623 bp, Homo sapiens
gcaaatccacacacctacagtgacctcatttgcaacaamggtgccaagaacatacactggggaaaaataaacaagtctcttcaataattggtgctggcaaaactggatatccttatgcagaagaatgaaactagaccccacctcttgccatgtaaaatatcaaatcaaaatggattaaaaacttaaatctaagacatcaaactatgaaactattacaataaaacattagggaaaaatctccagggcaagatctgggcaagaatttcttgagcagtaccccataagcacaggcaaccaagtcaaaaataaacaaatgggatcacatcaagttaaaaagcttctgcacagcaaatgatacagtcaataaagtgaagagacaacccacagaattagaaaatatttgcaaactacatatctgacaagggattaataaccagaatatataaggaactaaaacaactctataggaaaaaaatctaataattcaatcaaaaatcagcaaaagatttcaatggacatttctgaaagaagcatgcaaatggcaaacaggcatataaaaagatgttcaacatcgctaatcatcagagaaatctgttctgagcaagttaaaaattctcaagcac

SEQ ID NO: 379042 - DNA, 605 bp, Homo sapiens
tgaggcacatgggtataataaagaatgtatcataagagagcatgttttcacttgttaggctagaaagacattctcaggtaatgagatcagtggtactccagggtacacaactactccctagttgattcttccatcagttgttggggaaagatcagagaaaaccatgaagaaaattgtattaattgygccccattcttactccactgtctgggcaccaagacactgaatgtttgccccattctcaaagaaacttgtctgtatctctttggttcatgaagaagcttgtttgacattttatgtttaaaattttgattttacaaagagacacaagctaagtcagtaaatgttctaatggtattgctgtccagaacaaagatttctctaattagtatcaaagtataactgaaaagataactttcagttaattagtatttacactaaatctgccatacaatgagttattgtgaaatttgacatttgaatgaaatctctttagaataactgaagcagccaccttattctgaccccagttgagtcacaaggagacataatagccttcatcagcagcctgtctagagtactgttcatcactttttttgtcaata

SEQ ID NO: 379043 - DNA, 605 bp, Homo sapiens
tgaggcacatgggtataataaagaatgtatcataagagagcatgttttcacttgttaggctagaaagacattctcaggtaatgagatcagtggtactccagggtacacaactactccctagttgattcttccatcagttgttggggaaagatcagagaaaaccatgaagaaaattgtattaattgtgccccattcttactccactgtctgggcaccaagacactgaatgtttgccccattctcaaagaaacttgtctgtatctctttggttcatgaagaagcttgtttgacattttatgtttaaaattttgattttacaaagrgacacaagctaagtcagtaaatgttctaatggtattgctgtccagaacaaagatttctctaattagtatcaaagtataactgaaaagataactttcagttaattagtatttacactaaatctgccatacaatgagttattgtgaaatttgacatttgaatgaaatctctttagaataactgaagcagccaccttattctgaccccagttgagtcacaaggagacataatagccttcatcagcagcctgtctagagtactgttcatcactttttttgtcaata

SEQ ID NO: 379044 - DNA, 500 bp, Homo sapiens
ttttaagggaggggccctgttatccactaattcttttaagggtaccagaagggaatttttgaagttgtggatttaccacctggaacctttgaaaaacataataggaagtgacctagagatacatgttccttctctgtcaacctgctgaggagataaaacatagctgcttccattagtcagtctgcaagggtcaatatgtatyatgtacttagccagctatggtacacatgcaaccacagtcttgctttcgatgaacttataatgttgtcatacactttggtgaatacctctgaattagtctattcttgcattgctataaagaaatatttgagactgggtaatttataaagaaaagagatttaattggctcatagttctgtaggctgtacaggaagtatagtggcatcttcttcaggggaggcctcaggaagcttacaatcatgcagaaggcatagggggaccaggcagctcacatggcaaaagcaggagcatcagtgtga

SEQ ID NO: 379045 - DNA, 687 bp, Homo sapiens
aatattggcagagggatggacacatagatcaatcggacagagcagaaaagccagaaagagaatagaacccacacaaataggccaaaattatttttttccccaaaagcacaagaccaatttaatggggaagattagctttttcagcaagtgatgctggagtagttggacatctatagacaaaaaaaatgaacctttacttaaaccwcacacctcataaaaattaactcaagatacataatggacttacatatgaaactgtaaaacttttaggactaaaacagaagaaaatctttggaatctaggactaggcagagttcttaggcagagttcttagacttaataccaaaagcatactccaagaagggaagaaataaattggacctcataaaaattaaaaacttttgctcagcaaaagactctattaagagaatgaaaagaaaagctacagtttgggagaatatatttgccagccatatatctgacaaaggctagtatctctaacacaaattgctctcaaaattcagcagcaaaaatgaaaacaattcaactagtacatgggaaaaagacatgaagacacatttcaccaaagaagatatacaggtggcaaataagcatatgaaaagaagctcagcatcattagcgattagggaaatgcaaattaaaaccacaatgagatatcactacaca

SEQ ID NO: 379046 - DNA, 522 bp, Homo sapiens
tagtcagcagtaaataagaatgaactatcaattcacgcaaccatctagatgaaaatctagagaattgtgcagagtgggggaaagaagccaatctcaaaaagttacatttccatttataaatgataaaattatagaaatggagaacaggttagtsgttgctaggggttaagcgagaaatggggctcttaggaaagtgggtatgactataaaaggataatttaaaagactcttgtggtgatggaattattctgtatcttgactgcatcaatgtcaacatcctagttgtgatattgttccatagctttgcaagttgttaccactggggaaaacttagaaaaggctccacagggtctcattgtacgatgtcttataattgcatatgaatctacaattaactcaacaattttttaaaaagctaaaatgattttttgtaactcagaattcataatacttctacttgaaaacattttgttcaagtcaggtgaagtctccaaattgctggtttttacttcattgttatcc

SEQ ID NO: 379047 - DNA, 522 bp, Homo sapiens
tagtcagcagtaaataagaatgaactatcaattcacgcaaccatctagatgaaaatctagagaattgtgcagagtgggggaaagaagccaatctcaaaaagttacatttccatttataaatgataaaattatagaaatggagaacaggttagtggttgctaggggttaagcgagaaatggggctcttaggraagtgggtatgactataaaaggataatttaaaagactcttgtggtgatggaattattctgtatcttgactgcatcaatgtcaacatcctagttgtgatattgttccatagctttgcaagttgttaccactggggaaaacttagaaaaggctccacagggtctcattgtacgatgtcttataattgcatatgaatctacaattaactcaacaattttttaaaaagctaaaatgattttttgtaactcagaattcataatacttctacttgaaaacattttgttcaagtcaggtgaagtctccaaattgctggtttttacttcattgttatcc

SEQ ID NO: 379048 - DNA, 522 bp, Homo sapiens
tagtcagcagtaaataagaatgaactatcaattcacgcaaccatctagatgaaaatctagagaattgtgcagagtgggggaaagaagccaatctcaaaaagttacatttccatttataaatgataaaattatagaaatggagaacaggttagtggttgctaggggttaagcgagaaatggggctcttaggaaagtgggtatgactataaaaggataatttaaaagactcttgtggtgatggaattattctgtatcttgactgcatcaatgtcaacatcctagttgtgatattgttccatagctttgcaagttgttaccactggggaaaacttagaaaaggctccacagggtctcattgtacgatgtcttataattgcatatgaatctacaattaactcaacaattttttaaaaagctaaaatgattttttgtaactcagaattcataatacttctacttgaaaacattttgttcaagtcaggtraagtctccaaattgctggtttttacttcattgttatcc

SEQ ID NO: 379049 - DNA, 550 bp, Homo sapiens
aaaaggatttatttaaatagaagcttagaattcacaaggggccattgacaagtatttttgataaatcattctacttaattcaataaatgtttattgttcttttaggtgaagggttttctcaagttaccttgcagcaattccaaaatagtgacaatgtccctgccctattgaagtttgtaacttgcaaggtattagtagtactgaataaaatttattgtctaatatctcagaaagaatttcatgtgggaatgaaaaatgtgagattccggtggaatatttatggcaaaccttaggagcttcttattttgtttccacttcatgaactaaaaagaaattaggatactgtgtgagctgtgcttggaaatttgggggcacttgggatggtagaggcccagcaatgggaaagtaaaggaaagttcagcaamtcctctcaatataaagcatacattttagagtttagtaagagagaataagactaacatggtgagagccagattatgaaaagttttgaatggcaggtctgtaattaatctgccacatggtggcgatt

SEQ ID NO: 379050 - DNA, 619 bp, Homo sapiens
cttacttccaactcttctcttcctttttctatgctattgttgacatttattttacttttatatatgcyatttacccccaatatattgctgctattttttttgtttaggcagtcaacttcttttagaatgatgaataatatgaaaatatatttttatatttatttccattttaaattactttcagaactctttatttcttcatgtagatctaggtttctatctagtgtcatattccttttgcttgaagaatttcttttaacatttcatgtaaagtcagcctattggtaataacatctttctaattttatttgtctgaaagaccattattttaccttcattcttgaaaagtattttcactggctacaggatactaggatagccactttcatttttagtattttaaagatgtcactttcttctgacttgcatagtgtttgtcaagaaatctgcttatctttatttttcggtaagtaatatgtatttctttcttttttcgtctggctgccttcaagatttcctctttatctttgcattaagtctggatttaatatgtctaggtatgtctgtttttgtgtgtggggcggggagtgtatgtgtatttggggagggcatattgatc

SEQ ID NO: 379051 - DNA, 590 bp, Homo sapiens
agtaaaacagaaggatggaaacttggggtttcaacaacattttaaactgcagcctccaaacctgaacttctagatttcttgttacataaaacaattaaatgtctatcccttaagctagtgttagttggggatctattatttgcagctaaaagaatcctaattgatataattgtcttgttttccaacatagaaaataaaaccttccaatcccatagtctactccacttcttccactttaacattttacttatactgtatctgtatatcatgstacatcaaaaatctgtctgttccttatggaagtccctaatggagaaacatatcaaaggttagctctttttacctgagcaggtttttggagtaatatctctgtataggtctttggcaggcctccaaaagctttccccagttaatatatacatttttttttctcttttcttgctttaaatcaaataggaattctcttgtccataagaatgtaattttcccatgcctccatatgaatgaaccaatcagatcattctctggattttgagcaaaggcattaaagaggctgaggacatatgtgattagttgggcaggctacaatt

SEQ ID NO: 379052 - DNA, 590 bp, Homo sapiens
agtaaaacagaaggatggaaacttggggtttcaacaacattttaaactgcagcctccaaacctgaacttctagatttcttgttacataaaacaattaaatgtctatcccttaagctagtgttagttggggatctattatttgcagctaaaagaatcctaattgatataattgtcttgttttccaacatagaaaataaaaccttccaatcccatagtctactccacttcttccactttaacattttacttatactgtatctgtatatcatgctacatcaaaaatctgtctgttccttatggaagtccctaatggagaaacatatcaaaggttagctctttttacctgagcaggtttttggagtaatatctctgtataggtctttggcaggcctccaaaagctttccccagttaatatatacatttttttttctcttttcttgctttamatcaaataggaattctcttgtccataagaatgtaattttcccatgcctccatatgaatgaaccaatcagatcattctctggattttgagcaaaggcattaaagaggctgaggacatatgtgattagttgggcaggctacaatt

SEQ ID NO: 379053 - DNA, 511 bp, Homo sapiens
  misc_feature (1)...(511): n = A,T,C or G
tgagccagaacaggtaacctattgagaagtctgtgggtttgaatactccttatcatttgtgtcacgatctgaatttttgttactggttagtattatgaggtgttacagtttggattctctcgaacagcagatgctaagacagagtttagattatagaatatttataagagctgaaatcaacccaagtaaaaggaaaggggagtrtcttggtctattttttgctgctgtaacagaataccacaagttatgtaatttataaagaaaaaaagtttatttgaggcacagtctgggggctgggaagttcaagagcatagcatctggtcagcactggtgagggacttcttgctgtgtcaaaacatggcagaaaagcaagtaagtgagcactcaagacagaaagtgaaatggggccaaacttatccttttatcaggagcccactcccataataactaagctactcccataataacggcattaatcannnnnnnnnnnnnnnnnnnnnnnnnnnnnnnn

SEQ ID NO: 379054 - DNA, 511 bp, Homo sapiens
  misc_feature (1)...(511): n = A,T,C or G
tgagccagaacaggtaacctattgagaagtctgtgggtttgaatactccttatcatttgtgtcacgatctgaatttttgttactggttagtattatgaggtgttacagtttggattctctcgaacagcagatgctaagacagagtttagattatagaatatttataagagctgaaatcaacccaagtaaaaggaaaggggagtatcttggtctattttttgctgctgtaacagaataccacaagttatgtaatttataaagaaaaaaagtttatttgaggcacagtctgggggctgggaagytcaagagcatagcatctggtcagcactggtgagggacttcttgctgtgtcaaaacatggcagaaaagcaagtaagtgagcactcaagacagaaagtgaaatggggccaaacttatccttttatcaggagcccactcccataataactaagctactcccataataacggcattaatcannnnnnnnnnnnnnnnnnnnnnnnnnnnnnnn

SEQ ID NO: 379055 - DNA, 595 bp, Homo sapiens
catatgaagatagcataactttgataccaaaagtctgttaaggataatacaagacaggagaattgcataccaaccttgtgattatggatgcaaaaattatcatcctcgttaacaaacagaattcagcatagtataaaaagatgattattcatatccaaatcgagtttatcccaaggaattcaagattggtttaacatgtaatttcactatattaacggattaaaggaagaaaatcatgatcatgtcaacagatatagaagacatagtaaaattcaatatctattgtgataaaacctctttgcaatgtagttacagaagagaacctctgtaatctgatgtgggatatttgtaaaaaacctacaatgaagattgagcttaatgatgaastgttaaaacttttctattcatagccaggaataaggcaagtatggccgtcacacccttctgctcattgtgttataacttctactttacattgtactggaggttctagttgcagtgataaagctggaaagaaaaattaaaagtgtgaattttggataggaagaagaaatgtagataaattgctaggatattagtaacaatttggcaggtt

SEQ ID NO: 379056 - DNA, 595 bp, Homo sapiens
catatgaagatagcataactttgataccaaaagtctgttaaggataatacaagacaggagaattgcataccaaccttgtgattatggatgcaaaaattatcatcctcgttaacaaacagaattcagcatagtataaaaagatgattattcatatccaaatcgagtttatcccaaggaattcaagattggtttaacatgtaatttcactatattaacggattaaaggaagaaaatcatgatcatgtcaacagatatagaagacatagtaaaattcaatatctattgtgataaaacctctttgcaatgtagttacagaagagaacctctgtaatctgatgtgggatatttgtaaaaaacctacaatgaagattgagcttaatgatgaagtgttaaaacttttctattcatagccaggaataaggcaagtatggccgtcacacccttctgctcattgtgttataacttctactttacattgtactggaggttctagttgcagtgataaagctggaaagaaaaattaaaagtgtgaattttggayaggaagaagaaatgtagataaattgctaggatattagtaacaatttggcaggtt

SEQ ID NO: 379057 - DNA, 595 bp, Homo sapiens
catatgaagatagcataactttgataccaaaagtctgttaaggataatacaagacaggagaattgcataccaaccttgtgattatggatgcaaaaattatcatcctcgttaacaaacagaattcagcatagtataaaaagatgattattcatatccaaatcgagtttatcccaaggaattcaagattggtttaacatgtaatttcactatattaacggattaaaggaagaaaatcatgatcatgtcaacagatatagaagacatagtaaaattcaatatctattgtgataaaacctctttgcaatgtagttacagaagagaacctctgtaatctgatgtgggatatttgtaaaaaacctacaatgaagattgagcttaatgatgaagtgttaaaacttttctattcatagccaggaataaggcaagtatggccgtcacacccttctgctcattgtgttataacttctactttacattgtactggaggttctagttgcagtgataaagctggaaagaaaaattaaaagtgtgaattttggatakgaagaagaaatgtagataaattgctaggatattagtaacaatttggcaggtt

SEQ ID NO: 379058 - DNA, 579 bp, Homo sapiens
aaaattttacacaaaatgtatatttttgtaattagaagaaaataataaagataaattttatttccctaatggacttacctgtggttcatccttcacaagtgtcatatctttggcactgccaccaaaagatgtactctgtggggcatggcttttgtaccaaaccagttktgaagctcttaggcacatgaattctcaatgtttaatgtttaaagtaacacttcatttttttaaaaaaacaattctcacattttaaagggtatgttctcatcctgtgatccagagaatggggttgagggtctattcatttcttatctcattttatagacttcaagagatttgaaggctgctttcttctttactcagattattagtgtgcttttatttgaagattcctctggggtcagttttagtttttctgctctatactttgtctatagtccccctctcctgacccctttaaccactttattaaggtttaatttatataccataaaattcacctgttccaattcacatttgtctttctggtgtagtattgtaggagaatttgctataggaccctgggaattgagtggtctg

SEQ ID NO: 379059 - DNA, 579 bp, Homo sapiens
aaaattttacacaaaatgtatatttttgtaattagaagaaaataataaagataaattttatttccctaatggacttacctgtggttcatccttcacaagtgtcatatctttggcactgccaccaaaagatgtactctgtggggcatggcttttgtaccaaaccagttttgaagctcttaggcacatgaattctcaatgtttaatgtttaaagtaacacttcatttttttaaaaaaacaattctcacattttaaagggtatgttctcatcctgtgatccagagaatggggttgagggtctattcatttcttatctcattytatagacttcaagagatttgaaggctgctttcttctttactcagattattagtgtgcttttatttgaagattcctctggggtcagttttagtttttctgctctatactttgtctatagtccccctctcctgacccctttaaccactttattaaggtttaatttatataccataaaattcacctgttccaattcacatttgtctttctggtgtagtattgtaggagaatttgctataggaccctgggaattgagtggtctg

SEQ ID NO: 379060 - DNA, 450 bp, Homo sapiens
aatatacattgcttttgagaaagtaytcacaagtataaagccacagcaaacaaaaaaatcgaagccagcactgctagtagatgtttgtaatttctttcatcctttttacatagatatatacatccctcagttgagatatgctgtttatacaacgtagctgcccttttgcttttgtcatatcatgaacatcttcccttgccattaaaagcttttttataaacaatatatttcaaagggagtgaatatagctaagtgggaaagagcatgccttgagagttgactctgtttgaattttggctccaccacttattggctctatgacttttatctcagttatttcatctgtaaaattgagataatagcacttatctcacaggatagttatgattctatgaaataattcagtaagcaccctgttattttattttgtgagagcactatcatttatgt

SEQ ID NO: 379061 - DNA, 450 bp, Homo sapiens
aatatacattgcttttgagaaagtactcacaagtataaagccacagcaaacaaaaaaatcraagccagcactgctagtagatgtttgtaatttctttcatcctttttacatagatatatacatccctcagttgagatatgctgtttatacaacgtagctgcccttttgcttttgtcatatcatgaacatcttcccttgccattaaaagcttttttataaacaatatatttcaaagggagtgaatatagctaagtgggaaagagcatgccttgagagttgactctgtttgaattttggctccaccacttattggctctatgacttttatctcagttatttcatctgtaaaattgagataatagcacttatctcacaggatagttatgattctatgaaataattcagtaagcaccctgttattttattttgtgagagcactatcatttatgt

SEQ ID NO: 379062 - DNA, 450 bp, Homo sapiens
aatatacattgcttttgagaaagtactcacaagtataaagccacagcaaacaaaaaaatcgaagccagcactgctagtagatgtttgtaatttctttcatcctttttacatagatatatacatccctcagttgagatatgctgtttatacaacgtagctgcccttttgcttttgtcatatcatgaacatcttcccttgccattaaaagcttttttataaacaatatatttyaaagggagtgaatatagctaagtgggaaagagcatgccttgagagttgactctgtttgaattttggctccaccacttattggctctatgacttttatctcagttatttcatctgtaaaattgagataatagcacttatctcacaggatagttatgattctatgaaataattcagtaagcaccctgttattttattttgtgagagcactatcatttatgt

SEQ ID NO: 379063 - DNA, 450 bp, Homo sapiens
aatatacattgcttttgagaaagtactcacaagtataaagccacagcaaacaaaaaaatcgaagccagcactgctagtagatgtttgtaatttctttcatcctttttacatagatatatacatccctcagttgagatatgctgtttatacaacgtagctgcccttttgcttttgtcatatcatgaacatcttcccttgccattaaaagcttttttataaacaatatatttcaaagggagtgaatatagctaagtgggaaagagcatgccttgagagttgactctgtttgaattttggctccaccacttattggctctatgacttttatctcagttatttcatctgtaaaattgagataatagcacttatctcayaggatagttatgattctatgaaataattcagtaagcaccctgttattttattttgtgagagcactatcatttatgt

SEQ ID NO: 379064 - DNA, 610 bp, Homo sapiens
atatgcgtatgactttttccccctccaatcttgtatttactatagggacaaagacaaaattgataatatagtgacttctttaggattaaaaattggagcctgggaggcacgacattcagaccctaaagttcagatcaacgccatttgcagtcagtggctacccataccccatgctgctcttggtatcctttattctaatggtttttaatgaaatagttttgataaagctagaaaaaacaatgcattatggcaaccaagaaattctctggaaataacattcaatccaaaataagtcttytctgcttatttagtgttctaccatgaaactgtattaaatactttaataattaatacactaatactaatttgttttaacattactaatgaacttctttagaaagacagttcttttgtgtttgtttagtaatctgtaaaaatagaaatgtttacactgagatttaaatataagtagatgatttagatgtttgtgttagataactgtttcatttcaaggtcacctgtagccaacctgctaagctctgttctcatttgttccatgggcctcagtgttaaagtacctgttcaatgaggatcctttctgaactttaag

SEQ ID NO: 379065 - DNA, 597 bp, Homo sapiens
gccgctgtggttgtaaatgaagtgtgggactgttacaggactttctcctctgttcttgtgttcttgcctcttttctttgcttcttcaaattcaccttccaacctgacatttgaatcttcagtcaacattctcacctctggtctccttcatctcagtattagtgactattgtcccttcaggaagtaacatccatggttagtttaactatagcctaaataacttaacactcacaactgtttcctcactagtagggccccattttcttgtaattaaatttctttattctcaacaaatactggatacacagtgggtactttttacacatgcttgctgattactatctgctttgttcccctctaccatcattcccagtgcccatagcaatgcgtggcacacagtagttgttcaatgggtggatgrgtagatacatagatagacagcaggcatctatacagttgatgcttacttaatgactgtacatgctgattattccagatcacttcatgaacttaggcaggtgaggatttaatctgcaaggtgaacaaatacacttcttttttcactaaaactaaagtgaaatcacatttacttaagatg

SEQ ID NO: 379066 - DNA, 545 bp, Homo sapiens
ggagttaggccgctttgcatcaggagccctaagggtctgtggccatttggaaggcaagtaggcagaatagctacctgcatggcttccagtgcttacrgagagaggaggggaatatggcatggcaaagtggggatgaaggttatcagttaggtgtgaagtctgagattgggaaataaagcaggaatcataatattaaaggtgatggaaaacacaggagagaggcacaaagtgttgggaccatgaagagttgtccagcttccagagctggagcataaagttaggaccagaagattagcctgagtgctttgatgctcagtcccagagtatagggcaaaagatgctgttaatctatcagccttaggacagggtttggtcttgttcatgtgttggggttgagcatgcaggtaggttcataaggacccctacatgggaagggagccaagtcctaggaaacagtctacctgcctggtttctaccttccaaacccaaactcccaaacagaatttgtattcgacttagtgttccccttttgtcaacaccttttt

SEQ ID NO: 379067 - DNA, 575 bp, Homo sapiens
tgaaagtgatatgtataaaaactcatctatgattatcttggcttggacataattgatagtttgctgtttatcagtaaggggcaagtatcagttaatttttttctttttttgtgaaggtaaatgagcaagaaattgttatttagtgaaacattgatttatttagcattacaaattccatgaacaatccaatttatctctgcataatgtgtctttgctacaggttgaaatcagttgcttatgtgtctcacatcttaagcaggaatgatacaatacattgacagctcaaatggcttcttatttcagtaatcagagcaccataaaacctaattccaactgattaaaaaaaaactgaaatatttcagacctaccctcaaagtaacctctacctagaatttgtgttcatcttttgtgttagttttctgttactgcatattacagattacaacaaatgtagcagcttgaaacattacacattttgtcatctcacagtttctatgggttagaaaaccagacatggcttagccgcatcttctccttagkgtctcacaaagccacaatcagaatgttggccaggg

SEQ ID NO: 379068 - DNA, 564 bp, Homo sapiens
tttacaagaaattctagggaatatacctatagcagagttgccttggtaatctgcttaacaagataattccaatttattttctgaagtagctgtgatttacactcccaataggagtgtttaacagttccagttgttccacatgctcaccaaaatttggttttgttaggcttttgatttgtgccggtctgatgggtatgatatggtgttttggagttttagtttacatttttcttattactcttttaatgcatttattgatcaatcttgtgttctcatgtgaagatattaatagttcttggagtcatttccctgtttttctgttatgcttctttattgttttaaatactgcttttcagatgtcttttgtatattctggatactaattccttgtcagttttgaattttgcagatttcttctccagtgtaaarcttgtttttactttccatttggtaccctttaataggcagaagttcttaatttaaatatagtcaaattatcattattttatgggttttgctttttaaatcttaaaattgatattaagtctatattgaagtcacaaa

SEQ ID NO: 379069 - DNA, 580 bp, Homo sapiens
caccaggcttcccttcccctggagcagccagaccttctgtggtatcttgagcaagcgcctggtcctgtctgggcctctgcagactcaaggtctggtgcctgacttacaccctgttgtcatatcctgccatctggccccatatggagtcctacaggggactctcagacccaggcgtgagcactggctcargcccctctcagaggtctggcggcccagcatctgcccacgggcctcctctccccctccttttctccaggctcctgcctctgccacagttccctggaggtggcctctagcctggcccaggggctcacacactcctgaaggaggcagggccagactcaggcaaggccttggaggacacatcccagtgggcagggcccagcactcttggggtggaactacagggaggagaggcagggcaattgaggcttgaggtgcctggcctcacccaaggtgaccagcctgctccttttcctcagtctcagagggagcagaggacggaggtggggaagagaggccagggacacagtagggcttggttatggatgatggggggtccttgtgtgatataattagg

SEQ ID NO: 379070 - DNA, 580 bp, Homo sapiens
caccaggcttcccttcccctggagcagccagaccttctgtggtatcttgagcaagcgcctggtcctgtctgggcctctgcagactcaaggtctggtgcctgacttacaccctgttgtcatatcctgccatctggccccatatggagtcctacaggggactctcagacccaggcgtgagcactggctcaggcccctctcagaggtctggcggcccagcatctgcccacgggcctcctctccccstccttttctccaggctcctgcctctgccacagttccctggaggtggcctctagcctggcccaggggctcacacactcctgaaggaggcagggccagactcaggcaaggccttggaggacacatcccagtgggcagggcccagcactcttggggtggaactacagggaggagaggcagggcaattgaggcttgaggtgcctggcctcacccaaggtgaccagcctgctccttttcctcagtctcagagggagcagaggacggaggtggggaagagaggccagggacacagtagggcttggttatggatgatggggggtccttgtgtgatataattagg

SEQ ID NO: 379071 - DNA, 500 bp, Homo sapiens
tgactgtattgctatttgcttttgatttttcccttctttgttcccataccccttatttcctgccttcttttgtattactaaatggcatttttattattctactttactattagaattttatctttctatgttttaaaaataaaaatgaatttttgacttgtcatgagatttttctggctcaaacttaaatggacatttttaccacgtctaccatggaagaacctgtaagcaatttaattctatttaactcctcttgccttttgtgccactgttctaacatattttactttcatatttgtgtaaaaacataatatagtaattttgacttycagttgtcaatattcttttatatttacccacatatttaccctttctgtgtgcttcattccttcctgcatttcatgcttctatctggagtaagtttccttttaactaaacaattccctttaatacatttgtagtaggcatctcagctttttcttttttgtctgaaaacattt

SEQ ID NO: 379072 - DNA, 570 bp, Homo sapiens
actggcatgctctcaccttaatacctttattttatctctttctggaactctttccctctagatcttcacttggctaattccttcttttcccttaggtctttactcagatctcaccttttccatgagacctaccctgactatttaaaactgaaaacttctccatcccatatcttcccattcttctttaccctgccctacttattattttttcctagcaattaccactttataatatagtatgttacctattagtgttttatgtttattgttttttaatttttaaaaaattttaaaaattgtacttcttagaagtcagtatttattgtttrttggctatatttctcacagagccaggactagtctgaggcaaatgaggtacttgccacagatgaaaaatttaaggggctaccaaaaaatttttttagtaaaattaatgcaaaaaaaatccatgatgaacaagatatccatattttaaatagagacaggatccaacagtgccatctctaatcattttgaaacttgggacaaaagaaaaagtatgtgccataccttgtaatgtatttttaaaat

SEQ ID NO: 379073 - DNA, 575 bp, Homo sapiens
ttttagcctctggcactgcacatgtgtatctgagtatttactcaaaatacacacggaactgtcatggtgtgtggtaatattcatgttatttacctgccattaagactagccttcagagccaagctacaaagttaaagcttatctgtaggctatttgagaacatgtgatgtgccaagcacttttctagatgcttttcaaaattatttgtctcaacaaacctgctttgaataaacagacgacagctgacccttgaaccatgctggggtaggggtgccggccctcatgccgtcaaaaatttatgtacaacttttgacttcctaaaaatttatctactaacagcctaytggatgccttactgataacatcagtttgactggatgccttactgataacatcaatagtcgaataacatgtaatttttatgttatatatcttatatactatattcttacaataaagtaagctagagaaaggaaaatgttattaagagaatcattaaggaagagagaatatattcactcttcattaagtggaaatggatcatcataagtgtcttcatccttgtcatcttcctg

SEQ ID NO: 379074 - DNA, 543 bp, Homo sapiens
tattacagtagtacagtattactacagttaatttaatgcagttatgacttagtactgcatatttatgtttgtttatatttcttgactgtgaatggcaccatgtttggtctatgtttgtatatgtaaattttgatgaattttaactttttataatagatttgtgcatagtttagggcagcaaatgawaaaatagactagtatctacatatattgtatgcattcataatgtatctaactttttcttaatttttaaaaatatttctaggctatgtggttcatctgtgagttttttttttcaaattgtcaaaaatctccccctaaattttccaacatatgtttttaaaggcctgcatacatatagacccatgcagttcaaacccaagggccaaccgtattatataaaatgaaaacgcctgcagctgcttctgctttccaggttggggatggggaccagaagcatatctattagtgggaaaataatgcctacattgttcctttccacatcaacgagactgctaggggaggaagaaggaaagagcaaca

SEQ ID NO: 379075 - DNA, 543 bp, Homo sapiens
tattacagtagtacagtattactacagttaatttaatgcagttatgacttagtactgcatatttatgtttgtttatatttcttgactgtgaatggcaccatgtttggtctatgtttgtatatgtaaattttgatgaattttaactttttataatagatttgtgcatagtttagggcagcaaatgaaaaaatagactagtatctacatatattgtatgcattcataatgtatctaactttttcttaatttttaaaaatatttctaggctatgtggttcatctgtgagttttttttttcaaattgtcaaaaatctccccctaaattttccaacatatgtttttaaaggcctgcatacatatagacccatgcagttcaaacccaagggccaaccgtattatataaaatgaaaacgcctgcagctgcttctgctttccaggttggggatggggaccagragcatatctattagtgggaaaataatgcctacattgttcctttccacatcaacgagactgctaggggaggaagaaggaaagagcaaca

SEQ ID NO: 379076 - DNA, 543 bp, Homo sapiens
tattacagtagtacagtattactacagttaatttaatgcagttatgacttagtactgcatatttatgtttgtttatatttcttgactgtgaatggcaccatgtttggtctatgtttgtatatgtaaattttgatgaattttaactttttataatagatttgtgcatagtttagggcagcaaatgaaaaaatagactagtatctacatatattgtatgcattcataatgtatctaactttttcttaatttttaaaaatatttctaggctatgtggttcatctgtgagttttttttttcaaattgtcaaaaatctccccctaaattttccaacatatgtttttaaaggcctgcatacatatagacccatgcagttcaaacccaagggccaaccgtattatataaaatgaaaacgcctgcagctgcttctgctttccaggttggggatggggaccagaagcatatctattagtgggaaaataatgcctacattgttcctttccacatcaacragactgctaggggaggaagaaggaaagagcaaca

SEQ ID NO: 379077 - DNA, 448 bp, Homo sapiens
ctgcacttgtgtgactatattttctgctagacagggggcagagactgtacccctcttgttcaacactcaatagtcaaaacaatactgaacatatgtgttaaaggaataaagctattcaaaggcacatgcctacatctacctactcttaagtccatgatcttttccctttatcaatagcctctcttccaactaaggctacaatccacttaacctcagctggcagttacactcagttagaacaataaacttcatttatcataaaaaataaattcctcactggatsatcccagaattcctccatgttgtaccccaaaggcacacaaatggcctccttaccacattcaatgcaggttcacagagtaactaactcttcagagttctccaaatgatgatatgaatgccattcagtagctatgatcaattatggaaaatgaaggtaagaaaacag

SEQ ID NO: 379078 - DNA, 573 bp, Homo sapiens
atcttttccctttatcaatagcctctcttccaactaaggctacaatccacttaacctcagctggcagttacactcagttagaacaataaacttcatttatcataaaaaataaattcctcactggatcatcccagaattcctccatgttgtaccccaaaggcacacaaatggcctccttaccacattcaatgcaggttcacagagtaactaactcttcagagttctccaaatgatgatatgaatgccattcagtagctatgatcaattatggaaaatgaaggtaagaaaacagcttacttttcggggcattcctaagcacagtagacaagaatgctccaacagactatgttgtgcattgaaaaaaaaattttatcacatcatataattaagcaactrtgagaggcttcttcattgaatttgttttctaagaaaaaagcaagggccttttttaaggacataggttatcctttcctgcttttaattatgtcactcagatttttttaatattgacattattggcttcaattaaagttgtatcatcacacaaattaaatggaaccacctagaacaaat

SEQ ID NO: 379079 - DNA, 588 bp, Homo sapiens
aaggtccaattccaatttagcaaatttgcattctgccaaaacaaattttccttgtgatttcaaaatgaaattcctcttaactcttcacaggatggctaccttggttcccttttcgtggtggctttttatcagtaatcaggcaatgtgatatgtgccagaattgtatttgaaatctttgaaaaataagcatgatccttgtgattattagcctaataaaacactagtctgaagcataaatgggcttaaatgttgccactgtgaaccctattataaaagaagctttgtttttctgatttatctttgttaaatgtgtctttggtaggtttactgctgtggaacagagttcaagggttctggctgattcattccatccctcagtttcctccaattccggaagaaggctatgattatccacccacagggagacgaaatggacaaagtggcatctgcataactttcaagtacaaccagtatgaggcaataggtaaaactaaagtatgtgagaaaaaaaacgataactatgttgaagaaakgatttggaaatatattcataaatgtgtcacttcatttgttaatctattcatagac

SEQ ID NO: 379080 - DNA, 513 bp, Homo sapiens
tgagccatgatcacgccattgtactcccatcttgggcgacaaagcacagttctgtctcaaaaaaaaaamaaaaaaaaaaaaacagaaaaagaaaaagcagcaggatgccttggcaaacaatgacaacagcagagaagtgacaaatgacagggtggaaagacagaagaactcttaacagcacagctgtctggagccatttaacattgggtgaacggccctgtggaccttagtggctcctgagggcatggcagtattacagaattgaacaatgattgatgttcaaagtgagtcatcgagaaaaggtcaaattgtgttccgaatatttcatttaagaaggcaacatactacgtaaaacattttggaaaaatcactttctaaaataaaatttttaaattggcatttaagtttaggttataatatgttgacaattaatagtaccaccacttaatatattagatagactacattattaaaaatccccatccagaaagaattgatttttacttatatgtt

SEQ ID NO: 379081 - DNA, 513 bp, Homo sapiens
tgagccatgatcacgccattgtactcccatcttgggcgacaaagcacagttctgtctcaaaaaaaaaaaaaaaaaaaaaaaacagaaaaagaaaaagcagcaggatgccttggcaaacaatgacaacagcagagaagtgacaaatgacagggyggaaagacagaagaactcttaacagcacagctgtctggagccatttaacattgggtgaacggccctgtggaccttagtggctcctgagggcatggcagtattacagaattgaacaatgattgatgttcaaagtgagtcatcgagaaaaggtcaaattgtgttccgaatatttcatttaagaaggcaacatactacgtaaaacattttggaaaaatcactttctaaaataaaatttttaaattggcatttaagtttaggttataatatgttgacaattaatagtaccaccacttaatatattagatagactacattattaaaaatccccatccagaaagaattgatttttacttatatgtt

SEQ ID NO: 379082 - DNA, 530 bp, Homo sapiens
agctattattattctgtaagtggggaaattactataaactgtcatactttcagaaagaattgtcttcacctaaacacctcctttatgtgtataattataatatctcttatatatgtgtgtatatatatcttacayatatataaatatgtggatttagctacatacacacatatatacatatgtacacatagggtatatatgtactatatatgcctctatagcttatatatgtctgaatgtatatgagctaagctaggtcttttgtgtaaattattatatagacatttcttgatatttcaagatgcttccaaatccattttataatttcctcatcataaaagtgtgagatgtttataagagaagaaatcatggtacaaagagttaagttaaacgttctgtccgagatcacagagcagaagccagatgagagcccggttgcccgatgctccctgttgacgatgctgccaccctcgcttgataggctttgctccagctgagtctgagaaggacaccatgtccccatttcaatt

SEQ ID NO: 379083 - DNA, 525 bp, Homo sapiens
gtaagtttcttagatgttagttgcaatgtggaatatgaaataatgtcaatgagctttccctgttctattacattaaaatctattrgtctatcttgcattttgaatggaccttttacccatgcatagttttataacaacgtgcattcattggttatttggaaaatattggttcgcagagttttatgtatcttctaaaagttgacacgttcattatatagtttcaagaaatcacattaaaaaattactactaattttatcagggaagtctggaagtgctggtaaattgtcaagctaacagtgatggatacagcttttcttacttaatccctaggttgcatagagattttcacttgaataagggctttcttggctccaggtcactgatagtggttctctgcaatgcaggatgtggaggtaggaatttaagggactgaggagtttggggtggtaagggcctcttgttgatgtaaactttccagggctatttttcaggctaggccatctctcaattatcttctttcatgt

SEQ ID NO: 379084 - DNA, 567 bp, Homo sapiens
tctgaagtttttttttttttcctgtaaggcaaacagatgaaataaagtaaaaaggctcctcatcccttatctctttatactccaacagtgataaggtcctataaaatgtggatctttgactcaacaaaaaaattggaaaaaagttaagcttcatttaaggggaataatgaaatttaatagctttcttggaattccaatcacaagagccaagagggcttccttggcaaagggaaaggtaaggagaggaagagcagtctgaggaactgaagatgtgtatgggatcagcattaacagtggtgatacygtcagaatacagaattggatgacttttcctattttttttccctatgttactgttactagactgatactagagtgaagaagtagggattatataaaggacttctcagtaagtgattaggttctaaaagtttctattatattccagtacactccagggagattttgttgacttagtttccctaaaattgttccttttttattctaaagcctagagttcaggatagagaccagcatatcccaaaatctgccttggtcaaaggcatt

SEQ ID NO: 379085 - DNA, 536 bp, Homo sapiens
cttgctgtggttgttgccatgtcttgagaaattctgcaaagagctgtaatagaaaggaccatgtatctctcttatcttcctctatagaattatgtgaactaaagccaaagctatgtaaagatatccagaattgggactgagttctgtgtaaaacagaaaaataaaaataaaaaagataccaagaatttgatacatctaacattagagattctcmaagtgtttctaatttatcttctcaatctttctaaaattcctataaaatagatgcaagacaggaattatcatcattttccagtgggaaaatggaaattcaaagagattaaaaatagtacccagattaaactacaaattgtaatttttaatcactgctttttaaactaatcatgtggcatattttagatccgtattatttaaattattaaatgaatacatccccatacatgtgcatataactcattttcttaattctgttaaggaagaaagctgagctctgggccatatggatcctttaaaagagacagatgcatgaagtttgg

SEQ ID NO: 379086 - DNA, 475 bp, Homo sapiens
acaattacaatattgttggtcagaggccagaaaaattattgatttttcttccagktttccttctcaggaataaaatagttttcaaatacctgagttaagattttacattcaaatcattcacaggaaggtttaatatttgagctgataaaaggaggttaccaatttgagttacattgaactgccagaaaactgtgccttctagccttctacaaagtgaagatgtaacctaacatactttacatatctgataaaatataccatctattttatattctgtctcaaatctaacgtgaacatttctgcatttgttgtgaaaccaacatttaacataaagaggtcataaggtttgttgttctagataaggagatacagtgtgtaatcatttccatgggcacatttaattattatattccatattaaaataggagtcacagtattgatccacaggcatcttcattaaaaatagaaatctccc

SEQ ID NO: 379087 - DNA, 576 bp, Homo sapiens
ccttgggcaggtaccagcaattaacttcaagcttggctttcttcttcagtgtcttctggaaaatccaagcatcttgctccaatccaagtagcatctcaactggtgccacttctttttgttctccaatacttgtttttctcctgttcaggttagtgctgagagcagattagcaactccactgcctacatagatgtccaacccaacaatgagaygcttttgtctccttcttatgggtatatctagtccttacaagtaattttactgggttctttaacttggctttgagggagaagaagagccacattacttgtccccagtgactcccatgtgttcctctagtctacgtacaacacataatatgtagataacgcagtagggaggaggaaaggatgggagactgatgcttggaggaggaacgccagttctgttgcctctcagtagcccactggttctctttaaatgatgggggttccttgatgtatattgtcttcagctttggagctttgatggcaattctgaaaacatgggaagagaacagtttaccatcctgaattattaaatgtgggagaagagagt

SEQ ID NO: 379088 - DNA, 553 bp, Homo sapiens
gggtaagcatacaatgcaacatacatcttaggttcaccttagggcagggttttagcattaaaatgaggtggaatgtgactctatatcaaaaggcgaactacaggacaccaagacagcttgtgcacagcctctataagctggccgaaactggcttaaggtctgcaattgcttatcagaaaagaatgttggcaaggccagtcatctgtccaatcagagttgttgttttctgggttgtgaatcagagttaggataatttgcctgatagctcctattgttagtgaaagtgtagtttttcttgtatgaatttargaatttgccatgacagctgggcctggaaccctggacctatagacaactttttgtttctttaatcttaaggtcaatcttagttgtggaagcggtactattttggcctctcatatcacaaactaaaaaacttggccacaattttgtgccataatgtaggtggtcagaattaaaatattgtatgtagagtcttttattatttagatgtataagaatatgactttcttcatatttgatatgtgtacaa

SEQ ID NO: 379089 - DNA, 529 bp, Homo sapiens
aatctttctcagacatcattatttttatgtcacttctatagttaaaaaccattaaatgacaccccatcatccacaaagagtggcttttacaatgtgctttatatgttcaaccagaaaagtcttcttttatctgcttcaatacttttagatatggttttgtttgaaggaaaaggttaaggatcaagaaaagtttaaaaaccagtgatccacagaataaagttcaagttttctagcgtgatgtacaggagctactattacctggattctaactacctctctgaattacctcccaactactcctacccactccatwtctcatatgccagtgttggccaattacccatgggtctccaaataatccacacccagatttctggccctccaccaaccctgttaaatctccttataatatttatgttcattcttaaaaattcatgttagtcattgtgacctgaagccccagtgtttgtcactattactgggtatcattacactgtgttgtacctattaaccgacatgttgtcattat

SEQ ID NO: 379090 - DNA, 605 bp, Homo sapiens
tgtgagtatgtgtactctataatacagaatctcagaggagaagaggaaaaaatggaacaaccggggcaaataattccatccacccctactcacacttcccaccgttttacatgggagctaggctatttttaagaaccttctctgacagtgaactccaacaaactgttatgttgagtggttcwtctatcactataaaccatattatcaatcttaatagtacaatgaagaaattgaggtcaaaagggtaaatgcacaaagtcctaaaacttggttggcaaaaccaagaaaggaacatcaggccttctgacttcagcttttgtgattttcccatcactgaaccgcttctgtattgatgtagcattaatatagaactcatgatctaaacaaagcaaagcaaatctttcttcctgtacttcatgttacggacactttactatgttttcttttctgaatctcatggctgggggacagtgcgtgcaagggaaggagtatgggtttcaagtcagggcagctggctctgaaattaatgtaccaagggactttactaaagtgaatacataaccatgatgtgtctaactgcttttcttattttagaaagtgtaaat

SEQ ID NO: 379091 - DNA, 621 bp, Homo sapiens
aagtgtgtcgctatgcaaaatgcaaaggtagtagtttcccacctatacaatttaaacatatttatactaaaagtgattataatatatgttaaaagygaataaagccactattcatgttgttaattcttcccaatttgtatatatatcaagagggcattctcagggatagttaaatattgtatggattgtttatactaatgacctatttttgtccttccaaagccatgttgttgttaactctttttttctggtggatggtggtaatttaaataaactaaatatcacatacggtatttctaaatgttttctatttaattgagctatgtacagtatccatttttggggataaaatggttaaatattgacaatttcatacaattcaacctgtagataattcatgtttttttaaagaatcatagtagaatacattcctaaagctcttaaactagcaaacttctactaaggagaatgtgaaaatatattctaattaatatgtcaaaccaaatttgaagatgaacactaccaacattcaagtatttacatagctagaaatattatcaaaaccaagctggcttccatatttaaaaaagaggatgataataagttttcattagtggctat

SEQ ID NO: 379092 - DNA, 588 bp, Homo sapiens
cattatctcatttggaagcttcccctttcctcctatctaacctctccaggggattttcttttaattttattttcatttttatttttatttttttgttttaaaggttgattgagtttcaaacaccagacggctagagaatgagactcttcttaatacaccactgcaatttctttgccattctgcagagtatgyctttcatagtcggccctgcttattcactgcagtggccatgttcttgctatttgcctcaggagcaaaagtgatgccccaagtttaagcaccaaggtaacaagccaggtttttcacattcacatcctcagccattgttcccacaatgcaaaattttacctgggtttccagacctgcctataaactgtgataatagctgtcttcttcatcaaacctattgtagttctgatttcccattccataatggtaagttggcacacttgctttcttctctttcttttaaactctgacaagactactcaatcccatgaaaagttttcatagtttaaaccaccaaaggatatgtttgacatcagtcctgtattagtccgtcctcatgctgctaataaagacataccc

SEQ ID NO: 379093 - DNA, 599 bp, Homo sapiens
gtggatatctgcatgtgttaaaattwcttctattttaagctcactctctttttaatttaacaggacatgtcagaacatgcagtctcttttcttttcaccctcctagaaaataggaaatatacaaaccgatcttggtggaggcaaaaagccaacttgtaggggaaacaaacaaataataattaagcacacaaacaaatataaataaagaaacaacatttgaaggtctgggtgatttgatttgagttgaaatcccacagcatttgatataaagaactgcagtacgaaagaataacagcaaggacatagggagaaatacggacagtcttcttgcctggatcttaataggcaaggcattaactttgccttacctcagtttcccagaagacattaaaacgaaacttctcaattataaatatccatacataggcttactatatgaaaaaaataagaaaaatatctcacacttattgagagttcatttttatgtgagataatatgtttagaatatatacaacatatataatatgtatatatataacatatataatatatataatatatatctaaatatatacatatcccaaaataaaaaaaaatta

SEQ ID NO: 379094 - DNA, 584 bp, Homo sapiens
caggcatgagcccctgtgcctggcttatattgaaatttaaaccccaatgtggcagtactgaccgagcatggggccactaagatgtgattagatcatgaaggctctactttcatggatagattattccattcattgattaatacattaatgaattaatgggctaatgggttatcattggagtggagttggtggttttattaaaataggaggagacctgagctagcatactcagcctcctctctatgtgattacctgtgccatcttgggactcttcaaagtttccaccagcaagaaggctcttaacagatgcagccttttgacctttggcttttcagcatccgtaactataagaaacaaattacttttttttaaataaattacccaatttcaggtatcctgctataagaaacagaaaactgactaatacacagatgcctatttccctagatgtctgaaatgttggcttcaaaagtgcacagctgaattcctcttgggkaattcctctgccaaagaaaacccccttgttctaggttacacttagtccctttggacaatctccttccactcactagtttggaagagag

SEQ ID NO: 379095 - DNA, 659 bp, Homo sapiens
gtgccaattaaatgtctgatattacagttatttatcagaagtacctatattaacaatagattgttctaaaaagtcagttaagtaatagagaaagtgtaaaggctttgcattttatccaaatacttactacatttattgttacacatagatatcattacgtaatgcttcatcaattaatctctggccatattacctgagagatataaccatgtagcataaagtcagcsctgccccaaatgctgttggcttacaataagtaggaccagtaattttattggtcttttttcttgtgttatgcaatgcataataaggaaatgtgtggtcgtcagtgcctgaatgccactttcagtaatagaaacgccttctggggaaataagactggtgccaggacaagaatatggaagcaagcttgaaattatttcacttctatttcagaatggtttttaaaaaaagaaaaaaaaaggcaggagcaagaccattttgagggctgccaccacactgaggcatttcaatgaaaatacttctatagctttctgtaacctactaaacagaaatccagggatctcaggtgggcctgtcagccgtgccaacttacctttgcacatgatcattcacaaggtcccttcgtgagcacttagtattcttttttccaaagtgga

SEQ ID NO: 379096 - DNA, 661 bp, Homo sapiens
tgaacaaatttcaaatgcttggtgtgatacagagtataaagattgctatctactatacaattatgttaatagtaaaaaaaaactaattagaaaaatttttgatataaaaaacacatgcataaataagttattggtcaaggaagaaatacaaacaatagtaatttgattatttaagacttaatgattactaaaatatatctattcatgcttgtgagatacagctaaatgctacttggagggaacatttattgtcttgcatgcatgagcagaaaattttaaaaacactaaaaatctaaaaattaggaggttatgaagtgaacaaaataatataaaagaaagttaaaagaggaatagtgaaaggaaaagaaactaatcaaattcaaaagaaacgtccartagggaagatagttaccctgcaggacaacaaatcttagacaccagaactagttttagatcaaactttagaaactagaatagatgatttttcatgagtttcaatccttttaagttacagtagtaagatatatttttatttatgaaatccagcttacctaattgaaaactgtgtgtttgaacatcttgtgttctctcttatgttcaaagctatgcaatttttataagaaaatagatatttataatatttaatttccaagtaactaat

SEQ ID NO: 379097 - DNA, 556 bp, Homo sapiens
taaaagacctgacttcaaatgacccacatggtactgggggagacagatgtgcaaataatcatggtatactatgacaaacactgtgctaaaagtatggcaaagaatactccacgaaaacagaaggaattgatagacccattttgctaaggaagatttatgagtttgctatgtttgaactgtgccttgaagaatcagttgaattagctgaatggctaggaaggcatttggtaaactagggaaaacatcaaggaattacaaatcatttcagctgatcagtgatgagagacarcattaagaaacaaagtgaagccaattatagaaagaacatcatccccccatcacccgattctccactatcaccccagacaccaggaggagcgcttcctaccaatcagccccccctgacagacgggccccacaagagctccttaaataccaataggtatatcatagttcctcaacctgtctttgcatccacagttgtaatatgtaaggattaatttaacaagaaattttgatgtttagacaggtttggaaagtttagatctaaatataa

SEQ ID NO: 379098 - DNA, 607 bp, Homo sapiens
attatagaaagaacatcatccccccatcacccgattctccactatcaccccagacaccaggaggagcgcttcctaccaatcagccccccctgacagacgggccccacaagagctccttaaataccaataggtatatcatagttcctcaacctgtctttgcatccacagttgtaatatgtaaggattaatttaacaagaaattttgatrtttagacaggtttggaaagtttagatctaaatataaggttttgcttctcttttcacaggtaatttggactctaatgatgtctacatagccaatctacagtctggctaggaagggatacgatggcatggtattttaaaaagaaaaaaataaagttatctaaaagatacactaccattagctgagatgagataattgaattctctttaatttgtaagcagactggcttactctacacccacatactctcatttagcaaaaagataaaatatctacacaggaccttgcagcttacaaaatacatccatatacatgtaggtcccacaaaatgctgtggtgtaagtacccttatgaccctaattgacaaataagaaaaccaaggttccaagagttaaaggctag

SEQ ID NO: 379099 - DNA, 604 bp, Homo sapiens
actagtctatatgtgtattaattaggctacctttagcccagtgataattttttttaagtagttcttgtaagtctagatgtcagccaaaatccctcattcacctgcaccttttatcaaatatgcaaagaggcactctagggagccttaaaagcatagactctggagtcagtatgacctacattcaaagtctctatccttcactttttatgcatctgactgtggaggtttgatgtcaaagtccttgcttccttatctgtaaaatggagttcataatagtggctattgtggattagagtgaagaggcactgatttcacttgacttgtgtttccacaacggaaaagaaatttgcagtccatttctaggagggaaatctacaaaayggactcttccagcttctctctataccttccttcactgcactattagaaaggagggggacttaatctaatttgcaaatttgaaaggaatagagtatgcgtctctcctttttcagatgcgcctccctgcagagagggctctggttatgtagttatgccaagcagtgggtgacatacctttctttctacttcatatggatttccagaaaagccagcctggctactg

SEQ ID NO: 379100 - DNA, 607 bp, Homo sapiens
agtctgactaattttcaatgctaaattaaagtgcagagtttagattgtaattttgagattagatgatttctgagtccttggcctatatttcatgtattcttttttttcttttatagttattgtcttcactttctgatctctgcaatataatcagacaggtgttcctcaaattctcttaatttgcttcacttaaaataatcactaataacaatgagaaacatgtagtgaatgctcaactttatgatatggrtagttttttaacttttattttaaattcaggggtaaatgtgcaggtttgttatacaggtaaacctgtgtcatggaagtttgttgtgcagattattttgtcacccaagtattaagactagttcctaaaatgacaaacaccctggaagacagcctaagcaatatcattcaagaaacaggcacgggcaaagatttcatgatgaagacaccaaaagcaattgcagcaaaataaaaaactgacaaatggaacctaattaaactttagagcttctgcacagcaaaagaaactatcaacagagtaaagagacagcctacaaagtgagagaaaatttttgcaaactatgaatgtggatagttttaa

SEQ ID NO: 379101 - DNA, 607 bp, Homo sapiens
agtctgactaattttcaatgctaaattaaagtgcagagtttagattgtaattttgagattagatgatttctgagtccttggcctatatttcatgtattcttttttttcttttatagttattgtcttcactttctgatctctgcaatataatcagacaggtgttcctcaaattctcttaatttgcttcacttaaaataatcactaataacaatgagaaacatgtagtgaatgctcaactttatgatatgggtagttttttaacttttattttaaattcaggggtaaatgtgcaggtttgttatacaggtaaacctgtgtcatggaagtttgttgtgcagattattttgtcacccaagtatyaagactagttcctaaaatgacaaacaccctggaagacagcctaagcaatatcattcaagaaacaggcacgggcaaagatttcatgatgaagacaccaaaagcaattgcagcaaaataaaaaactgacaaatggaacctaattaaactttagagcttctgcacagcaaaagaaactatcaacagagtaaagagacagcctacaaagtgagagaaaatttttgcaaactatgaatgtggatagttttaa

SEQ ID NO: 379102 - DNA, 593 bp, Homo sapiens
gtgcatatagaccatgataaaaatgagatgaaatattaacctccatcacatgggcatctcagcaatgattcttaaccagactgaaatggttgaaatgacagacatataattcagaatctgaatggcaatgaagatcatcaagattcagggaaaagttgaaatcaatccaaggaatctaaggaatcccataaagtcatagaacatcagaagacaaratgaccattttaagagagaaccaaactaatcttctagagctatcaaacacactacaggaatttcataacacaattggaagtattaacagcagaatagaccaagctgagcaaagaaactcagatctggaagactggttctttgaatctttgaatcaactcagtcacacaaaaatatagaggctgggtgtggtggctcatgcctataatcccagcagtttgggaagctgaggagggtggattgcttgaactcaggagtttgagatcagcctgggcaacaggacaagacctcgtgtcttttaaaaattttttaaaaattagccaagcaccatggtgtgtgcctttaatctcagttactcagcaggctggggtgggaggatt

SEQ ID NO: 379103 - DNA, 593 bp, Homo sapiens
gtgcatatagaccatgataaaaatgagatgaaatattaacctccatcacatgggcatctcagcaatgattcttaaccagactgaaatggttgaaatgacagacatataattcagaatctgaatggcaatgaagatcatcaagattcagggaaaagttgaaatcaatccaaggaatctaaggaatcccataaagtcatagaacatcagaagacaagatgaccattttaagagagaaccaaactaatcttctagagctatcaaacacactacaggaatttcataacacaattggaagtattaacagcagaatagaccaagctgagcaaagaaactcagatctggaagactggttctttgaatctttgaatcaactcagtcacacaaaaatatagaggctgggtgtggtggctcatgcctataatcccagcagtttgggaagctgaggagggtggattgcttgaactcaggagtttgagatcagcctgggcaacaggacaagacctcgtgtcttttaaaaatttttwaaaaattagccaagcaccatggtgtgtgcctttaatctcagttactcagcaggctggggtgggaggatt

SEQ ID NO: 379104 - DNA, 586 bp, Homo sapiens
ttacttattcctgccagtccactctaatctgtagatatttggttatcaactgatattaattctagacaaagaaaaaaatagaaagatactctattttggtaaagtgggataataatttaaccaaaagcaaagacaacatttttttgatatttatgttctagtaacagggtaatttgaaacatctttaatacaataattctacagaaaattttaaattttaaaatataatttaatttctgcataatgcattttagtttttaaaataactcctttaaaaaagttaaatagagatattataagctgaatagtgtttctcscatttaaattcatatattgtagttgtaagccccaatatctcaaagaacatgattctattagtagataaggtctttaaggaagtaattaagttaaaatgaggtcatgagtgtgggtcttaattcaatatgactggtgtcatataagaagagattagggacagatatacacagagggaagaccatgtgaaaactggaggaagaaatctatctacaagacaaggagaaaggattgatctcagacttccagtctccagaattgtgagaaaaga

SEQ ID NO: 379105 - DNA, 503 bp, Homo sapiens
tgtggcatggtgaggaggggaaggctgtgtygcccctggatctctttggagaaatgatgtagacattcataagagggttcctgtggtgcacttggaaggttgtgagaaaaagtgcttcattatgatttcaaggttctattatccaaaaatgccacctcaaaaactatcaaaggctgctcttcagaaattcagtactgctctgtacacaaagcaggatgttccccgagaagaaaaagcacttctcccaccgcatcgaaggcctgcggtattactgacctcccacatcttttattggaagctgaggccttataaggtacaaaggtgctgctttagtttagatttttctctttgaatgatggagagactcatttagggcatcttaaggcaggggagtttcatagtatggcagggatggaggctctgaagcttgagtatcagatggcttgagtttgaatcctggttgcaataagcagcagctctgaaaccttcatatgtgactttac

SEQ ID NO: 379106 - DNA, 511 bp, Homo sapiens
ccagtcagccctctgtatccatggtcccacattcataaaatattttttaaaaataacgatgcaataataaaaagaatacaaattttaaaaagcaatataacaagtatttacatagtatttacattgtattaggcattataagttatgtagagatgatttatgaaggatgtgcataagttatatgcaaatactacaccatttgatataaggtatttgagcaatcatggattttgatacacagaggggtcctggaaccaattccccatgaatacctaggaatgactgtatatgcattcttgctttatatatgtgtcctaagactcaacaggaaagggaaatcactttcttgattgtatgatatcttgactcaaacaggatatttggaaggaagtttaatagyaaacactccttcctcaccaagacttactttgaagccaatagtgtcaccaaacactaaggtattggtatttaaaaaagacctctgtgcttattttatgtccccccaaattta

SEQ ID NO: 379107 - DNA, 588 bp, Homo sapiens
cgctcactctgggtgggggaagcgggttccaggcgccgggcctcactaggcgaggcgagacggaagaggcgtctctggaggtaacttttcgaccttcctgggagtagctctgaagcgagggggcgtggcctcgcctgagttctaacagatgattggtcttccggcaggtaggtggggaatgagtgctacccccacccctccctcttcgaaccggaagtgtctctgggtctttccagctggttgtcatttcactcggctcggtcctgaggagaaggactcagccgcggctgcgggacccgggcaccgggaggcggtggcggcggcggcggcggcagcagcggcgacasgagaggaggaagaggaggaagaaggaaagaaaaagaagaaccaggaggagtcctcaacaacgacagcggggactgcgggaccagggtaaagcggcgacggcggcgacggcccagcaaccgtgaggagaaacaaaagccttctaaattatagtttaaaaaaaaattctgggggaaaagagagagaaagccgaggggggaggcccttctcctttaaaataactacggtagtgggtttttcctt

SEQ ID NO: 379108 - DNA, 588 bp, Homo sapiens
cgctcactctgggtgggggaagcgggttccaggcgccgggcctcactaggcgaggcgagacggaagaggcgtctctggaggtaacttttcgaccttcctgggagtagctctgaagcgagggggcgtggcctcgcctgagttctaacagatgattggtcttccggcaggtaggtggggaatgagtgctacccccacccctccctcttcgaaccggaagtgtctctgggtctttccagctggttgtcatttcactcggctcggtcctgaggagaaggactcagccgcggctgcgggacccgggcaccgggaggcggtggcggcggcggcggcggcagcagcggcgacacsagaggaggaagaggaggaagaaggaaagaaaaagaagaaccaggaggagtcctcaacaacgacagcggggactgcgggaccagggtaaagcggcgacggcggcgacggcccagcaaccgtgaggagaaacaaaagccttctaaattatagtttaaaaaaaaattctgggggaaaagagagagaaagccgaggggggaggcccttctcctttaaaataactacggtagtgggtttttcctt

SEQ ID NO: 379109 - DNA, 605 bp, Homo sapiens
tggcttaaagtgtctgctcagactggttagcatcaacatgatgtgaacacytctttgaaatgctagatcttaggccccaacccaaatctactgaatcagcacttgcgtcaggttttcaaagtgatttgtatgtaccaaaaagttcaaagcaccaattaagggtacagttttggagtggaacaggctagagtcagatcctgcctttgtcacttactagtatttgcatgacttgggcaagttattgtctaagctgcactcttattgtctgtaaaacagtgattttcaaaagcacctgacttcccaaggttatttagaacattctacaagttaattcacataaaatgctggtttatagtaaatgctcagtaaatgtgagcttctgctattattgttaaaaataataaccttcttgatcagccagccagatggctcatgatttctttctgtgaagagcaaaagcctatacacacacacacacgcatgagtacacacatacacacatgcacacactgcaaaagaaagacagtgactttgcttttgagttggtctcagagcgttgaggaaggaagggcagaatcacagaagaacagacaagacagcttctc

SEQ ID NO: 379110 - DNA, 598 bp, Homo sapiens
ggccaaatttgaattccgcattaaccccttactagctatgtgaccttgggcaaatggtttcaccctcattttcttcttcagtttcttcatctgttaagtaaagctgataagagcacctatgtggtagatacactagagctcaccaacaactttttcagcacacataatcttttgaacttgggcatggactgtgaacttggactatgtgacttgccctgaccaggaaatataaggggaagtggtgtacatcacttctagatagaagcattcagagctggtatgggttctccacactctctaccttgccatgttgaccaaggaggcaggccaggtgatttgagtgttgcaactacaggatggccagcttggattcycaagcaattacagtgaaaagagatcccctcagctcacaaagaatattgagcaggagtgagaaataaacctttggtatttacttcagcaaaacctagctcatgccaacaaattggcttacttcatagggtttttgttaggatctgatgagttaggcgttttagatgtttggaccagtggctgacacttagctaagtacacagttaatgtgagttgaagttattaa

SEQ ID NO: 379111 - DNA, 606 bp, Homo sapiens
tctgaccccaaatctcattctcttatctcaaatcctagaggagagtacggccatttaacttacgtgaattttgctatacacatttgcgggggtggtgggaaaggaaattttaagaacatgggccattcttctcatcatgatctatgccatggagtaaacgtggggcagagcctgaatctaaaaaggttgccttcactcctctcagttcctttgggcctctcatggccaatatgtctaggtgtccacatgatttccatacaacaaagttcctaaatgcaagccccctactttacttgggctcaatcaaagaaacagtgatgtatctggtccaaccatggacattaaacaatcactcttcctgtatcatgcacattgatagacaagttaggaaattkttgaagatgatttttacaatatcaatgcagtccgtgttgtctttggaatgtactggccccaggaaggtgcaattatgcccagggcagcctccaggttaggaatggccagctggtctgtgggttaaagacccttgccttggcagccatctttgtgcccctttgtgcttggaatgccaagtatcttctgattttcagtggccaaagcaaccag

SEQ ID NO: 379112 - DNA, 426 bp, Homo sapiens
gttacattttgggagaagagagagggaaataatatggttagggcatgaggagcctcctatgtgtcctttgagtgtttcttgaaccaggttgatagtttcatgggtgtgttcactctgaactaattccttgagctatacagttatgatttgcacaattcaattatattatatttcagtggaagctaatgaaagagaaacattgctgctaaaattcattaagtgaaggcttatggggaagtagaccttcatagcatcctatacttgcaaaagtggcaatctaactgaaggatgacatcagtatcagatatcagatatcacacaaaccaatgatcactyttactgtctcaactgtgggtcaacctgacattacaaattttctgatgtagtacaacatgaggtacaaaatttcacctgtgatttattcta

SEQ ID NO: 379113 - DNA, 297 bp, Homo sapiens
ttttctgatgtagtacaacatgaggtacaaaatttcacctgtgatttattctagtcaagcgtgtttarctggcagccattaaggcatcagatgtaaatttagacacagaaagcaatcaagcaaagccttaaggtatgccattttgtaggtcaattggcctctttccttcaacaagtcagtaccatttaaaaagagggggtaattctaaatgtaaaaaaaaattaaggggtggacaattagatataatgtgcaggactgcactgagactggtttaaataaatcagccctaaagaaaaa

SEQ ID NO: 379114 - DNA, 297 bp, Homo sapiens
ttttctgatgtagtacaacatgaggtacaaaatttcacctgtgatttattctagtcaagcgtgtttaactggcagccattaaggcatyagatgtaaatttagacacagaaagcaatcaagcaaagccttaaggtatgccattttgtaggtcaattggcctctttccttcaacaagtcagtaccatttaaaaagagggggtaattctaaatgtaaaaaaaaattaaggggtggacaattagatataatgtgcaggactgcactgagactggtttaaataaatcagccctaaagaaaaa

SEQ ID NO: 379115 - DNA, 297 bp, Homo sapiens
ttttctgatgtagtacaacatgaggtacaaaatttcacctgtgatttattctagtcaagcgtgtttaactggcagccattaaggcatcagrtgtaaatttagacacagaaagcaatcaagcaaagccttaaggtatgccattttgtaggtcaattggcctctttccttcaacaagtcagtaccatttaaaaagagggggtaattctaaatgtaaaaaaaaattaaggggtggacaattagatataatgtgcaggactgcactgagactggtttaaataaatcagccctaaagaaaaa

SEQ ID NO: 379116 - DNA, 605 bp, Homo sapiens
cccagtctaaggtaatttgttacagcagtccaagtggacccaaacaggttgtaaacacttgaaaaatgaatatctgtattgaatcgcatattttagcaaaagttttctggtagaaatacagcctatggccaaagaattaatagccgactcccatttgaatggccaagatttgctctctatgtccagtattttatttttrtgcctgtaagttggacatatgcaaatttttacaaaacaaaccagaaaagttcaatagtctttcattctctgatttcactaacttcttttaagtatatttcaacaattatcttaatattgtcacctgtagattaagcatactgttttaaacactctattcctatttattcaaagcttgaattgagctagctgctaataacattttttgattagcatcgcaaccatattcacctaccatatttttccctctcctttgatttctgggcaatcactcactttcacaatttgtatgtgactcacaattctatacctacttttgccttaccttaaaatattttttgatttaatacatttacattttttctccttttgcttttggaattgtactactatcatgggggttttat

SEQ ID NO: 379117 - DNA, 604 bp, Homo sapiens
attaattttgttcattcccatatacctgaacatctgggacatgaagaaatagtgtgtatgtgttaataggcaaagctgtagtaatgacttctacctatcagaagcagttatctattttcctgttactatctaatttttacacaaaaatacttcagatgaatattgacagaaactcagaaagaagtatggcataagctaatatgaaggtaatgtaataatggcagaaagttacagcttaaaagtttttacagtgggaagattattgtaatagtgagagccatgtataagtttgttttgaaatgataatgtacagctgaagagtataatgctcaaatttttgtatatgtagtatttgtaattcaacaagtagggttaagagacagtaagaattatacagaatgttggattctatttcacatctgttcctcttgtcagatatggccatctttcccatgtttcatcaggtgttcrgtaagttaacaacattcactccgtgaaaagtaccacatgatttattgcataaatatagttggaaatacactgtggttcctcatatcctcaagcttataattcagtttggagactacactatataaatgtagaa

SEQ ID NO: 379118 - DNA, 561 bp, Homo sapiens
tagcgatctttttgaatatctacttaacctcagctagctttaaattcagaagtagcaactccatagaaattcaacttattacgaccttattactcatacttgtctccttgaagaagcttttttgctatcatccagtttagactgggatgtcacagatctctggactgagtagtataatactcactattcaaataaaatcaaattattagaatgttatgacacctccaaatacaaaaacgaagcccatggatgttaggttaaggtatagagacaagtattcctacttactatctttttagagcagacatatcccagctaaggtgattgcaaaatgaaatggaaaccatattgtggaagrggacttgagactcagattggattttcataccaactcttacatacacaagctgcatgactctgggtaaattgcatattctcttagagtttcaatttcttcatctgttcaatagaggttaatccctatgggctatggctgatgtagggataaaagaaccaacatggatgcatgggcagggcctggtccatagagcagctggcatc

SEQ ID NO: 379119 - DNA, 593 bp, Homo sapiens
atgtagaagcatttaagtattttgtgcatcaacaggacaactaaaggaacaaattcttattgtatcttttttagtccctgaagacaaaaccacagtgacagtaactagttcaaggcattgtattcagagagggtcagccttggtctttgagagtgagtcccctttaccccactgycaagactcactgagcagatgggaaagttcaggtggaacatgcagtgaatagcaaacacggtggggggcgctcactatcatgcactgccatgcctgccatggtcagcagacctgtcttctacttgacaacaggcaggttgagaaacattttcttggagagtttcttgattcttgccagttgtggcaggaaggactgatttagaggagttcaggaaggttgttaaacaacacagaaacacaagatgaattgtactcctcagcaggcctaggttagagcagcaggtacttaaagcctcagccactcctgggacacaacataatgccctaatgatttgaaatttggtggagagtgggtcgctaatccctgtgtccagggacaaaaagagacataaacagcaaaaagttataaaataagtggg

SEQ ID NO: 379120 - DNA, 593 bp, Homo sapiens
atgtagaagcatttaagtattttgtgcatcaacaggacaactaaaggaacaaattcttattgtatcttttttagtccctgaagacaaaaccacagtgacagtaactagttcaaggcattgtattcagagagggtcagccttggtctttgagagtgagtcccctttaccccactgccaagactcactgagcagatgggaaagttcaggtggaacatgcagtgaatagcaaacacggtggggggcgctcactatcatgcactgccatgcctgccatggtcagcagacctgtcttctacttgacaacaggcaggttgagaaacattttcttggagagtttcttgattcttgccagttgtggcaggaaggactgatttagaggagttcaggaaggttgttaaacaacacagaaacacaagatgaattgtactcctcagcaggcctaggttagagcagcaggtacttaaagcctcagccactcctgggacacaacataatgccctaatgatttgaaatttggtggagagtgggtcrctaatccctgtgtccagggacaaaaagagacataaacagcaaaaagttataaaataagtggg

SEQ ID NO: 379121 - DNA, 588 bp, Homo sapiens
gagtcctgaccaagagattttcttggaagacatagattgacttatagcaaatattatctgaagtagtaaaatcttayactttatttttatagaaaacagacaataaaaatctttctaaattaatgcataggtacttttgtaaaaataacataaaaatatctgattaacttagatacataagttcaagttccaaaataaagaatgagagtttatagtttgtctgacttttattcttttcaatccataattaattccatagatagaataatttataatgtaactttaatcattacatcctttgatcaaaaatatacaaatattcttaatttttcttctcatatttacttaaattatttttcatcactttaatatttctttattcactggtcccaaaatagttcactaagtttggtatttcttggttttgtaaaaaatttcccaattcagctcctaagtacaattagtactcttctctcctcttcctttgtattctttttaggtccaaccccatggctttccttttgtactctctaggccaagaatgttctttcttcttcctaccatttaaccattattcatttttcatgg

SEQ ID NO: 379122 - DNA, 520 bp, Homo sapiens
acactaaaacctgaatgtacaaatggtacctatcagtgtactagggaaaatgyacaatacacttaagttgtttaacttgaatagaatataataaaagagcaattaaaaagctgtggatagtgtatagataaaccacaagggataattctgtatgtaccctgcaactgttaccttctctaggtctgaagggatgaagggcagtattagttattgaaacttggagacaaaaagggcgtgtgaagataaccaccttcaagacagtgatccaggacattggtgagagataaaagcatatggcttagagaaggaagttctagaaagattatcagtggagacaagacaagtcagtggggaaggaaaatggtgaaaacaaagagcagggaagaggacaatagtatgtatgatgagtccaatcaggcactggggaaagggaagtgggtgtgattttgttttatttaacaacaaaatagagaaatgaaaggcaatgaagtgcacatgaataagctggtttctactgtgt

SEQ ID NO: 379123 - DNA, 588 bp, Homo sapiens
aatttcttgaacctgggagaaggtgcttgcagtgagctgagattgcgccattgcattccagcctgggtgaccagagctaaactccatctcaaaacaaacgaaacaaaaatctaaatgtaatttagttgaatatttaaacttttaattgacatttcaaattagattctaattccatttaaaagagcatatcatagaagcaaatgtactcatttatgttaactctgtggtttcatttaagcaatttrttttgtgaagggatgcaaatccaaccagattttaacagtgcataaatatgtatttattaattgaattacaatcacaatactctcaactccccatttgaataaaggagagcatctgatctgtgttctgggacagcgtgcactgtaggtgtgtggaaataccgatgccctcagctgtgtggcaggctcagtgggacctggagtgcaggaggagcccctggcatttcacctcctgccacaaaagtcattgtccatttatccccgactgctatactaatattatattcagtggttgttatgatgctaaagaaaagaagcagggagatttattaaacacttacatgta

SEQ ID NO: 379124 - DNA, 320 bp, Homo sapiens
aaacaagaagtgatgaaggaaatactcaagtcatggaggaaaacctggctaagaaagaatcaacacattggattttracatattgtcaataactacaagatcatgttccttggaagcaaaattatagtttacatctaaagtatacgctttttattgtttcatgtaaattgttttataacaagttgtgataagtcatgtataatcaacaataatatttttcataaaatacttgtcaaagtaagtttcacaaagacaaaatagagtagagctaagctaattcattggttatggacagtaaggtgcaagtgagtggtacaaga

SEQ ID NO: 379125 - DNA, 320 bp, Homo sapiens
aaacaagaagtgatgaaggaaatactcaagtcatggaggaaaacctggctaagaaagaatcaacacattggattttaacatattgtcaataactacaagatcatgttccttggaagcaaaattatagtttacatctaaagtataygctttttattgtttcatgtaaattgttttataacaagttgtgataagtcatgtataatcaacaataatatttttcataaaatacttgtcaaagtaagtttcacaaagacaaaatagagtagagctaagctaattcattggttatggacagtaaggtgcaagtgagtggtacaaga

SEQ ID NO: 379126 - DNA, 320 bp, Homo sapiens
aaacaagaagtgatgaaggaaatactcaagtcatggaggaaaacctggctaagaaagaatcaacacattggattttaacatattgtcaataactacaagatcatgttccttggaagcaaaattatagtttacatctaaagtatacgctttttattgtttcatgtaaattgttttataacaagttgtgataagtcatgtataaycaacaataatatttttcataaaatacttgtcaaagtaagtttcacaaagacaaaatagagtagagctaagctaattcattggttatggacagtaaggtgcaagtgagtggtacaaga

SEQ ID NO: 379127 - DNA, 489 bp, Homo sapiens
aagagaaagtggtttaaggagaacagaaagtgttagatattttttataatctattaaaagattcagaaayccttcataagaaacagcatagaggaagacaataattctccatctaatttcaagggattcctaaaccctcaaaaaggcctaaattaaaaatcttcagtcttgggtggacacagtggctcacgcctataatcataaaactttgggaggctgaggcgggtggatcacaaggtcaaaagatggagaccatcctggccaacatggtgaaaccctgtctctactaaaaatacaaaaattagctgggcgtggtggcatgcacctgtagtccctgctactccggaggctgaggcaggagaatcgcttgaacccaggaggcggaggtggagtttgcagtgagccgagatagcgccgatgcactccagcctggcgacagagcaagactctgtctgtaaatttaaaaacaaaacaaaacaaaacaaaact

SEQ ID NO: 379128 - DNA, 597 bp, Homo sapiens
ctttaagagaaagtggtttaaggagaacagaaagtgttagatattttttataatctattaaaagattcagaaacccttcataagaaacagcatagaggaagacaataattctccatctaatttcaagggattcctaaaccctcaaaaaggcctaaattaaaaatcttcagtcttgggtggacacagtggctcacrcctataatcataaaactttgggaggctgaggcgggtggatcacaaggtcaaaagatggagaccatcctggccaacatggtgaaaccctgtctctactaaaaatacaaaaattagctgggcgtggtggcatgcacctgtagtccctgctactccggaggctgaggcaggagaatcgcttgaacccaggaggcggaggtggagtttgcagtgagccgagatagcgccgatgcactccagcctggcgacagagcaagactctgtctgtaaatttaaaaacaaaacaaaacaaaacaaaactttagtctggagttgagaattcaaaacaggaaatcaattctgtaagtttctaggtgactaaaaatctacaaggcaaaaagctctgtacctaaaacttgtgattaa

SEQ ID NO: 379129 - DNA, 594 bp, Homo sapiens
agctacatacgaacataatggggcaaatgatttaatgtgtatgtgaaaatttttctgattagtggtatstatcatagaatatgtgtattattcaattaaataggtatggctaatttttaaaaactaaagtggtatgagaaagctctgaacttgaaagactaacaaggcaaacaaaccctagagaaccatttgcacttccagcctcctttgggaactgtctgcaatggagggtctaggcagtaggtgtgataacttatgtcacaatcatcacacagcaggagtcttcctgggtcagttgccttcccacaggcctcacacacagtgcactcaagacacctccaacctttgctaagaaccactttagtgatctgtaaaagaaacaaccaatccatgtgatttatgcattaacctaacataatcaaatatactatataaattaatatggtgcttatgtacctagaagcagaaaggggcaatcaactaacatttattgagcgcctacggaggcccaatactgggttgggcatgttcatacatgcttttaggagcctactgagcagaataatagaaaatggcacatattttaatgccttt

SEQ ID NO: 379130 - DNA, 578 bp, Homo sapiens
tcagctccttcattctccttctaataaagttacttagagatatgcggaacagaatgargatgtattacaaagaaaaggaagacttgggatctataaatcaacagatctgacaaaggacatcaggccagggaagtttaaggatgagaacaacacacccagaagccactggcacatatcagagcaggagaagggaatgtctagaaagagggtaggacttctcccagaaaaaaacagtactttaaaaaataatcttatatgatagttctatagtaggcaaaaacaaagaacgaatggagagtcactattactttcttgttattaaaaactccatgaaagacaaaagaaactcatagtatactgtttagatctgcagtgaacatttactgagtcataaccaacaccttattaattgaactaaacatagtaatacaactatattgggagaaggaaggaggtgtattttaagacctaaatcagaatttatttattcatagcagaaagtcaacaaaatctagcattgataaagcagtaaaccagttgattatttagagctatagcattaaccacaagaaaaaaga

SEQ ID NO: 379131 - DNA, 578 bp, Homo sapiens
tcagctccttcattctccttctaataaagttacttagagatatgcggaacagaatgaggatgtattacaaagaaaaggaagacttgggatctataaatcaacagatctracaaaggacatcaggccagggaagtttaaggatgagaacaacacacccagaagccactggcacatatcagagcaggagaagggaatgtctagaaagagggtaggacttctcccagaaaaaaacagtactttaaaaaataatcttatatgatagttctatagtaggcaaaaacaaagaacgaatggagagtcactattactttcttgttattaaaaactccatgaaagacaaaagaaactcatagtatactgtttagatctgcagtgaacatttactgagtcataaccaacaccttattaattgaactaaacatagtaatacaactatattgggagaaggaaggaggtgtattttaagacctaaatcagaatttatttattcatagcagaaagtcaacaaaatctagcattgataaagcagtaaaccagttgattatttagagctatagcattaaccacaagaaaaaaga

SEQ ID NO: 379132 - DNA, 578 bp, Homo sapiens
tcagctccttcattctccttctaataaagttacttagagatatgcggaacagaatgaggatgtattacaaagaaaaggaagacttgggatctataaatcaacagatctgacaaaggacatcaggccagggaagtttaaggatgagaacaacacacccagaagccactggcacatatcagagcaggagaagggaatgtctagaargagggtaggacttctcccagaaaaaaacagtactttaaaaaataatcttatatgatagttctatagtaggcaaaaacaaagaacgaatggagagtcactattactttcttgttattaaaaactccatgaaagacaaaagaaactcatagtatactgtttagatctgcagtgaacatttactgagtcataaccaacaccttattaattgaactaaacatagtaatacaactatattgggagaaggaaggaggtgtattttaagacctaaatcagaatttatttattcatagcagaaagtcaacaaaatctagcattgataaagcagtaaaccagttgattatttagagctatagcattaaccacaagaaaaaaga

SEQ ID NO: 379133 - DNA, 630 bp, Homo sapiens
gatctgttgcaactttataaaaactctgccagtgtaatgcaaaaaccgctacaaatatatgtaaacaaaagaacttggccatatttcaataaaagtttatttgcaaacacaggaaatgggccagatttagtctatgggccagtctgcctgatcctggcttaaacaatgacctgaagacaaagtggcagacagatctgaggtgtttagtggcagaacttttaaaatatttatcttcattcctactaagttttcttcacagatacctgtggtcccttttacaaccaaactctcaagtttctccgcttatattcactcttcaaaacactacagtctggtctctacacccacatccactcataactgcttaagccaggcttgtcaagaccttcttattctcaaatctaatggaaacattagtgtttgtgtttcttgacttctagtacttcaacacttcaacaatttctcygtctttgaaatttccttttaacttaggtactggggttgtactatcatttttttcttccgttgaaccagtttagccttagttttaaaagttttttcaaataagatgtcatccaggattccatccatggtaccatgtccaaagttgttacagatatgttttataat

SEQ ID NO: 379134 - DNA, 638 bp, Homo sapiens
taaaacaagtttaaataatactaagatttaatttgccttttttcactttaatttattcacaattatacagtggtgtttatagaagctacatgttgtatcataatattacattgacattgtacaggttgtgcttctgtagtcttgtgttacaaaatgttcctagttttaatttctaaaatgctgaatagtcsatagttaaaatcctcatgaacaaaaactatggcgtccccagtaattttaaagagtgttaaggttctaaaaccataaagtttgaaaatatccaccttagagtgaaggctttctagacttgccccagcaagcttaaaaagaagcttcaaaggtatcaaacttatccacaaacaattgcctcctgcaataaaaatgcaagctgagccaattcacatatccctagtatatttctagatactgctgtatttctcaatgagactgcagtattctatactgtccaaaacagtgtcatgtaaaaggaaccacacataatttttaaaaacaggaataactaggtgtctgatagtgcactaattgtccaatcttaacttatgtaagtcgtactcatctgtaaaatgggaattcggtaattgttggatgggttaaaagaaatacattactatcttgaa

SEQ ID NO: 379135 - DNA, 638 bp, Homo sapiens
taaaacaagtttaaataatactaagatttaatttgccttttttcactttaatttattcacaattatacagtggtgtttatagaagctacatgttgtatcataatattacattgacattgtacaggttgtgcttctgtagtcttgtgttacaaaatgttcctagttttaatttctaaaatgctgaatagtcgatagttaaaatcctcatgaacaaaaactatggcgtccccagtaattttaaagagtgttaaggttctaaaaccataaagtttgaaaatatccaccttagagtgaaggctttctagacttgccccagcaagcttaaaaagaagcttcaaaggtatcaaacttatccacaaacaattgcctcctgcaataaaaatgcaagctgagccaattcayatatccctagtatatttctagatactgctgtatttctcaatgagactgcagtattctatactgtccaaaacagtgtcatgtaaaaggaaccacacataatttttaaaaacaggaataactaggtgtctgatagtgcactaattgtccaatcttaacttatgtaagtcgtactcatctgtaaaatgggaattcggtaattgttggatgggttaaaagaaatacattactatcttgaa

SEQ ID NO: 379136 - DNA, 558 bp, Homo sapiens
attccttggaacatgacctcattcttatatcctatttttcttttctttyttttttttttttttttttgagatggagtctccttctttcacccaggctggagtgcagtggcatgatctcagctcactgcaacctctgcctcccgggttcaagtgattcttctgcctcagcttcctgagtagcttggactacaggcacttgccaccatgcccagttaattttttgtatttttagtagggatggggtttcaccatgttacccaggatggtctcgatctcctgacctcgtgatccacccaccccagcctcccaaagtgctgggattaggcgtgagccactgcgctgggtcctcattcttgtatcttaaaagtcagtgatgttgagtaatttctcatgccaccacctacaaggttgcctttcttctgtcttcttctttcacttataaggaagtttgtgatttcattgatcccacccatttaagacaatctctctatcatttttccgcaaccttaatttcacttgaaatctaatttcacactgccgtgcaacctaacatatttg

SEQ ID NO: 379137 - DNA, 558 bp, Homo sapiens
attccttggaacatgacctcattcttatatcctatttttcttttcttttttttttttttttttttttgagatggagtctccttctttcacccaggctggagtgcagtggcatgatctcagctcactgcaacctctgcctcccgggttcaagtgattcttctgcctcagcttcctgagtagcttggactacaggcacttgccaccatgcccagttaattttttgtatttttagtagggatggggtttcaccatgttacccaggatggtctcgatctcctgacytcgtgatccacccaccccagcctcccaaagtgctgggattaggcgtgagccactgcgctgggtcctcattcttgtatcttaaaagtcagtgatgttgagtaatttctcatgccaccacctacaaggttgcctttcttctgtcttcttctttcacttataaggaagtttgtgatttcattgatcccacccatttaagacaatctctctatcatttttccgcaaccttaatttcacttgaaatctaatttcacactgccgtgcaacctaacatatttg

SEQ ID NO: 379138 - DNA, 232 bp, Homo sapiens
tttcaagatggaattcttatttctttttgttctatttgacattctctgagtttyctatatctgaagtttgattttctgtcacttcttttagaatatttttggcagttattttgaaaaatatttcttttgctccactatttttccctgttttctttttgggatttcaatcataactagagtaggtaatttcatctctgtcttatgcaggtactttttctcagggtctcaggaa

SEQ ID NO: 379139 - DNA, 232 bp, Homo sapiens
tttcaagatggaattcttatttctttttgttctatttgacattctctgagttttctatatctgaagtttgattttctgtcacttcttttagaatatttttggcagttattttgaaaaatatttcttttgctccaytatttttccctgttttctttttgggatttcaatcataactagagtaggtaatttcatctctgtcttatgcaggtactttttctcagggtctcaggaa

SEQ ID NO: 379140 - DNA, 232 bp, Homo sapiens
tttcaagatggaattcttatttctttttgttctatttgacattctctgagttttctatatctgaagtttgattttctgtcacttcttttagaatatttttggcagttattttgaaaaatatttcttttgctccactatttttccctsttttctttttgggatttcaatcataactagagtaggtaatttcatctctgtcttatgcaggtactttttctcagggtctcaggaa

SEQ ID NO: 379141 - DNA, 574 bp, Homo sapiens
ttgttgtcaggttaggaaccctattccatcccagatctccaaaacccagactttttggggggttgaaattttaggctttctctttgaattgtagttttatcttctttcagttaccatttgcatttycataatgattaatgagactaagctttttttgtgtagttgactgtacctttggatttttttcccaaatacctttttatttcttcttttctttatggttttagaaaatgtagtttacataattgcagcttgattttatactcagttaatggcatgcttaatggagagaaaaaatattattttcctttttaattactgtgctttttttcttttttaaggaaatgtttcattatgttaaatttcagtgttattctacttagctattccttaaatattatagtatttcggatttcacatgtaaatttgtaacatatcttgagtttattatgtatagagtaaggctattttctctttttttaaggtaaaaatcacataatagaaaattaataacaaccattttaaagcatacaatgcacttgcttttagtatattcacaatgttccagggcaat

SEQ ID NO: 379142 - DNA, 574 bp, Homo sapiens
ttgttgtcaggttaggaaccctattccatcccagatctccaaaacccagactttttggggggttgaaattttaggctttctctttgaattgtagttttatcttctttcagttaccatttgcatttccataatgattaatgagactaagctttttttgtgtagttgactgtacctttggatttttttcccaaatacctttttatttcttcttttctttatggttttagaaaatgtagtttacataattgcagcttgattttatactcagttaatggcatgcttaatggagagaaaaaatattattttcctttttaattactgtgctttttttcttttttaaggaaatgtttcattatgttaaatttcagtgttattctacttagctattccttaaatattatagtatttcggatttcacatgtaaatttgtaacatatcttgagtttattatgtatagagtaaggctattttctctttttttaaggtaaaaatcacataatakaaaattaataacaaccattttaaagcatacaatgcacttgcttttagtatattcacaatgttccagggcaat

SEQ ID NO: 379143 - DNA, 590 bp, Homo sapiens
gctggtctccaactcctgacctcaggtgatccacccgcctcagcctcccaaagtgctgggattacaggcatgagccaccgcacctggccaagaaaggagctttagataaataaaatgattaaacatttgtagcatgtagaatgaaactattcccttagtaatactcaaattatccagatttccaagatgttggtagcaccccgagagcttcaaaagggaaattaaaagaaaaacgacgttacccttcctgaaacacagattcactgtttgccatattcttttctctagtaaaagatgaataaagtttccyctggaaaaactaaaaacaatctgaggtatatttcagagaaaacaaaattgcttgataaaaatgccatgttaacaactgaggaaattattttacatatattaattttaacacaggaataatatgtcaaaccaggatttctcaacctcagcactatcgacattttaagctgtatagtttttggtgtgggaggctgtcctgtatattgtagaatgtttagtggcagccctggcctctacccaagaggccagtaggacccacctcctcattcaagctaatgcac

SEQ ID NO: 379144 - DNA, 590 bp, Homo sapiens
gctggtctccaactcctgacctcaggtgatccacccgcctcagcctcccaaagtgctgggattacaggcatgagccaccgcacctggccaagaaaggagctttagataaataaaatgattaaacatttgtagcatgtagaatgaaactattcccttagtaatactcaaattatccagatttccaagatgttggtagcaccccgagagcttcaaaagggaaattaaaagaaaaacgacgttacccttcctgaaacacagattcactgtttgccatattcttttctctagtaaaagatgaataaagtttcctctggaaaaactaaaaacaatctgaggtatatttcagagaaaacaaaattgcttgataaaaatgccatgttaacaactgaggaaattrttttacatatattaattttaacacaggaataatatgtcaaaccaggatttctcaacctcagcactatcgacattttaagctgtatagtttttggtgtgggaggctgtcctgtatattgtagaatgtttagtggcagccctggcctctacccaagaggccagtaggacccacctcctcattcaagctaatgcac

SEQ ID NO: 379145 - DNA, 590 bp, Homo sapiens
gctggtctccaactcctgacctcaggtgatccacccgcctcagcctcccaaagtgctgggattacaggcatgagccaccgcacctggccaagaaaggagctttagataaataaaatgattaaacatttgtagcatgtagaatgaaactattcccttagtaatactcaaattatccagatttccaagatgttggtagcaccccgagagcttcaaaagggaaattaaaagaaaaacgacgttacccttcctgaaacacagattcactgtttgccatattcttttctctagtaaaagatgaataaagtttcctctggaaaaactaaaaacaatctgaggtatatttcagagaaaacaaaattgcttgataaaaatgccatgttaacaactgaggaaattattttacatatattaattttaacacaggaataatatgtcaaaccaggatttctcaacctcagcactatcgacattttaagctgtatagtttttggtgtgggaggctgtcctgtatattgtagaatgtttagtggcagccctggcctctacccaagaggccagtaggaccyacctcctcattcaagctaatgcac

SEQ ID NO: 379146 - DNA, 550 bp, Homo sapiens
agcatgggttccgatgctagtcacttattaactgtggtcttggataagctgcttaacctctctaagcctcagttttctcatyggtaagatggggataataatgcctgtctcatagggttattgagaagatttagtaacatctgtaaagaccctagcacagagcctagcccacaatcagtcctcaataaagagctgctggctaagacatatttctgctggaacattctgtggctctggatccatagaggacaggatttggccaatgactgcttaaggacatttcaatggccccttgacaatgacaccatcactgggctgcccacctcatcccacagctgcagcccattcttgtgatagcttcccttttcccccacaaatgggaatggcggctgccctggctatgcctatctgaagtggatccagctggtgaacagccgggacagctcaaatactagtggagtgcagctctctgcccagcccagcaggtgactgtgcctcagtgtaagctaatctaatctgcaagatggcagacctcaaaacagcccataca

SEQ ID NO: 379147 - DNA, 550 bp, Homo sapiens
agcatgggttccgatgctagtcacttattaactgtggtcttggataagctgcttaacctctctaagcctcagttttctcattggtaagatggggataataatgcctgtctcatagggttattgagaagatttagtaacatctgtaaagaccctagcacagagcctagcccacaatcagtcctcaataaagagctgctggctaagacatatttctgctggaacattctgtggctctggatccatagaggacaggatttggccaatgactgcttaaggacatttcaayggccccttgacaatgacaccatcactgggctgcccacctcatcccacagctgcagcccattcttgtgatagcttcccttttcccccacaaatgggaatggcggctgccctggctatgcctatctgaagtggatccagctggtgaacagccgggacagctcaaatactagtggagtgcagctctctgcccagcccagcaggtgactgtgcctcagtgtaagctaatctaatctgcaagatggcagacctcaaaacagcccataca

SEQ ID NO: 379148 - DNA, 561 bp, Homo sapiens
gcccattcttgtgatagcttcccttttcccccacaaatgggaatggcggctgccctggctatgcctatctgaagtggatccagctggtgaacagccgggacagctcaaatactagtggagtgcagctctctgcccagcccagcaggtgactgtgcctcagtgtaagctaatctaatctgcaagatggcagacctcaaaacagcccatacaatgaaatgcccatggcttgcaaaactttaattcatgcagaacctttcctcacaaacaaaatcttacacagaaccccatcttggcttcagcagaatcaggaaaaataaaaaattggcaggggaaggaaataaacagaacaagtggtatctgaatttatttgatatattctggttgatggcattaattatgatatttaaagtcaccatgaggacaactcattagtaatatcagtatgttaaaatatggtgcataacrtttttactatatgtacagtcatgcactgaataacatttcagtcaatgaggaaacacatgtgcaacagtgatcctgtaagattataatggagcatat

SEQ ID NO: 379149 - DNA, 445 bp, Homo sapiens
gtgttaagtggcctgaatgagccaggacagcagggtcaaatcaacttgtctaggctggamgcaggttataaacaatccagacaaataaataactactggattgcactttaaccacacacattcagctgcacctgtttattaaatacctccttaatttccctctgccccacaaagggcttctgacccctgaaaataatgcttctcaacataaaaataattgttttcttcttggcagtttaattccccttccacacatccccccaccatttccctataatggtaataccctgctgtgcagacctctgctgcctccaaagagacacaggcacccaaccctgaccagggcatcctctgacccacagcccctctatctcccctctcaacctacaatagaaagttcctcccaggcaaggatcattttttttaaataactttttaaacttta

SEQ ID NO: 379150 - DNA, 445 bp, Homo sapiens
gtgttaagtggcctgaatgagccaggacagcagggtcaaatcaacttgtctaggctggacgcaggttataaacaatccrgacaaataaataactactggattgcactttaaccacacacattcagctgcacctgtttattaaatacctccttaatttccctctgccccacaaagggcttctgacccctgaaaataatgcttctcaacataaaaataattgttttcttcttggcagtttaattccccttccacacatccccccaccatttccctataatggtaataccctgctgtgcagacctctgctgcctccaaagagacacaggcacccaaccctgaccagggcatcctctgacccacagcccctctatctcccctctcaacctacaatagaaagttcctcccaggcaaggatcattttttttaaataactttttaaacttta

SEQ ID NO: 379151 - DNA, 445 bp, Homo sapiens
gtgttaagtggcctgaatgagccaggacagcagggtcaaatcaacttgtctaggctggacgcaggttataaacaatccagacaaataaataactactggaytgcactttaaccacacacattcagctgcacctgtttattaaatacctccttaatttccctctgccccacaaagggcttctgacccctgaaaataatgcttctcaacataaaaataattgttttcttcttggcagtttaattccccttccacacatccccccaccatttccctataatggtaataccctgctgtgcagacctctgctgcctccaaagagacacaggcacccaaccctgaccagggcatcctctgacccacagcccctctatctcccctctcaacctacaatagaaagttcctcccaggcaaggatcattttttttaaataactttttaaacttta

SEQ ID NO: 379152 - DNA, 571 bp, Homo sapiens
ctggtctcaaactcctgggctcaagtaatcctcctggctttgcttcccagagtgtagagattacaggcatgagccactgaacctgcccctttccccccaacaacatcttgactgcaacctcctgggagactctgagtcagaagtatccagttaagatgttactgactttctgaaccacagaaactgtgagataataarcatctattgttcctttaagccttaagtttggggctttttttttttacaccaatatataactaatgtagacacctgcagtccctaagattgaatgcaaaattgtgttacatacacatgagtgtgttcttctgggaaaagagtccataaacttcaaaagattctcaagggaatccaagacccaaaaagattaagaaacattgcatcagacaataaattgtcaatgagcaaggtcctgtccttttagactgggttttgaaatcacccatcccacaaatatatgataccacttaactagtttttcaagatatttgttgttcaaagatgctcccactttttctttgtgctcaagtcctagataaacctggctaggggc

SEQ ID NO: 379153 - DNA, 571 bp, Homo sapiens
ctggtctcaaactcctgggctcaagtaatcctcctggctttgcttcccagagtgtagagattacaggcatgagccactgaacctgcccctttccccccaacaacatcttgactgcaacctcctgggagactctgagtcagaagtatccagttaagatgttactgactttctgaaccacagaaactgtgagataataagcatctattgttcctttaagccttaagtttggggctttttttttttacaccaatatataactaatgtagacacctgcagtcyctaagattgaatgcaaaattgtgttacatacacatgagtgtgttcttctgggaaaagagtccataaacttcaaaagattctcaagggaatccaagacccaaaaagattaagaaacattgcatcagacaataaattgtcaatgagcaaggtcctgtccttttagactgggttttgaaatcacccatcccacaaatatatgataccacttaactagtttttcaagatatttgttgttcaaagatgctcccactttttctttgtgctcaagtcctagataaacctggctaggggc

SEQ ID NO: 379154 - DNA, 391 bp, Homo sapiens
caagcgatcctcccacctttgcctctcaaagtgctgggattacaggtatgagccaccatgccctgctaaaacctggttcttaaaaaatacattataaaattcacagacctttagcaagatttgtcaagaaaaagcattcaaaaaacaatcttgcacaggaggactgtactacagatagaaagactctgaaaggaagtcataacttgcaggccaagaacgatggctcrcacctgtaatcccagcactttgggagaccgaagtgggaggaatgctcaaattcaggagtttgagaccagcctgggcaacatggcaaaaccccgtctctaccaaatatacaaaaattagctgggcatggtggcacgtgcctgtggtcccagctacttgggaggct

SEQ ID NO: 379155 - DNA, 391 bp, Homo sapiens
caagcgatcctcccacctttgcctctcaaagtgctgggattacaggtatgagccaccatgccctgctaaaacctggttcttaaaaaatacattataaaattcacagacctttagcaagatttgtcaagaaaaagcattcaaaaaacaatcttgcacaggaggactgtactacagatagaaagactctgaaaggaagtcataacttgcaggccaagaacgatggctcgcwcctgtaatcccagcactttgggagaccgaagtgggaggaatgctcaaattcaggagtttgagaccagcctgggcaacatggcaaaaccccgtctctaccaaatatacaaaaattagctgggcatggtggcacgtgcctgtggtcccagctacttgggaggct

SEQ ID NO: 379156 - DNA, 646 bp, Homo sapiens
gcttttttatcgcatgctgttttatcagcaagatctttgtgacccgtaccttgctctggccagctgctatctcatcctgtgacttagaatgcctgacttcttgggaatgcagcccagtaggtctcagccttattttacccagctcttattcaagatggagttgctctggttccaacacctctgacagtattaacagctggcctctaccattccagctcctatcattaccaaagatattaacaagcccagctttgtgaccatgtcttcgactatcactcctgacctgcagacaaacgttaccacagaactttgcaattctggtatcccactcaccagtgcatttttgatgcgcttaatgaagagtgtgtcttctgggatttcccttgaaacacagtactctagaggattttcaggttttgcaccatatatccattctagtataccaactrtatttttatcttttcctccatcgtctgccacagtggttcaggcatttccacttcacacagtatgggccatcgctcctaagaactactaccccagtgagcttattgacttcagaccttacaaatccatggccacatatcatgtacttaaggctctattaatctacccttaaaaactggggtttttgttagtgtattaa

SEQ ID NO: 379157 - DNA, 594 bp, Homo sapiens
tcagtttttggagttatttacccagatattttcatcacagtggtatgacagatctcagcagatattcttcttggagcttgacaagtctattaaatcctgagtttcgccttcagtttctgtgttctcccatctcttgttgtcaatcacaatgttcctttgcccttcacacttaattttcattgttcattaactgctttcagtttttttattatacctctgaggacatcaatgcaactcagtaacaaccagccagttctgttgtccttgaatgcactgtcccagttttcaaagccttatttattgcaaaatgcagaacattccctccactgggacaatattccaaattgcccagtgaatattttaagagtagagctttcacattgtgcagaaatgaatgtcccacctactgcctgggaggagtcctattgccaatgagacagagatgatttagtccccaaatttccacctaccacctgcttttacaaactttccaactatgccaattcaggacttactggaggcagatgttcatatggagtttgagtgtgagaatttyattggggagagaatgctgtgaaatgaaaagggcagaag

SEQ ID NO: 379158 - DNA, 592 bp, Homo sapiens
cccccttcctgggggtatgtacaaagttccaaccttccaccttgccagagttgcagtcagttttgcctggaagccaggtgctggagtatgttaagctcctgagtctctgcgtgtgcctgagtggctactctgccaagactccaggcagctgtgtgtgtcagactgaaggccctgatggagtgggttcatgatggaatctccttaccagagggttgaaaacatctgtgggagaggcttggtttctctgagttgcacattcacttactgcttccctgggcgggggatgttcacctggctctgtgttgctcctgggtgagcttttatcctgtcttgcttttctttgttcttcatgggtcgagttgtttccttgattagtcccagtgtgactacctggatgtttcagttgaaggtgatgtatttacttgcccctttcattcctctctgtgagagccacacaccatagctgcttctagttcakccaccttggcccgaatccctatgtaagctctattcctttaaactagttaaagtttattttatgacccagaatgtattctattttgggcaatgttccatgtgagcttaagaagaa

SEQ ID NO: 379159 - DNA, 592 bp, Homo sapiens
cccccttcctgggggtatgtacaaagttccaaccttccaccttgccagagttgcagtcagttttgcctggaagccaggtgctggagtatgttaagctcctgagtctctgcgtgtgcctgagtggctactctgccaagactccaggcagctgtgtgtgtcagactgaaggccctgatggagtgggttcatgatggaatctccttaccagagggttgaaaacatctgtgggagaggcttggtttctctgagttgcacattcacttactgcttccctgggcgggggatgttcacctggctctgtgttgctcctgggtgagcttttatcctgtcttgcttttctttgttcttcatgggtcgagttgtttccttgattagtcccagtgtgactacctggatgtttcagttgaaggtgatgtatttacttgcccctttcattcctctctgtgagagccacacaccatagctgcttctagttcagccaccttggcccgaatccctatgtaagctctattcctttaaactagttaaartttattttatgacccagaatgtattctattttgggcaatgttccatgtgagcttaagaagaa

SEQ ID NO: 379160 - DNA, 526 bp, Homo sapiens
cttgattctagaagaaccaagttttkgcagagccattttccctcagaaacctgtaaaggaagattctttttagcctatccagcttctgcgagccccaggcattccttggctatggcagcaatgctccaacctctgccacagttgttatataactattttctccctgtgtgccctcatatctctcttgtatctggcttttcactggactttctcctctcttataaggacatcagatatactaatttaaaggtctaacctagctcagtatgacttcatcttaactagctatacctataatgacacaatttttaatcaaggtcatgttctgggctactgtgagtcctgacttcaatgtatcattttgcagggcatagaacaatctataacacttggatataaatgtaataaaaattatgtatttacatcaagacttttcaaataaaattgttgatctttttgtatgaaaagtttatataagtagtggatgaattttggcagtattctggttaaatacacaaacgaccaa

SEQ ID NO: 379161 - DNA, 526 bp, Homo sapiens
cttgattctagaagaaccaagtttttgcagagccattttccctcagaaacctgtaaaggaagattctttttagcctatccagcttctgcgagccccaggcattccttggctatggcagcaatgctccaacctctgccacarttgttatataactattttctccctgtgtgccctcatatctctcttgtatctggcttttcactggactttctcctctcttataaggacatcagatatactaatttaaaggtctaacctagctcagtatgacttcatcttaactagctatacctataatgacacaatttttaatcaaggtcatgttctgggctactgtgagtcctgacttcaatgtatcattttgcagggcatagaacaatctataacacttggatataaatgtaataaaaattatgtatttacatcaagacttttcaaataaaattgttgatctttttgtatgaaaagtttatataagtagtggatgaattttggcagtattctggttaaatacacaaacgaccaa

SEQ ID NO: 379162 - DNA, 620 bp, Homo sapiens
acacttttcaaaagaagacatacatatggccaacaggcatatgaaaaaacgctcaatattaataattgttagaggaatgcaaatctaaaccacagtaagatgccatctcacaccatttagaatggttattactgaaaagtcaaaacaaacaaacaaacagatgttagtgagactgcagagaaaggtaacatttatacaatattggtgggagtataaattagctcaaccattgtggaaggcaatgtggtgattcctcaaagagctaaaaacagaactaccattcaagccagctatccaattactgggtaatacccagtaaggaatatcaattaccctctcatagaatatcaattattctatcatagagaaacatgcatgtgtgtgctcactgcatcactgttcacaatagcaaagacatggaatcaacataaatgcccataaatggcagactgatcaaagaaaatgtggtacatatacaccattgaatactatgaatccataataamaaacaagatcatgtcttttgcaagaacatgcatggagctagaggacattatccttagcaaagtaacacaggaacaggaaaccaaatactgcatattctcatttgtaagtgggag

SEQ ID NO: 379163 - DNA, 644 bp, Homo sapiens
aagcttaacttagactattatttaataaaattattccaaaacatgttgtaaattgaaataccttccaattatttatattagaggtttttcttttcacattcttttaagtattaaatatctcctttattacttttaaactgggtcctgccacactgrccaagaattaagagctgaacagtgttacatattaaatacagaactgcatttgcacatattaagagttaaatgtaaatattctggagacttaagaataagttttattggtatagttcagttaatcactttatgtgatcattaaactaaaattacaaattaagatgctcagtatggttgcttttgaatggttggaaacaatttttataactacaagagtatgctttgtgtttttcatttttgaaaacatgatgataattattttattcatagagaagttttatacacttcagtatataatttataaatatatttatttgcttattcttcacaatttaaatcaattttaatttattctaatttattttggtttcctacttaatcttttgatcccttctccttatctctccttcagctcctctggagaaaaccagcactctgaacacctttggattttttattgtccaaattttaatatgcaaaatatttaa

SEQ ID NO: 379164 - DNA, 644 bp, Homo sapiens
aagcttaacttagactattatttaataaaattattccaaaacatgttgtaaattgaaataccttccaattatttatattagaggtttttcttttcacattcttttaagtattaaatatctcctttattacttttaaactgggtcctgccacactggccaagaattaagagctgaacagtgttacatattaaatacagaactgcatttgcacatattaagagttaaatgtaaatattctggagacttaagaataagttttattgrtatagttcagttaatcactttatgtgatcattaaactaaaattacaaattaagatgctcagtatggttgcttttgaatggttggaaacaatttttataactacaagagtatgctttgtgtttttcatttttgaaaacatgatgataattattttattcatagagaagttttatacacttcagtatataatttataaatatatttatttgcttattcttcacaatttaaatcaattttaatttattctaatttattttggtttcctacttaatcttttgatcccttctccttatctctccttcagctcctctggagaaaaccagcactctgaacacctttggattttttattgtccaaattttaatatgcaaaatatttaa

SEQ ID NO: 379165 - DNA, 587 bp, Homo sapiens
agtaaactgacattgcaattagagattcttgactcgcaaggatttatagtgatggctgatagactatggtgttcctagggatgagagagatgcacaaccaactgttgttttttttttttgtgtgtgtgtgtgtgtgtgtttgttttcacttatatagccataaaataccaagagtgggtgagtcaatgtctaatatttattgctacagtggaaaaatcataatatctaactcagtctcctcacctgagccaaatctcagatccagagtcagttgattgaataaaagacttatccacatatctttttgaacaaagaccctgaaattctgcagagtgtatttggtggctattsccccaaaagagtaatgtatattgaggacagcagatgaaacagaaacgtttatgagcagccaagctgaatgtaataccaggtgaaccaaaatgaaatcaatgtctcccattagaataggagtatatggatacaaggtggtaaatgcacaccaggcccaggtctatctcaaatgtccaaagattctggaaacccatcttgcagttatttctccagtttctatgtgaataattggcatg

SEQ ID NO: 379166 - DNA, 471 bp, Homo sapiens
acataagtgcaaaaatcttcaaaaatttattagcaaatcaaagttatcagtgcattaaagattatacactaagaccaaatgagatttattccagagatgcaaaacttgttcaacatttgaaaatcaattaatgtgtaatccatcatatcaacaggctaagaggaaaaatcatatgwttgtaccaatagatgcagaaaaattatttcactcatccatgataaatgctgtcagtaaattaggactagaggaagtatccctcaaatcgataaataatatcatctaccaaaaaagtagagctaacagcatacatctattcaacattgtactgaagttctgcctaatgcaataagaaaagagtaaataaaagttaagtattatatacagtttaggaaagaaaaataaagctggctttgcttgcagatgacatgacagtctatataaaaaatcctgaagaatgcacaacaacaaaac

SEQ ID NO: 379167 - DNA, 576 bp, Homo sapiens
gtaatccattttgagttagttttataatgagtgtaatgtctatgtctagattaattttgtttagcatatggatatccagttgctccagcattacttgttgaaaatactatatttgttttactgtactgcctttgctcttttgttaaagaacagttggtctatttctgtgctttctattctgttttgagatctatttatctattaatttgtcaatatcacactatcttcatgactgcagatttataataagtttaatgttgagtaatgtcaatmctccaactttgttcttctccttcaatgttgtgttggctattctgggtattttgcctttcaataaacttcagaattaatttattgacatccacaaaataactctttggagttttgattgagattacattgaatctgtagatcaagatgggaagaactgatgtcttgacaatttgagtctttttgtccaagaacatataatatatttttaaatatttagtttgtctttgattacactcatcagagttaatggttatcttcatatatgtgttatacatattttgttagatttatacctaagtattt

SEQ ID NO: 379168 - DNA, 563 bp, Homo sapiens
cagtagtccccttttatccattgttttgctttttggagattcagtgayctctggttggccacagtttaaaagtaataaatagaaaattccagaaataaacaattcatgagtttaaaatatgttgttccaagtataacgataaaatcacactatccctttcctgcccaggacatgaatcatccgtttgtcaagcatacctgtgctgtctatgctacctgttagtcacttagcatctggctgggtgatcaatcaaatcaactgtctcagtattacagagcttgtgttcaagtcacctttactttacttaataaaattttcaaagtgccagagtggtgatgctggcaactttgatatgccaaagaaacgctgtaaagtgcctccttttagtgaaaaggtaaaagttctcaatttaaaaaggaaagaccaaaaatcttatggtgagattgctaaaaactatggtaagaatgaatcttagtcatgaagaaggaaaaataaacttgtgctaattttgctgttgcacttcaaattgcaaaagttgtggccacagtgtgtgataagtgctt

SEQ ID NO: 379169 - DNA, 563 bp, Homo sapiens
cagtagtccccttttatccattgttttgctttttggagattcagtgacctctggtyggccacagtttaaaagtaataaatagaaaattccagaaataaacaattcatgagtttaaaatatgttgttccaagtataacgataaaatcacactatccctttcctgcccaggacatgaatcatccgtttgtcaagcatacctgtgctgtctatgctacctgttagtcacttagcatctggctgggtgatcaatcaaatcaactgtctcagtattacagagcttgtgttcaagtcacctttactttacttaataaaattttcaaagtgccagagtggtgatgctggcaactttgatatgccaaagaaacgctgtaaagtgcctccttttagtgaaaaggtaaaagttctcaatttaaaaaggaaagaccaaaaatcttatggtgagattgctaaaaactatggtaagaatgaatcttagtcatgaagaaggaaaaataaacttgtgctaattttgctgttgcacttcaaattgcaaaagttgtggccacagtgtgtgataagtgctt

SEQ ID NO: 379170 - DNA, 532 bp, Homo sapiens
aatagcaacattttaaaccatgaagtttaaatagcacattttttttccacacaaagaataatttacacacaacttctcatttggagttaatctgagagaaaatatggtaatgtagacagagcagtgaccttgaagtcagggattatagagtacaattttaaatatcaaaatctaactttatgaccttggtcaaagactccaaattttcattgcctctttatctgcccgtattgtaatatattaggaataaattgcaaatagtacattgaagctttaaaagtgatataaaaatccatcttaaataaaggcttggarttttttaatagcagtaacaagaattgtgattttactttttactgaaattactagatgtatcaatcaaaacaattactaatatttagaaaaaactgtggtgtataaataatagatggcatttaaatataaattgtattaggatccaccagagaaataaaattaataggatctggatattagtataaagaaatttattttaaggcattggcttacagaa

SEQ ID NO: 379171 - DNA, 522 bp, Homo sapiens
cctcacagaaacatccagaatgtttgaccatgtatctaggcactgtggacccgcaaagtagagacatatagttaaccattatataaactaaatatgattataaattatgaatccaatatattaattattctttgtttaacttyacaaaatggtcttggaatttatataaggcaaagtagttaccaaataaatgtcagaagaatcccaaagtttccacaatcctttgtccttatcagatggatattctatgtacttattcttttgccctttaaagttcatataaagacttgtacatagataaaacattgtagcttcccctgagttttcatttgaaatactcccttgcttctttcttgcatttccccacatcttgtttttcatatatgatgaacttacatccaagtctactactgtggcctttattatgttgagttaaatttcttctttaccaagtttattgaatatttttatcataaaagagtattgaattttatcaaatgctttttctgaatctattaatat

SEQ ID NO: 379172 - DNA, 607 bp, Homo sapiens
tctttcagcactttgaatctatcatcccacttctttctgccctgaaatgtttctgtttagcaaagtgctgatatggaagctctcttgcatatgatgagtstcgtttctcttgctgctttcaaattctctgtttgtcttgatcgtttgatgatgtgattgtgatgtgtctcagaatagatttctttgagttcctctacttagagatcttttggtcttcatgatctgaatatacatttttctccttaggtttagggagttttctttaaagaatatatctgaccctctctctatctcttctccctctgtgacttccataaggcattcattggtcgcttaatgatgttttgtatgtttctaatttttttgcctgatttttctttctttttttgttcctctgagtttactgattcttttctctgcttgatcaagtctgcttttggtactctgtattgatttctttttgtttcagttattgtatctctagctctataatttctatttggttatttttatggcttctatatttttattgatattctcgtttgttcatgcattattttcctgattccatttagttgtgtagtgtgttctcttataatttaccaag

SEQ ID NO: 379173 - DNA, 481 bp, Homo sapiens
aattcacagatcttcatttcttgaaggtcagttagtggagatttattttgttcatttgtcatgtttccatgattattcatgtttcttgttgctttatgttagtatttgtgcattgaaaggaacagccaatttttcgtttttacaagttaatttcaataaaaaaagacctatagcaataaacctacctagatattctggaagcctctaaaatcttttctgtgacatgtatgctctactactcttccttcctccttttggtgatgtctcagtgttctgtgccttctctggatctcacatagccatactagctacaataagccaggttctctctttccctatagaagtgctctaaaagcctggggtgttggatacaaacttccctcttctcctttcctcctggaccagaagtcttagggttgtccaccttgtcccaatctcacatagstgatctgacaacagtaagccatctgctacttgtctt

SEQ ID NO: 379174 - DNA, 511 bp, Homo sapiens
gtttatttattaactgaaaagctttgcaatttggaattttatgtatgatgttgtatgttcttcctccaaagaacaactttttaaaaattttgcccagctaggaaacaacatgaaatagctacacttttcaggtcatccaattggccagatcacacaaaagcatgacaagataagaaaaacaagcattccctatccttcaaccatcctctgaagactgcagggctttgttaactatgtttttaaaaattaaatcaggaaacacttggattgctacaatagaacgtaaatgagcgaagcaaacaaacctaagtagtctccattgaatagatgcgtccattaaaataattcttagccaatatacagaattgagtcttcaactaagctttcttttcctccaacaaattttaggggaaaaaagagcagaccaaataaaagagattcataaaagacttagcaaaatacatacrtatctaccaccttcctagagtctagacaggatcaataaactttc

SEQ ID NO: 379175 - DNA, 524 bp, Homo sapiens
gacccctaactgcatgtgcctaacaatactgttcaccaggggggcattttagccaggtttactcaggagcagattttatggaggaaattactttacygtggaggagagtttgtccttgaacccagacaacagtaggaaagttggaaaatcgaagttcagtgctctaagctgtgggtaggtaagcacacagatttggagaccaccgtatcaccgccttctaagagattcagaaaacactttaattggactgctgtgacgcttcctgaaacagacaacttccagactattctgctgctttacaacattgtcagtatctagtttgacagatctttccaacttagattcaacaaaaaagccaaacaaaacattaactattttcagttaataatcatttaaataatttatatgacaataattattattactattgccaggcactatgctaaaggctttatgcacattatttaatttaatttatttaatgttcacatcaaccttgtgaagtaggtactattttaaatctg

SEQ ID NO: 379176 - DNA, 511 bp, Homo sapiens
  misc_feature (1)...(511): n = A,T,C or G
nnnnnnnnnnnnnnnnnnnnnnnnnnnnnnnnnnnnnnnnncacatcatcaaaggccatgctgatgatggtttggaggaaaggaaattgaatgttaagaaaattagcagttcaataatgatagagaatccaatattgaaaatgcaaaggtgtttataaattgagaaatcaagttttctgatttctttcttcttccttccagacttatctgaaaaacctctagaaattcagagagaataaatgaacagattatcgtcttatcctattagttggagtgtggatgttatccctgctgccagttgggcacatgtaatggccaaggagaagtttagagtcatgctgcacttagtttagaagrgaagagtgtgatcagtaagagaaaaaccagaaatggcattttcaaagagcagaatggaaacatcgagatacaactgacatccttagctcatattcaccacatcttcaaaattagctggattgcttcactaagaagagtctatttgcctttaaaa

SEQ ID NO: 379177 - DNA, 552 bp, Homo sapiens
taagtcacatcttagagtaattttttttttctcttgaccactctagctaaagaaatcactcctcccttttcttgacattctatctattgtcttcttttacttatttcatagcmcttactaccatctgcaatcttatttcattagtcacatgtttattatctgtgctttcttagcagaatgaaagctccctagtgccaagaacccatttatcacctttccagcaccatgtctgactcattgtaggtgctcagtacatgatgtcttggtgaatgaatgaatgaatgaatacatttttttaaaaaaatctactcatgtaaatgtttgagagaccactatgaaccaggaactttcttctgaagctacgtaggtcaaacaatttctacctgtaaagagtttctagactgttatctttgaactcaaagagaaatgaccagagaacttgctgtttttctgtacaggtccaaagggcaaaatctaagcttcttgtcttctgtagcatagccaggtggtattcctagaatgccagttggagaatcctagatgtttcctagt

SEQ ID NO: 379178 - DNA, 552 bp, Homo sapiens
taagtcacatcttagagtaattttttttttctcttgaccactctagctaaagaaatcactcctcccttttcttgacattctatctattgtcttcttttacttatttcatagcccttactaccatctgcaatcttatttcattagtcacatgtttattatctgtgctttcttagcagaatgaaagctccctagtkccaagaacccatttatcacctttccagcaccatgtctgactcattgtaggtgctcagtacatgatgtcttggtgaatgaatgaatgaatgaatacatttttttaaaaaaatctactcatgtaaatgtttgagagaccactatgaaccaggaactttcttctgaagctacgtaggtcaaacaatttctacctgtaaagagtttctagactgttatctttgaactcaaagagaaatgaccagagaacttgctgtttttctgtacaggtccaaagggcaaaatctaagcttcttgtcttctgtagcatagccaggtggtattcctagaatgccagttggagaatcctagatgtttcctagt

SEQ ID NO: 379179 - DNA, 552 bp, Homo sapiens
taagtcacatcttagagtaattttttttttctcttgaccactctagctaaagaaatcactcctcccttttcttgacattctatctattgtcttcttttacttatttcatagcccttactaccatctgcaatcttatttcattagtcacatgtttattatctgtgctttcttagcagaatgaaagctccctagtgccaagaacccatttatcacctttccagcaccatgtctgactcattgtaggtgctcagtacatgatgtcttggtgaatgaatgaatgaatgaatacattttttwaaaaaaatctactcatgtaaatgtttgagagaccactatgaaccaggaactttcttctgaagctacgtaggtcaaacaatttctacctgtaaagagtttctagactgttatctttgaactcaaagagaaatgaccagagaacttgctgtttttctgtacaggtccaaagggcaaaatctaagcttcttgtcttctgtagcatagccaggtggtattcctagaatgccagttggagaatcctagatgtttcctagt

SEQ ID NO: 379180 - DNA, 552 bp, Homo sapiens
taagtcacatcttagagtaattttttttttctcttgaccactctagctaaagaaatcactcctcccttttcttgacattctatctattgtcttcttttacttatttcatagcccttactaccatctgcaatcttatttcattagtcacatgtttattatctgtgctttcttagcagaatgaaagctccctagtgccaagaacccatttatcacctttccagcaccatgtctgactcattgtaggtgctcagtacatgatgtcttggtgaatgaatgaatgaatgaatacatttttttaaaaaaatctactcatgtaaatgtttgagagaccactatgaaccaggaactttcttctgaagctacgtaggtcaaacaatttctacctgtaaagagtttctagactgttatctttgaactcaaagagaaatgaccagagaacttgctgtttttctgtacaggtccaaagggcaaaatctaagcttcttgtcttctrtagcatagccaggtggtattcctagaatgccagttggagaatcctagatgtttcctagt

SEQ ID NO: 379181 - DNA, 573 bp, Homo sapiens
cagctacatgccaggcattgactaaagattttatacatgtccttcacaattctcatcacaacttttatacaggagactgaaatacagataaagtaaaatcaaaacttcagggccatcagaattggaaggccaaastaattcctctatgcactgtatttaacacccactcaccaagacctctttcctctccaacatagatttacaaagactaaagatgagggaatgagcatgtcttgtttctggtcatagttatatctctaatcatgtcaccttggacatgtcatttttaaacctgtgctaatcaatgtctttgaaagaggtctattagaatttcaactcaaactgctaacagttattggactgtcagaagcctgggcccaaatggccatctcatacatatgccaaattcctcttccattccaagccttcacactaaaatgtttcatgatctagaatatggtctttgtgcaattttgccagaagacgtcaggaaagtatgcaactcattggcaaaagtaacagctttgcaatggaagaacagaaagagacttctgcaggagaaagcagttttat

SEQ ID NO: 379182 - DNA, 573 bp, Homo sapiens
cagctacatgccaggcattgactaaagattttatacatgtccttcacaattctcatcacaacttttatacaggagactgaaatacagataaagtaaaatcaaaacttcagggccatcagaattggaaggccaaagtaattcctctrtgcactgtatttaacacccactcaccaagacctctttcctctccaacatagatttacaaagactaaagatgagggaatgagcatgtcttgtttctggtcatagttatatctctaatcatgtcaccttggacatgtcatttttaaacctgtgctaatcaatgtctttgaaagaggtctattagaatttcaactcaaactgctaacagttattggactgtcagaagcctgggcccaaatggccatctcatacatatgccaaattcctcttccattccaagccttcacactaaaatgtttcatgatctagaatatggtctttgtgcaattttgccagaagacgtcaggaaagtatgcaactcattggcaaaagtaacagctttgcaatggaagaacagaaagagacttctgcaggagaaagcagttttat

SEQ ID NO: 379183 - DNA, 602 bp, Homo sapiens
ttcacactaaaatgtttcatgatctagaatatggtctttgtgcaattttgccagaagacgtcaggaaagtatgcaactcattggcaaaagtaacagctttgcaatggaagaacagaaagagacttctgcaggagaaagcagttttatttctcctgcagtgtctggtctcccagtctggtgcaaccctgaaggtaccctttgaaggartggcctgcagaatattcatggcagaatgtttattggccccatcttagctcacagtgacccaagtcaccaagcttagaagcttagtaagaaatgagcatgtccctgcagtgtacctgccactccagctatattatccaaacataggaagtgagatagggtgaggagtatgaggggctgagaggagctcagtatttgactagaatactacccaaatctttcagctggataattcgatgttttaggggctgtgctgtgcattgtaggatgtttggcagcatccctaacttctactcactagataccagtagcataaccttctattggtgacaaccaaaatgtccccaggcattgtcacacatccccaggagatgtgggaggggctaaatcaccaccag

SEQ ID NO: 379184 - DNA, 571 bp, Homo sapiens
tgtacctgccactccagctatattatccaaacataggaagtgagatagggtgaggagtatgaggggctgagaggagctcagtatttgactagaatactacccaaatctttcagctggataattcgatgttttaggggctgtgctgtgcattgtaggatgtttggcagcatccctaacttctactcactagataccagtagcataaccttctattggtgacaaccaaaatgtccccaggcattgtcacacatccccaggagatgtgggaggggctaaatcaccaccagttgggaagcactggacsggggtaggaatgtgacgtcagtcaggataggccagatatgccatagcaacaaccccatcatctcaatggctacaaagaagaccgtcatgaagtgacagaaggactctacttcacggatacttcacagattcacagtctacttcagagactctggctgatagagcagccaatgtatccaatatcatgaattgccatgccagagggaatagagtgctctgaaaggtctcaaaccagaaattaaatactttatgcccaaagttttgtatc

SEQ ID NO: 379185 - DNA, 634 bp, Homo sapiens
cattcattcatgtaatcagccctgagtgtctggcacatataaggcagttagctatgccctgggaaaacttcgatgaataagatagcaagaaaagacaccgcatgtaacaaatttaatcatcatcaagcagttaaacaaacactgtgctgtggaatcacatagcaggaagacctgcccctaacctaggggctgggaaggacttcataaattagtgctgcctgcattgatacctgatggatggcatgatagagccagataaggggtgaggaggaagaatgagtaggaatcttttaggaawgttttcctaagaaagaaaggtgggattgataggcaaggaattgtacataacctagtacccaaattctctatgccacatcccagaagtatatcctgtacccaaacatcatctgtcatgtgatcatggatgtaccaacaacaataaagtttgaaaacccctgcatatggtcatactgcattcatcaaggtatttcagaccaccagaggggcatgtgcagtgctgtgtttgctgttacatgtttaacaaccatttctcaggaggggaaaaaaaaactgttttgtagcatttgccaatttccatggtctaaatattcccaccttggctgacatgaagctg

SEQ ID NO: 379186 - DNA, 490 bp, Homo sapiens
tttcacatatctttcagaggaaagaacatattttctctctgatccttttgtcatcaagaagtactagctacttcattatgtcactctgaaatgggcaggcactgcttttccatcttaaaatgttgttttgattaccataaaatcagcaaaacctcatagaaacgtgagttgagagtgaaaataggtgtgtaagactggatgcaccattaatgataaaacaacattcaattgtgcacttattcaatgtgaattgagtgtctatcatacaccagacactgttccaggaactgaggatatagcagcaaatgtaacagatgagatttctgctctcaaaaaactgatgtttaatgggcaaaasaagaaaaaaaaagtatattatgtcatataaacagagatatgggctataaagaaaaacaaatcagaatgaggagacagaggataatggtggtatttgagattatgtagacagagaagtctttgtagggtttgt

SEQ ID NO: 379187 - DNA, 504 bp, Homo sapiens
tagtttgtaattgtatatctgttggtgtggtcacctgactgacctctgtttctccattagggtatgagttccatggcttttgctcaacatcataaccttagagactggcacagggcctggcctgtgttaaagtttcaataaacagtattagtggaaagaaagaagaaaatggatcttccttctattgcccttccactggccctcactttgttctatcttgatgttattatttgcgtacacatctaatcctcctacaagactagaaacttctgagggmagaaactatagctggcttctctcctgatcttcataggccctgaagaatgaaataaatggtgggcaagatttttgttgtttgacacgtctacatgaacaaaaacctacactggattcccatgtaatgcagtccctcaggggccttgttacagagtgtcattttgaaaagctcaggttctccagtcactgactcgatgactataacacatctacatcatccccaagatt

SEQ ID NO: 379188 - DNA, 583 bp, Homo sapiens
tccctaacttctctgttttcagttttttctatctaaagaaaaaggggtcagttatgtagtcttcatcccttttacaaatttctgtgactctttgaaaggagtagcagacatttctgtaaagggacctatattcaaaactttaggctttgagggccataagatctctgttgcaataaatccactcctcccttgcaggtgaagacagcactaaacaatatgtaagtatagataatatataagtgaatgtaagggctgtaggtgaatgagacccactatattctaatagaattttatttacaacaggtggcaggccatagttgctcatttccattttatgagttgaaactattatttccaagcaaccccagcatttcctttcaagctgtattgagtctgcttattcagmaagttatattttattcacagaaaagtttactaaggagcagtggcatttaaataaaatggtttttattcctctttttagtatatcttaattcaaaacaaaaagtagcataagaaatatgtgagttttctaagtccctttcttctaaaatcaattttagaagaaagtttaaagctccct

SEQ ID NO: 379189 - DNA, 621 bp, Homo sapiens
ctctaatattactattagaataatagtctccacttccatccaggtctgcgaatgccattagctcattcctttttatagctgcttagtattccatcgtatatacataccgcagtttatccacttgttgattgatgggcatttgggttggttccacatttttgcaattgtgaattgtgttgctacaaacatgcatgtgcaagtatgttttttgtwtaatgacttatcttcctctgggtagatacccagtagtgagattgctagatcaaatggtagttctacttttagttcattaaggattccccacactgtttttccatagcggttgtactagtttacattcccaccagcagtatagaactgttccctgttcaccgcatccacaccaacatctattattttttgattttttgattacggccagtcttgcaggagtaatgtattattgcattgtggttttgatttgtatttccctgatcattattgattttgagcatttttcatatgtttcttggccattgctctacatatataaaatcatctaattaaaacagcaacactatgaaactgatattggtttttatacctatttattatatgtggaaattgaggcagtgagaagct

SEQ ID NO: 379190 - DNA, 498 bp, Homo sapiens
gaggtggtgattaaagctcaggtaatctgactccacagcccaggttcacaaaagtgctatagttcttcatttgacagcatccatttttatagaataatttgtacccatgaaayaaatgcttcaagacatttgttttgataatatgagaaaatgtatgtgatattggtaagtgaaatagaattttgctttgcaagatatataaacatataaaatcaagattggaatgtcataaacaaaagatgtttccagaaatggaagaatagattattcaaattgttgttatattttgtgtttgccaacatttctaaaataaacttacattaataaaaacataattgtggaagtaaattttcaatattttgtaacacaaaacattatatggtatctttatcatctgataatgctgatgtgttgaacagcatataaacagcactagcggttgctggaaaaatgcctataaagtatatatttatttgtttttattgatgacttttttct

SEQ ID NO: 379191 - DNA, 498 bp, Homo sapiens
gaggtggtgattaaagctcaggtaatctgactccacagcccaggttcacaaaagtgctatagttcttcatttgacagcatccatttttatagaataatttgtacccatgaaataaatgcttcaagacatttgttttgataatatgagaaaatgtatgtgatattggtaagtgaaataraattttgctttgcaagatatataaacatataaaatcaagattggaatgtcataaacaaaagatgtttccagaaatggaagaatagattattcaaattgttgttatattttgtgtttgccaacatttctaaaataaacttacattaataaaaacataattgtggaagtaaattttcaatattttgtaacacaaaacattatatggtatctttatcatctgataatgctgatgtgttgaacagcatataaacagcactagcggttgctggaaaaatgcctataaagtatatatttatttgtttttattgatgacttttttct

SEQ ID NO: 379192 - DNA, 498 bp, Homo sapiens
gaggtggtgattaaagctcaggtaatctgactccacagcccaggttcacaaaagtgctatagttcttcatttgacagcatccatttttatagaataatttgtacccatgaaataaatgcttcaagacatttgttttgataatatgagaaaatgtatgtgatattggtaagtgaaatagaattttgctttgcaagatatataaacatataaaatcaagattggaatgtcataaacaaaagatgtttycagaaatggaagaatagattattcaaattgttgttatattttgtgtttgccaacatttctaaaataaacttacattaataaaaacataattgtggaagtaaattttcaatattttgtaacacaaaacattatatggtatctttatcatctgataatgctgatgtgttgaacagcatataaacagcactagcggttgctggaaaaatgcctataaagtatatatttatttgtttttattgatgacttttttct

SEQ ID NO: 379193 - DNA, 498 bp, Homo sapiens
gaggtggtgattaaagctcaggtaatctgactccacagcccaggttcacaaaagtgctatagttcttcatttgacagcatccatttttatagaataatttgtacccatgaaataaatgcttcaagacatttgttttgataatatgagaaaatgtatgtgatattggtaagtgaaatagaattttgctttgcaagatatataaacatataaaatcaagattggaatgtcataaacaaaagatgtttccagaaatggaagaatagattattcaaattgttgttatattttgtgtttgccaacatttctaaaataaacttacattaataaaaacataattgtggaagtaaattttcaatattttgtaacacaaaayattatatggtatctttatcatctgataatgctgatgtgttgaacagcatataaacagcactagcggttgctggaaaaatgcctataaagtatatatttatttgtttttattgatgacttttttct

SEQ ID NO: 379194 - DNA, 607 bp, Homo sapiens
aactattgacaacaatatagaaatacaactgaacaaaaagggtatgatctaatgccaatagactgagtggggaaatccagcaaggcccatttgtatagatgcttttttagcatctctgagcctgcatttgttccttctgggtatgggacaggatcctctctggaatgggggcttatgactcccattcaaacaaggtaggtcagataacttctttatggccagttgtttacacagaaaggtgaggggaaaattagagtaacatttttagttttcatggctggctttggggaaaaggaactcagtttctatggctagccttggaggagaattgaactgagagacgagtgcaggaaaagatcagagaaaaactattgcttctgaggcttttattttggggtgttgttttctgagtcctaacatcatcttcccagaatctttgccttcctttcattctttgtctcttgtcattcaktcttctcagaacagccagtgtgatgtcttaacaaataaataaaataaggtttatgttattttcttgcttagcttttccagtagtttcttcgcactttagaccaaaataaataaatgagcatgtttttcaaaaacc

SEQ ID NO: 379195 - DNA, 642 bp, Homo sapiens
ccttcctttcattctttgtctcttgtcattcagtcttctcagaacagccagtgtgatgtcttaacaaataaataaaataaggtttatgttattttcttgcttagcttttccagtagtttcttcgcactttagaccaaaataaataaatgagcatgtttttcaaaaacccaatcatcattccataagctataaaaccatccttgatctagcccttatctacttttcaaacctcacttattttacttctttctgtttaaacatgctaagtttgctcctggctcggaaactatgcagttatttctttgggcaaatgttttcctgctttgagagaggaaaaaaaaattmtctaccatcttaggttttgaaattgtagtcatggattaaatcgacagaagacaaattaagagaaaagtcatacacatttaattgcttttattttacacacatggggactacacagaaagaaagacaaaacccaaagaagcagttggactgggagcttatataccattctaacaaagggatataaattgtgaacaagtgactagacaaagaaggatgggaactggacatccagggatggtaaactgtgggcagatgaccaggaaatatatgatagaaaaaagttgcttaataaagctt

SEQ ID NO: 379196 - DNA, 453 bp, Homo sapiens
gcctctttaactaccattcttgtggtagaggtaggactgatatgcatgaatagttttccaaaggatcagaggaaagaaggaagaatatgtccagaacacggcaaactaaataatcatcagtaaaatggagtttcattgaattagtattccctgaaggcaaaatataatagtaggaagtcctgtcagtctaattcaaggaggtttattcattggaataccaaaagtacagaattactaaattttactaagtggyggtggtcttcagtagattttctgacatctcagcttttaagtattgatttttattaaatttcagtagcaacatttgagtttagatagaatgcaccgttaacttaacaacaccttgtagttaagctctttctagaaaactaatctcagacactacctggcaattaaattattatgtaagcttcaaaatctgcaattgcaatg

SEQ ID NO: 379197 - DNA, 453 bp, Homo sapiens
gcctctttaactaccattcttgtggtagaggtaggactgatatgcatgaatagttttccaaaggatcagaggaaagaaggaagaatatgtccagaacacggcaaactaaataatcatcagtaaaatggagtttcattgaattagtattccctgaaggcaaaatataatagtaggaagtcctgtcagtctaattcaaggaggtttattcattggaataccaaaagtacagaattactaaattttactaagtggtggtggtcttcagtagattttctgacatctcagcttttaagtattgatttttattaaatttcagtagcaacatttgagtttagatagaatgcaccrttaacttaacaacaccttgtagttaagctctttctagaaaactaatctcagacactacctggcaattaaattattatgtaagcttcaaaatctgcaattgcaatg

SEQ ID NO: 379198 - DNA, 597 bp, Homo sapiens
tgtggttcaagaaccacagagggctactagtagaagggaaagctagggtcagatagaaaagaaccttgaatccagaagctatacatttggactgttaggctattcaagttttttggtggtggtgtgtgtctgtgtgtgtgtrtatatatatatattgaaaatcgggttgtgttttctccttaggtggattaaattgtatagatttttccttaaagttcagaaaaatacagatcatgcagaaaatatcttggcacgattatcttatttggaaaggcatctaagactcttttcataattggcaatttcaaactggaagcagcatttattcacataatcttgtagttaccacacattttctgccatataggaatcatgtgtctataaagtgtttagctgtggaaaatgaattattttaaaaaaatcctcttgggcaaaccaagggtgcaccataaacaaatgcccagaaggaaaatcttagaagattgagattattccatcaaatgagaataatgcagtcttaattcgtatattccttttcagaactggttttgctccaaaaatatgcagggaaaaatctgccagtagaaccagcagagt

SEQ ID NO: 379199 - DNA, 597 bp, Homo sapiens
tgtggttcaagaaccacagagggctactagtagaagggaaagctagggtcagatagaaaagaaccttgaatccagaagctatacatttggactgttaggctattcaagttttttggtggtggtgtgtgtctgtgtgtgtgtatatatatatatattgaaaatcgggttgtgttttctccttaggtggattaaattgtatagatttytccttaaagttcagaaaaatacagatcatgcagaaaatatcttggcacgattatcttatttggaaaggcatctaagactcttttcataattggcaatttcaaactggaagcagcatttattcacataatcttgtagttaccacacattttctgccatataggaatcatgtgtctataaagtgtttagctgtggaaaatgaattattttaaaaaaatcctcttgggcaaaccaagggtgcaccataaacaaatgcccagaaggaaaatcttagaagattgagattattccatcaaatgagaataatgcagtcttaattcgtatattccttttcagaactggttttgctccaaaaatatgcagggaaaaatctgccagtagaaccagcagagt

SEQ ID NO: 379200 - DNA, 633 bp, Homo sapiens
ctagtgatgtaagggaaagcctttgccttcctgaggcacaatgagtctgtgcctttcttactctataattcatatatatatttttttctatgggaatcactttacattgaayagatgacaaataatattttgggcctatatgacacaatagttttcagagccaccaaaaatgtgaactctaatctctagcctttttataaatgctaattcatcttccagataatatccatgtgatgtcaatataacttatcagacattaaatatagaaaagattaattaatgtatatgaaacttagttacagaaaaatttggctatgaaaaccgatgatttattttttaaaaaaactgatttctcataaatgaaaacttctagataaattttaagtaaagtcatcagtaggagatgaatcttaagtgaacatacccataccattttggtaggggaaagggaatccaaaatttttaagtacgtactatgttgcaggttatagtaaatattttagttttaggtaagcacttcacaaaccttatcttatttagtgatctcaccttttttgaaatatatgttcatatgtcttttttaaaaattggagaaactaaaattcagagagattcaataacttgtttaacttt

SEQ ID NO: 379201 - DNA, 633 bp, Homo sapiens
ctagtgatgtaagggaaagcctttgccttcctgaggcacaatgagtctgtgcctttcttactctataattcatatatatatttttttctatgggaatcactttacattgaatagatgacaaataatattttgggcctatatgacacaatagttttcagagccaccaaaaatgtgaactctaatctctagcctttttataaatgctaattcatcttccagataatatccatgtgatgtcaatataacttatcagacattaaatatagaraagattaattaatgtatatgaaacttagttacagaaaaatttggctatgaaaaccgatgatttattttttaaaaaaactgatttctcataaatgaaaacttctagataaattttaagtaaagtcatcagtaggagatgaatcttaagtgaacatacccataccattttggtaggggaaagggaatccaaaatttttaagtacgtactatgttgcaggttatagtaaatattttagttttaggtaagcacttcacaaaccttatcttatttagtgatctcaccttttttgaaatatatgttcatatgtcttttttaaaaattggagaaactaaaattcagagagattcaataacttgtttaacttt

SEQ ID NO: 379202 - DNA, 633 bp, Homo sapiens
ctagtgatgtaagggaaagcctttgccttcctgaggcacaatgagtctgtgcctttcttactctataattcatatatatatttttttctatgggaatcactttacattgaatagatgacaaataatattttgggcctatatgacacaatagttttcagagccaccaaaaatgtgaactctaatctctagcctttttataaatgctaattcatcttccagataatatccatgtgatgtcaatataacttatcagacattaaatatagaaaagattaattaatgtayatgaaacttagttacagaaaaatttggctatgaaaaccgatgatttattttttaaaaaaactgatttctcataaatgaaaacttctagataaattttaagtaaagtcatcagtaggagatgaatcttaagtgaacatacccataccattttggtaggggaaagggaatccaaaatttttaagtacgtactatgttgcaggttatagtaaatattttagttttaggtaagcacttcacaaaccttatcttatttagtgatctcaccttttttgaaatatatgttcatatgtcttttttaaaaattggagaaactaaaattcagagagattcaataacttgtttaacttt

SEQ ID NO: 379203 - DNA, 633 bp, Homo sapiens
ctagtgatgtaagggaaagcctttgccttcctgaggcacaatgagtctgtgcctttcttactctataattcatatatatatttttttctatgggaatcactttacattgaatagatgacaaataatattttgggcctatatgacacaatagttttcagagccaccaaaaatgtgaactctaatctctagcctttttataaatgctaattcatcttccagataatatccatgtgatgtcaatataacttatcagacattaaatatagaaaagattaattaatgtatatgaaacttagttacagaaaaatttggctatgaaaaccgatgatttattttttaaaaaaactgatttctcataaatgaaaacttctagataaattttaagtaaagtcatcagtaggagatgaatcttaagtgaacatacccataccattttggtaggggaaagggaatccaaaatttttaagtaygtactatgttgcaggttatagtaaatattttagttttaggtaagcacttcacaaaccttatcttatttagtgatctcaccttttttgaaatatatgttcatatgtcttttttaaaaattggagaaactaaaattcagagagattcaataacttgtttaacttt

SEQ ID NO: 379204 - DNA, 491 bp, Homo sapiens
attttctttaatagtatacatagtcccaaaatattactgtgtygtctctctctttctctctctcatttatcttttctcttttaaatttagcttattcatagatctactattttgtttggcatggattgtagatagagccactggaatatttgtcaaggatcttgttctgttcatagtagtcaataaatgtttattcaagtaacattgatatgattacttattgctgctgatgccatatctgttctgtgacctaaataaaaattcaagtctttgctgataatttggcaccgttgaaatgcattacattgacttgaaaggagaacaaaaatggaccaataagaagcaagctatataaaatgtaataactctgaatttaaatagaaacaaaataacatcatgccaagcaggtatttttgtccctcagcttaattcgtaacaggcatttctgttcatatttggatatttttgctaactagcatatttgaaggttg

SEQ ID NO: 379205 - DNA, 491 bp, Homo sapiens
attttctttaatagtatacatagtcccaaaatattactgtgtcgtctctctctttctctctctcatttatcttttctcttttaaatttagcttattcatagatctactatttygtttggcatggattgtagatagagccactggaatatttgtcaaggatcttgttctgttcatagtagtcaataaatgtttattcaagtaacattgatatgattacttattgctgctgatgccatatctgttctgtgacctaaataaaaattcaagtctttgctgataatttggcaccgttgaaatgcattacattgacttgaaaggagaacaaaaatggaccaataagaagcaagctatataaaatgtaataactctgaatttaaatagaaacaaaataacatcatgccaagcaggtatttttgtccctcagcttaattcgtaacaggcatttctgttcatatttggatatttttgctaactagcatatttgaaggttg

SEQ ID NO: 379206 - DNA, 557 bp, Homo sapiens
tggaaaacatattcaaagaaataaatcaagaaaacttccttaatcttgctagagaggtagacatccagatacaggaaacctagaggacacctatgagatacaaaacgaacatcatcaaggtatatagtcaccagatggttcaaggtcaatgccaaagaaaaaagtcttaaaggcagctagaagaaaatatcagattacatacaaaggaaaccccatcaggctaacaacagatttctcatcagwtactttataagccagaagagattgggggtctattttgagcatttttaaagaaaagacattccaaccaagaaatttcatagcccaccaaactaagattcataagtgaaaaagaaataaatattttctagtcaagcaagtgctaagggaatttgttaccactagatcagccttacaagagattcttaaaggaattctaaacatgaaaatgaaagaacatatcaatattaacgtaatataacaggtctaaattcctcatctaaaagacatagaattgcaagatggatttaaaaactccatctgctgtattcaagaga

SEQ ID NO: 379207 - DNA, 592 bp, Homo sapiens
tcttagcttgggaaccaggatgggaaattgctaatgatataaaaatatttcttgttgtatctctgcacttttcccaaaagatagrcacattaaacaccttggcaaagtattcaatgtatttgttaaaatgaattctccatctcttcaatgactacaaagtaaatttatattaatgactttaaaataatttaccatttgatggatagaaggggactttgatcattttgcttcttcaagacattacatgatttgtccaaagtcataagttttagagattgaagtaagatttgaattcaagtgttcagtgtgctaattcatgtcaccttgaaaccactgaggtagaaagtctgctcttttaaaaataagaaataacacgaaattcccacatcatttctataaattcttatagtggaacaaatgagctgtgtcttctgaattattagttggtcttagaacttaaagttatttaagattgtcttctggcttcaagaagaaacagaatcttcacttctggatgtattactaatcctaaactattgtgtaacttttatattttaaggtacatgatatttgagagaacaaagagtttatt

SEQ ID NO: 379208 - DNA, 514 bp, Homo sapiens
tcttctggcttcaagaagaaacagaatcttcacttctggatgtattactaatcctaaactattgtgtaacttttatattttaaggtacatgatatttgagagaacaaagagtttatttcatggttcccatttttatcttcccactcaatacctgaaactaagttgtgttttattatttaattttattttgtctttggagaagttcaatattatttttcactgataaatattaacacaattcagtgccatttattttactttcttagataaatcaaaccctaaaaaaataaatttcaacaacgaagttacttgctagaagtggaaattcagtgtagtcagtcattctttggagagtgatctggaaraagaaaaaggatgggcattatgaatcagagttaaaagcattagtgaagaaaaatgtcccatttcccccctcatactaatggcgtaaatgtgtttgtgattgtggtgacagtcatttctcatgaggctaatagctgcaatgtgtgtccaa

SEQ ID NO: 379209 - DNA, 576 bp, Homo sapiens
aaaatttccaacatatacttattcctcacaaaaacctatgatctaatattctcattttacaataaagaaggtgcagrtcagaaaggatagagtctttgacttattgtcaatgaagacataatttaaagcctgattctacaggtatttactgagcttggcatgtgccaggcaatatgctcagggctggaaacactcgggaaaataaaatactgaaaatgtcacagctgtacattcttgtggggaagacagacctcaaacaagtcaacatatacacagcaactgaaagaaagagttagccagggatgataataataataataataataataataataatagaataaagacctttgctaggttaaaggtcagaaaggcccaggctgatcacaaagatacctgaggcaagagggaaagagaaaagatttcagatcggaaggttcccttttgcctttaattggacaagattcattggagaatgccagaaatctgtaggccccaacattttaggcatagacaaaaatgtcttttctatattatgcgaaagatatgggcatcacagggacacacagtcatgtg

SEQ ID NO: 379210 - DNA, 622 bp, Homo sapiens
cagcaactgaaagaaagagttagccagggatgataataataataataataataataataataatagaataaagacctttgctaggttaaaggtcagaaaggcccaggctgatcacaaagatacctgaggcaagagggaaagagaaaagatttcagatcggaaggttcccttttgcctttaattggacmagattcattggagaatgccagaaatctgtaggccccaacattttaggcatagacaaaaatgtcttttctatattatgcgaaagatatgggcatcacagggacacacagtcatgtggacctgattcactgctcctttgctgctactaaatctcaaacacttagcctgcaatcaatggtgctcattttccaaagagcctggattataactatttccatgcaaagcacttttcacacaatatatgggaatttttcagtcggccgtacacattctaatcttgatagctgccctctgttcttgggccttttcatttgtcttttgtctaggttactgatctttttttaaaaggcatttttctttttctttttttttcttttgtgcagacatgctcatcagccagcagatgctcccctcttgcacaaaactgagcagaggt

SEQ ID NO: 379211 - DNA, 514 bp, Homo sapiens
gttcctcatgttccaccatcccccagctgatgtctgatcacacaggcctgtcttgtaacagaaagaattctgttaggtaggcttagctaaaatcctccttcctcgtgatgtttcgtcttcgtaatttttttatctgctgattcccactccattaattgactataaattctcacttgtccatgctgtatttggaactgaacccagtctgtyttcactactgcaaaattcatttgtggtggtccttatgtctatcataggggtcctgaattaagtctgccttgccatgctttagcaaatatcattgaatatttttttctcataagtaactcatcaccatattttgttctaaatattgttgttttgacatctatagctgttctgttggtttttatgtggcagctcttaagtgactgaagaaacagttctgggactgttgtcattgtcaaggctaagggacaacttctcatttgctcactgaaagttcactgaaaatcactgacaaagaggcagatta

SEQ ID NO: 379212 - DNA, 589 bp, Homo sapiens
aagggcttatcaatgctaagtataggcatatttccagtgaaattaatttctacagaacttttcccttcggaactatgttgctttcctttctaagaaggcaactaaaaacctctatgaacaaattagggcacctattatgaagagatctcaggatgcttctctcctttctaaataacacattcactttctttatcagatacatttttagagaaaatgccttaggcaaggccttcttcacacattgtaatgatttaaatttctggtaaagcaagatgaaaagaaagcctagtggagagaattattttgtgtaggctgagcagttttatcgaagccaagaacatagtagtatgtctatggtgattaagcactgaccaagctagaagaaaggaaggtctccagttttaactagacatatatcagattaatttgtccaaactaaaatgagcaagtcaatcgtatttaccaattatttgtgctcctgatgtccagttaaatcacttacattttttttcttggatatacacccttygaatatttatattcagttattcagccccagggttattattatttcgtcgaggtctgcatt

SEQ ID NO: 379213 - DNA, 559 bp, Homo sapiens
agatgccacatgcgatacctctaggtaaagtattagggcctgataactaacttggtggccctatatctgagtgtaatacaaaagagccttaaaatactctcttttagttggacatggaacatcaggcagcaggtacctcaagggttccaaagaggattcagatgttagctagtgggaagcgcagtagcagtggtggcaccaaagatgaacattatatattagggccagcaaggagatgttgcatggtagatgactagatttgttactgggacactaagaaacaattagtggtggtggtggtggtagtagtggtagtgttgtgtgcaatattcttttggggatgagtgcatattcacagaaaattgtaattatcttaaaagaggcatggattgaatgctatggaagttccatgagtggaggaagcactagctgggaggaccagtaaaaatctcatgaaaaatatagcataggaacrggtcctgggtgatatgtagaattcagatttcagagataattttatgcagatggaaaaccaggcaatttgattccaatgtgaaga

SEQ ID NO: 379214 - DNA, 550 bp, Homo sapiens
ggcttttacttattatcaatctgagtagttatttatcgagtttcatgatggtaatgtgtacaatgtagttagatggcaactgtagattggggcaagaacctaggcctctacaccaatgtaattccttctatatgacactatttatttaattccagtggtatattagatttttgtcattcagtagccattgtcccattgtttacacatagtaaggtgatgttttagcacccatctttagagtcatgatgacctggtaaatttaattgaatgctgttttaaagatagccactagagggctttgctttatttaaataaaggggcgttacaacctgagattactgtcctattaactcgaaataatattttctgaaggggtcctagtttagtataagggaaacttgtttacactcacaagattcaagttctaatctcagwtctgtcactcgcttgcctttgaatttagttttccagtgtattatgtacctcttctattacatatatgctattccctaccctataaggtgtgaattccattaaatgacatacatac

SEQ ID NO: 379215 - DNA, 444 bp, Homo sapiens
catgtcctcttttctctgcatctcattctcatccttgtttggctttttaaaagtggcagtgtttgccctgacaagttgtagagagctcttgctcatccttctgccccatatacgtgagagaagacagaatggaaaaaagcaccaagcaatcctaaagggagggacatgagaggatctctcaaatatagacagtctacacagaagcaagaacatttatctccaaaaccctttacactagtactgagaaccaactgtatcttagccttgacagyaagtgttgaagggttacaggacctgaacttcctctttagatggaagagtgctattggttttagggttgttccaaacttgcctagtcctaggaagtaatagattatttacttaagattccccttgaatgtctcacagatgacttgaaattatgccagctcccgggcaaacagg

SEQ ID NO: 379216 - DNA, 526 bp, Homo sapiens
tactaccacttattgattttcccaattagagatttatatgtcgactttgttatgtaagataaggattccgctaagttcattcctaaacacccacattttttccyagatcttccttatgatatatttatctcacattttatggtaaaatcaatatttactcagtggtagtttgttatcatagtcctagcaaactaattgtctcctttgatctgaaatcgtttctcatctttccttgtctttcatgacattgatatttttgagttatatgggccagttgtttcataaaatgttccttggtttgggcttgtctgttttctcaacattggattccaattgtgcattttcagcaggaatataatgaaggtgatgttgtgtcctcagagcattgccttgtgggtgatgcaaatttctaatattggtgttctctagaatcactgcttcttgaaccctgagccaccatttaagaagtctgactaccctgagggtccatgctgtgagaaaacttaagctagtcatgtggagaaac

SEQ ID NO: 379217 - DNA, 600 bp, Homo sapiens
tgactgcaactgccctgtccaatccccatcttcagctcagacctgagtttcagccatgtctatgccactgtatccagtgaccgcatcttacctttcctcctattctcacaggttcccacatgttcttctcagctagctgaaaagctcatctttgctartaatagctgctgcttattcagcacctcctaaaaactaggcttggggtttatatgccttatttctgtgactcacaatgatgcttcaaggtaaatatgatcatctacattttttttgagacggggtctcactttgttgccaggctggagtgcagtggagatttcaaatgttggttaatttccaaaacatatctctttttacttcagtcacaaagtgtctaaatgattttgtagtagatactaatgaactattttgttacctcttctagatagaaatagtaagcactgggtatgtgccagatactgttgtaattgctttatatatgttaactcatttaatcaataatcctatgagatagatactattattgtagagttgaagaaactgaggcacagaagagtatagtaactttctcaaggccaggcagttactaggaggaagaga

SEQ ID NO: 379218 - DNA, 547 bp, Homo sapiens
actatagatgctcctcgttttatgatccggttatgttctgataagctcattgtaagctgaaaatattatgttaaaatgcatttaatacatctaatctaccaaacatcatagcttagtcaagcccaccttaaacgtgctcagaacacttttattatcttacagttgggcagagtcatctaacataaagcataataaagtattgaatttctaatgtaacttattggacactgtattgaaagtgaaaaatagaatgkttatatgagtacttgacatatggtctctaatgtatccgtattataccattggaaagtcacaaactcataagttggggactgtctgtagttgttgcttaccttaagaataggcatgtaacaggttgaatgggcttggctatataaaagggtgagattactttccagtttgaaatctcttagcagtctgcctataatgtgcattgcagtctggtttgatacttattgaacattaaaattgttttctacctttgtggagaagtgtttgggtttggaggagatttcgttttcaattg

SEQ ID NO: 379219 - DNA, 547 bp, Homo sapiens
actatagatgctcctcgttttatgatccggttatgttctgataagctcattgtaagctgaaaatattatgttaaaatgcatttaatacatctaatctaccaaacatcatagcttagtcaagcccaccttaaacgtgctcagaacacttttattatcttacagttgggcagagtcatctaacataaagcataataaagtattgaatttctaatgtaacttattggacactgtattgaaagtgaaaaatagaatggttatatgagtacttgacatatggtctctaatgtatccrtattataccattggaaagtcacaaactcataagttggggactgtctgtagttgttgcttaccttaagaataggcatgtaacaggttgaatgggcttggctatataaaagggtgagattactttccagtttgaaatctcttagcagtctgcctataatgtgcattgcagtctggtttgatacttattgaacattaaaattgttttctacctttgtggagaagtgtttgggtttggaggagatttcgttttcaattg

SEQ ID NO: 379220 - DNA, 566 bp, Homo sapiens
ctctttaacttgcccattattattttccagccatgctggtctttaattttattttagttcaagctctttcccacatgctattcacttggcctgaaatgctctttccctcattttctttggtttattactcagcaggcctttgttcaaatattctctctacagagaggccatccttctccatacaatttgagtaggttggtctaatgacttctcaacgttccttctttttttaatcatcagagggcttatcacaccacatataactagtaattatttgttctgtgcttgtttttcacacaaaggcaaggatcatggatttttctccattattgtaaacccagtgccctgcacagcatccaaaacatggtagttcctcagcagctgttcgttaaatagatctccaccaaagttcatttcaaagcaaatatttgtcagtatttttyccccttttcctgtttgtgctctaattggagggctggagtgacactgcagatatacatttggaacattaaatttgccagggaatataacaattccagtgcttacaagcctataaatcccagttg

SEQ ID NO: 379221 - DNA, 566 bp, Homo sapiens
ctctttaacttgcccattattattttccagccatgctggtctttaattttattttagttcaagctctttcccacatgctattcacttggcctgaaatgctctttccctcattttctttggtttattactcagcaggcctttgttcaaatattctctctacagagaggccatccttctccatacaatttgagtaggttggtctaatgacttctcaacgttccttctttttttaatcatcagagggcttatcacaccacatataactagtaattatttgttctgtgcttgtttttcacacaaaggcaaggatcatggatttttctccattattgtaaacccagtgccctgcacagcatccaaaacatggtagttcctcagcagctgttcgttaaatagatctccaccaaagttcatttcaaagcaaatatttgtcagtatttttcycccttttcctgtttgtgctctaattggagggctggagtgacactgcagatatacatttggaacattaaatttgccagggaatataacaattccagtgcttacaagcctataaatcccagttg

SEQ ID NO: 379222 - DNA, 608 bp, Homo sapiens
actaaaagggatggaggggtcggggaagatgtgacctgtctcccacttcagcaagatggatgatgtgctacgttttcctgtggttatggttgaagraagtgctgggcaaggacaggttactgagactgaggcaggcgactgatgcatgttttatagcagaatttcaagaagaaatgattttaatgaaatagaggcttgtgaagcatataactgtgcaagcaagactgctagtaggtaaataggtttgcaggttcttttggtaagtgtttttgttttattttgtgtttcactccagtagcttcaaaacattggcaactacttttatttttcaaatgcgttttagcaaacatagatgagccttaataacattagtcatgacagtggaagatcttgccacacaattttattaatgaggcaaagaatgccttaaataatatgatttaatagagaagttgtctgcctccccctcttccctccaaagactttgagtttatgggagtaaacaatttatcttcatgcacagaccacaaggttggtctgcatttgtgatttaatatttacttttgattaattgaaagagcagagctttggatctgacttaaggcatt

SEQ ID NO: 379223 - DNA, 564 bp, Homo sapiens
ggattaataaatctgggaataaatctgggaaatagatgaagacatttttcatttttgccaataattagcagcacatctaagatggatcaattttaattaggtaattgaaattatgaaccagttagccaagtcagctatttaagaatcagacttagttattttctgcctctagttccatggctttttaaagtattgaaagtttccactataaaaaagtgtgtttttaaacaaaaaccctgaaaataatcagctaaaataatctaaatataaaatatgtgtcattttgatgattagattattttgaacagtaaactggttaatattttagattttggttataatattaagaaacactatgtatatattgaaaatwtttgcttagcttgaaaatcaacataaagccattacagaagaaaacagttttatataatatgaatggaaacaacatcctcagacacagattataaaagcataaaataaaacttgattctttattttttattgtggtaaagacatgatcaagcagacaaccagcagaatgggagaaaatgtaaagtgttcatc

SEQ ID NO: 379224 - DNA, 543 bp, Homo sapiens
atcacatattaatacattaatttttaaatctacataatagtaataataatagtaataaccatgtatttaaaatccatttttttgtcaagagctgtactgagagctttaaatattttatcttgaattcaaaaagtaaatattgtggggcagttatttttatccccatttttcacatatgaaagctgagattgagatagcttaatttgccaaaaatctcacagagtagagaaggattctaatactgattcatgggactctaagcaaacatacttcctactaccrtgtgtctggcttacttgaagacttatctttataggcatgtattttttagttgaatcaaaaattgaaattgtggatgagataatttagctgtgcatgggttagtgtgctgagtgagaacatgagacttagtctagggaatttaactgctgaagtctcctcattgatgagttaccctgggggagttatttatcttaataggctcaggcccaagacctccaactcagagatttctgaaactgacccctttcaatcaagagctca

SEQ ID NO: 379225 - DNA, 543 bp, Homo sapiens
cttaaatgaagtaagagtaagccctgtgttgatctaaaggcagatccatcagcaagtgtaagggccaggaatgggctgaactttgttctgtttggcagcagagccaggccagaggggctagagaagagtgaatgagaaggagtggtcaggaaacaagttttggcctaataggccatggcaaggagttttcattatactctaactatgatctcttagaggaattttgaacacataggggatttggtctgacttatattttcaaaagttcattctacctgctatgtgagaaataaataagctctgggaacaaaaatggaggcaggaagaccagttagtaatctacagcagttgcccatagatttaatayagcttttcagacataatccaaacctttaaattatcgtaagtcctcattatgctgaggctcaaactgctcctgacatgtgaatgacatgtgttgattaagaaaagtgcaatttgaatgagatggtcttgccaccaacaacataagcatttgaaacataattaaccgctgttatgtgc

SEQ ID NO: 379226 - DNA, 399 bp, Homo sapiens
gggttgcaggaaaggccctccttaaagaaggaactctgaaccagctttgcaatctcttaagccctgaattctgcctcttattaacactgtgatctagacaagttgtttgacctcagcctcagcatctgtgtctgtggaatacagataaaatgtaaatgattgatatggaaattaaatgagataatgtagtgtggtgcctggcacatagaaagcattcaataaattattattaacaataaaaaacatatatgggttcmaagcaattttatattccacattaggtattaattcattgttctttccagcagtcttttattaaaatgaaagtccactttgggaagaataagctattccacataaataaaaatgtgacatagcatacttcattgtaggttgaag

SEQ ID NO: 379227 - DNA, 508 bp, Homo sapiens
tttttaaattttaagaaaagatttcaaaggaagtgttaaacatgagacaacccagtataaagggaagagattaaaaatttagcaagatgcaccaaaaaaaaaaaaaagtaaaggatgtgagtttgaaataaaaatgtgacagagcactaagggtactcactggtgagcaaacagatgttggagatgagttagaatgagtccccagtaactaaagaaaaagactgagtctaggcactgtgggacacagaaacaaaggaatcgagattacagggagggtagcatttagtgaagaaattatccaaactacagtaaaaagggatacctattggatttctgatctaatatatattgstgtgtttagatttcttatacagcatacttatcgccaaatattgagacatccaattctgtaaacggtttttttttaatttttattttacttttacgttcaggggtacatgtgcaggatgtgcaggtttttacataggtaaatgtgtgtcatgggggt

SEQ ID NO: 379228 - DNA, 643 bp, Homo sapiens
gcctgatatgtagcaggtacttaaaaactagcacctgtcatattattactgatacattcacctacttcctgttttcttcaggcctctttcctaaggaatgctgaggtgttcaccagttactgaagaagaggaagtcactaaagggacttaaagtcactattacacattgtgacacttcctattatttatttattttttatttctttttatgtatttttttttttgagacagagtctcgttctattgcccaggctggagtgcagtggtacaatctcggctcgctgcaacatcckccccctggctcaagtgattctctcgcctcagcctcccgagtagctggggttagaggcatgcaccacgacacccagctaatttttgtattttcagtagagactggtttcaccatgttggccaggctggtcttgaactcctgacctcaagtgatccgccagcctcggccttgaaagtgcttcgattacaggcctgagccactatgcccaaccctcttcctattatttaaatgctttgggtgtttatgttgcctcctctacaagaaagtaacgcagtagatcatttatatgatctaaaatatggtaagtattcaataaatacaaagtactctcccaggtgaatttaaaaaggt

SEQ ID NO: 379229 - DNA, 566 bp, Homo sapiens
gtgattctctcgcctcagcctcccgagtagctggggttagaggcatgcaccacgacacccagctaatttttgtattttcagtagagactggtttcaccatgttggccaggctggtcttgaactcctgacctcaagtgatccgccagcctcggccttgaaagtgcttcgattacaggcctgagccactatgcccaaccctcttcctattatttaaatgctttgggtgtttatgttgcctcctctacaagaaagtaacgcagtagatcatttatatgatctaaaatatggtaagtattcaataaatacaaagtactctcccaggtgaatttaaaaaggtgcttccctttctccagtcacctgtcaagtaagcaagcagaagaaaatgggaaacaagagtctggaaaagaaattttattttaaaaacagaataattattataacacctatgcagcagtactaatctacataagaaaaaaaatgcaaacctaggcagtgttttttgtggaagaaagtccaaatcagttttttttttwaaaaaaatgaagcatcatctgaaaaagaaaata

SEQ ID NO: 379230 - DNA, 557 bp, Homo sapiens
cacttcagtacatttagtattattgattttaccatgtaggcttttattcctaatctttctttatcaccaaaatttatttaataaaactaggtagtggaggaaggagaaaactagctgatgaatatctgagtatctgatttttgtttttcagtgtttgaacttttaatttgtcatgcttctcatttctttttatacttagattatagaattatatgtgaatatgcttttggctcttacaccattaatgttacatgtaatcaaaagtaattaaattttcaaaattagtaaaaccactcagttaagcaatgtaagcatacattagctgataatcatttacaatgccaattgcatcctgaggctgttattgacatgtcagcagagcatatgatagagttgtttttctgccagtactaatccagaaacaatgtaaggttgccaatgcagatgggattgtatttgtagaatggagcaattcccataagagatttttgccrtactaacagtcgctaggacttcctcagttttctcctgtgccaggtgcagtagccaccaacagc

SEQ ID NO: 379231 - DNA, 566 bp, Homo sapiens
tactttcagtttctcagtcaggtgtccgagtgcctattatgcacrtggggctagttattatctctaaatgataacaatgttaagcctaaatattatttatttatgtatttatttatttctgagacagagtctcactctgtgccccacgccggagtacagtggtgtgatcatggctcaccgcagcttcaaactcctgggctcaagcggtctttgtgcctcagccccccgagtactagagcaacaggcacacaccactgaacctagctgatgtttttaattttttgtagagacttgggtcttgctatgttgcccaggctggttttgaactcctggcctcaaaacaatcctcctgcctcagcctcccaaagtgctgggattatgggtgtgagccactgtgccagactttccttaattttgtaagtggcagtcaaggttgcaagaggacctaagctagtattggagtgagcattatgcaatgacccaagtattggagggtttttcatacagtctgcaggatcacttttatttctgtttcaggagcataaggagaattattttttactccc

SEQ ID NO: 379232 - DNA, 566 bp, Homo sapiens
tactttcagtttctcagtcaggtgtccgagtgcctattatgcacatggggctagttattatctctaaatgataacaatgttaagcctaaatattatttatttatgtatttatttatttctgagacagagtctcactctgtgccccacgccggagtacagtggtgtgatcatggctcaccgcagcttcaaactcctgggctcaagcggtcttygtgcctcagccccccgagtactagagcaacaggcacacaccactgaacctagctgatgtttttaattttttgtagagacttgggtcttgctatgttgcccaggctggttttgaactcctggcctcaaaacaatcctcctgcctcagcctcccaaagtgctgggattatgggtgtgagccactgtgccagactttccttaattttgtaagtggcagtcaaggttgcaagaggacctaagctagtattggagtgagcattatgcaatgacccaagtattggagggtttttcatacagtctgcaggatcacttttatttctgtttcaggagcataaggagaattattttttactccc

SEQ ID NO: 379233 - DNA, 580 bp, Homo sapiens
ctgtctcaaaaaaaaaaaaaagataattttttatggggaaatgcaccctcacaacaaatctagtgtttccacatgaacatgcacataggcaaacgcaatgaaaaacagtctgcaaagatacacacaaacttacacaagtagttatttcagaggactaagattggggagggagccacatttaagctatctgtaatgttytcattttgtataaagagaatgtatgtattatttatgtaattttttttttaaagggcagagtcttgctatgttgctggagatgttctcgaactcctaggcttaagcaatccttcctgcctcccaaagtgctgggattacaggcatgagccacagcactggactatttatgttatttaaaaaataagtttagagctagatttgattagaatatagctcatatgtagaatgctcaggcctacagaggaaatggcagtgaacctcagtgagtcaggacaagattcagagaagaggaggcctttgggtttagtggggtggggagagcatgcaaagcagaggaaatagggcgggaggtgagagaacatgttatgtttataaggtacat

SEQ ID NO: 379234 - DNA, 269 bp, Homo sapiens
tctcctgtgaaatgggttaataacagtacacaaggcattgtgatggtcaaaagagttatgacatacacgcctgggtcagtgggtggtcagtaatgggtgcccgttatcatcagtatctctccccgccagctcccagcatggggccttccacaggtaacatcagaaagaccttgttaggttgcatttctaagtcttctgggctgrcttctggtgcagtttctccatggtccaccctgttcatcttcctgcctccagctgggttctctccc

SEQ ID NO: 379235 - DNA, 607 bp, Homo sapiens
gggcccaggacagcaccatcagggatgctggtattgagaggcggggcatgaagaggaggtcatgcyggagtctgaaagggagcagtcagaggagaggacttcaaggggagagtggtcaccagggccacctactcgtcaaccctcaaaggaagcctttgccattcttgtttcacaggtgtaacggcaaaataacttgcagtagaattgggagtcaaatctggctctatcagattccaaaggccgactcttggctatgcttacacttctacctacagaggctggtcacccacaggacatccatgttcagttctcaatccaggggtgcccttggggagggagggcttaaggaggcctgtcccactaggcatgagctctgcattagttatactgctcttaaccgtgtgcctggggaggtcccaaccattctcccctcaaccttactctcaagttaactccatatgacctgtcttctacctcagattctctgcttagcccccacgattcccaaagtgactggagtctaccataaataccaacttaataattgctaataattccatggcacaacctacattctagcttctctctatacattagtcttccagca

SEQ ID NO: 379236 - DNA, 501 bp, Homo sapiens
atggaatattactcagctgtaaacaagaacgacctattgatacacacaacaccacggatgactttcaaatgcgttatgtcgagtgaaagaagccatcctcaaaagattctaagctgttgattttatttgtacaacattctgagaaaggaaaaactacaggggcagagaacagatcaagggtcggggatggggagaggttgattacaaagtcccagcatgaggaaactcttcagacaggtgtgggaattgttctagatcctgtttgtggagctcccccmtcttatccctctcctccgggatcagctccccaccccactgctgcattctcaggttgctatggagctgccatgctgggcccccaagtaggggtggctctgccaagcccatttccccacggggggagcagtgagctgtcatgctgggtaggtgcttcagggctgggtgggactggccactgaactgggaaggcctggatcacccccctggtagaggagaaagagc

SEQ ID NO: 379237 - DNA, 484 bp, Homo sapiens
tttgcattcccaccagcactgtatgagggttccaatttctccacatccttgccagaacttgttattttccactttgttttttatgaagccatcctagtgggtgcaaagtggtatctcatgtggttttgattttcgtttctctaatgactaatgatgttgatcattttctcatgtgtgtattggccatttgtaaatcttctttggaaagatgtctattcaaatccttcacccatttttaaattgggttgtttgtctttttgttgttgagttgtaatagttctttayatattctggatactagactcttgtcagatatataatttgcaaatatattctcccattctgtaggttgtttatttactctcttgatagtatcccttgatagacaaacattcttaatttgttgaagtcagtttatctagtttttcctttgctgcttgtggttttggtgttataattaaggaactgttgcctaatccaagat

SEQ ID NO: 379238 - DNA, 543 bp, Homo sapiens
gggcacagtggctcacacctgtaatcccaacactttgggaggctgaggcyggcagatcacctgaggttgggaattcgagaccagcctgaccaacatggagaaaccccatctccactaaaaatacaaaattagccaggcgtggtggcacgtgcctgtaatcctagctacttgggaggctgaggcaggagaattgcttgaacccaggaggcggaggttgtggtgagccgagattgcaccattgcactccagcctgggcaaaaagagggaaactccatctcaaaaaaaataaaaaaagactattctttcccccattgagtgattttgtcacccttgtcaaaaatcacagatgtatggggttgcttctggactctcaatcctattctattgatctatgtgtctgtccttgtgctagtaccacatcattttgattattatgtctttgtagtaaattttaaaatcaggaactgtgagctctccagctttgttctttcttaagattgtttttggctacctggagtcccttgcatttccataggagtttta

SEQ ID NO: 379239 - DNA, 520 bp, Homo sapiens
aggtcacacaggagttaatgttgtatggctaggtgtcatttccaaagaagagggccaagaccaaaccctgaggggagctgccggaagcagagaaagggactaacaagagaggtgggggaaatctggacaaagtagacatttcaaagcaggggaagagagaggcagcagaacaaagcagttgacagtgtcagctcctgccaagagatctagtaagataaggaccgagacgtgtcattggaattggtaagtgggtcactggtatccttgacaagagtggtttagtggagacggaagccraaatggagctggtgaggacagcaagcacggtgaggaagcaggaaaggagcgttgctgggaaatggggaagaaaatggggcaatcgctgaggaagtatttaaagggctttccagttgggaaaagtgtgagcaaatatgcagactgagggcttaatgcagagttggagaaagaggagagatgttgaatgaatgagtaaatgaacaaagaaagtaagacgtacgaa

SEQ ID NO: 379240 - DNA, 437 bp, Homo sapiens
caccttctgtttcccgggctcaccatcatcatcttagttcctgcctgtgcctaaggccagtcctaatgtctcctcctgggtctgggataacttcaaagacttccagtcaatgcccttttgcttaaattgaccacagttcatttctgttactttcaagcargaaccaggttgacccggactcacccaaggaccagatgttccgtctccatttgacagtcttccattccaacagtctgtgcattgatgagataagtggaagttaacacgcagagagcagggccctggtgctaggtttgttttgagagcattgatctccttcccctgttgccaccctggaaacacttctcaccacccccaattacagctcatctcctcctttcacagaagtggggccgtgtgtgtccttgactgctccattgtggcttccctttgcagtc

SEQ ID NO: 379241 - DNA, 513 bp, Homo sapiens
aaactgcattaattcaatgcaaacaagagctgagagctagaaatgacagtgagaataagagctaatctttcatagtgcttaccatgcaccaggctcygctctgagcatttgcacaggaactcactcatttaattctcacaacaactcgatgaagtcagtactattattatctgccttctacagatgtggaaacagagcaattgagtagcgtcagttgctctagcaagagatagagctaagatttgaacccaggcagtctgactagagtctgtgctcttaaccaccacctgtgagaagccctccaggaatgtgcgggaacctcaggagatttttagtgtacagtctgttgtatgagggtttgaattgagctgacctggatcttaagggcaagaagagtctaactggcacctgggtttatctattctaccgtcactctctgggactagctctgagctcccccagggcagggaccacattttatttctctgtgacctcagatcttccacaaggcct

SEQ ID NO: 379242 - DNA, 523 bp, Homo sapiens
ctgcttctctttgcctggcagacccccaatgtgtgggttgaatggtggtctctaaaaagaaatgtccacatcctgccccccagaacttgtgaacgtgaccttatttggaaaaagggtctttttacacatcattaagttacagatcttaagatgagattgatcatattggattgccctggacagactcaaaatctgatcaatgtctttataagagacagaagaagacacagacacacaaaggaggggagaaggccacgtgaagaggaaggtggagattggggtgatgcaatcataaagaaggtcaacagccaccgggggcygggagaggcctctcatctcctagagctttcggagggagcacagtcctgctgacaccttgacttcagatttcttgtttccagagtggtgacagactaaatatctcttgtaagccacctagtttggggcagtttattaagacagccccaggaaattaaagtacacactaacatttttagccccaacttggaccactgggaagcca

SEQ ID NO: 379243 - DNA, 571 bp, Homo sapiens
cccacattcatgcatcctcattttacagaaggcatctagcactgctttgtccttgatgagctcacctagggagagagggtggagagagaagcccaaggcctgagccccagacatctctgcttgcttctgggacgtcactcttatctggttgtcccctakctggttctgaggtcaggactagtagagggcttgagttcatttcctagagctggcgtcacaaattactccaaactgctagcttaagaaaaagcaatctattctctcatagttccagaaggcacagctccaacattaaggtgtctgcagggctgtgtcctttccagaaggtccagggaagaatcttttcttgctttttccagcttctggtggcttcaggacaggggtgtaccccagacataaggaaggctgggggagaggcccctgctgagcaagttactggtcagtcccaggggttgccttcagggctggtgggctgggagcagaagctctgagctcttcttctttctagaaagaaattcaccctcaaatcctttcctaacacctggggagtgccacccaccctcttcagcca

SEQ ID NO: 379244 - DNA, 555 bp, Homo sapiens
gtagaaccaggatatgaacccaggtttttctgactttgaagcccccactctttccaaatccctgtggtctgtggcaatgggaagcattacggaggaaagtaaggaaacagggaccagtttggatgctgttgcagtggtccagatgagagatgacagtggcatgatagcaaagatggccagaaaggggtagattgaggctatgtttaggaatacagcttgcaggcctgactgatggattaacctgctgaagggtttttggcttgagcgactaagtgagtaatgatgccgttttctgaaatggaaagaccagagaagaaacacatttcagggaggggataatcaaagatcctgctttggtcttgttaagttcaggtgcctattagtcacccaagtagagcttttggatcgatagctgggtaaatgcatctggatctcagtggcgagggmaagacaggcgatatccacagagagatgacaggtaaagccagtggattccatgatatcacttgagagggaatgaatacagaaaaaaggtcagggactgagcccctgggc

SEQ ID NO: 379245 - DNA, 544 bp, Homo sapiens
gagtccttttttttccatggggaagtttaattcagttgtatttcttgtcaaaattgattatataattttgcattctcattgagtttaatgctttttttctttttaaagcttttgtgtrttgttcactgctgtatcttcattgcctagaataatgcctggcaaagagcaggaactcaataaatgcgtattaaattaaggtatatgtgaatttagtataggattaaagtggccatttaagtgaagaaggataagtaatgtttctggctagttatccagaaaataaataaatgtacattcttactttatatcatgcacaaaacaaatttcagataaattaaacattcaatcttcaaaataaactaaacaaatattagaaaatgttgggggatgtgtttataacagttgagtagataacagtccttaagataaaaatgcagaagcgacaaaaaaaggtggattattctgtctacctccaagtttaaaacttccctaagacaaagatgtcataaaccaagccaggtaaagcaaccgactaggagaaaat

SEQ ID NO: 379246 - DNA, 631 bp, Homo sapiens
ggatgtgtacattgaagcaatataagaaacactggacaaatactaatgctgtgaaagtcatacaatgtttcactttaagaaaacctgacatgtgaacgtctaactttagctgatggataaactgagaggtcatgttcattgcaataggattttcttcatgcttgctttaaatagtgtctcctataatgtccctggatcactgagaatatatttaacactatttaaatactttctaagggtagtattaattctataaactgtacctggtaacaggaaccccaaagaaaatttctgagagggatctcaaaattatttatttgactgagaagagaaacatccgggaaattggtgtggtgctgccaaagaaccttgagagagatggggtgagggtggagaagtgctgaggcatcctgttgtgggtgccaccaggtctctgtgtctcttccaggacgacaggtgctggtcactaagctatcttatcaaggttaaggaatgtggcccacttcacaccccctaaggtgtrtgacttcttggcttttgcatgagctatcctctgcatttggggatgtagatcctgttgtgctactggaattccaagcacatgaattcctatttttgtttaggtggaaga

SEQ ID NO: 379247 - DNA, 599 bp, Homo sapiens
atataatcattataatttttaacamataaatctgattagatcaccatctgccatgtcttacctctgaaatccttcagtggctcctgatttgtcacccagagtgtaaagtcaaatctggttcactcttattcaatgtcctttatgatctactccaatgaacatatctggttttcatgccagtgccctgcatgcagtgcgtgattcactcatgaatttgtatattcaacaagtatttattaaatatgcaatatgtgctaggttctgttccaggcactggagatatggcagcaaaccaggcaaaaatgcccataattaataacagctaacatttttgagttactgtagttaggctttatgtgtattaatgtatttaatcttcaaatgaggtagatatatcattagttttattctagagatgagcagactcagataagtggtttattgtagaagtttaaaaaatacttttcctgtaaatctgtacttaggaaattaacacctatttattattttataccatttgggtcagagcatacatattgtcccagaacttactttgttttctaataagtaggctgtgaatattttcctgtgttcctaaa

SEQ ID NO: 379248 - DNA, 599 bp, Homo sapiens
atataatcattataatttttaacacataaatctgattagatcaccatctgccatgtcttacctctgaaatccttcagtggctcctgatttgtcacccagagtgtaaagtcaaatctggttcactcttattcaatgtcctttatgatctactccaatgaacatatctggttttcatgccagtgccctgcatgcagtgcgtgattcactcatgaatttgtatattcaacaagtatttattaaatatgcaatatgtgctaggttctgttccaggcactggagatatggcagcaaaccaggcaaaaatgcccataattaataacagctaacatttttgagttactgtagttaggctttatgtgtattaatgtatttaatcttcaaatgaggtagatatatcattagttttattctagagatgagcagactcrgataagtggtttattgtagaagtttaaaaaatacttttcctgtaaatctgtacttaggaaattaacacctatttattattttataccatttgggtcagagcatacatattgtcccagaacttactttgttttctaataagtaggctgtgaatattttcctgtgttcctaaa

SEQ ID NO: 379249 - DNA, 211 bp, Homo sapiens
atagacaggatgaaacttaaggtaarttttgaaaggcatatccatataagggaggcatttcagacagagagagatacgtattgataacatgtatcaggcctatataacctctcagaaaggggcactttttgcttttccatttatgtaaacactctgaaataagttggcacaatgttcctgaaatacctggctttgaggaagaaaagggtat

SEQ ID NO: 379250 - DNA, 482 bp, Homo sapiens
gttcctgtggcaaattcatagatgtctaagataggctcttgtcatcaagggactctcagatttcttcacaaatagcagcagttcaacaaggctcagcaacctgcaacaagatcacttttactaaggtagtcaaggaagacttcatagacaggatgaaacttaaggtaaattttgaarggcatatccatataagggaggcatttcagacagagagagatacgtattgataacatgtatcaggcctatataacctctcagaaaggggcactttttgcttttccatttatgtaaacactctgaaataagttggcacaatgttcctgaaatacctggctttgaggaagaaaagggtatgagatggcgcctttccccttttgtcgctaccataaaataagaacaccaaggacaggtggatttctgacagttcttagaagatatttttctcactttttaattaactgttataattcccagggtggatt

SEQ ID NO: 379251 - DNA, 482 bp, Homo sapiens
gttcctgtggcaaattcatagatgtctaagataggctcttgtcatcaagggactctcagatttcttcacaaatagcagcagttcaacaaggctcagcaacctgcaacaagatcacttttactaaggtagtcaaggaagacttcatagacaggatgaaacttaaggtaaattttgaaaggcatatccatataagggaggcatttcagacagagagagatacgtattgataacatrtatcaggcctatataacctctcagaaaggggcactttttgcttttccatttatgtaaacactctgaaataagttggcacaatgttcctgaaatacctggctttgaggaagaaaagggtatgagatggcgcctttccccttttgtcgctaccataaaataagaacaccaaggacaggtggatttctgacagttcttagaagatatttttctcactttttaattaactgttataattcccagggtggatt

SEQ ID NO: 379252 - DNA, 593 bp, Homo sapiens
gtggtttgctgcgcccatcgacccatcatctacattaggtgtttctcctaatgctatccttcccctagmcccccagcccatgacagaccccggtatgtgatgttcccctccctgtgtccatgtgttctcattgttccaaacagaattttcttatacaagtagttctgataatttgattagctctctttgcattattatgtaaataaaagcttgctatctgtcagccttaataataagaactaatcttattttacaacaatttgtgtgctttgaaaactttagagctactttcctatactttatttcatttgattcacaaaataatctgaaaatactgataatgcaaggtattactgcaatcatccctagtttacagacaagacttctgagtttccgaacgtgacttgcgtaacttgcaaacctagttaagtagcaaggactccaaaatttaaccatgtcccttgattccaaattgtattctcgatttttgataccacatgcttgaagtacaggccactctattagtgttaactcatatcaagaggactccccacacacagggataccatgaactacttgtacaaatggtgtcc

SEQ ID NO: 379253 - DNA, 621 bp, Homo sapiens
ggtacaattggctctgatgaaccagtttgagtcgattccattactgtaaagactaaaaaggaaagcaattgcaagctgccaagtgtctccttttccctttgactactaaagttaaatgtggctgctttgctgataatatcattttgtgtaatttaaaagggggtaaatattgcctatactctgagttttcagccataacatgtctactggaggacccagtgaccaactgtacctgtgaacaaaatgtgtccatcccaggtctgctcttcttcattctctagctacaaattggagtcatagagtagcctgcacaggtccccacatgctcccaggagggaccctcagccctactttcttgacctcattaagcaaaagcaagatgaagtttgtttcaaaggaaaaattacagaatctcacatttaggagacttttwcttcccagtctagcagagtaaagactgacaaaaccaatgaagtccaagccaatacaatatacttggtgaaactcttgagtttgtgcaacattgagattttataattttggatgtacatgagatagaaacaaacatgttataactgttgtttattcatcaaagccacattcttggaaagaacagaggga

SEQ ID NO: 379254 - DNA, 564 bp, Homo sapiens
cttcacacagccatggatgaagcttgaagtcatcatcctcagccaactaacacrggaacagaaaaccaaacaccgcatgttctcactcatatgtgggagctgaccattgagaacacatggacacagagaggggaacaacacacaccagggcctgttggggtatgggggtgagggaggggaacttagaggatgggtcaataggtgcaggaaaccaccatggcatacaaatatctatgtaacaaacctgcacattctgcacatgtatccctatttttttttgaagaaaaatatctaataaaaaataatcctacctggatttgctgccaaaaaaatagaattgtatttgaggcaaaatatttgaataatttttatcaaagatgtaaattaaaacaaatgtaaaagtaaaaaacaaaacacacaaacaaacacaaaaaagaaataagcctttttctataaatctatttcataaaattggaagaggtgactgttctactggatgcacagaaatcagtgtaagaacacatcaaacatagaaaatcaaggaaacattacacctccaaagga

SEQ ID NO: 379255 - DNA, 564 bp, Homo sapiens
cttcacacagccatggatgaagcttgaagtcatcatcctcagccaactaacacgggaacagaaaaccaaacaccgcatgttctcactcatatgtgggagctgaccattgagaacacatggacacagagaggggaacaacacacaccagggcctgttggggtatgggggtgagggaggggaacttagaggatgggtcaataggtgcaggaaaccaccatggcatacaaatatctatgtaacaaacctgcacattctgcacatgtatccctatttttttttgaagaaaaatatctaataaaaaataatcctacctggatttgctgccaaaaaaatagaattgtatttgaggcaaaatatttgaataatttttatcaaagatgtaaattaaaacaaatgtaaaagtaaaaaacaaaacacacaaacamacacaaaaaagaaataagcctttttctataaatctatttcataaaattggaagaggtgactgttctactggatgcacagaaatcagtgtaagaacacatcaaacatagaaaatcaaggaaacattacacctccaaagga

SEQ ID NO: 379256 - DNA, 627 bp, Homo sapiens
agaaaaatctaaagactccacccccccaaaaaataaacaaaaatttaaaaaaaaactcttataactgataaattcagtaaaggtgcaggatacaaaatcaacataccaaaatcagtaacatttttatatgctaacagcgatcaatctaaaaaagaaatcaagaaaggaatttcatttagaatagctacrgaagcaataaaatacctggaaataagtgtaaccaaggatgtaaaagatctctacaaggaaaactacaacacactgatgaaagaaataaagaaggcacaaataaatgaaaagacatctcatattaatggatttaaagaatattgtgaaaatgaccatgctaacaaaagcaatctacatatcaatgcaacccctatcaaaataccaatgacattcttcataaaaatagaaaacaccatcctaaaattttgcaggctactgcaaaagacctcaaatagccaacacaatcccgagcaaaaagaacaaagctggaggcatcacaccaccagactttaaaatttactacaaagctatagtaaccaaaatagcattgtactggcataaaaataggcaaatagaccagtggaacataatagagaacccagaaattaatccatgtat

SEQ ID NO: 379257 - DNA, 535 bp, Homo sapiens
aaactacaacacactgatgaaagaaataaagaaggcacaaataaatgaaaagacatctcatattaatggatttaaagaatattgtgaaaatgaccatgctaacaaaagcaatctacatatcaatgcaacccctatcaaaataccaatgacattcttcataaaaatagaaaacaccatcctaaaattttgcaggctactgcaaaagacctcaaatagccaacacaatcccgagcaaaaagaacaaagctggaggcatcacaccaccagactttaaaatttactacaaagctatagtaaccaaaatagcattgtactggcataaaaataggcaaatagaccagtggaacataatagagaacccagaaattaatccatgtatccacaacaactgatttttgactaaggtaccaagtacattrattgcggaagggaaaatcttttcaataaatggtgctcagaaaactggatacccatatgctgaacaaggaaattagactcccacctctcaccctattaaaaaaaatttcaaaatggg

SEQ ID NO: 379258 - DNA, 627 bp, Homo sapiens
ctgctgtggttagtgtttactattattctgcatgaagttggagttaatttcaaaaatagtaattgaatacctactttgtgctcaagaagcatcagctgaataaatgaattagtgagtgagcatatggctaataaataaactcagctaggaactgtctataaacacatttgatgttaaaagaatttcacccccccaaaagagagtttttaaaactccagattttcaaagggccggagaaggtgcaaacgctggagagacttggaacggaagcagagtttcttggcccccagtggcttcgtcttcaggtagcaagatytacctttctctaggcatataaactcctcttcctcccgcccacgggaataatgtgcacaaaacgaaagttctatgagaatgagaaaaagacaacctagaagaagcaaataaatagaaaagataatttctgaaagtttagaaataaacatagttaaaccaagttgtaaattatatccagtttttctaggagacaaattcctagtctacatttgtcaggtatacctagatttgtggggatgaggaagggggagttgaggtagaaggtaaggataactcctccttctagatactactgaggggaatttaaacttc

SEQ ID NO: 379259 - DNA, 627 bp, Homo sapiens
ctgctgtggttagtgtttactattattctgcatgaagttggagttaatttcaaaaatagtaattgaatacctactttgtgctcaagaagcatcagctgaataaatgaattagtgagtgagcatatggctaataaataaactcagctaggaactgtctataaacacatttgatgttaaaagaatttcacccccccaaaagagagtttttaaaactccagattttcaaagggccggagaaggtgcaaacgctggagagacttggaacggaagcagagtttcttggcccccagtggcttcgtcttcaggtagcaagatttacctttctctaggcatatamactcctcttcctcccgcccacgggaataatgtgcacaaaacgaaagttctatgagaatgagaaaaagacaacctagaagaagcaaataaatagaaaagataatttctgaaagtttagaaataaacatagttaaaccaagttgtaaattatatccagtttttctaggagacaaattcctagtctacatttgtcaggtatacctagatttgtggggatgaggaagggggagttgaggtagaaggtaaggataactcctccttctagatactactgaggggaatttaaacttc

SEQ ID NO: 379260 - DNA, 603 bp, Homo sapiens
atttatatgtgtatatatacatatgtgtgtgtgtacatatatgtgtatatatacatatatgtgtacatatatgtgtatatatacacacatatatgtgtacatatacatgcgtacatatatatacgcatacacattgtgaaatgattgccacaatcaagtttattgtacattcttacatcttttcaactttgggttgcagaaaaaaatagaacaaccatttcaatttaaattttagataaacaatgaattttttttctttagtatgggtatctccatgcaatatttgggcatatttaaacctcattgtttatcagatagtcaaattcaagtgcccatactgtgttttggtttgttttggctaaatctggcaaaatagtttataatttaaaaaatrtaattagtcagatgctaatcacttattcagagatgacttcaaccacccaggaaactgtccagatttcataatttagcaaaaaaagaaaaagcccatgtacagatggcaccaagtccaatcactactttggattatttgactgtgtttataggaaagttgacaagatcctttgttagagctgttgactttacattgaattctaacagtat

SEQ ID NO: 379261 - DNA, 570 bp, Homo sapiens
acaagagccgtcaacacatacactgtgtgtgtattcaataaaaaattattccatgcgcagaggcagagaaatgtgacacatactaagaaaaagatcggtcaagggcaagactcagaaaggacagttgattgcattagctgataagaaatttaaatcactgcttataaatatgatgatttatatcaaggacttaaagagaaacaggaataaaatgaaatgaaagaaacaaaattatgatgccaaataaaaaacacagtatctgaaaagaaacatccaatcaataagtttaacagattagcattaaaaaaaaaagtaacagccgacttgaagacataataatggaaactattgaaaataaaatacagggagggaaaaatactaaaaaacgaggaacctcaatgatgaatkgtacagcatcagcgatcgaacatacatgccgttagaattcttgaaggagaaaagaaaagcattagaagaaagaatggctgaaatgtttccaaatttaatgaaaattataaactcagggatacaaaatgttaatgaataccaagtaagataaacacaaatatc

SEQ ID NO: 379262 - DNA, 464 bp, Homo sapiens
aaatcaggtgaaaatcaaatagtaaaatttacatcattaggtacagagagaaaaagtctagcatgttacaggaaaattaaaatggattgaattgccaattaaacatcaaattatagaaattataaatgccttttaaatatatacacatacacacacacacacacacacacacacacacacacacacaaagatcctatagcttttacttcagaactttagccatgagataaacacaaattcaccagcttgcaaacaaaacacctgttggatccaaacagtggtttttatcttaatagaaaaataacagcagatttaaagcaggcagaaaataaaatagagaaaaaaagagaacttatgaactctatactttgcaggttgaccttagggctctttttctcaatgtaaatgtgcacaaagaccatactacttycattttacataaactctggcaagtagagatgcca

SEQ ID NO: 379263 - DNA, 619 bp, Homo sapiens
ctactttgtagctcccatttgccataacacatgccaaggtcaaatcctctcacagtacaaagtaatctctggtacccccaaagccaaaaaggtcagctcattcaatacaggaaaacagagctttagacctaagaagaatctgcccatgactctcgaaattycacaaagaaagaagaacatcccaaaaggggtgattggtgcctttgttctgaattatttaaaggggttcaagtcattaaaagccttttctagatttttgatgctgcagatggcaagagagggaaggagatatagggtggaaaaaaagtaaaagaactttttttaagataggaagtaaacacagaaaccaagcacatggttttggggatttttgtttgtttgttttttcctcttttgcagttgcaaggaattttaaccaaattagagaggctttgttacccataatttggaattctcacttggatttaaccaagtcaggtagagttggtcaaatctgattggcaaaagactggaagaaacaacaacaacaaaaaaccaacaatatgatcgctgagcactctaatggtaaaaagaaattaagacaagctggttgttagactttagataagacaaaacccaa

SEQ ID NO: 379264 - DNA, 594 bp, Homo sapiens
atatcagcacaataaaatacatatattgcaaacccacaacatactgaatagtgaamagttgccacttattgctttaaggtgtggaagaagacaagaatgcccatttttacaacttttattcaacatagtactggaagtcctagccagagaaactatgtaaaaaatgaaataaaagaattggaaaggaggaagtcaaattttccctgtttgcaaatgacataatcttttttttttttttttttttttgagatgggtcttgctgtgtcacctaggctggagtgcattggcgctatctaggctcactgcaacctctgctgcccaggttcaagcgattctcctgcctcagcctcctgagtagatgggactacaggcacatgccaccacgcctggctaatttttttttatttttagtagagatggggtttcaccacgttggccaggatggtctcaatctcctgacctcgtgatccacctgccttggcctccaacagtgctgggattacagggacataatcttatatgtagaaaaacctaaaagcctcacagaaaagagccttagacctgacaaacaagtcagtaaagtcacaggttaca

SEQ ID NO: 379265 - DNA, 518 bp, Homo sapiens
cttgagtccaggagcttgagacaagccatggacaacatggcaaaactccacctttacaaaaaatacaaaaattagctgggcrtggtggtgcatgtctgtagtcccagctacctggggggctgaggtgggaggatcacttgagtctgggaggtcaaggctgcagtgagctgagctcatgccactgtactacagcctgggcaacagagtgagacttagccaaataaataaataaaggaataaataaacaaactctaaatggattaaagatttaaacataagactccgaaccatggaagtacaagaaaaaaaacataataggaggaacagtttaggacactgatctggacaaaggtattatggagaacacttcaaagcacaagcacaaaaacaaaaatagacaaatggtattacattaaactaaaagccttctgtatagcaaaggaaacaaacagaatgaagagacaacctgaagaatgggagaaaatatttgaaaactattcatctgacaagggattaat

SEQ ID NO: 379266 - DNA, 518 bp, Homo sapiens
cttgagtccaggagcttgagacaagccatggacaacatggcaaaactccacctttacaaaaaatacaaaaattagctgggcatggtggtgcatgtctgtagtcccagctacctggggggctgaggtgggaggatcacttgagtctgggaggtcaaggctgcagtgagctgagctcatgccactgtactacagcctgggcaacagagtgagacttagccaaataaataaataaaggaataaataaacaaactstaaatggattaaagatttaaacataagactccgaaccatggaagtacaagaaaaaaaacataataggaggaacagtttaggacactgatctggacaaaggtattatggagaacacttcaaagcacaagcacaaaaacaaaaatagacaaatggtattacattaaactaaaagccttctgtatagcaaaggaaacaaacagaatgaagagacaacctgaagaatgggagaaaatatttgaaaactattcatctgacaagggattaat

SEQ ID NO: 379267 - DNA, 453 bp, Homo sapiens
atcttccaaccacaatggtatgaaaggaaatcaataacaataaattttggaaaattcacaaatacatggaaattaaacaatattctcctgaacaatcagtgggtcaataaattaaaagcaaaaataaaaataacttcaggcaaacaayaatggaaacacaacacaccaaaacttacaatatacagcaaatgcagttctaagaaggaagtttataacaataaatacctacatagaaaaatgaagatcttaaacaacctaatattataattcaaggaactagaaaacaaaacaaactaatctcaaagttaagaggagaaagaaaataataaagaccagagcagaaataagtaaaatagaaaccagaaaaacagtagaaaagatcaacaaaactaagttggtgttttgaagagatacatcaaataaacaaacctttatctagactaagaaaaagag

SEQ ID NO: 379268 - DNA, 453 bp, Homo sapiens
atcttccaaccacaatggtatgaaaggaaatcaataacaataaattttggaaaattcacaaatacatggaaattaaacaatattctcctgaacaatcagtgggtcaataaattaaaagcaaaaataaaaataacttcaggcaaacaacaatggaaacacaacacaccaaaacttacaatatacagcaaatgcagttctaagaaggaagtttataacaataaatacctacatagaaaaatgaagatcttaaacaacctaatattataattcaaggaactagaaaacaaaacmaactaatctcaaagttaagaggagaaagaaaataataaagaccagagcagaaataagtaaaatagaaaccagaaaaacagtagaaaagatcaacaaaactaagttggtgttttgaagagatacatcaaataaacaaacctttatctagactaagaaaaagag

SEQ ID NO: 379269 - DNA, 453 bp, Homo sapiens
atcttccaaccacaatggtatgaaaggaaatcaataacaataaattttggaaaattcacaaatacatggaaattaaacaatattctcctgaacaatcagtgggtcaataaattaaaagcaaaaataaaaataacttcaggcaaacaacaatggaaacacaacacaccaaaacttacaatatacagcaaatgcagttctaagaaggaagtttataacaataaatacctacatagaaaaatgaagatcttaaacaacctaatattataattcaaggaactagaaaacaaaacaaactaatctcaaagttaagaggagaaagaaaataataaagaccagagcagaaataagtaaaatagaaaccagaaaaacagtagaaaagatcaacraaactaagttggtgttttgaagagatacatcaaataaacaaacctttatctagactaagaaaaagag

SEQ ID NO: 379270 - DNA, 550 bp, Homo sapiens
aagactgccacagagagactccataaggatgtctggtggaaccatgacagtggggtcaccccaaagaccacaaaactgtagagccaccaacgtgcaactgcagtcaaggagagtctcaggcactagactccaacccacgaaagctgtaatgtaggctgcaccgtgcaaagtcatggggctcagtcccccagagccttggggacacaacccctgccccagtgtgtcttggaggcaggacgtggtgtcaaagattattctcaagcctcaagatttaattttttttatcttgttggggttgggacttacctgggatcagttacctttttcatctttcctatttcttcttttcaaaatgagaattcctgtgccaccactgtattttggaagcacataacttgttagatttcacatctaaagaggctcacakctagatattatctaaatcaaggaggagaatttgcaattatcctccttggtttagatgatatttagatgagatttctgactagtctctaaagttgatgccagaatgagttaggattttttggtt

SEQ ID NO: 379271 - DNA, 550 bp, Homo sapiens
gtttgagtgtttgtgtccccttgaaaattcatgttgaaatgtaatccccaatgcaaaagtattaagaggtggggactttaggcagtgattaggtcatgatggctcctccttcatgaatgggattaaagcccttataaaagagacttcatatagcatttagctctttttgcccttctgaccytccccatgtgaagacacagcacccattccccaccaccccctggagaacagagcaatgaggcaccatcttggtagcagagaccaggctctcagcagacactgaacctgtaggcaccttgatcttgaacctagcattcgtaagtgagaaataaatttctattgtttataaattacctggttgctggtattttattgtagcagcacaaatggactaagacaaatgcacaatggggaaaaaacaatgtcttcataaatgatgttgggactagatatccacatgcagaagaatcaaattagacccttatctcacaccacgtatgaaaatcaactcaaaatggattgaagtcttaaatgtaagacctgaaaaatt

SEQ ID NO: 379272 - DNA, 550 bp, Homo sapiens
gtttgagtgtttgtgtccccttgaaaattcatgttgaaatgtaatccccaatgcaaaagtattaagaggtggggactttaggcagtgattaggtcatgatggctcctccttcatgaatgggattaaagcccttataaaagagacttcatatagcatttagctctttttgcccttctgaccctcmccatgtgaagacacagcacccattccccaccaccccctggagaacagagcaatgaggcaccatcttggtagcagagaccaggctctcagcagacactgaacctgtaggcaccttgatcttgaacctagcattcgtaagtgagaaataaatttctattgtttataaattacctggttgctggtattttattgtagcagcacaaatggactaagacaaatgcacaatggggaaaaaacaatgtcttcataaatgatgttgggactagatatccacatgcagaagaatcaaattagacccttatctcacaccacgtatgaaaatcaactcaaaatggattgaagtcttaaatgtaagacctgaaaaatt

SEQ ID NO: 379273 - DNA, 550 bp, Homo sapiens
gtttgagtgtttgtgtccccttgaaaattcatgttgaaatgtaatccccaatgcaaaagtattaagaggtggggactttaggcagtgattaggtcatgatggctcctccttcatgaatgggattaaagcccttataaaagagacttcatatagcatttagctctttttgcccttctgaccctccccatgtgaagacacagcacccattccccaccaccccctggagaacagagcaatgaggcaccatcttggtagcagagaccaggctctcagcagacactgaacctgtaggcaccttgatcttgaacytagcattcgtaagtgagaaataaatttctattgtttataaattacctggttgctggtattttattgtagcagcacaaatggactaagacaaatgcacaatggggaaaaaacaatgtcttcataaatgatgttgggactagatatccacatgcagaagaatcaaattagacccttatctcacaccacgtatgaaaatcaactcaaaatggattgaagtcttaaatgtaagacctgaaaaatt

SEQ ID NO: 379274 - DNA, 550 bp, Homo sapiens
gtttgagtgtttgtgtccccttgaaaattcatgttgaaatgtaatccccaatgcaaaagtattaagaggtggggactttaggcagtgattaggtcatgatggctcctccttcatgaatgggattaaagcccttataaaagagacttcatatagcatttagctctttttgcccttctgaccctccccatgtgaagacacagcacccattccccaccaccccctggagaacagagcaatgaggcaccatcttggtagcagagaccaggctctcagcagacactgaacctgtaggcaccttgatcttgaacctagcattcgtaagtgagaaayaaatttctattgtttataaattacctggttgctggtattttattgtagcagcacaaatggactaagacaaatgcacaatggggaaaaaacaatgtcttcataaatgatgttgggactagatatccacatgcagaagaatcaaattagacccttatctcacaccacgtatgaaaatcaactcaaaatggattgaagtcttaaatgtaagacctgaaaaatt

SEQ ID NO: 379275 - DNA, 535 bp, Homo sapiens
agtggagagagagagagagagagaagccattttttgtgtgccatgtcttataagaactttacatactgactgtgtatctgtgtatattccattctgtacagtttttaggtagttcaagaattgcaggcttttaatcagatcacaaaaagaatagaccttcagcattagctyggtcaggtttcttaaacttaggtttataatgtaaccgtctgtaatatatctctcatttgaccctgtgggccataaaataaaatttataaactagatattgtggaatgcattctcaccaccaaactattcacaaagaaccacaatggactggtatgggttttgttttgagtcttctttctactcttgtattcaaaatattctgcccttaaagattttgttcaaaatagacaagaatatcattaaacaaacaaacacacaaacaaaaaactgtccttcctacactgttcaatgtgttcctttgttatttagaaagtttattttgctttactataccctttgctatagtatagtaaagctatactat

SEQ ID NO: 379276 - DNA, 544 bp, Homo sapiens
  misc_feature (1)...(544): n = A,T,C or G
ttatgtaaatctaaagctgttctaaaaagaaccatctactaatttaaaaagaattcctattgtcatanatgtcctgaagttattgcgtgcattctcattacaatgcaagcatggtaaatactttattttcttcctttgtttcaggtctattttgtgtttgacatgttttggtgctctcaggcagtacatctcaaattttcctgtgtctacaagtcaactgggggatcttgctaagatacaggttgtgmtctaccaggtctgggggaaagcctgagatttttacatttttaacaagctccctggtgattcccatggagctggtacatggtccacacttggaatagcaggacctacaagcagacaaacaagactggagacccagactccaccctttgtactctgttttctttctttttcttttattgtagatacagggtcttactatgttggccaggctggcctcgaactcctggcctcaagcaatcctcccaccttggcctcccaaagtgctgggattacaggtgtgagttaccatgcctgacct

SEQ ID NO: 379277 - DNA, 606 bp, Homo sapiens
tcatgtggaacactcaccaagatagaccacattccatgccataaaacataccttaacaagtgtaaaagaatagaaatcatacaatgcatgcttttagaccacaatggaattaaactagaaatcagtaacataagatagctagaaaatctcagaataattggagattaaacaacacacttctaaataacacgtgggtcaaaaaaaaaatctcaagaggaatttaaaaatattttgaactaaattaaaatgaaaatataacaccaaaatttgtaagatgcagtagggtgcggtggctcatgcctgtaatcccagcactttgagaggtcaaggcaggtgaatcacctgaggtcaggagtttgagaccagcctggccaacatggtgaaaccccatctctactaaaaatacaaaaattagctgggtgtggtggcacatgcctgtagtcccagctacttgggaggctgaggcaggagaatcgcttgaacccaggaggtggasgttgcagtgagccaagattgtgccactgcactccagcctgggtgacagagcgagactctttaaatataaagacatatatagattaaaagtaaagggaaggagaaatatat

SEQ ID NO: 379278 - DNA, 570 bp, Homo sapiens
gttgtaactgcctatggagaggacctctaggagttgaggccatggaggagcatggaggaggaccaagtggagggttatgatcttcacataggaacatggtccaaacagcatcttgtttgcagtcttgtgagataacaaatctaagtggttctaagctgcttgttttgttttaaattttaagtttctgaaaacttattacacagcaatagataactaatactgtaaattagtttgtgtagtatggtactataaaastggaaacacatccttattcatttgtcaaaatccatggaatatacaacacaaagagtcaaccctaattaaactgtgaactttgtttgataatatgtcaacattgctgcattaatggtaacagaggtactgcacagaggtgccattaacaaaagataactaaatctgcaggaggagaagggaattagctggaaagaagaagaaaatggacagagaatagtagagacaagtgagaagcaacactcttctgagtattccttttagtatgactttcatcttttttcacaagggaaagttttgcatatcaccccccccccc

SEQ ID NO: 379279 - DNA, 570 bp, Homo sapiens
gttgtaactgcctatggagaggacctctaggagttgaggccatggaggagcatggaggaggaccaagtggagggttatgatcttcacataggaacatggtccaaacagcatcttgtttgcagtcttgtgagataacaaatctaagtggttctaagctgcttgttttgttttaaattttaagtttctgaaaacttattacacagcaatagataactaatactgtaaattagtttgtgtagtatggtactataaaagtggaaacacatccttattcatttgtcaaaatccatggaatatacaacacaaagagtcaaccctaattaaactgtgaactttgtttgataatatgtcaacattgctgcattaatggtaacagaggtactgcacagaggtgccattaacaaaagataactaaatctgcaggaggagaagggaattagctggaaagaagaagaaaatggacagagaatagtagagacaagtgagaarcaacactcttctgagtattccttttagtatgactttcatcttttttcacaagggaaagttttgcatatcaccccccccccc

SEQ ID NO: 379280 - DNA, 463 bp, Homo sapiens
ggctatagcttctagtttcaagattgtaaccacatccgtttagtctttacacttatttcagacatgatatttaaacagattttagttgattttctgaagataacattaagtcacaaaacagaccccctacatgctcttaaaatctgataactcagttctacaatgcccatgcctcagggtccagagaagttagatcaggaagtggaggcmcaagcccaagaattcatattccttttgaaaagagaatttgcttactttagcttctaaagcaataattgcatctagggcatcaaacgattggagacatattgcaataaaggggtttagtgtatacaaattctattatatcaaaactgtgttcatccctgggattttgttgagtctaaaaaaggtattctccagaaatagacctgctcccgtgtgaccacttgagaaaatttaatttaaaaaagagtcaagatat

SEQ ID NO: 379281 - DNA, 619 bp, Homo sapiens
ttagagaacaggagataaattgaaaatcatgagttaaatactaattaaagaaaacaccaacttcttcacataaaagaaccatctttgaatacaattttatctaacatctataattttaattctatatttaaacaaagagaaccactaatgttaacatgttgcccttaattcatataacatgccttccttgatccaaagtgttaattatacattctgtcttcaatatttctatataactttcttgatacctgccatttctcacagtctgccttgtatcacaatctttgcacatttgtgtgtatgtgtgtgtgtacacatacagggaatgtacacrtacagggaatctctcctatgtccaacagattggaaagtctctgagaatgggaacactgccctattcctagtatggttcattacttatagaagtccttaacaacattcatagatttgttaataaatatacaaatataatctaccataatttacattatggcaaatctccaacttactaaaaactcaattttatatattaattttaaagattatctaacaaaacatgcattaaacattgtgttatacactcagagtataacagttttgactattataatttaaccac

SEQ ID NO: 379282 - DNA, 547 bp, Homo sapiens
tcctctaatggaaatccattgaccgtcttggtgtgacagtccaaaggactagggctttagccatcaaaatgtaaaatgggactctccaaatccctgtttcatctaaggcctccagataatagttgcaccatgtaacattttgagaagatggtgctataaactgattttgcagatcacctatattcaatctgtgaaagaaatggaagagatcaaaagatactgattggagattaaagaaaaaatcttagagtttttagtatgytgctgataccctgccttcatggctatggagtaagaggaagaggcttcctcctcacctaaagtcaagcaaaataggcttcccagggataaattgaggtttctgataggattccctgctgtttgggggatacagtggactggtatctgacacatggttaaagcacctaaaagcaagatgctctggccaaagcttcctgctttgttggtgcgacagggaatgacacgtgagtctttttcatggatcaaatgtgagcaacaagtgagagagaaagccatccttaaactg

SEQ ID NO: 379283 - DNA, 547 bp, Homo sapiens
tcctctaatggaaatccattgaccgtcttggtgtgacagtccaaaggactagggctttagccatcaaaatgtaaaatgggactctccaaatccctgtttcatctaaggcctccagataatagttgcaccatgtaacattttgagaagatggtgctataaactgattttgcagatcacctatattcaatctgtgaaagaaatggaagagatcaaaagatactgattggagattaaagaaaaaatcttagagtttttagtatgctgctgataccctgccttcatggctatggagtaagaggaagaggcttcctcctcacctaaagtcaagcaaaataggcttcccagggataaattgagktttctgataggattccctgctgtttgggggatacagtggactggtatctgacacatggttaaagcacctaaaagcaagatgctctggccaaagcttcctgctttgttggtgcgacagggaatgacacgtgagtctttttcatggatcaaatgtgagcaacaagtgagagagaaagccatccttaaactg

SEQ ID NO: 379284 - DNA, 635 bp, Homo sapiens
catgtttctaccacctatagatggacgtgagggaaggcaccatcacatctaataagtttgtgtctcttcaatttatgggttgctccattgatgagtgattgtccccactaaacctcacctgggagaaataatagagccttttggaaggaccaggatatctaaacaaaacagtcttatagaagtacatagacagagcaagaatcgcagatcagagataaaatataacaggcagtcctgagacaaygaatactcatttcccaaaacatcagaataatgataacctctggggaaagagagaagaataaaactgggaatgggcttgcagagcccttgaagatactagcttaatctagttcttaacctgagttttgatttcacacactttatgattatttgtaatttgcccatgcataaattatatatttttcaaatgtacatttaacattacatttatttatgacataaagaagtatacagaatgaaatactgcaaatccaagatctaaagtgggattaatggcaaacaattacctagctaaaactatgaactgactccagaataaaatatactgagccatctggtagctgagttagtgtttgaggctgcctgaaaaaacagcacagaccaagtctgga

SEQ ID NO: 379285 - DNA, 494 bp, Homo sapiens
tcctcctcctccttattcttcttctcttcttcttcctcttcctcttcctctcctccttctccttctcctcctcctcctcctccttcttcttcttcttcttctcttcttcttcttcttctccttcttcttcttcttttcttcttcttctcttcttcytcttcttcttcttcttcttcttcttcttcttcttcttcttcttcttcttctttctgtcttttctctttactgaattgtattcactatttctctcaccattttccttggaaccactctaggtgggatttgtctgaggtgttgattcagtacaaattctctcttatcaaacaaacaaaaataacaataaggggacagaactatggctggttaagtgggggtcccccaggatagagtcatccaagaaaactggtatggaatgctgtgagcatgggaagaagagcttcactcggaattgggaaaagctaaacaaaattgaggctcacaaaagacagagcagg

SEQ ID NO: 379286 - DNA, 530 bp, Homo sapiens
ttcctcccacaatatgtggagattatgcragctacaattcaagatgagctttgggtggggacacagccaaaccatatcgagggttgaactcatagaattagagagtagaatggtggttatcagaggtttacagggatgtggagtagttgagatgatgttggtcaaaagatacaaaattttacttagcaaaattttaattagctaaatttagccattccacatgtatacatatttcaaaacaacttgtataccatagcagtttttatttgtgaattaaaatttttacaaaaattataatgggaagaaaacacattgcaaagattggattcaagggccagaagaacagtgggctggggagctactcccagggagaaccagggactgatcaaggagcctttcccgtcccaggacagtggatgatcactgtttgcccaggagaatttcaaaattgttattgcctggtgactgctctgtttcttcttattttcccctttacaaatgagggtgttgattgtggttatcctgtccct

SEQ ID NO: 379287 - DNA, 529 bp, Homo sapiens
agaaaaaagatatgcaagaaatgttttctaagatcataatataaaaagcctttctcagaakctattaaagaaatgcaattaaactttgctctttttctaatataagtctggcaaaaaaatttaaatactattatctggggtggattagattattgctcagcaaatattcattccctgccaatccattgagttgaaggttgtcacgtgattagctctggtgccacggtgagtgaattatatttcctcagcccttgacttaagacttagccacatttcttgctttaatcaattacaaatatttttttgagcaatagcataatacatgttcacatggtaagaatttctctttgcatacttgtcttttaccatgaaaagaacatactttgtgtaactgcttgttcagagaggatgagagactagtgaagcaggcctatattttggagctaagcccagcctagatcagccaaactcgagccaacacatagacaagtgaacaagaagttatttttattattacaaagtatgccac

SEQ ID NO: 379288 - DNA, 529 bp, Homo sapiens
agaaaaaagatatgcaagaaatgttttctaagatcataatataaaaagcctttctcagaatctattaaagaaatgcaattaaactttgctctttttctaatataagtcyggcaaaaaaatttaaatactattatctggggtggattagattattgctcagcaaatattcattccctgccaatccattgagttgaaggttgtcacgtgattagctctggtgccacggtgagtgaattatatttcctcagcccttgacttaagacttagccacatttcttgctttaatcaattacaaatatttttttgagcaatagcataatacatgttcacatggtaagaatttctctttgcatacttgtcttttaccatgaaaagaacatactttgtgtaactgcttgttcagagaggatgagagactagtgaagcaggcctatattttggagctaagcccagcctagatcagccaaactcgagccaacacatagacaagtgaacaagaagttatttttattattacaaagtatgccac

SEQ ID NO: 379289 - DNA, 529 bp, Homo sapiens
agaaaaaagatatgcaagaaatgttttctaagatcataatataaaaagcctttctcagaatctattaaagaaatgcaattaaactttgctctttttctaatataagtctggcaaaaaaatttaaatactattatctggggtggattagattattgctcagcaaatattcattccctgccaatccattgagttgaaggttgtcacgtgattagctctggtgccacggtgagtgaattatatttcctcagcccttgacttaagacttagccacrtttcttgctttaatcaattacaaatatttttttgagcaatagcataatacatgttcacatggtaagaatttctctttgcatacttgtcttttaccatgaaaagaacatactttgtgtaactgcttgttcagagaggatgagagactagtgaagcaggcctatattttggagctaagcccagcctagatcagccaaactcgagccaacacatagacaagtgaacaagaagttatttttattattacaaagtatgccac

SEQ ID NO: 379290 - DNA, 446 bp, Homo sapiens
taagtgggggacatggagcttgctaatggtctctctatactaattaygagcaaccctggtttggaaaatctaactttactctcttctcagatcttgtcaagtcccattatggggcactgcccagaaaatttctcatgaaaggataataattactcattcttcaaagaattcaattaggggcctttcatcaaagggtattaagtactcggtgtgctccttcaaaagtagcgatgatgtttatggagagagtcagagataaagggcagcatttggagattaaatgtttgatatggtgtatcagggatgatgttgcccacaaggagaacatccagggaaataagcctatcctttgaaagccgcaaatagaaaagaccaatttggattctaatctttccactacaacactttatttagggatatgagagcactaagaacagtttcagcca

SEQ ID NO: 379291 - DNA, 446 bp, Homo sapiens
taagtgggggacatggagcttgctaatggtctctctatactaattatgagcaaccctggtttggaaaatctaactttactctcttctcagatcttgtcaagtcccattatggggcactgcccagaaaatttctcatgaaaggataataattactcattcttcaaagaattcaattaggggcctttcatcaaagggtattaagtactcrgtgtgctccttcaaaagtagcgatgatgtttatggagagagtcagagataaagggcagcatttggagattaaatgtttgatatggtgtatcagggatgatgttgcccacaaggagaacatccagggaaataagcctatcctttgaaagccgcaaatagaaaagaccaatttggattctaatctttccactacaacactttatttagggatatgagagcactaagaacagtttcagcca

SEQ ID NO: 379292 - DNA, 446 bp, Homo sapiens
taagtgggggacatggagcttgctaatggtctctctatactaattatgagcaaccctggtttggaaaatctaactttactctcttctcagatcttgtcaagtcccattatggggcactgcccagaaaatttctcatgaaaggataataattactcattcttcaaagaattcaattaggggcctttcatcaaagggtattaagtactcggtgtgctccttcaaaagtagcgatgatgtttatggagagagtcagagataaagggcagcatttggagattaaatgtttgatatggtgtatcagggatgatgttgcccacaaggagaacatccagggaaataagcctatyctttgaaagccgcaaatagaaaagaccaatttggattctaatctttccactacaacactttatttagggatatgagagcactaagaacagtttcagcca

SEQ ID NO: 379293 - DNA, 689 bp, Homo sapiens
aggcacttaattttagtgaaaacatttccacaaaaaatatccaggtccagataattttattagtgaaattcacaaattacttaatgaagaagtaaaaataatctgacacaaactcttctagaaaatgaaaaaaaaaaatactttccaattcattctttgaagccacgttatacagataacaaatccaaataagcatttcataagaaaatgaaactacagaacaatcttttttaaaacgtagacaaaaattctaaaccgcttttaggaaatcaaaactctcaatatgaagaaggatagtatattattagtaaaggaggtttatcccaggaaggcaaatatagtttaacattttaaaattagtgaatataattaaccatattaacaaatcacaaaaaaagaaagtctatattaccatrtatgtgcaaaaaaaagacaaaattcaatacctatttttaaaactctcagaaaagtaaggatagaagagaatggccttaacctaattttaaaaaatctacaaaatacctatagctaacatcatacttaatggtgaaagactgaatgcttcccccatgccgtcaggagagtctcaccgtctcactcaatgttactatttttattcaaaattgtactaaaagtttgagcccttgctactgaagataaaaagaaataaatcatttacatgggaaaga

SEQ ID NO: 379294 - DNA, 689 bp, Homo sapiens
aggcacttaattttagtgaaaacatttccacaaaaaatatccaggtccagataattttattagtgaaattcacaaattacttaatgaagaagtaaaaataatctgacacaaactcttctagaaaatgaaaaaaaaaaatactttccaattcattctttgaagccacgttatacagataacaaatccaaataagcatttcataagaaaatgaaactacagaacaatcttttttaaaacgtagacaaaaattctaaaccgcttttaggaaatcaaaactctcaatatgaagaaggatagtatattattagtaaaggaggtttatcccaggaaggcaaatatagtttaacattttaaaattagtgaatataattaaccatattaacaaatcacaaaaaaagaaagtctatattaccatatatgtgcaaaaaaaagacaaaattcaatacctatttttaaaactctcagaaaagtaaggatagaagagaatggccttaacctaattttaaaaaatctacaaaatacctatagctaacatcatacttaatggtgaaagactgaatrcttcccccatgccgtcaggagagtctcaccgtctcactcaatgttactatttttattcaaaattgtactaaaagtttgagcccttgctactgaagataaaaagaaataaatcatttacatgggaaaga

SEQ ID NO: 379295 - DNA, 530 bp, Homo sapiens
aaatgcaaaccaacaagatcccaacagtctttactattttctaggaattgaaaagcttatttaaaaatttatgtgaaaccccatctctactaaaaaaatacaaaaaaattagctgggcatartggcggacgcctgtagtcccagctactcaggagactgaggcaggagaatggcgtgaaccagggcagcggagcttgcagtgagccaagatcgcaccactgcaccccggcttgggcaacagtgcgagactctgtctcaaaaacaaacaaataaacaaacaaacaaatttacgtaaaaaagcaaacaatctaaaacagcaaagcagttttgaaaagaaagaagacaaataatactttattttgggacctcagttctgattacaaacctagagggataaatttagtgtagaattaatataaagattgacaaaaaatcaatagaacagaataaagagcccagaaatatatctgtacatatatgtttgacaaggatgcaaaagcaattcaatggagaaataaaagtcttcaaca

SEQ ID NO: 379296 - DNA, 530 bp, Homo sapiens
aaatgcaaaccaacaagatcccaacagtctttactattttctaggaattgaaaagcttatttaaaaatttatgtgaaaccccatctctactaaaaaaatacaaaaaaattagctgggcatagtggcggacgcctgtagtcccagctactcaggagactgaggcaggagaatggcgtgaaccagggcagcggagcttgcagtgagccaagatcgcaccactgcacyccggcttgggcaacagtgcgagactctgtctcaaaaacaaacaaataaacaaacaaacaaatttacgtaaaaaagcaaacaatctaaaacagcaaagcagttttgaaaagaaagaagacaaataatactttattttgggacctcagttctgattacaaacctagagggataaatttagtgtagaattaatataaagattgacaaaaaatcaatagaacagaataaagagcccagaaatatatctgtacatatatgtttgacaaggatgcaaaagcaattcaatggagaaataaaagtcttcaaca

SEQ ID NO: 379297 - DNA, 530 bp, Homo sapiens
aaatgcaaaccaacaagatcccaacagtctttactattttctaggaattgaaaagcttatttaaaaatttatgtgaaaccccatctctactaaaaaaatacaaaaaaattagctgggcatagtggcggacgcctgtagtcccagctactcaggagactgaggcaggagaatggcgtgaaccagggcagcggagcttgcagtgagccaagatcgcaccactgcaccccggcttgggcaacagtgcgagactctgtctcaaaaacaaacaaataaacaaacaaacaaatttacgtaaaaaagcaaacaatctaaaacagcaaarcagttttgaaaagaaagaagacaaataatactttattttgggacctcagttctgattacaaacctagagggataaatttagtgtagaattaatataaagattgacaaaaaatcaatagaacagaataaagagcccagaaatatatctgtacatatatgtttgacaaggatgcaaaagcaattcaatggagaaataaaagtcttcaaca

SEQ ID NO: 379298 - DNA, 387 bp, Homo sapiens
gttggttaattggaggaaaaccaggaggaaatagaaagtgatttggggtcatagaatctttggaagaagggatacagaatgcttactttcttggaaagattgtagaattcaggattggaagaattctgcttgcctccagctttgcccyattcctggctgggtgagccccacctggacaagcaagttgctgcctctgagtcagagtattttcagtggggacatagggtgttatagaccgaatgtgtgtgtttttcacaaaatttatacggtgaagtctgaactcccaaagtgatgatatttggagatgaggccttcggaaggtacttgaggttagagcagggtcctcatgatgggtcctcatgttgggattaatgcccccattaggag

SEQ ID NO: 379299 - DNA, 388 bp, Homo sapiens
ctcacaatcgtggtggaaagcaaggaggagcaagtcacattttacatggatggcagcaggcaaagagagagcttgtgcaggaaatctcccatttttaaaaccatcagatctcgtgagacttaactcattatcatgagaccagcatgagaaagccctactgccatgatycaattatctcccacctggtccctcccacaacacgtcggaattcactatgagatttggatgggcatacagctaaaccatgtcaaacacaaaatctagatttgttaatgcctttcctgcagattgttacctatgtatcctaccatagctaccatcagtccctgccgcaaaccctgttcttttccagagagaagccaatatattgttcttttaatgaaccttg

SEQ ID NO: 379300 - DNA, 621 bp, Homo sapiens
atcaagtgcttctcctgagagaggagtcatccagtggagttgctgtatgtctgtttcataatgcacacggcacatgaaagatacatgggatgatgtttatgctgcttgccagatacttctagttgtccagtgaatgaaccatcatgtgaaacagagaaataatgagtttttaaatagcttattggccatttattgcaaatttaacctttgtggtaccatctctgaccatagacctttggatgcagggcaagctagaggagtttagtgaatgtcctctggcggaatgagtgaatgaatgtactcacaaatgtagaggaaggcattagctacaagagagcttcttgctgttaagaagatgygggtgagtggaagagagaatgattgcttccaagcctgagcaataattggactttgtcactgtgtcatttttaaaaatacctgtatctcgtccctgacatcctgatctttcacttttaaggaggtcccttcagtgagagcatacacactcacctgcaaatcctgatttccttatcagtagtcagtgcacttttgcctttttgctttcagattcctgctgttttcttatacagtgagtagattagttatctcagatgtgacttt

SEQ ID NO: 379301 - DNA, 617 bp, Homo sapiens
gaggtgagtaaggaggtttctgacaaggatagaagaagtcatcatagcagcaggaaaaaaacccagtaaattactaagttgtgtttttatttatagatctttgaaaaaatcatttttaaaaattttaattgtaactggatatttctgtttacaagtctaatatttaaccatacttgagatggccatatgtatttttatttgaagggaattaatatctatwataaaagtgaaagactttcaaacacgcaagtgatgagtgtctgaaggagtagcgtaagtagaaccctagtaaatatgttcttacagttcttaggggctagctgtggttaatttttagctctctctcccagacagcatgttttgtgtatctttgcatccagaatatccattctgtgcataaataaacacatatcccccatagtgatatacttttttttaatctaagagaatataagttaaacctaattgctcaatattagaacccaaataaaattcagtgaaaactccttagtacttacatatctctttactctttgttcagaagtagaatcagaattcacgtattttggtggtggagctactttttatacttcaactggcatatgttttacaataga

SEQ ID NO: 379302 - DNA, 505 bp, Homo sapiens
ttttgcaatccacttattttgattcatttgcacctttctgcctagaggtctttcagcttatgacaaatttcatcaatgctgcaagtcacttctttttggttaagtcttctttgataatgtcagccaaccttcttttccttaatttctgatttcctgtaagaattactgtctatacctatagtattccaaagccttttgtaagcagcagaatctaccctgtrtcacatctgtaacataagtacgtgtgcacatatgcacacatgtacctgtgtacacacacacacatacaaagagctcttacatggaaatccaaggtataaaaaaagttaaaagtatagcttactgtactaatgaccctgacactcctcaagaacccttccactccacagaacatacttgaagccagtgttgtgacctcagtcacactggtctttggttcctctcactattccaaagaaaaagtcagaagtggtcaggatgacttagcattgctgagagaaaaatt

SEQ ID NO: 379303 - DNA, 617 bp, Homo sapiens
gaggtgagtaaggaggtttctgacaaggatagaagaagtcatcatagcagcaggaaaaaaacccagtaaattactaagttgtgtttttatttatagatctttgaaaaaatcatttttaaaaattttaattgtaactggatatttctgtttacaagtctaatatttaaccatacttgagatggccatatgtatttttatttgaagggaattaatatctattataaaagtgaaagactttcaaacacgcaagtgatgagtgtctgaaggagtagcgtaagtagaaccctagtaaatatgttcttacagttcttaggggctagctgtggttaatttttagctctctctcccagacagcatgttttgtgtatctttgcatccagaatatccattctgtgcataaataaacacatatcccccatastgatatacttttttttaatctaagagaatataagttaaacctaattgctcaatattagaacccaaataaaattcagtgaaaactccttagtacttacatatctctttactctttgttcagaagtagaatcagaattcacgtattttggtggtggagctactttttatacttcaactggcatatgttttacaataga

SEQ ID NO: 379304 - DNA, 617 bp, Homo sapiens
gaggtgagtaaggaggtttctgacaaggatagaagaagtcatcatagcagcaggaaaaaaacccagtaaattactaagttgtgtttttatttatagatctttgaaaaaatcatttttaaaaattttaattgtaactggatatttctgtttacaagtctaatatttaaccatacttgagatggccatatgtatttttatttgaagggaattaatatctattataaaagtgaaagactttcaaacacgcaagtgatgagtgtctgaaggagtagcgtaagtagaaccctagtaaatatgttcttacagttcttaggggctagctgtggttaatttttagctctctctcccagacagcatgttttgtgtatctttgcatccagaatatccattctgtgcataaataaacacatatcccccatagtgatatacttttttttaatctargagaatataagttaaacctaattgctcaatattagaacccaaataaaattcagtgaaaactccttagtacttacatatctctttactctttgttcagaagtagaatcagaattcacgtattttggtggtggagctactttttatacttcaactggcatatgttttacaataga

SEQ ID NO: 379305 - DNA, 587 bp, Homo sapiens
ataattcttatatcattgctttagaaggctaagatggtggatttagcacatgtatcatcatatgtgtaagcagatacaaaagactggtgtaaatttctgatataataagaggtcttacttgctagacatgtgratagtatggcatagctcctaaaaactaatttttaaggagacgtatatatggtcttaatagatattattcagttcagtacctgaacctttttgccatcagccaatttttagtctttctttcattggacctcctgagaagttgacactccctctttctttcaatactttcttcccttggttatcaggataccatgctcacctgctttttccttagtttgtggtcctttttacttagtctccttggaggttcttctccctcttagagtgtcccacaatttagtccttagacttccctcctctatctacattcactgcctttggatattttccctattgtcttgttctaaaaattgtcttttgtgagatgattcctaaatattctcatctttagcccggtcctttcctctgtccagtctcatatttctagttatctacttttctccatttgcctgtgt

SEQ ID NO: 379306 - DNA, 605 bp, Homo sapiens
aaattttaatgggaatacttaaattgatataattattttaaatcatatatgtaatttaatattcagataattctttaaaatccatattcacccttcttggctttactttatatctagctcaaaggaaacattttttttccaagtacattttaattcagtaagaccagatttttcaaaatatcatgacaagacttagcttttagtgtatttcagcaataatgataatttcagtgtatcctaagggaaaaactgttatcttatattttggttgaaagagttgaaataaacattttgagagggaattgttattgtctacaatatgtcctagaccagtgaaattacctgattgtgtctattttggacagagacgtggatcttagccacagttacctaactgaccagattttggagttactcaatttccctcataataactagacacttgtgacagctagaaaaaataatgcagttaactttaattttatagtttctaatttgataaatattagctattttacagtataggctgttgytagccacagaggaaaatatagtatatggatatgtggtttgaatctacaaatctgtgtgtgggtatgggtgtg

SEQ ID NO: 379307 - DNA, 621 bp, Homo sapiens
ttcccctcattttgcagatattaaacctcaggcttagaaagaacatgtaaactgaccacgtaagtcagtggcagagtcayagacagaattgagctacgctgcctttccccatagggtgagattctcaaccattctgcctgtaactctatctctgactatagctgcaaagtgtcctctaaaaaagaaaggataactgttcttgatgatattcacctcagaaaaattaaagtttattccaaatatcagaggcttccattaatagtattttataagactatgatctataaatgtgtccaaagccaacctgaagtcatttatgttttttacacttactatctcaaaatggtagacttttctagaagttttatatacatcctattagctgctcttccttttagacctttaaagtttccctcattcgtcacccctttcacctgcatggcattttgccggctcactgccacatctcttcactcccttcccttccttctaacatttttggcttctgtcgcatctcttctccacttcaactttccagagtcctaattcagttagtcaattgtcattcactgcctctgctttctcttgatttctgtaattgcactccttatgacccctttc

SEQ ID NO: 379308 - DNA, 628 bp, Homo sapiens
atttaaatgtgctgattcctttgtctataaaatgggaatgtctattattttaagttattataaagttcaaatgagaatacatgtaaaactcttttcaaaagggagcatgtggaagcattatcattattctcgatttaaccaataagaaaaattgtaatgttaatctcttatagtacagattttgtgtttttttttacaaatcaaattttccaagaaatgtttaaggtgttttcttattttccagagtaatatttattgttagattgagggagtgggtggaaagaatacaaattcaagtcaaagtacataaaagcatatgcctatttaaagtttcattttctttcccattcttattgtgatattactcagcatgatgtattacgggctttaggggtgatttgtattcatcgtaaaattttctctcrgtactattagagcccattgtgggatgcttaggactgtctgaaagtcatttatcattcagaatttatgataaaaccactgttaggcagcttctagacactctgtcatatttacccttctggaaagcaacatagtgaaagaacatttgggaagtgaccttgatgctttcatattgtgctattgtaaatatcattaatgctagaac

SEQ ID NO: 379309 - DNA, 585 bp, Homo sapiens
aaaaatcatacctacctattattttcataatatatcaaggttgattaaagctaactataaatgtgaaaccgtaaatggttcataggatcagaatttagaactagaatacacctttgagatcagctacagaaatctaactcctgtattttataggtaagctgacacttaaaagtgcctcataactcaggaggcgacatgactagttagtgtcaagaacatatcatttctctctgcctgtgatcatgcttatcctaccaagggtgctaccctaccaagggtgcacacactacagttaattctgtccttcaagagtctggtgtttcatttcttttcttcggcaacagcagtaaatcataaggttctcaaattctaagtcagatataatactcagataatctccagtatagtcatagaattatgcataaatgcagatcatacataaattataaacscaagtttctatattcttaaacaaaatgtgttcaacactctatgttcttactaacttactaggtttcctgacatttaatttgtatgcagaattatagaaatggtgaataaattaattgaattcataattctgat

SEQ ID NO: 379310 - DNA, 466 bp, Homo sapiens
tggttgccaggagtagtatggagggagggatgaataggcggaacacagaggacttttagggcagtcacagtacatgtcattatgcatttgtcaaaacccataggatgtacaacaccaagaataagwgctaatgtaaactgtggactatggatgtggttctgggtttgtaacaaaggaaccactgtggtgggggatattgatacgggggagaaaatggggaggcagtggtatatgagaacttcatgttttgcttgattttgctgcaaacccaaagctgctctaaaaagactatttttaaatggtctatttaaaataatccatatttccaacttctccgaaaacctggaagatcagtcagcattaaggttgcattccacatggtggtgaccaccaggacatgtgtatcagctgccctcttgggatggacacgagcgctcagttttgtcagtacccacgaggaccgtgt

SEQ ID NO: 379311 - DNA, 557 bp, Homo sapiens
ctttttcacatctgccaaatgagagacatgaatacgtgctttataagactaatacagcaatgataaattatgaagcacctaccagagtgcctggcatacaataggaatttaatgtattctaattctcctcccttgcctgctctctcctgcagaatccatattctataattctatggctcccatttccttctgtagaccttatttcctactgctgttgtccctaacttaagaagaaaataaacaaagtacaaaatcttgcaaaagtgacatcctattctggaaaccagtagttattgtgtgtcaacacatggtattaattcaggtcttgatatgcaatatcccttagaaataaacaaactagtttctttctctatgagtgtcagttcagctagagrccatcaaactaacatttttgttcttcaaattatcaaaatgatgctgttgcttggaggcaagttgagtgcatccctagagtgttgtctcaaaacaagattgttgacccaattaccttttaagtgttacagtctttcaaagtaaccctgaagaaatctgtttat

SEQ ID NO: 379312 - DNA, 464 bp, Homo sapiens
tcttttaacatgggtctaatttatttgctgtgtcattttccatacaattcagttgctttaaaagttcatttctcataccatgaattaaaataaaaatttgaccaattaaaaaaaccaaagaaaatggctcagaataaatgaatatattatcaatggtgctaaacttttgcagggtaattcctgaatacttgcattaaagattttgtatcatgaaattacacttagcacatgtttattgttttttgacagttttcagtttatttataggyctaccaaggataaaatggatagataaaattagaaaccataaatttcacagagaattagttctactgtatatattttacatttgttttctctctagttatcctcttttttataagcgttcaatcaacaaatgttgaagtgcatgatgtcagcaaggcactgtgaaagcataaataaagaacagtgcttcaaggagt

SEQ ID NO: 379313 - DNA, 360 bp, Homo sapiens
tcttggttttataaggggctcttcccccttctctttctcttctctctcctgctgccatctgaagaaggtccttgcttccttttcaccttccaccatgattgtaagtttcctgagacctcccaaaccatgtggaactgygagtcaattaagcctctttcctttataaattatccagtctcagggaagttctttacagcagtgtaaaaacagactaatacacttgctaaactcgttatagttctagtcgctttttcttgtatacttttagtattttctatgtagataatcatatcatctgtgaattaaagcagttttattttttcctttctgatctatatgacttttttaaaaaaaatttac

SEQ ID NO: 379314 - DNA, 486 bp, Homo sapiens
tcttggttttataaggggctcttcccccttctctttctcttctctctcctgctgccatctgaagaaggtccttgcttccttttcaccttccaccatgattgtaagtttcctgagacctcccaaaccatgtggaactgcgagtcaattaagcctctttcctttataaattatccagtctcagggaagttctttacagcagtgtaaaaacagactaatacacttgctaaactcgttatagttctagtcgctttttcttgtatacttttagtattttctatgtagataatcatatcatctgtgaattaaagcagttttattttttcctttctgatctatatgacttttttaaaaaaaatttacttcaagttctaggatacatgtgcagaacatgcaggtttgttacataggtrtacatgtgccatggtggtttgctgcacctatcaacctgtcatctaggttttaagcctcgcatgcattaagtgtttg

SEQ ID NO: 379315 - DNA, 596 bp, Homo sapiens
cggctatttgatcaagttcccaagctgttggtgcatggtgctctgcctgtctcagtaactgtttgctgcacctgtaagccaaaagatagacctaacmctttgattttataaggggcttagctacaaataacttaataagtgtttatttccttacaactggctaacagtgagatgaggccatctgtgtttgcttcttggtgcttaaagaagttaggctcctacctccccagagactgggagacaggggctgtatctttcttaatgcttacatttcaaaggggtgactcccaggtccttgaaagacatacctgggttgtaaaagtggcaagtggctgggagaagatttacatctgaaggggacaaagaaagaattgatcactgaaagttttctaaagtaaacgctctaagataaggcaggtcaagggcctgtagtccgcaagaaacctatctaaattgtggttaaggagaggggaatgttagtaccattttagtccttataataaggaaaaaaaatccataatatctttttcagataaaattggaaaaattttgtaagcaaaacgggaagttctcatccttagttttaataaaggaga

SEQ ID NO: 379316 - DNA, 437 bp, Homo sapiens
gacagtatattttaattttttacatcctccattatccccatgtagtaactaactcaaaacagaaagctattcagtgttttcatygactattcattttaattgttatcagtgactgaatctaaatataaaccaaacaactctgaagacaaaaattagataataaataaagttactttcatctgtgacccacaatttggtacaataattgagtttcatttattaggttcttgaaaagacagctgtaatagaactgaagggtttttgcccataactattccgagaaatgaagccagaatgacagtcttggttatagtggagggcaggagatggagtttgttaaaaagccttattaggaaataatcattaaacagtcatgttttaaaaagtcaagccatacacataaatcaacagtcatgttataaaaagtcaagccatac

SEQ ID NO: 379317 - DNA, 437 bp, Homo sapiens
gacagtatattttaattttttacatcctccattatccccatgtagtaactaactcaaaacagaaagctattcagtgttttcatcgactattcattttaattgttatcagtgactgaatctaaatataaaccaaacaactctgaagacaaaaattagataataaataaagttactttcatctgtgacccacaatttgrtacaataattgagtttcatttattaggttcttgaaaagacagctgtaatagaactgaagggtttttgcccataactattccgagaaatgaagccagaatgacagtcttggttatagtggagggcaggagatggagtttgttaaaaagccttattaggaaataatcattaaacagtcatgttttaaaaagtcaagccatacacataaatcaacagtcatgttataaaaagtcaagccatac

SEQ ID NO: 379318 - DNA, 589 bp, Homo sapiens
ttttgtgtatattctttcagatttataacacaratgtatttatgaagtatgttttctaaacacacacagatgaaatatagaattatactgaatgctatttgatacatatgaccactgtttcctcatttatacatcttcttactacttccctgcttagattattttaaaacatatttaatattgcatgaccttcttcaaagattctacaaaatatatttataatcaataaggagtttgtttttaaatagaacttaaaatgagcatatctaacataatttataagttctgcaatatcataaaataatcataggctatttgacttctgcttgtagtgtaaaaatatctttttagaatttattatttgaattagaattcaaagtctaataatacgttgaattaatacatgttttatagtacaatactatttattacctttaaaatcatttttattgagaaagtatttagttgccataaaatgcacccaaataaagtgcagaaattgatgagttctgataaatgtaaacacctgtttaaccccacaaagaggaatcagaatgtatccatcacccaagagttccttcatgctcct

SEQ ID NO: 379319 - DNA, 589 bp, Homo sapiens
ttttgtgtatattctttcagatttataacacagatgtatttatgaagtatgttttctaaacacacacagatgaaatatagaattatactgaatgctatttgatacatatgaccactgtttcctcatttrtacatcttcttactacttccctgcttagattattttaaaacatatttaatattgcatgaccttcttcaaagattctacaaaatatatttataatcaataaggagtttgtttttaaatagaacttaaaatgagcatatctaacataatttataagttctgcaatatcataaaataatcataggctatttgacttctgcttgtagtgtaaaaatatctttttagaatttattatttgaattagaattcaaagtctaataatacgttgaattaatacatgttttatagtacaatactatttattacctttaaaatcatttttattgagaaagtatttagttgccataaaatgcacccaaataaagtgcagaaattgatgagttctgataaatgtaaacacctgtttaaccccacaaagaggaatcagaatgtatccatcacccaagagttccttcatgctcct

SEQ ID NO: 379320 - DNA, 534 bp, Homo sapiens
aacctctttctcgtgctttctctagggctgcttrgcatttcaccttgagcatgtgagttacaagaattggccaaggatctgagggaattgtgtctgcaggagcacggaccattgctctctgatcttcttctaaatattccctactcaatttctagcctctctggcaacttgaaatctgacctctgtccccacttcctagtaaaatctagctattttctgctggtcctttggtaaaagcaagataaatgtggatttcccaaagtttacttcccttattccaagaatcaattctgctccagtttctttcattttattaataccttaaacttcagaactctgaagcaggcttttaaaatatattttatttaacacttataattttatggacagcagcttagtccaataaaagctacaacgccatgactgatactgaaaaactgatcttctcccttgttgtgaaccgtcatagttagcttgaaccagtcatttatttagtgctgccaaatagacattttctaattctattattcattt

SEQ ID NO: 379321 - DNA, 534 bp, Homo sapiens
aacctctttctcgtgctttctctagggctgcttagcatttcaccttgagcatgtgagttacaagaattggccaaggatctgagggaawtgtgtctgcaggagcacggaccattgctctctgatcttcttctaaatattccctactcaatttctagcctctctggcaacttgaaatctgacctctgtccccacttcctagtaaaatctagctattttctgctggtcctttggtaaaagcaagataaatgtggatttcccaaagtttacttcccttattccaagaatcaattctgctccagtttctttcattttattaataccttaaacttcagaactctgaagcaggcttttaaaatatattttatttaacacttataattttatggacagcagcttagtccaataaaagctacaacgccatgactgatactgaaaaactgatcttctcccttgttgtgaaccgtcatagttagcttgaaccagtcatttatttagtgctgccaaatagacattttctaattctattattcattt

SEQ ID NO: 379322 - DNA, 534 bp, Homo sapiens
aacctctttctcgtgctttctctagggctgcttagcatttcaccttgagcatgtgagttacaagaattggccaaggatctgagggaattgtgtctgcaggagcacggaccmttgctctctgatcttcttctaaatattccctactcaatttctagcctctctggcaacttgaaatctgacctctgtccccacttcctagtaaaatctagctattttctgctggtcctttggtaaaagcaagataaatgtggatttcccaaagtttacttcccttattccaagaatcaattctgctccagtttctttcattttattaataccttaaacttcagaactctgaagcaggcttttaaaatatattttatttaacacttataattttatggacagcagcttagtccaataaaagctacaacgccatgactgatactgaaaaactgatcttctcccttgttgtgaaccgtcatagttagcttgaaccagtcatttatttagtgctgccaaatagacattttctaattctattattcattt

SEQ ID NO: 379323 - DNA, 597 bp, Homo sapiens
aactacttaataatacttaataaactcccctttatatatattcgatatttcaatatttctagtatatatatttataaatatatatattttaattatacaaatgtatcttattagatatatatccctttgtatatataaatttctatatatgtgtgtgtgcatatatatacagaacacacacacacayatatatattagttctgtctttctagagaaccctaatacactccacttgtcatcaaacttaaaattataaattttgcaaagaattagagaatttatactctttgattttaggccaatcagagtctatcttcttttcaaactttgacataaaacagtatttctcagctactatattagctgatagataatctgagtgtaagaactatctaattcaccttactccagcttttagcagttagcatgtgggagttgctcaataaataggtactgaactcaattataactatcattttagtaaatctaaccaatttattgcttttcattcttccccctaaccagacaggtggtatgagagattagcatcctgaatagacagagactattatctagctgtctttcaatgttttgttt

SEQ ID NO: 379324 - DNA, 597 bp, Homo sapiens
aactacttaataatacttaataaactcccctttatatatattcgatatttcaatatttctagtatatatatttataaatatatatattttaattatacaaatgtatcttattagatatatatccctttgtatatataaatttctatatatgtgtgtgtgcatatatatacagaacacacacacacacatatatattagttctgtctttctagagaaccctaatacactccacttgtcatcaaacttaaaattataaattttgcaaagaattagagaatttatactctttgattttaggccaatcagagtctatcttcttttcaaactttgacataaaacagtatttctcagctactatattagctgatagataatctgagtgtaagaactatctaattcaccttactccagcttttagcagttagcatgtgggagttgctcaataaataggtactgaactcaattataactatcattttagtaaatctaaccaatttrttgcttttcattcttccccctaaccagacaggtggtatgagagattagcatcctgaatagacagagactattatctagctgtctttcaatgttttgttt

SEQ ID NO: 379325 - DNA, 465 bp, Homo sapiens
tctcctatggtttaattgctgctttctaaggacattgcagatatattcactttcacccatttattttcctttgttcaccattgtttacttctctttcagacatgtagtattgtttctgtagcatcaaacattttcttttctttttctttctttctcccaccagtaatttacttctatacatttcttctccagatctgcaaacaggatcactgctsctatggccaagatattggaaatttatagtttctctttgatcccataaaatttagcctctacttctctcattactcaggaaacaacttcaagtttactgacataaaagtagaacatgctctttgatatggattttccattcacttgatgttccttcataacaagttactgccctaacttgttggggtaaacggcaatttatgtgtggttttcacaatagccattttcctgtaataatcacaggataggctt

SEQ ID NO: 379326 - DNA, 642 bp, Homo sapiens
cttctgatactcagtgaatgcacagtgtttatccctgataaagggcaagtgacacgtaaggtttattttatcatggaaaacagctaataaaaatacgacttagttttctgaaagcgattattctacgtgcctctttctcatggattgttgacagcctctgggtataatggaaaattagaaaaggctgccagagacacagttgattcactagttcaaggaggaatcagaaaaccatctcgactctttatttgattctgctgtgaataaccagtctgctcctgagttctggttttggtctttctttagggcatctcattatgtcagagcctctgtttcyaccacatctgccttacagtaagccttcatgagctaattcttgaagtcactgcaagagctttccagctggcctcctagcttgtcatctcttcacatcttctaaccatccaatgcaaaatccaaaatattagtctctatgaagaaaattaacctttaagaaatgctgcccccacttttaagaaacacagttctatttaagaagctctaccgcctttctgttgtttgtctgtccaacacagcctcttctgctggatcctggaattgcgtattctgtgtccaccctgcctatacaaccctcgtgccacc

SEQ ID NO: 379327 - DNA, 557 bp, Homo sapiens
tttaaaacaaatttatgtgcatttagcttttatttacactagaactttatttttacaagttgctgatcacatctggctttgatattcactggtcgatgaaaaatacatctttataacatggtaaaacttgatctgtttaatactataaccaattataatattttattttagatacgcttctascacatattgatatttgagcatttgaatccattgctaatgaattaattaatcaatttgttggtacattctccttataaatctatactgctcacaaataccctagaacacaaagaagtcatagcaaacatcctatatttgcttgtggtaataagatttttttggtgcagaagatttcctgcatatgatgttctgtgactacatattttaggtaaaaaagatcatctccctctataacaataaatttacatactgtgagaaagatgaaggtacaagtactatacaccgaaagctgctactgtgagttagactgccttgggaaatgcttcacctgttctatgatttactgaaaaggtgggctctttatagtgtatttt

SEQ ID NO: 379328 - DNA, 557 bp, Homo sapiens
tttaaaacaaatttatgtgcatttagcttttatttacactagaactttatttttacaagttgctgatcacatctggctttgatattcactggtcgatgaaaaatacatctttataacatggtaaaacttgatctgtttaatactataaccaattataatattttattttagatacgcttctaccacatattgatatttgagcatttgaatccattgctaatgaattaattaatcaatttgttggtacattctccttataaatctatactgctcacaaataccctagaacacaaagaagtcatagcaaacatcctatatttgcttgtggtaataagatttttttggtgcagaagatttcctgcatatgatgttctgtgactacatattttaggtaaaaaagatcatctccctctataacaataaatttacatactgtgagaaagatgaaggtwcaagtactatacaccgaaagctgctactgtgagttagactgccttgggaaatgcttcacctgttctatgatttactgaaaaggtgggctctttatagtgtatttt

SEQ ID NO: 379329 - DNA, 531 bp, Homo sapiens
acatttgggctggatccactttttggatattatgataaggcttctgtggacatccatgtatgcttttttttttttgtggacaaaggctttatttctcttcggtatgtacctaggagtagaatttccctacatttaacctctttaggaactggcgtaatttttatgtggcatgctgtgtaaccttcagtagtttgcatatatgatcccatacttgtctgtgctgaggaatgcagttgtctcgtcttctactgcttttctaaatgtctttttagttgactgtatttcattatgaatataggttttgtttttgaaaaattttctcaacagggctcttgtatgctttattttcagaattctttcagacttgaaagtgtctgcctattgccttaacacttcagaagtaaactagactggataaattttctttctctcaggaatctatggacagatttccttyattttatgccattgagtactgtgaaggactctgaggccatactggtttttttcaccttgtatgtgacttgcttt

SEQ ID NO: 379330 - DNA, 572 bp, Homo sapiens
gaaccggaagcatctggtacctatagtacctatagcaaacctaaactgtaacccatttcttagccagagtaatgtaaatcttcatactaacaacytatttgtcttagtttctattgtcatcagatatagcgcattttggtttcaacaaaatattacaaggaatggcaaaaagtaagaaaaaaaaaccccacactctgcagagacaaaacaattatcagaacaagactcaaatatgccacagatgttgaaaatcagacaagggcttaaaacaactatgattgatatgctaaggggtctaatggaaaaagctcaaaacatgcaaaaacagatgggtaatgtaatcgagagatgaaaactctgcaaaagaatcaaagagaaatgctacaaattaaaaatgctggaacagaagtgaagaatgcctttgatgggcccaacaacagattcaatacaaccaacaaaagatcagaagattgtgcacatgtaccctagaacttaaagtataaaaaaaaatatatatataaaagaaaagaagatacaaatttctcaagctgtaatagaaaaagaaaaaaaaa

SEQ ID NO: 379331 - DNA, 572 bp, Homo sapiens
gaaccggaagcatctggtacctatagtacctatagcaaacctaaactgtaacccatttcttagccagagtaatgtaaatcttcatactaacaacctatttgtcttagtttctattgtcatcagatatagcgcattttggtttcaacaaaatattacaaggaatggcaaaaagtaagaaaaaaaaaccccacactctgcagagacaaaacaattatcagaacaagactcaaatatgccacagatgttgaaaatcagacaagggcttaaaacaactatgattratatgctaaggggtctaatggaaaaagctcaaaacatgcaaaaacagatgggtaatgtaatcgagagatgaaaactctgcaaaagaatcaaagagaaatgctacaaattaaaaatgctggaacagaagtgaagaatgcctttgatgggcccaacaacagattcaatacaaccaacaaaagatcagaagattgtgcacatgtaccctagaacttaaagtataaaaaaaaatatatatataaaagaaaagaagatacaaatttctcaagctgtaatagaaaaagaaaaaaaaa

SEQ ID NO: 379332 - DNA, 638 bp, Homo sapiens
cattttgagatcttcaaaatttatgataatggctttctgctaatgaatttaatagtgaccacagttaataataatgtactgtatatttcaaaattgctaaaataatatatttttaatattttcataacataaaaatggtaactaatgaggtgatgggtgtattcattagcttgattaactctttctacaatgtatgcaaaaatcaaaacatcacattgtaccccataaatatgcacaattatttgttgtaaccttaaaatagataaattcaaaaaacttatgacaaatgtatgataaatgcatgtatttcaaatgaggaaaatcatttaatttcttgaactctgaatagaaaatgacacagaattaagattgctgtaatgtagttgttaaagagtttctcattgatagacttgttttcactatgacacttataaacacttaacccttgctatgaaacataacattaggttacattattctagagaccatcttaaaaccatgcgagtattgtaattgttytttcccagtagctatttagatctgatcactataattgctaagtaaaataaaacagggaattgcaactttccaaatcatcaatttctaaataaattttagttgacttttggataacacag

SEQ ID NO: 379333 - DNA, 590 bp, Homo sapiens
aattcaaaataagcaaaactaatctatggcaatagaattcatggtcatgattatttggtgggaagagggaggtaagagtcaacagtaaaggcatgaaagttacaataatatgtttggcctacgtaayatttacatagcattttcactttttgatagtccaatgagttgtatatacatttatgctttttgtctttttctgaatgtgtattgtctttcattataaaaagttacatgaaaataagcatgctaactatgaaaaagaaataggtccttggcactttaaaaaatagttcagcaaagacaatcaagatttaaattttgcatgtatttatccaaaagcaaaaatagaagatttttttaagaatacctcattaaaattctatttttcacttttgtgcttttttatagatcattaagaacactatgagaaatacctttcaacttcatattttagatatcacataatttatcatgcattataccataaagagctcaattagcatctctcattttaccattaatattactaagaataatggcattcttatgaccattaccatcaaaatcactattgttcagtgctgaaagaa

SEQ ID NO: 379334 - DNA, 590 bp, Homo sapiens
aattcaaaataagcaaaactaatctatggcaatagaattcatggtcatgattatttggtgggaagagggaggtaagagtcaacagtaaaggcatgaaagttacaataatatgtttggcctacgtaacatttacatagcattttcactttttgatagtccaatgagttgtatatacatttatgctttttgtctttttctgaatgtgtattgtctttcattataaaaagttacatgaaaataagcatgctaactatgaaaaagaaataggtccttggcactttaaaaaatagttcagcaaagacaatcaagatttaaattttgcatgtatttatccaaaagcaaaaataraagatttttttaagaatacctcattaaaattctatttttcacttttgtgcttttttatagatcattaagaacactatgagaaatacctttcaacttcatattttagatatcacataatttatcatgcattataccataaagagctcaattagcatctctcattttaccattaatattactaagaataatggcattcttatgaccattaccatcaaaatcactattgttcagtgctgaaagaa

SEQ ID NO: 379335 - DNA, 590 bp, Homo sapiens
aattcaaaataagcaaaactaatctatggcaatagaattcatggtcatgattatttggtgggaagagggaggtaagagtcaacagtaaaggcatgaaagttacaataatatgtttggcctacgtaacatttacatagcattttcactttttgatagtccaatgagttgtatatacatttatgctttttgtctttttctgaatgtgtattgtctttcattataaaaagttacatgaaaataagcatgctaactatgaaaaagaaataggtccttggcactttaaaaaatagttcagcaaagacaatcaagatttaaattttgcatgtatttatccaaaagcaaaaatagaagatttttttaagaatacctcattaaaattctatttttcacttttgtgcttttttatagatcattaagaacactatgagaaatacctttcaacttcatattttagatatcacataatttatcatgcattataccataaagagctcaattagcatctctcattttaccattaatattactragaataatggcattcttatgaccattaccatcaaaatcactattgttcagtgctgaaagaa

SEQ ID NO: 379336 - DNA, 593 bp, Homo sapiens
ttttctttttaactagtttgcctttgcatataatttttggaaattatacttcagccagtgtaattatagtaccatgcagcaaccagaagttcctaaatatccatattgtttctatttcaacgcagtttagattggttgatcaacattttcaaattattttaaaggtgcatacataacttttatagatatttgtatgcatcctctgaagtcactttataaaacatattgcatgttattttaatgatgctgtatacgtactttaaactctgcttattttaattttaagaaactacattattcataatatatagaataaccrtaagtgtttctgtaaggaaccagataaaacgccttgctgctccctaaagattaaaaaaattaaaataaatgtatctgagggggaattctttagtattctgatgacacagtattagggcttattttacacttaaatgatatttatcttaatgccacatgtagtgtaaagcctattgtgccatacattcaaattttcctttgaattcttccaggacagtcacaaaatcttaggccacaaatgtatagtaatgaaaaaaagaataacagacataatg

SEQ ID NO: 379337 - DNA, 584 bp, Homo sapiens
ttgtccccataaactaggattactcttggaacacttaatttcaagaggcctagacattttcccagcactgtcccattcactgtcataaragagagctctgaggattgctgagaaactacagtgacaggaaataatttagtactcagagtaggagtgaggttggctcaccttgaaaaaggggacctgaaaggaacaaagtacagaaagagggaaatcaacaaactggctacagtcgcatcacagatttcccatgcaggtaaacaatacccttcagagaaaaaaagttcagtataattcacaatgcgagtacattatcagtacaggaaaacttcaaaggatacacatttaatatatagaaacagactctcaggaaatgaaaaaaaattctggatgatttttaacagtattattttagatataacactcattgtaggtcactttttataagcaatttttataaaaagttatttgcacccatttgatatactttaaaaatcatcttaaacaattacaaaattctgagttatgtggcataaagttaatcatataaaaacctgaaaaaattaatcttttgagagagagaa

SEQ ID NO: 379338 - DNA, 503 bp, Homo sapiens
atatgtctttgtattgtactaatctatgaaagatatgagtaaatagaattgctaaaattagtacaaatcaatatttattttagaaacactaaattaagcatccaaaataaaattaatatttaaattaacagtcaatatcatacttactcctatcttttgtaaatacctttgggaaaatattttttttggacagggtctccctctgtcacctaggctggagtgcaatggcataatctcagctcactgcagccctgacctccgaggctcaagtgaacctccaacctcagcctcagccttccaagtagttgagastacaggaatttgccaccatgtccagctaattttttgtatttttggcagaaatggagtttctccatgttgcccaggctgggaagacaatcttttgtacatagttgaattgtataaataggaaaagtagaagtattataaaattgaccataggaaaaatgtgaaatctgaagttaacaaaatttgtaacagta

SEQ ID NO: 379339 - DNA, 566 bp, Homo sapiens
tagggaggagctcttttttgaaataacaaagggacatggaatttggatttttaaagcttgaacatgtcctcattacctgggcacagattcatttcttgtgcaaagatgtcccgagtctcacagcttgaagatgcytgtcaatgaatgaaaggtcgctgcagctgcagggagggaagtcaaagtgcttacaccagagtccctgctttataccttgccatgctttacgcctttgcatcttgcctcacctgagaggtaggttcttagcataatgggcttatcatttttatcgtaagtattttaatgactttaacaagcacaattgtctaaattgtattctgacattgagctagtctttcctctgtctttctgaacatgactcttatagattctccaccaaattcaccaactacattacaactttttccattaggaaaccaacaaacccctatctagccttatcttatggttgctatggttattctcagccatcgatgatgattttactacccactgaaaagctccggcctatgtcctatataggaaatgtgatgaattgattagtgaaa

SEQ ID NO: 379340 - DNA, 566 bp, Homo sapiens
tagggaggagctcttttttgaaataacaaagggacatggaatttggatttttaaagcttgaacatgtcctcattacctgggcacagattcatttcttgtgcaaagatgtcccgagtctcacagcttgaagatgcttgtcaatgaatgaaaggtcgctgcagctgcagggagggaagtcaaagtgcttacaccagagtccctgctttataccttgccatgctttacgcctttgcatcttgcctcacctgagaggtaggttcttagcataatgggcttatcatttttatcgtaagtattttaatgactttaacaagcacaattgtctaaattgtattctgacattgagctagtctttcctctgtytttctgaacatgactcttatagattctccaccaaattcaccaactacattacaactttttccattaggaaaccaacaaacccctatctagccttatcttatggttgctatggttattctcagccatcgatgatgattttactacccactgaaaagctccggcctatgtcctatataggaaatgtgatgaattgattagtgaaa

SEQ ID NO: 379341 - DNA, 566 bp, Homo sapiens
tagggaggagctcttttttgaaataacaaagggacatggaatttggatttttaaagcttgaacatgtcctcattacctgggcacagattcatttcttgtgcaaagatgtcccgagtctcacagcttgaagatgcttgtcaatgaatgaaaggtcgctgcagctgcagggagggaagtcaaagtgcttacaccagagtccctgctttataccttgccatgctttacgcctttgcatcttgcctcacctgagaggtaggttcttagcataatgggcttatcatttttatcgtaagtattttaatgactttaacaagcacaattgtctaaattgtattctgacattgagctagtctttcctctgtctttctgaacatgactcttayagattctccaccaaattcaccaactacattacaactttttccattaggaaaccaacaaacccctatctagccttatcttatggttgctatggttattctcagccatcgatgatgattttactacccactgaaaagctccggcctatgtcctatataggaaatgtgatgaattgattagtgaaa

SEQ ID NO: 379342 - DNA, 529 bp, Homo sapiens
gcattcatttccaaattttgctttgttagaccttaggygtttatatagctaaaaaagtcaaggggatgacttcacttgaattgtgcatattcatttgccatttaattcaataaagaacagcaaatgtattgattgcagtaacagttactgctgctgctcacaagccagacaccaccagaaacacacctataggcacactaagttggccatactacccggtgcaagggacaggatgcaccctatgtgagtatcctaatttttatcaaggaggtaggaagaatggggcaaaactaaagctgtaagtggtgaagagagagctgttactcatgctaaccaaagaggtggatgtccagtcactttgctggtttagacattactttagttttgatcttcactcagacatgattacagagtggttttgtttttgttttgttccattacagtggaagaatgaccttgtgtggtgctggtgtcctgtgaaattgtttatattcaatagtaaaacatcatcctcactcacagctgacag

SEQ ID NO: 379343 - DNA, 529 bp, Homo sapiens
gcattcatttccaaattttgctttgttagaccttaggtgtttatatagctaaaaaagtcaaggggatgacttcacttgaattgtgcatattcatttgccatttaattcaataaagaacagcaaatgtattgattgcagtaacagttactgctgctgctcacaagccagacaccaccagaaacacacctataggcacactaagttggccatactacccggtgcaagggacaggatgcaccctatgtgagtatcctaatttttatcaaggaggtaggaagaatggggcaaaactaaagctgtaagtggtgaagagagagctgttactcatgctaaccaaagaggtggatgtccagtcactttgctggtttagacattactttagttttgatcttcactcagacatgattacagagtggttttgtttttgttttgttccattacagtggaagaatgaccttgtgtggtgctggtgtcctgtgaaattgyttatattcaatagtaaaacatcatcctcactcacagctgacag

SEQ ID NO: 379344 - DNA, 600 bp, Homo sapiens
tgaattgtggtggtgaccattatcctagcgctcattggcacttaagtttatttccctaaatgtgataatgttgtatagagtttacttcaatattaattccagcaaatctttacattgtatgaaagtttttgaaatttacattgtaatggacagggaatcatgagaaatcaaaatcttactatcactttaggtttgggtatgttgatrtaagcatttgttcaagttcacaagcaatggaaaggatgacaatgtccaaggaaaagctttcgtggctagagaaaatgggttaatcaattgtcttatcttgtattggagtgagtagggaggagaaaagtgtaaaatacaatggtttagaacatttggtgagaatgagtactatagaacctaaattgccataggtttactagtagtaaacattatgataatataatgactttaaataaaattcacaatttaatctttcacatttgaattaaaaataggaaaaatctagtctaacaagaatcaagaaaaattgactcagttggtctttttgaagcagatcaaatagaaataacatatgtatcacaaccatttaagagtcattcttttggattttag

SEQ ID NO: 379345 - DNA, 546 bp, Homo sapiens
tgttgtatagagtttacttcaatattaattccagcaaatctttacattgtatgaaagtttttgaaatttacattgtaatggacagggaatcatgagaaatcaaaatcttactatcactttaggtttgggtatgttgatataagcatttgttcaagttcacaagcaatggaaaggatgrcaatgtccaaggaaaagctttcgtggctagagaaaatgggttaatcaattgtcttatcttgtattggagtgagtagggaggagaaaagtgtaaaatacaatggtttagaacatttggtgagaatgagtactatagaacctaaattgccataggtttactagtagtaaacattatgataatataatgactttaaataaaattcacaatttaatctttcacatttgaattaaaaataggaaaaatctagtctaacaagaatcaagaaaaattgactcagttggtctttttgaagcagatcaaatagaaataacatatgtatcacaaccatttaagagtcattcttttggattttaggcaaagccacttat

SEQ ID NO: 379346 - DNA, 543 bp, Homo sapiens
gatagagaggagacttagtttcccaaacaatcaacagacctaaaaaagagcatgaagtrtattgattctgtatctcccttctcacctcttttatttatttatttattatatttattttgcagtttactaaaaatataaacaaaaatattttactatctctcattaatactacatgaaaatcttgttcaaaaaaaatcaaattttaccttttatatcagtgcattattattgttaaagctaattataaggaaacattatagtctgtctaatctaatcagctttgaccacacaagataatatttctataaaccttttataacctcttacattttttccattctattttttcaccaactttgatatagtttggatctgtgtccccacccacatctcatgttcaattgtaatcccatgttggagatggggcctggtgggagatgactggatcatggggcagagttttcatgaatgacttagtattatccccttggtattatatagagagtgagttctcacaagatccggttgtttaaagtgtgtagc

SEQ ID NO: 379347 - DNA, 460 bp, Homo sapiens
gtctggaggacttaacccttcctagcatggccaagaggcacagctaggccaggaagaactttgggtatctatttccaacactcactctggccactagtctagtcytcagaatctaaaagcttaaaaccaagacataaacttacaaagtaagtcaatatcaaaagtatcactgaatatttatcagaaacattctaatcctatcaaacgaatatatccaggcaaaaatctctaaattaaattttgaaaacatttgtattatattttaccagtaatttaaaaactggctttatataccaaagattactaaagtcatgtgaactttaaaagaatttgagattatttacttaatctatgagtactcatatacttacaagttaatttgatatcatgcagataatatacaaacagatgtgtatgatatgtatacacatatatacataaaaatacagagaaacacaaa

SEQ ID NO: 379348 - DNA, 594 bp, Homo sapiens
aaagcaggcagtctgagcatataaagaattttaactttgttttaggtcaggtagattttagcattttaatttagtcaaaagattttctatcatgacactattatatgtttttctattaatttgatgtctccataaatacaaataaataaaacaattttttaaaatgagagatctctaaaaacttttttttgtaatttagtagtctgtctaatgtaaatgatccactaatgattagaatttccaatagtgtacttattccaayggtgactcaacccagtggcaacttcatagaaagctcagggtgtaattttataggtttagaataagactaaattgatgttttttggagaaggcataggagaggcaatcccaaagatctctctccagacttttgcttcaaagaataggttaagatagcaaaagtctcttgttgccactgatggttaaggatggtgtttatgtgtacaggcctgggttacccacaagtttgtgggtgctgctcatcatagatctgtcaatccatgacaccagctaggccctcctgggattaaacatttcctggactaacaaggctacaagagttgagatgacaaa

SEQ ID NO: 379349 - DNA, 618 bp, Homo sapiens
tagatggtgcagagccagagtgytcccactgtgtcaaaagtcaagccctcaaagacataaaacaagacaagaggggaaactcatccagtttttattttggggacagacagcaaattttatataccattctgatcagaatggcaaaactgactggtctgcagggccagcttgagcaatgggattatagtggttttaggcctgtgttttaccctataatatcccttttatgacagaacaacatggaaaaacaaaggaaaatactgtgtattagtcaaggttctctagaggaacagaactaataggatacatgtatacataaaggagagtttattaaggagtattgactcacacaatcacaaggtgaggacccacaaaaggccctctgcaagctgaggagcaaggaatacagtccgagtcccaaaatctcaaaaatagggaagccaacagtgcagccttcagtctgtggttgaaggttcaagagccgaaaagctgaagaacttggagtccaatttttgagggcaggaagtatccagcatgggggaaagatgtaggccaaaagactaagccagtctagtctttccacatttctttgcctgcttttattctagctgcactggc

SEQ ID NO: 379350 - DNA, 643 bp, Homo sapiens
gccctgcataaaaatgtatttgcaccgaaatttatttctaagtactttgttactgctattgtaagataattatttttctatttcattttccaaacttttgtggctagtatctaaaaatacaattgatctttayactgaacttgctaaatttacttattctagtaggtttgtgaaagattaagattttctacataaaaaatcatgacatccttaaagagaacatttcatttcttcattctaatgtttatgcattttgtttccttttcttgctttattgtgttggtcaggacctccggaaaaatgtgcaatagaagtggtgagtaagaagatttatgccattatttcatcaaacatttttttctatacacttacattttttctgcctctctgagactcagttatatacatgtgcaattacacatgtagatattgttccacaggtctctcagtcccattcaatttttatttcaagattttttatctctgttcttcaggtttgatcattttcacttatctaccattaagttattttttcttctttttcagtgattgtttttctatattctctcatattacaagcatattttactttattgagcagttataacagctgcttttaaaatgtttgtctgctaatttcacc

SEQ ID NO: 379351 - DNA, 471 bp, Homo sapiens
ccacgcctaagtaacaaaaggagcagaggatacaccctttgcaaacctcccaccttttctgtgcagcaggtgggaaattggctgtccacaacaaatcagactgattgtgggatgagtatttgtttgcatagacgcataactttgtaacttcaccctagcctctgattggttgccttttgcaaccaatcatatgtttgcacgagaatgtgacctttgtaacttcacttcaggctctggttggctgctttttgcaaacaatcagactgactgtgggctaycactttatttacatgaggtgagcatgatgtagccaatgggaaacttctagggggtatttggacccaagaagattctgtatccgggcccttgagccactgcttggcctgttcccatactgtggagtgtacttttgttttcaataaatccctgctttcattcttttgttgcttcattccttctttgccttgctgg

SEQ ID NO: 379352 - DNA, 553 bp, Homo sapiens
aatctggttcacctttgtggaacaaaggcatatctctgccctaactccttgattctctatcagaaacagaaataaactatttcagtacagcatggcatgcgttgctttcttatgtaggcttattatatgaaagaacacactttcaggcatgtacacacacacaaattatatctagcagaatatcatatgctaatgtgcatcatctttaactccctgctttattgcttcctagtagatgtgggccccaaagtatgcagaatgtacaaatgggtcctagagaaaggatgttcctgattctgctttagataccaatactgcatcacaagggattgattgccaattttcttgatgctacataatctgcatcacaaaactagaagcatataccaagaagaactgaamccacttcataggagataggcctactctatttcaaaatggcgaaatatgtcacaatgctatctcttctgctcaatctgatctatggttattacaatttatccccagtttcattcaaatggtattcctaaatgcagttaatttcagataaatt

SEQ ID NO: 379353 - DNA, 485 bp, Homo sapiens
atctttaactccctgctttattgcttcctagtagatgtgggccccaaagtatgcagaatgtacaaatgggtcctagagaaaggatgttcctgattctgctttagataccaatactgcatcacaagggattgattgccaattttcttgatgctacataatctgcatcacaaaactagaagcatataccaagaagaactgaaaccacttcataggagataggcctactctatttcaaaatggcgaaatatgtcacaatgctatctcttctgctcaatctgatctatggttattacaatttatccccagtttcattcaaatggyattcctaaatgcagttaatttcagataaattaatcaatgaaaacattaattcaatttatacaatgtaactaaaatgataattataagattgcaacaataataatacaggtcaatattagttgcataccaaccggcatagagcattcaagtatccctgattactc

SEQ ID NO: 379354 - DNA, 628 bp, Homo sapiens
agaccattaataacttgtaccaagcagtggatctaaactggaacccaggtctttctgattgcagattgcaagctctgaactgctaagctagacacttgtctttttaaagtaagaattcttccactgagggaggtcatagctacaggaaattcagcagcatcctctcttctgcagaagaattatgatttctgaattatgaaactcactgactagactcttattggaaaaaaatcattagagatgacaaccctcctgtccaggaggcaagtaaatgtattgtttcaatagagaatatgttgcgtttgtgtctaagacagtgataattacgtcactccctaatgcatggaaaagaagcctttgctgtttctagtaagctgtttacagcaagaactttwtagaatataaatatagtgtctattatatagcattttctaccaatagcatcattgttcccctccatatgttcttccgctaggtgtctaatgagttcctacgtatgaaaaatgacaagagaatctgaggaataattcaagcaactgtggcatatggaaactgttttctagtccctttgccatgatttctaggcaaaacagcaggaatacttggcagcagaggctagaaaaatcat

SEQ ID NO: 379355 - DNA, 608 bp, Homo sapiens
gctttccttcatttataaagctctcttgtgtttctgagtgttgtgtgctcctctgaattcttgtgaggttttgccagataagcttttttcaataagacagttaccaatctatagttctgcttcttctccattcaaggaaggacaccmtaacacttttgagacaaggtagtagagagatgtaatatagtgagatgtgattcttcatcccctttatccttcctgatccttagacgtaatgattgtgcaactgtaatttattctgcattccacctacagacatgtatctactcatcaatttacccattcacaaatatattgaggacactcctagacagaacaagtcaataattccttccaccatacattgttcagtgctgcctactagtatatacatttacttatttaactacatgccggtacccagtttggacttaggcatttatgacagtaacagaattgatacagtcttcatttggtattgccactatttttgtttatttttttaaattttaagttctggggtgcatgtgcaggatgtgcaggtttgttacataggtaaatgtgtaccatggtggtttgctgtacctataaacctatcacctaggtat

SEQ ID NO: 379356 - DNA, 575 bp, Homo sapiens
aatctgttcctggacataaattatacattttcaaatcaatcaaagtttagctcattctttccctgcaactggaatgagacattattccactgactctcttttttaagctttcattggcaaacccagaaaacaagaacagagacctagaatatttgccctatggagttaaccctagaaaatttatatctgggccgggtgtggtggctcacacctgtaatcccagcactttgggaggccaaggagggtggatcacaaggtcaggcgttcaagaccagcctggccaacatggtgaaaccccatctctactaaaaatacaaaaattagtcgggtgtggtggcgggtacctgtaatcccagctactctggaggctgaggtaggagaatcacttgaactcaggaggcggaggttgcagatcacgccactgcactccagcctggaaaacaagagcaagactccatcttggggagaaaaaaaagaaaaagaaaaaataattttatcwggtgacagaattttttttatttattaccaaatactttttttttcagattcagtgtttacatgtgcaggtttattac

SEQ ID NO: 379357 - DNA, 614 bp, Homo sapiens
tctgaatgtgtcaacaggtaaggaacaaaatagatcttcaaaatcaaattccaagtggtctgggaaactgctctgtcacacagtagctcacatgaaaattgtccacttagatagacatagtcataacagagaaggtggtggctggaaacctatctcagctctcagataccccaccatgtacagtagcaagccccagccccttatccatggggatacattccaagactcccagtgaatgcctgaasccacagatagtaccaaatccaattgccatcaatcagaacacgtttctttcacaccttccacgtacaaatttagtgcctttccatcctaactaagcacttatcatgcgctatgatcataacttttgcagtcttatgcgagacacaaaactagcataaatttctttttcttcacaatttcatggatagaagatttttttttaccgtaggaattagcaaccacagcatagaacttttttccttattaaattggtaacttaaattttcttacttaaaggaagaactttatgttttctcttttggcatgaccactactcttgcactttaggcccactattaagtaaaataaagttactcgaacgtaagcactgt

SEQ ID NO: 379358 - DNA, 519 bp, Homo sapiens
gtgtgagtcatctccaatgataggtaaggtcacgtgggtcacgtgtccactggacagggggccctttcctgcctggcagctgaggcagagagagagaggagacagaaagacagcttatgccattatttctgcatatcagagacttttagtactttcactaatttactactgctatctagaaggcagagtcaggtgtacaggatggaacatgaaggcagactaggagcgtgaccactgaagcacagcatcacagggagatggttagccctccggataaccgcaggcgagcctgactgatgtcaggccctccacaagaggtgaaggagcagggtcttctctaaactcccccggggaaagggagactccctttcctggtctgctaagtagcgggtgttkttccttgacacttttcgctaccgctagaccacggtccgcctggcaaccggcatcttcccagatgctggtgtcaccgctagaccaaggagcccttctggtggccctgtctgggcataacagaag

SEQ ID NO: 379359 - DNA, 575 bp, Homo sapiens
ttcgttgacaaaatgataatgttttagatatattgggttatactattaagttaattttagctgtttctttttattttttaaggtgattagaacatttaaaattacatgtgtcttgtattatatttctatgagaaaatgctggtctataacacttctgaaactactgttgtgggtatgctgctataaggacaacagtttacrtgtgagtaaaagactatttcagattaaataatttggttagccattatacaagttttttctttaatatgttcaacaacattgtaattttttcaagaagtatctaaaagatatagactccaccaattcctttctttcctgcatgagaatgctgttcttcccaataagaggtggtgattattttccctccccttgaatatgggctggccttcataacttttctgacctattgaacacaggagaagccattttatgggacttctgaggctagataaaaaaaaagccttgcagcttcgggttatgattctcaaaacactttgggatattctcttttaaaatccagccatcatattgtcagaagcaaacttcacatgtta

SEQ ID NO: 379360 - DNA, 594 bp, Homo sapiens
  misc_feature (1)...(594): n = A,T,C or G
tgtgtgtgcacagatcacaaagtgaggcatgagagcaaggggctaatccatatgtgtggtcagttcctctcccaactcactgatccagcaattaaatacctccctggggaggatttaaaaatggaacaaaaacctaggattatttagcaaaaaatcctttatggaaccagagaagtcagacagaaatgttctcctcccctcaaacaattagtgtggattttattgtgagggcaatggaaagtaatcacaaaaatgtagccaagagagtaacataatttgcattttgaaggatcatttgggctgccatcgaagaaggatgaaaagtggtagcaggaagactaggtaggatgctgttagaatgagccagatgaaagatgtggtggtcaggccagggtggtcatgatggggatagtgagaagtggctgaatgctattatgatcccaaaagtgtctgagtcaggtctcagtcaattcggaaactttattttgtcaaagttraggatgagcttgtggcacagccttaggaagttctaatgagatgtacccaaggaggttggggtacagcttgctttcatannnnnnnnnnnnnnnnnnn

SEQ ID NO: 379361 - DNA, 626 bp, Homo sapiens
aaaattgcagtagataaagttaaacagacaaggaaggctttattcaagattatgatgaaagggcagagaggccgaaattcacgctgaactcaactccaccgaaacaaatggtaggagagttcttaattgctgaggtagaaagattcttaggccactgtttttgctagttggccttactcaaaagaaaagtagtctttctcctgtcttcatggcaggaggtagttttacaacttgaagcaaggtacccacagaaattaggcacttatcctcctacagagattggaaaatgagggcactatcttctttgatgattatttttcaaagaaatggcaccaagatccatgagaaagacattcctaaggtttaaaacttgtaagaggcttamaaaatatctactcaaagtgggagagaaagaatctataattgaaaattttctaaggtagatgctttaagaaaagggaggtcaggggctagagtcaagaagtctgcctgaagttttagtcaaacaagtttagtcaggagaaatattcaggccataccagtcatctatccagttgaagactgcatttactttgttatgctatcagaacacaaagattgccagattaccactttattaagatgta

SEQ ID NO: 379362 - DNA, 628 bp, Homo sapiens
tgtgctttaatggctggacagagcgtggcatattaaggactgaatttcttcagtaaattggaatgtcttatagtaataggtgccatttaggtcattattgtcacttttaattagtgtagttattattaatttaaagcttaatattattaatgacatgtgaacatattagtgtttctaaattagtgtctactaaaagtttgaaagatagttgtatttttggtgaacttgtaacctgaagttttcaatgatgttaaacttataatctccttttagacttagaagatcaaatttaattgtagtattaaaataaaaatagaaccctgctacacactatatagtttagtaatatttaataagataaaaagaagaaaaccatggcacagtggaataatagagcaaataactattggagyaaatacaagaatcactcaccaaggctgctcctatttttggatgaaataggtgatgcttagtaacatcatttgagctgctcaggaggagtgtctcctaaaactcttcttttcattgaggtatgtatttaatgatactttatttaatgaaacatttgtttcatttctaggcttaaattttgacctctcaatgagatttcctctgaaaatgcagacat

SEQ ID NO: 379363 - DNA, 528 bp, Homo sapiens
cacgattgttttgaattttctgatgccattagctgagctgaatgctaactagaacagaaatcttaatggctaataattcctttcactgctgatttaggaccaaacagtacttgaaagaggtwtaagtagtaggtgaatgagtcagcagtgggtaagcgtaccaaatggaagcaaataatatttaatttgtcttacttatttttcatcttcctagccactcattatactggcatctcccttctattttcttctgattcattgactcatacaaaagtcatatacctgtttacctttaggcattcattttcttattcaacatttcttgaagatctactgggttccacagcactgggtaatagtaaggtatgcaggtttcacaatgagacataaatgctattcaggtagccttttgatttcttcaaaatatagggctgaaattgatcttagaaatcaagaggtcccataccttaatttcacctgtgaggaaactgagactcaaagacactctatgttgcacagctagttagt

SEQ ID NO: 379364 - DNA, 528 bp, Homo sapiens
cacgattgttttgaattttctgatgccattagctgagctgaatgctaactagaacagaaatcttaatggctaataattcctttcactgctgatttaggaccaaacagtacttgaaagaggtataagtagtaggtgaatgagtcagcagtgggtaagcgtaccaaatggaagcaaataatatttaatttgtcttacttatttttcatcttcctagccactcattatactggcatctcccttctattttcttctgattcattgactcatacaaaagtcatatacctgtttacctttaggcattcattttcttattcaacatttcttgaagatctactgggttycacagcactgggtaatagtaaggtatgcaggtttcacaatgagacataaatgctattcaggtagccttttgatttcttcaaaatatagggctgaaattgatcttagaaatcaagaggtcccataccttaatttcacctgtgaggaaactgagactcaaagacactctatgttgcacagctagttagt

SEQ ID NO: 379365 - DNA, 544 bp, Homo sapiens
caatgagacataaatgctattcaggtagccttttgatttcttcaaaatatagggctgaaattgatcttagaaatcaagaggtcccataccttaatttcacctgtgaggaaactgagactcaaagacactctatgttgcacagctagttagtggcagaatggtgaactgaagtcggaggctctcacatttgtgaccagtgctttttgtgttgtaccctagttttatttcagagtttccatggaaagggggcttcatcagattttgaggtgacatttaattttgtaatttaattagggataaaagackgtgttctaaaattttgcctttagccaaaaacatttgagagcttcacacaactgctccagaaattatatattgcttcctaataatgtgcaaatgtgcatgcagtggtggcaactttggaacgctggatttcaatttgattttgagaaatattgaaatactttactatccaactagtagtaattttagttgtagttgtgcaatggtacagaagacataattgtatcaatgtagattggtt

SEQ ID NO: 379366 - DNA, 495 bp, Homo sapiens
ttatttcagagtttccatggaaagggggcttcatcagattttgaggtgacatttaattttgtaatttaattagggataaaagacggtgttctaaaattttgcctttagccaaaaacatttgagagcttcacacaactgctccagaaattatatattgcttcctaataatgtgcaaatgtgcatgcagtggtggcaactttggaaygctggatttcaatttgattttgagaaatattgaaatactttactatccaactagtagtaattttagttgtagttgtgcaatggtacagaagacataattgtatcaatgtagattggttaggaattgagtagttgctaaactggaacttagttccaaattttcctgcccatagacactatagagccaaggagaatttttcaaagtggtagaaacactctctattacttgggaggtttgagtatagaaaatagagcagaagcagctatttttcatatcctatggttgtgatt

SEQ ID NO: 379367 - DNA, 544 bp, Homo sapiens
caatgagacataaatgctattcaggtagccttttgatttcttcaaaatatagggctgaaattgatcttagaaatcaagaggtcccataccttaatttcacctgtgaggaaactgagactcaaagacactctatgttgcacagctagttagtggcagaatggtgaactgaagtcggaggctctcacatttgtgaccagtgctttttgtgttgtaccctagttttatttcagagtttccatggaaagggggcttcatcagattttgaggtgacatttaattttgtaatttaattagggataaaagacggtgttctaaaattttgcctttagccaaaaacatttgagagcttcacacaactgctccagaaattatatattgcttcctaataatgtgcaaatgtgcatgcagtggtggcaactttggaacgctggatttcaatttgattttgagaaatattgaaatactttactatccaactagtagtaattttagttgtagttgtgcartggtacagaagacataattgtatcaatgtagattggtt

SEQ ID NO: 379368 - DNA, 555 bp, Homo sapiens
gataatcaaatgttgagggaaaattaaaaaaaaagtagtaagtgggaagaaatgaatagagggtaatcaggtaggtttataacacttaggtgaccagttgagatgcaggctcagtaaaactatgaatctgatagagacacagaaagaccagtaagaagttaaaacacattattaatgaaaaatagaaaacaactctctgaatataattttagarccccctttatacaatttagacaaaggtactttatctgggctgatgaattaggaaaaacgttctcctataaatgacagaataagaccaaggtacagctcttagtggcttcagcttctctcagtggacactgtttggcaaatggagtgtaggctaaaattaagtcccaacagcacaactgtgtgcaattctgtgtagaggagaattgagacatactttaagtatagaagagaaagtgaaataaattacaaaggtgtgaaaaaaatatgatactgatacatggcttagaaagtcaatataaactattactaagttagaaaataagaaaataaaacaaataaaga

SEQ ID NO: 379369 - DNA, 561 bp, Homo sapiens
tagcattccccaggtttttacttttgattgtctcatcttcctcattgtaaaacaccacctcatttatctctgttacatcctatggtttcatttttcaccttcttactggtttacacaactgtttatcttcagagctttcaaataactgaccaaaagacagaccgacttaaagaaagaattaaattacgttctttgcagcaatgtggatgcagctggaagccattatcctaagtaaattaatgcaggaacagaaaaccaaatacctcatgttttcacttataagtgggagctcaacaytgggtacacgtggatataaacatgagaacagtagacactgaggactcctagagggggaaggaaaggaggcgggggcaagggctgaaaaactacctattgggtacaatattcattacctgagtaatgggacttgtaccccaaacctcagcatcacacaatatttctaggtagcaaacctgcagatgtaccccctcaatctaaaataagagttgggaaaaaaaagcctcaatatttatggccaatgggaatcagttcaatgttaca

SEQ ID NO: 379370 - DNA, 541 bp, Homo sapiens
ccattcatgatgcggagagctgggtttcaggtggatttggacctcctgcatgctttgagtaggccctggctactgattaaatagtgcccgctgctctcaaaaacaagttaggagggaaaatatccacagtggagcttggagggtctgatttcctggagtacaggctagagtccatgttgaggttcagaggtttttctctgcaatgacatccccactgaaagggaaggaccttggggagctagcaagaggatgacattgctctccaactcccagtccctgagaactggggatcaaaagycttccagatcaagtcacaaaagtagtaggctgcttctgttttgggaggcatccatccccaggtgccatctggctacctcattcagagtggggaagaaatcataggtacaagaagtggccattttccctctggagtcaaaatcaggacttagctcctggccagctattgtgtgtttattctttaatggaattttccacagttagtgcctggcctccagcaaagtccttgcaacctccacggagt

SEQ ID NO: 379371 - DNA, 571 bp, Homo sapiens
agcctacaaagactacacacaaaatgtatttgtgccctacagctcaccttatgacataaaaagccgaagtccatctaattttaatgttaaaaccctgtcccaaagtgaacatgggatgtatgttagatatatgttaactcactgcacatgtgcttgactttttttaataaatattcacagacattcccaaacctgatgaatattcatggctatgcatggagacagaccactgaaggcttaaatgacaatgtattcttcctttctacaaagtatgtgttttcaatttcctcagaagcttcatttccccaatttacagattgtcactcagaaaataaagttttctcccttttccttactccacagatctcatgggcatttgttaacacctgattacatctgacagaaaygtgctaaaacggatcaatttgtatctatttgaaaaagttctcactaattaagattgttgtattttcatgaaatattagataaacactacaactcacactcttattctctctggtaataatatgatattttgaaaatataattaaatttagttatcttgaaaatg

SEQ ID NO: 379372 - DNA, 571 bp, Homo sapiens
agcctacaaagactacacacaaaatgtatttgtgccctacagctcaccttatgacataaaaagccgaagtccatctaattttaatgttaaaaccctgtcccaaagtgaacatgggatgtatgttagatatatgttaactcactgcacatgtgcttgactttttttaataaatattcacagacattcccaaacctgatgaatattcatggctatgcatggagacagaccactgaaggcttaaatgacaatgtattcttcctttctacaaagtatgtgttttcaatttcctcagaagcttcatttccccaatttacagattgtcactcagaaaataaagttttctcccttttccttactccacagatctcatgggcatttgttaacacctgattacatctgacagaaatgtgctraaacggatcaatttgtatctatttgaaaaagttctcactaattaagattgttgtattttcatgaaatattagataaacactacaactcacactcttattctctctggtaataatatgatattttgaaaatataattaaatttagttatcttgaaaatg

SEQ ID NO: 379373 - DNA, 576 bp, Homo sapiens
atggcttgagcccagtagttccactccagttgggacaacgtagcaagactctgtctcaaacaaaaacgaataaaaagacaaaaaaaaaaaaaragagagagagagagaaatagagagggatagatttggtggggaatggcgaaaatgagagagaatctaagaaaatgttggagagatgctcttattcagtacaaaaatagaacgtaaaagcaagaaagcaagaggttaagtgaaacgtaaagacgaaagtctcaaatgatactttaaatgtagcaattgtgtttgattgaaattaaagcttttttaaagtgcaattacctgactttataattgaatagttctgttggcacagactaggaaatatcctcacattactggcagactttacattgaatagtcattatattatcatgatattacgcttccctggagaattgctttaatggtatactaatatgtcagtcacttgaagcccgcagacaagtaaagcacagtaggtctgcctattcatgtcttactgtcgagcctgaaaaagaaggtgccacaatctaacatcttgctcacatggaaagtgat

SEQ ID NO: 379374 - DNA, 577 bp, Homo sapiens
tcagtcctgaataaggttcgtgatcgaatcacgttcatcttgctggtggggttatttttcattgtttttcttcacctcttagatggatgccaattcaaaagacaagccccctgaaaccaaggagtctgcaatgaataatgctggtatgtgwtgatctgcctccttgtgaagttgaaggtttagacagagagttgtcctcacccctacaatatgtcgtccgtttcaggaaatgcctctttcattttgggaactgggaagattgtgactcctcagaagcatgccgaattacctcctaatccttgcacaccagatacttttaaatcacctttgaacttttccacagtaaccgtagagcaattgggaattacacctgaaagctttgttaggaactctgcaggtaagaaaagttgtcattctgttgtaatgcttttcaagtttaaaaataactttaatataactcagctttatttgtttatacgtactgtcatattttaggtacctaaattgcctactctgcaaacttgcttcttcagagagacttctttgcacatgcacagttcatttagcatagcaggga

SEQ ID NO: 379375 - DNA, 552 bp, Homo sapiens
gctgcccaggttggctggtcttgagttcaagcgatcctcccacctctgcctcccgaagtggtaggattacaggtgtgagccaccacacctggccacatataccttttaaaattgtgtgctgtgactttgaggctgaggcgggtggatcacttgaggtcaggagttcaagaccagcctggccaacatggtgaaaccccatctgtactaaaaatacaaaaaaattagccagtcgtgatggtgcgtgcttgtaatctcggctactcaggtggctgaggtaggagaatcacttgaactcagaaagtgcagcctgcastgagccaagatcgtgtcactgcactccagcctgggtgacagagttagactctgactcaaagtagataaataaataaaaataaataaataaaattgtgtgctgtgaaataaattcctaaataatataaaagtaaggtgtgaaataaaatcaaattgtacactttctcaggccttcatgtggaggcactattgattatgagatagcttagtgggtaaaactcagaccaggcagatgtgtta

SEQ ID NO: 379376 - DNA, 575 bp, Homo sapiens
taatgggagacagtgacagatcatcaggcattagattctcataaggcatgcacaacctagatccctcgcatgtgcagttcacgatasagtttgcactcctatgaaaatctgataccaccactgatctgacagcaggcagagctcaggttgtaatgcgagcgatggagagtggctataaatacagatgaagcttccctcacttacctgtcgctcacctctggctgtgtggcctgtttcctaataggccacggactgatactggcctggcattttgggacccctgctataagtctaaccttgattagcaaatcttcccttttctatagcttgtgggcattttatacctcttcaagggaagagttaaacttttttcagtctttacttggagctgacaagtgtcctctttctcccatgtgctctgtcactcaggaagagatcagtcctctggagaatgccatcgaaaccatggagctgaccaacgagaggatcagcaactgtgttcagcagcatgcctgggaccggtccctctctgtgcaccctctctccatgctgctcagtggcatcgtggacccggc

SEQ ID NO: 379377 - DNA, 575 bp, Homo sapiens
taatgggagacagtgacagatcatcaggcattagattctcataaggcatgcacaacctagatccctcgcatgtgcagttcacgatacagtttgcactcctatgaaaatctgataccaccactgatctgacagcaggcagagctcaggttgtaatgcgagcgatggagagtggctrtaaatacagatgaagcttccctcacttacctgtcgctcacctctggctgtgtggcctgtttcctaataggccacggactgatactggcctggcattttgggacccctgctataagtctaaccttgattagcaaatcttcccttttctatagcttgtgggcattttatacctcttcaagggaagagttaaacttttttcagtctttacttggagctgacaagtgtcctctttctcccatgtgctctgtcactcaggaagagatcagtcctctggagaatgccatcgaaaccatggagctgaccaacgagaggatcagcaactgtgttcagcagcatgcctgggaccggtccctctctgtgcaccctctctccatgctgctcagtggcatcgtggacccggc

SEQ ID NO: 379378 - DNA, 537 bp, Homo sapiens
gaaatgaagcagcatctctggggattgcagagccacactctcttagaaattagcttctaggggcaaagtgtagtgttcacacctgtaatcccaggatttagggagccaaggcaggtggatcacttgaggtcaggagcgcgagaccatcttggccaacatggtgaaaccgcgtctctactaaaaatacaaaaattggccaggcatgatggtgcatgcctgtagtccgagctactcaggaggctgaggcacgagaatcacttttaaccccagaggcaaaggttkcagtaagccgagattgggccactgcactccagcttgggtggcggaattagcttctaggacccctgcctgacttggtgtgccagaggttgtatggacaactgatggccctgactctacaattaaattagttcaactaagtattcttagttgagacatgaaagcagtacttggcacaatttaatccatgggatagggttaggatgtaacagcatttaaaatacacatcatgcattcagtgtatgttaggtataatta

SEQ ID NO: 379379 - DNA, 545 bp, Homo sapiens
tccttccaaggatgtgtgaaagaatgttccatgtctctcgtcctggcttctggtgtcttcttggtgctccgtggcttgaggatgctcctccatgtcttgtcgatggccatcttcttgcatctcttcwcataatgttctcccagtgtttgcacttctgtctccaaatttcccctttttataaggacaccagtcatatgggcttaagggcccaccctactccagtatgtatgacctcctcttaactaattaaatctgcaacagccttgcttccaaatagggtcacattctaaggtaccaggcattaggacttcagcataggaatttgggggacataattcaacccataatgtctgctcgcaagataggctttgcacatactttgtttgccacgcaaaatgggccattcacttttataagtctgtcctgtagttccaggagctcttggttttatataatggggggtttggctctcaaggcattaaagcagaagaccgaaggggaatctgaaggctggtcttcgaaagcactttcagaaatgaatgtta

SEQ ID NO: 379380 - DNA, 545 bp, Homo sapiens
tccttccaaggatgtgtgaaagaatgttccatgtctctcgtcctggcttctggtgtcttcttggtgctccgtggcttgaggatgctcctccatgtcttgtcgatggccatcttcttgcatctcttcacataatgttctcccagtgtttgcacttctgtctccaaatttcccctttttataaggacaccagtcatatgggcttaagggcccaccctactccagtatgtatgacctcctcttaactaattaaatctgcaacagccttgcttccaaatagggtcacattctaaggtaccaggcattaggacttcagcataggaatttgggggacataattcaacccataatgtctgctcgcaagataggctttgcacatactttgtttgccacgcaaaatgggccattcacttttataagtctgtcctgtagttccaggagctcttggttttatataatggggggtttggctctcawggcattaaagcagaagaccgaaggggaatctgaaggctggtcttcgaaagcactttcagaaatgaatgtta

SEQ ID NO: 379381 - DNA, 546 bp, Homo sapiens
aaaggcatttttgacaaagtttagacaaacgactcacaaaatatggctaatagtagatgagtttggacatctgatactgcagaccagccttggctagatcctaggcgtcagagtgaaatcatgaatttccttttgtagattagaattgatggtccaactctcaacccaccaaagagaaacttaccttttccaatttaattgtaaaagccagatatatcactgaatgaaggtatctaaggaagtgatatttatcaacttcccaaatgatacagagaaggaaagcataattattaaaatgaacctaaagtctagatacagtgggccaggctggtgaagccttagactactatggaaatgacrttgtttataagatgttgcacaaattatggtaatctgtgtcaatatttcaatgtgtgctggattattactgacatattcataattttaatgtccacaaatctttttatcttaatagccagggtatggcagggtcaaagcaccacctgggatgataaatgggacaagtatagtccatggacctcaaag

SEQ ID NO: 379382 - DNA, 554 bp, Homo sapiens
agtgtgtcacgtgagaaaagtacctaagtctcaagcacagcttttcataagcaaagcaaaaaatccttccaaggagtagattacaggggttgctccaccatcaatatggaagaacttgtccaggcttgtgcagaccaccatgtctctgccktacaggctgacatttaacaatggtgaaggcaatctcttcttggaaaaaatcagaggctgtgactgattctggaattccatgtggactggaagggaggtggcatggcctcaaaattctatcaaagagaagcttttggaagaacatgactggttttgggctggtaaacatcatcccagatcaggaaatgcagtcagcagggagccccatggaatgaggacaccggctggaggccagttctcaggcagcagctgtctaaggcactcggtgttgcagggagggcaagatccttactgggatccaggctcggaagtagggatgccagacttccgagcctttggaggtggagggggtggtgctttggcttctcttcggacaggcagtgggggagcgagctgcagaagca

SEQ ID NO: 379383 - DNA, 555 bp, Homo sapiens
tgcaccagctcattctaggtaggcagattatggactcattaataaaataatttgccagccatttattcaacaactactatgtgccaggcattaatttctaaataaaattgctttcaagatgctcagttttctttctgtaaggggacaaaattacaatacagggtatgataaaaaagagataccccaacctgtcagccctccaggggtatcaaccttcagatcacgcaagtttagtttctttccagaataagtgatgcttgagccaaattcactaataggagttttagaggaatggggacccaaaaggcacatcccattccaaatctcctttgattrttattcaataatttcattattcattaaactgagactaggtgatacaggctggcttcatctcatgtttttcttttaagtattttttaactttcattaaattctaacctataaatacatctggaaaagcatggatttgaaactagactacaagttgtgaattgtacctaaaattttaaagaaacctgctctgttctcaattgcttaggcatttctgtccca

SEQ ID NO: 379384 - DNA, 521 bp, Homo sapiens
agcctttacgagtctaaggtaaaggtaaatgggtctcgctgtgttggttgccaaaatactctgctgcctgcacattcggggaacactgtaaatttttaaatagtgaaattgtccagtggcattaaaaatggctttccgattattcagtgtagagtaaacatgctccgaaaattcgaaccagagtgtggtttgttggctataattttatgttcttttggtcttagagatttaatactcatttaaaatcagaattcgtataaattsgagttcttgagttatcatgaatgctaccccgaaaatatgttcacgaagtttacatttctcatcactattaactttttctaaacctgttctgtacttagctactacctgttatctaaaacgtgtgttgttactctaagaaagatttagtatgttcaaaattggtaatatttctcaaaaacaaacttctggttgacctttttaatgcagtatctctgctatgttactcatggaagacaaatatttaaacctagtcataa

SEQ ID NO: 379385 - DNA, 521 bp, Homo sapiens
agcctttacgagtctaaggtaaaggtaaatgggtctcgctgtgttggttgccaaaatactctgctgcctgcacattcggggaacactgtaaatttttaaatagtgaaattgtccagtggcattaaaaatggctttccgattattcagtgtagagtaaacatgctccgaaaattcgaaccagagtgtggtttgttggctataattttatgttcttttggtcttagagatttaatactcatttaaaatcagaattcgtataaattcgagttcttgagttatcatgaatgctaccccgaaaatatgttcacgaagtttacatttctcatcactattaactttttctaaacctgttctgtacttagctactacctgttatctaaaacgtrtgttgttactctaagaaagatttagtatgttcaaaattggtaatatttctcaaaaacaaacttctggttgacctttttaatgcagtatctctgctatgttactcatggaagacaaatatttaaacctagtcataa

SEQ ID NO: 379386 - DNA, 521 bp, Homo sapiens
agcctttacgagtctaaggtaaaggtaaatgggtctcgctgtgttggttgccaaaatactctgctgcctgcacattcggggaacactgtaaatttttaaatagtgaaattgtccagtggcattaaaaatggctttccgattattcagtgtagagtaaacatgctccgaaaattcgaaccagagtgtggtttgttggctataattttatgttcttttggtcttagagatttaatactcatttaaaatcagaattcgtataaattcgagttcttgagttatcatgaatgctaccccgaaaatatgttcacgaagtttacatttctcatcactattaactttttctaaacctgttctgtacttagctactacctgttatctaaaacgtgtgttgttactctaagaaagatttagtatgttcaaaattggtaatatttctcaaaaamaaacttctggttgacctttttaatgcagtatctctgctatgttactcatggaagacaaatatttaaacctagtcataa

SEQ ID NO: 379387 - DNA, 599 bp, Homo sapiens
gataccaagaccattcagtggggagaggacagtcttttcaacaaatggtgttgaaaaaactggatattgacatacaaaagaatgaagttggactcatattacaccatatacaaaaaaaaaaccctcaaaatggatcacaggcttaaacataagagctaaaactattaaaaaaaattttaagataggaaaaaagcttcatgagatcggatttgttggtgccttcttagatctgataccaaaagcacagacgacaamaggaaaaaacaagaaaagataaattggactacagtaaaacgttaaagccttcttcatcaaaagacactatcaaaagagtaataaggcaatccacagaatgggagggaatatttgtgagtcatatatctgataagggtcaatatccagaatatataaaactacaaacgttgaaaaacaaagaaacaatccagtttaaaaatgggcaatcaacttgaatagacatttctccaaagaaggatatacaaatggtcaataagcatatcaacatcactaatcattagggaaatgcaaatcaaaatcacagtgagatgccacttctcagccattaaagtcactattaatga

SEQ ID NO: 379388 - DNA, 599 bp, Homo sapiens
gataccaagaccattcagtggggagaggacagtcttttcaacaaatggtgttgaaaaaactggatattgacatacaaaagaatgaagttggactcatattacaccatatacaaaaaaaaaaccctcaaaatggatcacaggcttaaacataagagctaaaactattaaaaaaaattttaagataggaaaaaagcttcatgagatcggatttgttggtgccttcttagatctgataccaaaagcacagacgacaaaaggaaaaaacaagaaaagataaattggactacagtaaaacgttaaagcyttcttcatcaaaagacactatcaaaagagtaataaggcaatccacagaatgggagggaatatttgtgagtcatatatctgataagggtcaatatccagaatatataaaactacaaacgttgaaaaacaaagaaacaatccagtttaaaaatgggcaatcaacttgaatagacatttctccaaagaaggatatacaaatggtcaataagcatatcaacatcactaatcattagggaaatgcaaatcaaaatcacagtgagatgccacttctcagccattaaagtcactattaatga

SEQ ID NO: 379389 - DNA, 551 bp, Homo sapiens
ttaggtaggcctcctgcttatgccacaagcactacaccagcctagtggccccatgacaggtatagcatgagcctactgcattctgatataaccttcctggccagcacttcatgcccagttaccctggtgtcactgctcctgctagagtggaaggcaggacctgctgtgtgcatggggcaggcgttgtcaggccaatgtctaggtgttcacacctcacagtgcagaaaggtgctggaacaattctagcagaaaaagtggaagtggcagacatgtgggaycagggaagggcactgaccaccttccagatggtgtgagtttcacatagttctggccagtggggcatggttcggccagcgactttcaactttcaacagcaccctatagcaaaatttgtgcaaagttcccgagttattagttacaattggggtaactgaaaaacaagttatgatgattaaggagataaaactttctttcttgatcctttaaagagctcacttattcaaggtcttccagttgttgcaggactttttttcagttcagctaaagatggg

SEQ ID NO: 379390 - DNA, 551 bp, Homo sapiens
ttaggtaggcctcctgcttatgccacaagcactacaccagcctagtggccccatgacaggtatagcatgagcctactgcattctgatataaccttcctggccagcacttcatgcccagttaccctggtgtcactgctcctgctagagtggaaggcaggacctgctgtgtgcatggggcaggcgttgtcaggccaatgtctaggtgttcacacctcacagtgcagaaaggtgctggaacaattctagcagaaaaagtggaagtggcagacatgtgggatcagggaagggcactgaccaccttccagatggtgtgagtttcacatagttctggccagyggggcatggttcggccagcgactttcaactttcaacagcaccctatagcaaaatttgtgcaaagttcccgagttattagttacaattggggtaactgaaaaacaagttatgatgattaaggagataaaactttctttcttgatcctttaaagagctcacttattcaaggtcttccagttgttgcaggactttttttcagttcagctaaagatggg

SEQ ID NO: 379391 - DNA, 566 bp, Homo sapiens
attgggaagctggaacttgaagcatctggtgcttatgtacaaaacaaacataaataagaattcatgtacaaatgtggctctaacaaatctccagcaacaagaaaagaagtagcaccaacaaatgaaaggagaaaaatcaatactaaaaggagagaaaaaagagaaacagaatcctccaaagactrtacttcaaaagtttaatttcaggctcagatacctgaccaaaagacagcatttttagtggtatctgagattcctgaaagagagtgagaaacttgttgtgaagatccaattatgacttcctgcctttgctctcccttccctctttaggagtcatgagaatacttacgcagaacaattgatgcatagagaagaaaaaaatgagtattaaaaatcactatcactaacatttattataatctaaagaagatagggttccagtcttctatcaggcccaggttcagaaatgtggtctttcttgctgtttttaatttgaataactacgtacaaattaatataactctggagtcttactccacggacgttttgacaggaaggtatacctc

SEQ ID NO: 379392 - DNA, 573 bp, Homo sapiens
actatcactaacatttattataatctaaagaagatagggttccagtcttctatcaggcccaggttcagaaatgtggtctttcttgctgtttttaatttgaataactacgtacaaattaatataactctggagtcttactccacggacgttttgacaggaaggtatacctcttactctaatgcaatggatatacatctatctagaaaaaaaagcatgtcaacaaaaaagaaagaaaatatttaacaaaataatatagagttagagatttatggcttcgaaggtgtcttcctactggttttcgttctttttatcctgtgtttgaggatgagaatgcagcaarataccttcagttgtcacgggtcgatgatcttaccctctgtgcttaccctcagattctgagagatgttttaggctgacaaataagcaaactctccaagatgtatcatattatctattgcccattagacagcagatagcctcatgcttttacaggcattggggggaacatctttatgtagtctaccttttctatccattaatctgtcaagaaggagaattagactccactggggg

SEQ ID NO: 379393 - DNA, 575 bp, Homo sapiens
tttaaacatagcactggtgttattttagacgcatgtgtgtatgtgagygcatgtaaaacatctgtatccttggcatctgaaacagagcctggcaccaaaaaaaaaaaaaaatcaattgatatctgttgaagaatgaataacaacttcagaaaagtacatcagtctttataaagctcatcactgttattgagattgtggcagaaggtctgtatgtgttagaaaaatctatcatcactgcgaaggacaggcgaatgctgccgattgtacctgaccacatctttgtagattctgctgaatttgtgtgatagtttcagatgtatacatacatggagagattaacaaaggattgttaaggtatctgtacctgcactgggtttcaaataagtggttgatatggtttggctgtgtccccacacaaatctcatcttgaattcccatgtgttgtgggagggacctggtgggaggtaattgaatcatgggggcaggtctttcttgtgctgttctcatgatagtgaataagtctcaggagatctgatggttttataagggggagatttcctgcacaagctctcttt

SEQ ID NO: 379394 - DNA, 586 bp, Homo sapiens
cttggggaacctcatagataactttttacagtgtaaatcttacatgccttaggttggcttgtttattttaaagtttttttgttgtcatgttacttttgtttgtcttcttggttatttttgttgttttgtttgctttggttttgcctacttcatcattctggcattaaggatggaaaaaaggaattgactatcccccatcatggagagctgccatcgtgccaggctctgggaagggcactttcccatgcatcaccgcgctcacagccatcctgtgaggaagctctcatgcacgccgctcacagaggagggtacacaaactcagaggatcgccctgcttggaagtagcagagctgggattggaagccaggcattttaattcacgcacaatgttggttccttccatcagtccaggcagatgcattctaggttgaaaaggatgtgatgtggtctgtgatagaaaagagaagcaggttgggatttaagggkcctgaattctgcccttaggttagcagctgactaggaaaaccaatgaatgtgtatttgcataagttttggaagtgtgcaaacaagaatgagaagcgaggtt

SEQ ID NO: 379395 - DNA, 509 bp, Homo sapiens
tggtgtgtcccctggggccatgagggattgcaaacgctgcttacaggtgaaaatccccgccctgagccttcagcagactcagtactaccttggccccctcgaagcagttatttgtgcctggtcgctggaagttcctttccaggcagccctggtacccacgaggcgcctgcacsgcgagcccccagcagctcctccggtgaggccgccccttttccccagcccttccctcttctctcctaggctcctcctccgtgtactcacgctgacctggtaggtttagtcttttgtgtggtcctgtatcaaaagtttaattagaaaatcgcgcctgggctttttaatagcccgagttccggccgtaaaagccccggacgtgctcccgcgcgcgccggctcctggcaggacgcaccagccgctgcggcgcggggactcccgcctgaatcttatttacattcggactaacaatagctctggaacctggctataaataatttctggggaagggttgtcta

SEQ ID NO: 379396 - DNA, 509 bp, Homo sapiens
tggtgtgtcccctggggccatgagggattgcaaacgctgcttacaggtgaaaatccccgccctgagccttcagcagactcagtactaccttggccccctcgaagcagttatttgtgcctggtcgctggaagttcctttccaggcagccctggtacccacgaggcgcctgcacggcgagcccccagcagctcctccggtgaggccgccccttttccccagcccttccctcttctctcctaggctcctcctcygtgtactcacgctgacctggtaggtttagtcttttgtgtggtcctgtatcaaaagtttaattagaaaatcgcgcctgggctttttaatagcccgagttccggccgtaaaagccccggacgtgctcccgcgcgcgccggctcctggcaggacgcaccagccgctgcggcgcggggactcccgcctgaatcttatttacattcggactaacaatagctctggaacctggctataaataatttctggggaagggttgtcta

SEQ ID NO: 379397 - DNA, 587 bp, Homo sapiens
ctcagcttcaaatcttttttttgtcttttttcttcctcttgttataaagctaccagtaccacccctatgataacccattaatccatgaagccatgaatgaattagtctattcatgagagcagagccatcataacccaatcacctcttaaagtccccacctctcaatcctgccacattggcgattacatttcagcatgagtttgggagaggacaaatattttaagcatatcattaatcttttatcttgcaatcttgctatgattgcttattagttccaggaatttttttgttgttgttgattctttcagattttgtatatggactatcgtgtcatcagcatatggactatcatgtcatcagcaaacagatttacttcctccttccctattaatatgcttttcttcccttttcttgtcttggacttctagtacaatgtttaaaaggagtggtgagagaggacatccttgccttgtttctcatcttagtggaaaagcttctagttttcaccttcatttttttaaattcctggttttattttattctttatttccataggtttttggraacaggtggtatctggttaccat

SEQ ID NO: 379398 - DNA, 608 bp, Homo sapiens
tcataccatttgcataatatcatctttaattattcactgagctaggtttgctacatgacaacatgtactccacctttagaactgggagggtttagtgggctaaggttttactcagtgtgaggaatttaagctcagttctcacatctagactctcctttaacaccagtctttttctttttttttttgagatggagtctcactctgtagcccaagctggagtgcagtggcgcgatctcagctgaactgcaccctctgcttctggggctcaagcgattctcatgcctcagcctcccaagtagttgggactacaggcacaagccaccaggcccggctaattttttgtattttagtagaggtgggatttcgccatgttgcccagggtgatctcgaactcctgagctcaagcaatctgccyacctcagcctcccaaagtgctgggattacaggtgtgagccaccgtgcccggccaacaccagttttaatcagctctccattcaagtatgaattgacagaagaaaaaaatagcacaaggaaaaagaactgagatattaaggatagcaagaaaaatccttcctgtgaaatagatatcttttaagaaacaaaaaaca

SEQ ID NO: 379399 - DNA, 608 bp, Homo sapiens
tcataccatttgcataatatcatctttaattattcactgagctaggtttgctacatgacaacatgtactccacctttagaactgggagggtttagtgggctaaggttttactcagtgtgaggaatttaagctcagttctcacatctagactctcctttaacaccagtctttttctttttttttttgagatggagtctcactctgtagcccaagctggagtgcagtggcgcgatctcagctgaactgcaccctctgcttctggggctcaagcgattctcatgcctcagcctcccaagtagttgggactacaggcacaagccaccaggcccggctaattttttgtattttagtagaggtgggatttcgccatgttgcccagggtgatctcgaactcctgagctcaagcaatctgcccacctcrgcctcccaaagtgctgggattacaggtgtgagccaccgtgcccggccaacaccagttttaatcagctctccattcaagtatgaattgacagaagaaaaaaatagcacaaggaaaaagaactgagatattaaggatagcaagaaaaatccttcctgtgaaatagatatcttttaagaaacaaaaaaca

SEQ ID NO: 379400 - DNA, 608 bp, Homo sapiens
tcataccatttgcataatatcatctttaattattcactgagctaggtttgctacatgacaacatgtactccacctttagaactgggagggtttagtgggctaaggttttactcagtgtgaggaatttaagctcagttctcacatctagactctcctttaacaccagtctttttctttttttttttgagatggagtctcactctgtagcccaagctggagtgcagtggcgcgatctcagctgaactgcaccctctgcttctggggctcaagcgattctcatgcctcagcctcccaagtagttgggactacaggcacaagccaccaggcccggctaattttttgtattttagtagaggtgggatttcgccatgttgcccagggtgatctcgaactcctgagctcaagcaatctgcccacctcagcctcccaaagtgctgggattayaggtgtgagccaccgtgcccggccaacaccagttttaatcagctctccattcaagtatgaattgacagaagaaaaaaatagcacaaggaaaaagaactgagatattaaggatagcaagaaaaatccttcctgtgaaatagatatcttttaagaaacaaaaaaca

SEQ ID NO: 379401 - DNA, 608 bp, Homo sapiens
tcataccatttgcataatatcatctttaattattcactgagctaggtttgctacatgacaacatgtactccacctttagaactgggagggtttagtgggctaaggttttactcagtgtgaggaatttaagctcagttctcacatctagactctcctttaacaccagtctttttctttttttttttgagatggagtctcactctgtagcccaagctggagtgcagtggcgcgatctcagctgaactgcaccctctgcttctggggctcaagcgattctcatgcctcagcctcccaagtagttgggactacaggcacaagccaccaggcccggctaattttttgtattttagtagaggtgggatttcgccatgttgcccagggtgatctcgaactcctgagctcaagcaatctgcccacctcagcctcccaaagtgctgggattacaggtgtgagccaccgtgccyggccaacaccagttttaatcagctctccattcaagtatgaattgacagaagaaaaaaatagcacaaggaaaaagaactgagatattaaggatagcaagaaaaatccttcctgtgaaatagatatcttttaagaaacaaaaaaca

SEQ ID NO: 379402 - DNA, 314 bp, Homo sapiens
ggtggcagtttactcataatattcaaaatgaccatgaacaactacatgaagaatatttaagataagaaaatataataaacattctctaaaacatgctgtcattttaaacaccttgggtcactaaagaaaaaacataggtaattaaamagaaaaatcatttttagtgaattattaaatgtaatacataactggatctaggttttctcagaagaaggggcaggcaaaaaaaatttatctgaatataggtgttaggataggtgagatcactgaaacttctactaataattaacacttagcttcaatatttgtactga

SEQ ID NO: 379403 - DNA, 314 bp, Homo sapiens
ggtggcagtttactcataatattcaaaatgaccatgaacaactacatgaagaatatttaagataagaaaatataataaacattctctaaaacatgctgtcattttaaacaccttgggtcactaaagaaaaaacataggtaattaaaaagaaaaatcatttttagtgaattattaaatgtaatacataactggatctaggttttctcagaagaaggggcaggcaaaaaaaatttatctgaatataggtgttaggataggtgagatcactgaaacttctactaatarttaacacttagcttcaatatttgtactga

SEQ ID NO: 379404 - DNA, 633 bp, Homo sapiens
gactttgtgacagtaatggccatagtcatatctgttatgatgtattgttgcaaagtaagagaagttcccacactccatgagtgtaccagttcaaaagatgtaacaaaaattgtcattctgtaataacattgacttacacttaaaaaaactattatggatttcaaaacttttcaaagttctggaagaaagacagtcaggaactttacaaattattggtttatagttcatacattcagtcttcacaaagtcctaattaggctttcagtataggggacattttgaggaacaagagatgagtcacgagtttgacctccaaagatcaagttgtggaggtatcatgtatgatatatttatgtgtrgaaataacttgaaacatcaaaccacaagttgagctttccttctcttgtgaccatccacccatgtattacccaagtccagacccaatggcagtttgccaagtgtgagccaaaatgagtgtggtcccagaagaactggttcatcttcctctggtctggaggggaaatacaaagccagcagaagaggcttctttgagacagcagagttcatggagtgttacattagacacctggtcccttaccctttctcctttctgcagggggtatggagggtact

SEQ ID NO: 379405 - DNA, 506 bp, Homo sapiens
tcctaattaggctttcagtataggggacattttgaggaacaagagatgagtcacgagtttgacctccaaagatcaagttgtggaggtatcatgtatgatatatttatgtgtagaaataacttgaaacatcaaaccacaagttgagctttccttctcttgtgaccatccacccatgtattacccaagtccagacccaatggcagtttgccaagtgtgagccaaaatgagtgtggtcccagaagaactggttcatcttcctctggtctggaggggaaatacaaagccagcagaagaggcttctttgagacagcagagttcatggagtgttacattagacacctggtcccttaccctttctcctttctgcagggggtatggagggtactcgacctgttctctctgcaamcctcaccagcccaaggggtcccaggagagtgttccacggggtttaaagagtgattctagaacatggggctgcacgtatttcttgccaggaactctcacaa

SEQ ID NO: 379406 - DNA, 471 bp, Homo sapiens
ctaaagcaaggaaggagagggaagtgaggcagcctgctcagttgggatcagatgggagcctgggagagggttcccaatgcaggtaaagtgagagacccacaggactccacattccaaccatggactttctttctttctttttttttttgagatggaatctcactctgtcacccaggctggagtgcagtggtgtgatctcagttcactgcaacctccacctccgaggttcaagtgattcttctgcctcagtctcccgagtagctgggactacaggtgcacaccaccactatttttttttagtagagacggggtttcaccatattggtcaggctggtcttaaactcctgacctcattatccrctggcctcagtctcccaaagtactgggattagaaatgtcagccaccgcgcctggcccatggactttctaatactagaagtcctacctagagcaattaaacaagagaaataa

SEQ ID NO: 379407 - DNA, 593 bp, Homo sapiens
ttgcatgggtgcatatatatatatgtgaatacacagaacaagggctgaggagtctgcatcactcacagtagtcactgctgaggacgaggtagtgaactagcaggacgtgctaaaagaacttaattccctctatatacttctgtattatttgagtttttaagaacatagaataatttgtggattgcttctttaaaaatttacttttcattaaaaaattaaaagctatgtaattgaaagaactgaacacaaacatgagatacaaaaggtctatttttttttcattaaggggttaaaaaagttttctctataacccaattaatttctggctcctaggaagaaaacagaattttycagacatgaggctgtgtttgtccattgccaggcctttaaaacagaaattccctttgaaatcctgtctgtcttgtaaacttccatgcttctaacactttcactggaaatggccatactgccaaaagtaatttatagattcaatgctattcccatcaagctaccactgactttcttcacagaattagaaaaaaaactactttaaatgtcatatggaaccaaaaaaagtccacatagccaagaca

SEQ ID NO: 379408 - DNA, 560 bp, Homo sapiens
gtcatttattttcttctctaaactggttattctggttagcaattcctctaaccttttttcaaggttattagcttccttgcattgggttagaacatgctcctttagcttggaggagttggttattacccaccttctgaagcctacttctgtcaattcatcaaactcattctttgtccagttttgtcaccttgctgatgaggagttgtgatcctytggagaagaggcattctggtttttgaaaattttagcctatttgcactggtttttcctaatcttcgtggatttatctacctttggtctttgatgttgttgacctttggatggagtttttgtgtggatgttctttttgttgctgttgatgctattcctttctgtttgttagttttccttctaatagtcagtcccttctgctgcaggtctgctggagtttgctggaggtccactccagaccctgttttcctgagtatcaccagcagaggctgcaaaacagcaaagaatgctgcctgttccttcctctggaagcttcatcccagaggggaacacaccagatgccagccaga

SEQ ID NO: 379409 - DNA, 560 bp, Homo sapiens
gtcatttattttcttctctaaactggttattctggttagcaattcctctaaccttttttcaaggttattagcttccttgcattgggttagaacatgctcctttagcttggaggagttggttattacccaccttctgaagcctacttctgtcaattcatcaaactcattctttgtccagttttgtcaccttgctgatgaggagttgtgatcctttggagaagaggcattctggtttttgaaaattttagcctatttgcactggtttttcctaatcttcgtggatttatctacctttggtctttgatgttgttgacctttggatggagtttytgtgtggatgttctttttgttgctgttgatgctattcctttctgtttgttagttttccttctaatagtcagtcccttctgctgcaggtctgctggagtttgctggaggtccactccagaccctgttttcctgagtatcaccagcagaggctgcaaaacagcaaagaatgctgcctgttccttcctctggaagcttcatcccagaggggaacacaccagatgccagccaga

SEQ ID NO: 379410 - DNA, 563 bp, Homo sapiens
ggtgtctcccagtcaggaggcatgggggtcagggaccaacttgaggaggcagtctgtctcttagcagagcttgattgctgtgctgggagatctgctgctctcttcaaagctggtaggcaggaatgcttaagtctgctgaagctacacccacagccgccccttcccccaggtgctctgtcccagggagatgggagttttatctataagcccctractggggctgctcctttctttcagagatgccctgcccagagaggaggactctagaaaggcagtctggctacagtggctttgccgagctgtggtgggctccaccaagtttgaacttcccaggggctttgtttacactgtgaggggaaaacttcctactcaagcctcagtaatggcggactcccctccccctaccaagctcaagcatcccaggtcaacttcggactgtgtgctggcagcgagaatttcaagctagtggatctcagcttgctgggctttatgggagtgagatctgctgagctagaccacttggtgccctggcttcagccccctttccatgggagcgaacaatt

SEQ ID NO: 379411 - DNA, 581 bp, Homo sapiens
ggttggtgtgattttggttttcaaaaagttgttgagaattgctttatggctgggcatgtggtcagttttagaatatgtaccacgtttagatgaaaagaatgtatattcttttactgttggcttgagtgttccataatctgttaggtccatttggtgaagtgtcaagtttaggtaccaaatatctttgttagctttctgccttgatgatccacctartactgccagtgggttgttgaagtctcctgctattgttgtgtggttatctaagtgtcttcaaatcttttctaagaacttgttttatgaatttgggcgctccagtattggctgcatatatatttgggacagttcagtcttcttgttgaattgaactctttatcattatgtaatgcccttcattgttccttttgattgtcattaaaatctgttttgtctgaaataagaatagcaactcctattcttttgtgtttccatttgcttgagaaattttactccacccatttactttgagcttatgggtgtcattgcatgtgagatgggtctcttgacggcatacatttgggtcctgcttctttatccagcat

SEQ ID NO: 379412 - DNA, 581 bp, Homo sapiens
ggttggtgtgattttggttttcaaaaagttgttgagaattgctttatggctgggcatgtggtcagttttagaatatgtaccacgtttagatgaaaagaatgtatattcttttactgttggcttgagtgttccataatctgttaggtccatttggtgaagtgtcaagtttaggtaccaaatatctttgttagctttctgccttgatgatccacctaatactgccagtgggttgttgaagtctcctgctattgttgtgtggttatctaagtgtcttcaaatcttttctaagaacttgttttatgaatttgggygctccagtattggctgcatatatatttgggacagttcagtcttcttgttgaattgaactctttatcattatgtaatgcccttcattgttccttttgattgtcattaaaatctgttttgtctgaaataagaatagcaactcctattcttttgtgtttccatttgcttgagaaattttactccacccatttactttgagcttatgggtgtcattgcatgtgagatgggtctcttgacggcatacatttgggtcctgcttctttatccagcat

SEQ ID NO: 379413 - DNA, 581 bp, Homo sapiens
ggttggtgtgattttggttttcaaaaagttgttgagaattgctttatggctgggcatgtggtcagttttagaatatgtaccacgtttagatgaaaagaatgtatattcttttactgttggcttgagtgttccataatctgttaggtccatttggtgaagtgtcaagtttaggtaccaaatatctttgttagctttctgccttgatgatccacctaatactgccagtgggttgttgaagtctcctgctattgttgtgtggttatctaagtgtcttcaaatcttttctaagaacttgttttatgaatttgggcgctccagtattggctgcatatatatttgggacagttcagtcttcttgttgaattgaactctttatcattatgtaatgcccttcattgttccttttgattgtcattaaaatctkttttgtctgaaataagaatagcaactcctattcttttgtgtttccatttgcttgagaaattttactccacccatttactttgagcttatgggtgtcattgcatgtgagatgggtctcttgacggcatacatttgggtcctgcttctttatccagcat

SEQ ID NO: 379414 - DNA, 518 bp, Homo sapiens
aagtgttgggattacaggtgtgggccaccacactctgctaagatctttatttctttgtattgcttcaagttaatgtctagtgtcctttcatttaactctgcaggacttcctgaaacatttattgcggggcaggtatagtggtaaaaacccccctcagcttttgtttatctgggaacgccttaatttcttcatcacttttgaaggacagttttggcagatataggattcttggctgacagtttttttcttttagcactttgaatatattaagccactcttctattttcaaaagtttctgatgagaaatcttctggtaatcttattgaggaccccttgtatgtgacaagtcacttctcttctgtcttactgctttcaaaattctctcttcatctttgaattttgacasattggttatgtgtcttggtgtggctgtctttgagttcatcttacttggagtttgctgagcttcttggatgtctatatttatgtctttcatcaaatttgggaagttttcagcc

SEQ ID NO: 379415 - DNA, 539 bp, Homo sapiens
cagttttcacctggtgcttgccttggccaaggctggactaaaaagtgagctaagaggctgtgagatgaggacgaagtagagagtcataaaacagcccgtgtggtcatggaccctatttaatgaactcagacactaggcaattacaaagaatatagtgtgataagtgataaggaaatagagagagtttatcagttagaattgggatacatgcaacagaaaccctacagtagaggcttaacccagtggtttaaaaataaacctatttttctcatgtaaaaagaagttcagagcgaggaagtttggcactcarggaagtcatccagtaccaggctccatccagcttcctgctcttccatccttagtgtctggctttcatcttcatagttggtctgattgtgttctaggcaggaagacagggaagacaggcagaggacatgtgccagctgagtctgtttttattaggaaaagcatagctttcttggaagcccatccaacaggattctgcttacatatcattgagtgtagtagctcacgtggtc

SEQ ID NO: 379416 - DNA, 471 bp, Homo sapiens
aacttctaaaactcaacaacaagaagacaacctgattcaaaatgggcaaaagtcttaaggtgactcaccttctttgcgggatgcctgggagttgccatctgctcatccccattggccttaaaaagccagtggaccaaaaggtggcagtcttttttttctacaaacaggaattggaagcagtggctggcaggccagtgcgatctctggttcctgtctatttatgagcctactctctrtgagtcctgtggtggcctcagagctggcagaagcacactgggtttgtccctgcctccctccaactatgagttgggccatactaaactgcccaccatattgaaaaaaaaaagttttaatgggcaaaagatttgaacagacatttctttaaagaaaatacacaaatagccaataagcacatgaaaagatgttcaacattactaatcactggggaaatgcaaatcaaaacaatgagat

SEQ ID NO: 379417 - DNA, 527 bp, Homo sapiens
caataagcacatgaaaagatgttcaacattactaatcactggggaaatgcaaatcaaaacaatgagatatcacctcacacccattaagagggctactgccaaaagaacagaacagaacagaagtgttggagagggtgtggagaaattgggacccttgtgtactgttggtgaaaatgtaaaatgttacagccgctgtgaaaaacagtatgacagttcctcaaaaatttaaaaattggattaacttatgatccaggaattctatttctgtasccaaaaaaagctgaaagcagggcctcaaaggatatttgtatacccatgttggtagcagcatttttgagctaaaccatgaaagcaacccatggtccatcaatggatgaatggataagctaaatgtggtatatctgtacaatgaaatatatttcaccttaaaagggaaggaaattctgatgtcggctacaatatagatgaatcttgagaacattatgtgaagtgaaataagccagtctctagcagacgagtactgtatg

SEQ ID NO: 379418 - DNA, 593 bp, Homo sapiens
atccagtaaggaaagttatctagaaattaataatgaaggtgtgattgaaccagacactgatgcccctcaagaaatgggagatgaaaatgcagagataacagaggagatgatggatcaggcaaatgataagaaagtggctgctgttgaagccctaaatgatggtgaactgcagaaagccattgacttatcacagattccatcaagctgaatcctcacttggctattttgtatgccaagagggccagtgtcttcatcaaattacagaagccaaattctgccatccgagactgtgacagagtcattgaaaaaaatcctgattcmacctaggacacaggaaattacagaacatcggagaaagtatgagcgaaaacgtgaagagcgagagaccaaagaaagaatagaaagagttaagaagactcggaagagcatgagagagcccagagggaggaagaagccagacaatagtcaggagctcagtctggcttttttccaggtggctttcctggggaaatgcctggtaattttcccagaagaatacctggaatggagggggcatacctaggatggccagaaggcctggacccaatgaaatt

SEQ ID NO: 379419 - DNA, 593 bp, Homo sapiens
atccagtaaggaaagttatctagaaattaataatgaaggtgtgattgaaccagacactgatgcccctcaagaaatgggagatgaaaatgcagagataacagaggagatgatggatcaggcaaatgataagaaagtggctgctgttgaagccctaaatgatggtgaactgcagaaagccattgacttatcacagattccatcaagctgaatcctcacttggctattttgtatgccaagagggccagtgtcttcatcaaattacagaagccaaattctgccatccgagactgtgacagagtcattgaaaaaaatcctgattccacctaggacacaggaaattacagaacatcggagaaagtatgagcgaaaacgtgaagagcgagagaccaaagaaagaatagaaagagttaagaagactcggaagagcatgagagagcccagagggaggaagaagccagacaatagtcaggagctcagtctggcttttttccaggtggctttcctggggaaatgcctggtaattttcccagaagaatacctggaatggagggggcatamctaggatggccagaaggcctggacccaatgaaatt

SEQ ID NO: 379420 - DNA, 514 bp, Homo sapiens
gctcataaaaacagattgctgagatttattcccagagtttctgtcaagagatatgaagtggggcttgcaatttgcatttataacaagtttccaggtgatgctgatgctgctggtccaggagccacattttgagaaccacaattataatgaattcctgtttccatcctcagctaataatcaacacatgaccaacttggtttcattcatactctccactcacgttcccctcctttccaatgtaaggtttaggagcaaattccacacattttatactttcatctataggctcttctgaatgtatctctgaaacagagattggcagaattcatggartcgcctgtttttgtaaataatgttttattggaacacagtcacacctatttgtttatgtgtttatggctgctttcaggctataaagatatagttgagtagttgcaacagggactgtagacacactgccttttcatgctaaaatccgttttcatgctgctgataaagacatacctgagactgg

SEQ ID NO: 379421 - DNA, 514 bp, Homo sapiens
gctcataaaaacagattgctgagatttattcccagagtttctgtcaagagatatgaagtggggcttgcaatttgcatttataacaagtttccaggtgatgctgatgctgctggtccaggagccacattttgagaaccacaattataatgaattcctgtttccatcctcagctaataatcaacacatgaccaacttggtttcattcatactctccactcacgttcccctcctttccaatgtaaggtttaggagcaaattccacacattttatactttcatctataggctcttctgaatgtatctctgaaacagagattggcagaattcatggaatcgcctgtttttgtaaataatgttttattggaacacagycacacctatttgtttatgtgtttatggctgctttcaggctataaagatatagttgagtagttgcaacagggactgtagacacactgccttttcatgctaaaatccgttttcatgctgctgataaagacatacctgagactgg

SEQ ID NO: 379422 - DNA, 596 bp, Homo sapiens
ctgcaaacaaatcaaacaaagcaacctttccatccatccttatgtcaatttataaaaataagtttctggaggggtcactagcttgtcaatttcacagtaagatcattgcttcccaaactttaatgagcagatttactacctgaaagtatctcgttaaaattatcaaaagacaaaattacaactaattaagtttaaagatctaatttgctttattagcgattcatgaatcaggcagtgtctcatctataaaaatagataggcgctccgatgaactgagcagatgagattggctttataggcaagaaaataytgaagaaagcagaaacggaacaaaaagcaaattggtcatttaaaagttactttccttatacggttaatatagaggttacttccttatcatgctggcttaggtaactgggccccttctgattggttgctgtgaatttcctggttttggaaaactggtcggtttcaaagtccagtttaattacatggcacctagcataagtgactccattctggtttgggctggtctattgggcctagtgcaggagctcagtccaaaacaatggccttccatgaatttcactgaatga

SEQ ID NO: 379423 - DNA, 464 bp, Homo sapiens
agggatggaaaaggtgctccaagtctgcaaacctaagggcctgtctagcaatgccctcagagttcagcccatggaggtccagcctagactggccttaacctctcactaagttatgttttgtaggttgtactagaagtcactgaggtttggagaactataaacatttttaattcaaatatgttatctggcaaaataatatgttatgccagcatttttcaaatattttagccatagaaacctttatttaaataaagtactttgatatacgttatgattggccaattaaatataatatgaattttaatttttttattaaaaataataaataaaatattttaggaaaccccaaagagattaaagtggatctactgaaattgaagggagtggggagaaagtggaccccaatcagttcaagttacaaagsggtcctcaagagaagaaaaacagcgtcagaacaagagaga

SEQ ID NO: 379424 - DNA, 597 bp, Homo sapiens
ctctctctcagctttgcttgaaggtttttagtgggttccttgccattmatacccaattatcttagtgatagcagcactcccaggaattgaagtctcataagtggttgggatggaattgacaccacagccccacaaacaactctataactgtatggattttagtggtttctgtacaaacgttcagcaactgggcagaagctggtcatcatacaatgttgttaaagaaaaagaaagatacatgagaaggaaggtcatgttatttaaatctagattggttcattgccctctcactgatagaggggttaagcaacaaggtaaagataaataaatatctagggaaacgtgattatatacagaaaacattctgaatatgaaaggaaatagtttgtaatgtgaaaacacaatgggccacagacttaggaaagctagttgagaaaaaaatctctatttgtaaaggatctaatggatctcagaggaaaacctggcagagactggggcgtcagaattagtggctctttttcccagagttaaggctagttcaggataaaagtctacaagagaaaagtttgctctctataataccatttcatcaataac

SEQ ID NO: 379425 - DNA, 597 bp, Homo sapiens
ctctctctcagctttgcttgaaggtttttagtgggttccttgccattcatasccaattatcttagtgatagcagcactcccaggaattgaagtctcataagtggttgggatggaattgacaccacagccccacaaacaactctataactgtatggattttagtggtttctgtacaaacgttcagcaactgggcagaagctggtcatcatacaatgttgttaaagaaaaagaaagatacatgagaaggaaggtcatgttatttaaatctagattggttcattgccctctcactgatagaggggttaagcaacaaggtaaagataaataaatatctagggaaacgtgattatatacagaaaacattctgaatatgaaaggaaatagtttgtaatgtgaaaacacaatgggccacagacttaggaaagctagttgagaaaaaaatctctatttgtaaaggatctaatggatctcagaggaaaacctggcagagactggggcgtcagaattagtggctctttttcccagagttaaggctagttcaggataaaagtctacaagagaaaagtttgctctctataataccatttcatcaataac

SEQ ID NO: 379426 - DNA, 522 bp, Homo sapiens
tgaccatgcttcgtttaagtaaaattcagtgcaaatagtgcaagcaaatgttttccagtgygctatgtcacttttcaaagctgtaactactggaaatgctacatctcttgcacttacctgggttatccacaaagacggctaaaataactgtaagtcaatatgtatcaggtaaacacattggactacgcccaggcagctttcaaatagatgacacaagactagggatgtgtccagacatgttctgaacaacaagcattcctctgttttgatataatctgcaaaagttttctgacgcattatttatccttgttaaaaataaaccagaaaccttaattgctaatattatttcaaaactgtgcctttcctatgtggctttacagagggttaaaagaatgaaggaacatatttgaaaaggggagacaagacgaaagacacaatcagaactgcattttttaaaaaattctattttggatttttttttaactttttcataattcagagttttacatgaattccactatc

SEQ ID NO: 379427 - DNA, 522 bp, Homo sapiens
tgaccatgcttcgtttaagtaaaattcagtgcaaatagtgcaagcaaatgttttccagtgtgctatgtcacttttcaaagctgtaactactggaaatgctacatctcttgcacttacctgggttatccacaaagacggctaaaataactgtaagtcaatatgyatcaggtaaacacattggactacgcccaggcagctttcaaatagatgacacaagactagggatgtgtccagacatgttctgaacaacaagcattcctctgttttgatataatctgcaaaagttttctgacgcattatttatccttgttaaaaataaaccagaaaccttaattgctaatattatttcaaaactgtgcctttcctatgtggctttacagagggttaaaagaatgaaggaacatatttgaaaaggggagacaagacgaaagacacaatcagaactgcattttttaaaaaattctattttggatttttttttaactttttcataattcagagttttacatgaattccactatc

SEQ ID NO: 379428 - DNA, 570 bp, Homo sapiens
tgcccgcctcagcctcccaaagtgttgggattacaggctgagccaccgtgcctggccggtaactagatcttatacttctgaccttttcatcattttagcagcaaccgatttcctttattgggccatcacttattcattcaacaaatgagttaagttcccagcatcatgcatctggctgaggtcaggctcaacaaagggccatgcctattcttactcaatcttggcactgtattccttaccatttctttctgccttttgaaatgcccaagtataactttgccttgagtttccaagacaagctcaagctcctttgtcttctgagttgatgcaatgttggattaccaaataaagctccagatgccaatcctttcagtaagatctgatgaggttttgttaaagctgacaaaagaaatttcaaagaaatactgtcgacactgctgaacagtagttaataatgaagcttacatcactcaagccttggcaagtgaaatagtttgtcctgcagtraaaaaaaggccttaaactgggtagtgacagcagcaaaattctcaagtttgcatctcaggtgaa

SEQ ID NO: 379429 - DNA, 581 bp, Homo sapiens
gcaattacatttatcagtgtatcctctgcatatcccactccctctccggggctcgttgccagcaggcctcttattcctctgctacacagggacataaatctctttgcaggaagcagaaactaaactaggtgcttaagagcctcggcagagaaattcagtgccactcagctgttgatttgctgatgataaaacgcactcctgatttgcaagcctggaggtccctctctaactctgcagttctctgtgccctgggacagccttcatgtggcctccctgtggcctccagggtacagtaatgcattgtatagatttcaccgcaagtaaaggattcagaatccttgccttggagaggccacaagatgctcatttattataaaatatcctctagtcagatgataaaattccaccattaaggattcatgccctargataaatgtcactctcttcctgcagccttctttctaggatgcaaacctctgggaggtaagaatgtggagggggtaaatgaatggaggaaaggacaaagaagagggagctatagagtttgagttttgggggagggaaacacaatctttgcttcc

SEQ ID NO: 379430 - DNA, 581 bp, Homo sapiens
gcaattacatttatcagtgtatcctctgcatatcccactccctctccggggctcgttgccagcaggcctcttattcctctgctacacagggacataaatctctttgcaggaagcagaaactaaactaggtgcttaagagcctcggcagagaaattcagtgccactcagctgttgatttgctgatgataaaacgcactcctgatttgcaagcctggaggtccctctctaactctgcagttctctgtgccctgggacagccttcatgtggcctccctgtggcctccagggtacagtaatgcattgtatagatttcaccgcaagtaaaggattcagaatccttgccttggagaggccacaagatgctcatttattataaaatatcctctagtcagatgataaaattccaccattaaggattcatgccctaggataaatgtcactctcttcctgcagccttctttctaggatgcaaacctctgggaggtaagaatgtggagggggtaaatgaatggaggaaaggamaaagaagagggagctatagagtttgagttttgggggagggaaacacaatctttgcttcc

SEQ ID NO: 379431 - DNA, 594 bp, Homo sapiens
ttggctctttaaagagaggtggccccaccctctcccacaggctgcagagtcctggccgacatatcaactcggtggttaagagcacctaaagatgttttttatgggaccttttacaagggcaaaactcatttaaagcctgcacctttgaaagtcagattcctggagaaatggtttacagccttgagcatggtaaatggtaaaaaccattaagcttgcaaaaatatatggataaaataatgaaagggggctcagctgctgaattaatacctttatgtactcaaagcagtttaactgccaaagtgctagcttgtatatccgtggaaragaaatgagaaagaagtaagggagatggagactccaagttatcaagatggccaataaacatgagaactgtgaaatgctgagttgacagccgtagagatacactttgcctgtgaagcagtaatcagcctcattcacaaaatagaactgtcactgttagaatccaatggattctatatgagcagggaagcaaagaatcttaatgaagcttcctcattttacatggatttggtagagctccttaggttctgtatttgtttgctagggctgcca

SEQ ID NO: 379432 - DNA, 558 bp, Homo sapiens
ctgcagaacgatttgtcattgtgtcatgctgatttataacaaagttgggggattagcatgttaccatcttcccctactagactgctggcaggggttacatttggttcatcattgtatccaccgtacctagcatagtacaagagctcacacatctgtttcagggagaaaaacacaaagaactaatgaaaaattacagtctacaggagtaagatctcttagctcaggcgtgaagaaattcagascacaggtagattaattaactccaggaaggaataggaaaatatcttccactgatactacaagaaaaagagaggacagatgtagaaataaaattagatcaaagtgatggagaatgaggaagggggcatttgtgccagggtccacaatttgcccaatttcaggctttccatggcaaggtctgcagggaggagcaagattggatggaagcaaaggtggaggctggaagagagcaaggatggtccagaaaagccactgtggtgagaaagtcagaaagttcattaaagaaatacagaaaagtggccgggcacggtggctcac

SEQ ID NO: 379433 - DNA, 558 bp, Homo sapiens
ctgcagaacgatttgtcattgtgtcatgctgatttataacaaagttgggggattagcatgttaccatcttcccctactagactgctggcaggggttacatttggttcatcattgtatccaccgtacctagcatagtacaagagctcacacatctgtttcagggagaaaaacacaaagaactaatgaaaaattacagtctacaggagtaagatctcttagctcaggcgtgaagaaattcagagcacaggtagattaattaactccaggaaggaataggaaaatatcttccactgatactacaagaaaaagagaggacagatgtagaaataaaattagatcaaagtgatggagaatgaggaagggggcatttgtgccagggtccacaatttgcccartttcaggctttccatggcaaggtctgcagggaggagcaagattggatggaagcaaaggtggaggctggaagagagcaaggatggtccagaaaagccactgtggtgagaaagtcagaaagttcattaaagaaatacagaaaagtggccgggcacggtggctcac

SEQ ID NO: 379434 - DNA, 569 bp, Homo sapiens
ctgtctgtattttctcctctgctctctgctccccatcaacctttatgagttgtccctttcccagacctccatggtgtaaccatcttcaggatctcagcacccctgttagcacaatgtgagccgcacctacctctgtgcccaccatagtagacttagtgggtaccagcccacatcagagcaaaaagtctcctcccagggatgcaggcctaagagaattcagtgttagcctggattgtcttctaaagaaagagatgtaaacctgggagtggtgctggtcaaattcctccctgtggagtagggagatgagyaagcagatgggcagaaagagaaagagggatcagagaagactgaagaatgggcaagcagaagatagcagaggagagatgaaaaacaagacctattggagttgcattgagcccctgtgtcccagctcccaatccaattgcttttcaacatgttgcaagggacacagctgtaaaggtgtccttgcactcttggccctctgcttcctataggtggatccagatgctaaacttccaggaggattgcacctatacaatgatccacag

SEQ ID NO: 379435 - DNA, 548 bp, Homo sapiens
tggttctttgtatgtctctctctttcagctagaaattgatttccttgatgctgagttcatatcgtctctgtgtcttcttcatctgtcagtgtcctggcacccacacattagtaatttggagagagtttaagaaagggactatttacaaagatgtgagctgggatttggaaaataaaagcaatcatagagtgttcccccttcccctctctcaccccccctcaccatcactgacccccacctacttaccaaccctaagacctgggcagttactggaacccttccacaatcacagaaagcaggatggatggggctytgccaactgacaggagatgagccctgatgttccacagtgaacaggtctacgcaaatctattcctacagtctaaggaagctaagaggccaaagaaaaaggctgacaaatcattcttagtaatatttactaggaacttacagacagaagccatgtttgtgtgtcaggtggcagtgagacgagatggtggattcctgtgctatcaaccttcagacccagggcttatgtaccatgggga

SEQ ID NO: 379436 - DNA, 548 bp, Homo sapiens
tggttctttgtatgtctctctctttcagctagaaattgatttccttgatgctgagttcatatcgtctctgtgtcttcttcatctgtcagtgtcctggcacccacacattagtaatttggagagagtttaagaaagggactatttacaaagatgtgagctgggatttggaaaataaaagcaatcatagagtgttcccccttcccctctctcaccccccctcaccatcactgacccccacctacttaccaaccctaagacctgggcagttactggaacccttccacaatcacagaaagcaggatggatggggctctgmcaactgacaggagatgagccctgatgttccacagtgaacaggtctacgcaaatctattcctacagtctaaggaagctaagaggccaaagaaaaaggctgacaaatcattcttagtaatatttactaggaacttacagacagaagccatgtttgtgtgtcaggtggcagtgagacgagatggtggattcctgtgctatcaaccttcagacccagggcttatgtaccatgggga

SEQ ID NO: 379437 - DNA, 566 bp, Homo sapiens
tgctttctataaccctcttcacagtagattaattctcttcttctcatgagtccaatccatgtagagagtccctccatgggaccaggaagaggcaaaggagtcatctgccttggacacaaaatttaagggcatgccaaaagytttagtcatcaagataaagaagaagaatgacgagggttttcatcaccctcttaaataaatttcacatctattaaaatattatttatctggatgactgaacttattggtatctcttggaagttggcaccaatggtgagtacctcactcgcctcccccctggagtctacaactgctccttgcctgtgaaatagcaggtatcacagcttctgggtctgtgacattctcacatggtgagtgtgtaatatctgctcttttctttccacactcagtatgtctcagtatcaaaaatctgcattataggtaaatagaatggaaatgttcttaaggatttggggttcttcagttacctgctcccttccatgttccttaccaccagcctgccacaaaggctcttccaatccttaagtccacaggaaaaaacaaca

SEQ ID NO: 379438 - DNA, 497 bp, Homo sapiens
tgtatattagccttgtatcctgtactcttgatgtaattacttattagttctaagagcttttatttgttctttggaattttctgcatattcttagttaaatttgtatttcagataaacaacaaagttttcttttcttagtatagcatgtcccaaatagtgcatcatacatasttatatttttaaaaaatgttgcttctctgaaattcaaaattaactgggtgccttgatttttattcattaaatatggcaacttgatttatcatctcaccaagcccatttctgcttcaaatagtttcatcaattagtacctcttctgggaacattctttttcctattttgcatggttggctgcttcttgttgttcaaaattaaatttaaatgttatctcctcagacgagcttccctaacccaatccaaagtggcctccccgtccttctctcttacatctgcctatgttaatgctttgcaatggcagtcattccttaacaatttattga

SEQ ID NO: 379439 - DNA, 628 bp, Homo sapiens
tttatttctcttcctctcttctatttagcagtatatgaattgcttttatgttcattaaatttctctgtgatgttaaagcactctatcctataattttgcagtattatctaataagttccaagtatctccaatctaagtatgaattgcttatttttatctccccatatttccaggcttagatttaaatccatattaaaatgcttaacacttgtagtgatttttaaagtttcgtaagtggaacctcatcaatgagcccaaggcaacatttctaaaacatcaaacgccctgacagaaaccgaaagatgtcgtcgctctcaagacgcatggtgtcacataaacacacaaaagatgtgccgggtgcttcattttcatccagatgtcttggcatcatgcagacagaacctttaaggaactgaatgatrggtcataactagcatgtccaccatctgctgcgggacaccacttgtgcgagattttaaaatggactcacagcataagatcaattataatgtctggaagccagccagtttgcctttcctcctggaagacaccaccattggcttttatagcttcctctgaggtcaaaaacattctaacttcatttagtggcatccatacgtgcccaaac

SEQ ID NO: 379440 - DNA, 549 bp, Homo sapiens
ggacagtgttccattgtatggatacataatttgtttttccactcaccagttgatggacatttgagtactgtccagttttggctattgcaaataaaatgctatgaacatctatgtttaattttttgtgtgtacatgtttgttcttggataaataccctggagtgatattactgggacatatggttaatgcatgtttaacttaactttttaaaaaatctgccagttttccaaagtggctatgctattaacactgtgttgcattcccatctgcaatgtatgagagttccagcattctatattgtggccaacatttggtattgtcaacttttaaaaaaacatttagctttctgagcatttcattgtagtttctctggcatatcttcatgataaatgatactgagcatccatcctttcatgtacttattttcactttgtgtgtcttctttcataaagtgcctgtttcaatcttttgccacctctcacaccacccmccccccggcccacccttttttttttttttttggagttggaagattgtgaagattgtgta

SEQ ID NO: 379441 - DNA, 610 bp, Homo sapiens
tgttatagttttagctcttatctttacatttatgagccattatgtgttaatcttcayatgtgctatgagttaagggtggagtttcctctcttcccagatagatgtcctgttgttctaattccattcttgaaaagattatccttttgcatttaccttattgaaaatcaattgaccattatatatgtgacctacttttgaactctctcttccatttcattgatctatgtctctatacttacaataatgcaaagtcttcattactagctttatagtaatattgagatcaagtagtgtaagtattctaaatttgttctccagttaaaaattgttttgactcctctaggttctttgtatgtccaaataaattgagaatcaatatattagtttcattaaaaatgtccagtatgatgtcaattgggatggcactgaatctgtaggtcagcttggagggaattgaaaatctcaacaatttgtcttctaaaacatgaacactctatatccatttatttatatttcctttgatttatttaagcaatgttctgcagttttcagtgtatagtacttgcacattgtatttgtccattctcatgctgctaataaagacataccc

SEQ ID NO: 379442 - DNA, 610 bp, Homo sapiens
tgttatagttttagctcttatctttacatttatgagccattatgtgttaatcttcacatgtgctatgagttaagggtggagtttcctctcttcccagatagatgtcctgttgttctaattccattcttgaaaagattatccttttgcatttaccttattgaaaatcaattgaccattatatatgtgamctacttttgaactctctcttccatttcattgatctatgtctctatacttacaataatgcaaagtcttcattactagctttatagtaatattgagatcaagtagtgtaagtattctaaatttgttctccagttaaaaattgttttgactcctctaggttctttgtatgtccaaataaattgagaatcaatatattagtttcattaaaaatgtccagtatgatgtcaattgggatggcactgaatctgtaggtcagcttggagggaattgaaaatctcaacaatttgtcttctaaaacatgaacactctatatccatttatttatatttcctttgatttatttaagcaatgttctgcagttttcagtgtatagtacttgcacattgtatttgtccattctcatgctgctaataaagacataccc

SEQ ID NO: 379443 - DNA, 553 bp, Homo sapiens
atttttggctctttaatagtagccattctgactggtttaagaaatatcattgcagttttaatttgcatctccctgataattagtgctgtttagcattgtttacttatttatcatccagcattttcccatgtatatcaatacatcaactggtgtaccttaaatacatacaattttatttgtcaactttagctccataaagctgaaaatgtaactcagtcttataataaaaaaatgcatacttatatttctacgtattttatcaatatgtgagaatataaacagaaaaacttgtacgaaaatagttataacagtttgtttataacatttatgttggaaagaaatttaaatttcatcaacaggaaaacaaatatacatattgtcattatttcacataataaactgatttatttacttaataaactgtcatttactgatgttatggattgattcagatatgaaatattcatatgtgtattagtacrtacatatgtatatatatgatgacaaaaccttgagacatgaaattacataaataaacctaaaaataacaaaa

SEQ ID NO: 379444 - DNA, 657 bp, Homo sapiens
attcatatgtgtattagtacgtacatatgtatatatatgatgacaaaaccttgagacatgaaattacataaataaacctaaaaataacaaaaataagttcaaaacagaaaaaattaacctatagtgacaaaaattagaacatttttctatttgcatttttctgatggttagtgatgatgagaatcttttaaaatattgctggccacctgtaagtcttcttttcagaagtgtctgttcttgttatttgcccatttattaatggggttatttgtctttggattcttgatttgtttaagtttcctatacattcttgatatggtttgattgtgtccccacacaaaycttatcatgaattgttgctcccataattaccatgtgttgtgggagggaccccgtgggagataattgaatcatggtgggggggtctttcccatgctattctcatgatagtgaattagtctcatgagatctggtgatttgataaaggggagtttccctgcatgagttctcctctcttgctgatgattttataaaggggagtttccctgcatgtcctctcttctcttgtatgccaccatgtgatatgtgcctttcacattctgccatgatttcgaggcttccccagcaacgtggaagtgtgagtctattaaacctctt

SEQ ID NO: 379445 - DNA, 547 bp, Homo sapiens
tcacattctgccatgatttcgaggcttccccagcaacgtggaagtgtgagtctattaaacctctttctcttgtaaatgcccagtctcaggtacgtctttatcagcagcatgaaaagcaactaatacagtaaattggtatcagttgagtgaagtgctactgataagatactcaaaaacataaaagcgaatttggaactggaaaacacrctgaggatgaaacagtttggagggctcagaagaagacagaaaaaaatgtgtgaaagtttgaaactctctagagatttgttgaatggctttggccaaaatgctgataatgatgtgaacaataaaatccaggctgaggtggcctcagatggagacgaggaacttgttgggaactggagcaaagttgactctagttaggctttagcaaagatactggtggcattttgcctctgccttagagatttgtggaactttgagcttgagagagatgataccaggtatctggcagtaaaaaattctaagcaacaaagtattcaaggtgtgacttcggtgctgttaaaca

SEQ ID NO: 379446 - DNA, 594 bp, Homo sapiens
agtgctgctgtcacttggggcacccagaccagtcttcaggtcggaaagagggtggcaactgaggggtaaagaggaacagcgacttgcccagggccacgcagcaagataatggcagagcagagaggagagcaaacctggatgtctgatcttgcagcgggcaagttgccaggagcctctacctatgtttacgaagtcaagtggaacccaaacaaagatcacccagggcatttgctcagggactcactcagcaaaggcagtgayacctaatgtttctcagcttcagcactagtgaccactgaggtccagataagtctttattgtgggaggctgttctgtgtgttataggacatttagcagcatcgctggcttctaccttctggatgctgggaatatcactctagttgtcaatcaaaaatgtctccagacattgccaagtgccccctggggtgggggattgacggcagtggctctagggccagcctgctcctatgtgctgtgtggccttggacaagttccttacctgctgtgcctcagtctccacacctgtaaagtagagatgacaatactgtttacctcacattgttgtgaatgtct

SEQ ID NO: 379447 - DNA, 533 bp, Homo sapiens
tttgtcatatggctagctagttgtcccagtaacatttatggaacagggaattcctttctcatttcttgtttttttgtcagccttatcaaatatcatacagttgtaggtgtgcagcctcacaccactcaaatttttatcactaaaaagtcaaaaaccartggatactgatggggctgtggtgaaaagaaaacacttacacactgttaatgggaatataaattagtccacccactttggaaagcagactggagatttctcaaagaacttaaaacggagatattatatgaaccagctatccttctacatggtatacactacaaggtaaacaaataattctaccaaagagacacatgtgtgtgtatgtttattgctgtgttattcacagtggcaaagacaaagatcagcccagatgcacatcaatggtagagtggatatataaaatgtggtatatgtaaaatgtataatactacacagccataaaaaagaatgaaatcatgtcctttgcagcaaaacaaatggagctggagttctta

SEQ ID NO: 379448 - DNA, 625 bp, Homo sapiens
ggagatttctcaaagaacttaaaacggagatattatatgaaccagctatccttctacatggtatacactacaaggtaaacaaataattctaccaaagagacacatgtgtgtgtatgtttattgctgtgttattcacagtggcaaagacaaagatcagcccagatgcacatcratggtagagtggatatataaaatgtggtatatgtaaaatgtataatactacacagccataaaaaagaatgaaatcatgtcctttgcagcaaaacaaatggagctggagttcttaatcctcaacaaattaattcaggaaaagaaaactgaacaccacatattctcctaagtggcacctcagcattgagcacacatggataaatatgggagcaacagacactgtggactgctagacagtggagggagagggtgatgaaatctgtattccaaacctcagcatcacccaataatcccatgtaacaaatccacacatgaaccctctgtttctaaattataaagttgaaataaaaaaaaaatcgttatgtgagaactaactggaagcactgaagaggacactttgtggggagatggacctgttcctcaccctcacttagctgctgtagacaagtatgtg

SEQ ID NO: 379449 - DNA, 625 bp, Homo sapiens
ggagatttctcaaagaacttaaaacggagatattatatgaaccagctatccttctacatggtatacactacaaggtaaacaaataattctaccaaagagacacatgtgtgtgtatgtttattgctgtgttattcacagtggcaaagacaaagatcagcccagatgcacatcaatggtagagtggatatataaaatgtggtatatgtaaaatgtataatactacacagccataaaaaagaatgaaatcatgtcctttgcagcaaaacaaatggagctggagttcttaatcctmaacaaattaattcaggaaaagaaaactgaacaccacatattctcctaagtggcacctcagcattgagcacacatggataaatatgggagcaacagacactgtggactgctagacagtggagggagagggtgatgaaatctgtattccaaacctcagcatcacccaataatcccatgtaacaaatccacacatgaaccctctgtttctaaattataaagttgaaataaaaaaaaaatcgttatgtgagaactaactggaagcactgaagaggacactttgtggggagatggacctgttcctcaccctcacttagctgctgtagacaagtatgtg

SEQ ID NO: 379450 - DNA, 625 bp, Homo sapiens
ggagatttctcaaagaacttaaaacggagatattatatgaaccagctatccttctacatggtatacactacaaggtaaacaaataattctaccaaagagacacatgtgtgtgtatgtttattgctgtgttattcacagtggcaaagacaaagatcagcccagatgcacatcaatggtagagtggatatataaaatgtggtatatgtaaaatgtataatactacacagccataaaaaagaatgaaatcatgtcctttgcagcaaaacaaatggagctggagttcttaatcctcaacaaattaattcaggaaaagaaaactgaacaccacatattctcctaagtggcacctcagcattgagcacacatggataaatatgggagcaacagacactgtggactgctagacagtggagggagagggtgatgaaatctgtattccaaacctcagcatcacccaataatcccatgtaacaaatccacacatgaaccctctgtttctaaattataaagttgaaataaaaaaaaaatcgttatgkgagaactaactggaagcactgaagaggacactttgtggggagatggacctgttcctcaccctcacttagctgctgtagacaagtatgtg

SEQ ID NO: 379451 - DNA, 625 bp, Homo sapiens
ggagatttctcaaagaacttaaaacggagatattatatgaaccagctatccttctacatggtatacactacaaggtaaacaaataattctaccaaagagacacatgtgtgtgtatgtttattgctgtgttattcacagtggcaaagacaaagatcagcccagatgcacatcaatggtagagtggatatataaaatgtggtatatgtaaaatgtataatactacacagccataaaaaagaatgaaatcatgtcctttgcagcaaaacaaatggagctggagttcttaatcctcaacaaattaattcaggaaaagaaaactgaacaccacatattctcctaagtggcacctcagcattgagcacacatggataaatatgggagcaacagacactgtggactgctagacagtggagggagagggtgatgaaatctgtattccaaacctcagcatcacccaataatcccatgtaacaaatccacacatgaaccctctgtttctaaattataaagttgaaataaaaaaaaaatcgttatgtgagaactaactkgaagcactgaagaggacactttgtggggagatggacctgttcctcaccctcacttagctgctgtagacaagtatgtg

SEQ ID NO: 379452 - DNA, 199 bp, Homo sapiens
ttactctctgcttgctacttcrcttgcccccagctcccaccctcagccctgtgactggaatgtgtgccccaccgtcattgtcctgagttgaatgtccctttgtgggggaggtgtgggggcagtgtccatccacgaaggggcagaaggagggagccacgggccctgccccacccgctcgggggaagcccagtgggatttg

SEQ ID NO: 379453 - DNA, 208 bp, Homo sapiens
tactctctgcttgctacttcacttgcccccagctcccaccctcagccctgtgactggaatgtgtgccccaccgtcattgtcctgagttgaatgtccctttgtgggggaggtgkgggggcagtgtccatccacgaaggggcagaaggagggagccacgggccctgccccacccgctcgggggaagcccagtgggatttgcatctttctt

SEQ ID NO: 379454 - DNA, 208 bp, Homo sapiens
tactctctgcttgctacttcacttgcccccagctcccaccctcagccctgtgactggaatgtgtgccccaccgtcattgtcctgagttgaatgtccctttgtgggggaggtgtgggggyagtgtccatccacgaaggggcagaaggagggagccacgggccctgccccacccgctcgggggaagcccagtgggatttgcatctttctt

SEQ ID NO: 379455 - DNA, 199 bp, Homo sapiens
ttactctctgcttgctacttcacttgcccccagctcccaccctcagccctgtgactggaatgtgtgccccaccgtcattgtcctgagttgaatgtccctttgtgggggaggtgtgggggcagtgtccatccacgaaggrgcagaaggagggagccacgggccctgccccacccgctcgggggaagcccagtgggatttg

SEQ ID NO: 379456 - DNA, 208 bp, Homo sapiens
tactctctgcttgctacttcacttgcccccagctcccaccctcagccctgtgactggaatgtgtgccccaccgtcattgtcctgagttgaatgtccctttgtgggggaggtgtgggggcagtgtccatccacgaaggggcagaaggagggagccacgggccctgccccamccgctcgggggaagcccagtgggatttgcatctttctt

SEQ ID NO: 379457 - DNA, 573 bp, Homo sapiens
aattactttaagataaatgggttaaactatttaatgaagaccacagaatgaataatagaaaccatcgtctaatcatatgctgtctacataacattgaaaagctcaaatagtttaaaagtgaaagaatcaaaaacgatattacatgcaaatagtaatcaaaggaaaggtggttagtatactcacatcagaaaataacaggcttcacatcaaagttgtaacaagagacaaagacaatgtattgataatagggccaatccagtaagaagatataacaattataagcatatgcatatattacagaagaaccctcaaatatatgaaaatatattaaatatacaatatgttaaaaatggacagaatttaagagaaaatgaacaattctacagtaacaaataaatacctcaattccacattttcaataataaatagacaccagccatcaggcagaacatcaataagtaataggggactggtagaaygctataaacaaactagacctaacaaatatgtatgaaaaactccacccacccccacaaaaaaagcagaatactttcttttcaagtgcacatggaa

SEQ ID NO: 379458 - DNA, 452 bp, Homo sapiens
aaaactataccaggagcctacttcaaaagcttctaaagggaatgacttttccagaaccttatcctatgtgaaggaagacaaatctcccattccagattctctcccattcttccattattatatgaatgagtaaagttagccaaaaggggtaagatgtaygtaaatagtccagggaggccaaaaccacaaaagggagtaacagccaaaaatgagcttttcccctggagatgctttttcaaggtcacagcccagaagaggaagcctattgaatctctaggtttccattggaagaacaggcagtgcttacctgcactgcacaatccattctaactaggatgatgactatggattaaagatgaaagtgtggcaatgcacagactctatctgaggagaatacagaaacactaagacaatgacagagggtgagacaaaggcagtagagcaatgtgaag

SEQ ID NO: 379459 - DNA, 540 bp, Homo sapiens
gaatgacttttccagaaccttatcctatgtgaaggaagacaaatctcccattccagattctctcccattcttccattattatatgaatgagtaaagttagccaaaaggggtaagatgtacgtaaatagtccagggaggccaaaaccacaaaagggagtaacagccaaaaatgagcttttcccctggagatgctttttcaaggtcacagcccagaagaggaagcctatygaatctctaggtttccattggaagaacaggcagtgcttacctgcactgcacaatccattctaactaggatgatgactatggattaaagatgaaagtgtggcaatgcacagactctatctgaggagaatacagaaacactaagacaatgacagagggtgagacaaaggcagtagagcaatgtgaagcctctgacatcatgatttttaagaccaacatcttgtaaatgccatcatagatctcagcttcttttattatggggactttgctggtttcccagctgagaaagtgaaaataacaacctgcatgcacttc

SEQ ID NO: 379460 - DNA, 452 bp, Homo sapiens
aaaactataccaggagcctacttcaaaagcttctaaagggaatgacttttccagaaccttatcctatgtgaaggaagacaaatctcccattccagattctctcccattcttccattattatatgaatgagtaaagttagccaaaaggggtaagatgtacgtaaatagtccagggaggccaaaaccacaaaagggagtaacagccaaaaatgagcttttcccctggagatgctttttcaaggtcacagcccagaagaggaagcctattgaatctytaggtttccattggaagaacaggcagtgcttacctgcactgcacaatccattctaactaggatgatgactatggattaaagatgaaagtgtggcaatgcacagactctatctgaggagaatacagaaacactaagacaatgacagagggtgagacaaaggcagtagagcaatgtgaag

SEQ ID NO: 379461 - DNA, 540 bp, Homo sapiens
gaatgacttttccagaaccttatcctatgtgaaggaagacaaatctcccattccagattctctcccattcttccattattatatgaatgagtaaagttagccaaaaggggtaagatgtacgtaaatagtccagggaggccaaaaccacaaaagggagtaacagccaaaaatgagcttttcccctggagatgctttttcaaggtcacagcccagaagaggaagcctattgaatctctaggtttccattggaagaacaggcagtgcttacctgcactgcacaatccattctaactaggatgatgactatggattaaagatgaaagtgtggcaatgcacagactctatctgaggagaatacagaaacactaagacaatgacagagggtgagacaaaggcagtagagcaatgtgaagcctctgacatcrtgatttttaagaccaacatcttgtaaatgccatcatagatctcagcttcttttattatggggactttgctggtttcccagctgagaaagtgaaaataacaacctgcatgcacttc

SEQ ID NO: 379462 - DNA, 617 bp, Homo sapiens
aggggattgagttcagtcaagggggcttttatcaactcctccattctcctcacaggtgtccattcccaggttcagctgttgcagcctggggctgaggtgaagaagcctgggtcctcagtgaaggtctcctgccaggcttccagatacaccttcaccaaatactttacacggtgggtgtgacaaagccctggacaagggcatagtggatgggatgaatcaacccttacaatgataacacacactatgcacagacgttctggggcagagtcaccattaccagtgacaggtccatgagcacagcctacatggagctgagcarcctgagatctgaagacatggtcgtgtattactgtgtgagagacacagtgcaaaaacccacatcctgagagtgtcagaaaccccaggaaggagacacctgtgctgacacagaggagatgacaaagattattagattaaagatttgcttagaaaatgacattaagtcattaaagaaaaggaacaatattaatgtgtatttgagaaattttaattatttgagagatttttcatacaacatttattctgtaaacaaatttcaatgattagagaatgaatcaaattaatgaaactaatataga

SEQ ID NO: 379463 - DNA, 617 bp, Homo sapiens
aggggattgagttcagtcaagggggcttttatcaactcctccattctcctcacaggtgtccattcccaggttcagctgttgcagcctggggctgaggtgaagaagcctgggtcctcagtgaaggtctcctgccaggcttccagatacaccttcaccaaatactttacacggtgggtgtgacaaagccctggacaagggcatagtggatgggatgaatcaacccttacaatgataacacacactatgcacagacgttctggggcagagtcaccattaccagtgacaggtccatgagcacagcctacatggagctgagcagcctgagatctgaagacatggtcrtgtattactgtgtgagagacacagtgcaaaaacccacatcctgagagtgtcagaaaccccaggaaggagacacctgtgctgacacagaggagatgacaaagattattagattaaagatttgcttagaaaatgacattaagtcattaaagaaaaggaacaatattaatgtgtatttgagaaattttaattatttgagagatttttcatacaacatttattctgtaaacaaatttcaatgattagagaatgaatcaaattaatgaaactaatataga

SEQ ID NO: 379464 - DNA, 607 bp, Homo sapiens
atgtttatggacgcatcaaaactacttatgtacctaatcttctgtaactttattatattaaaaatgagaacacactggtctcctgacccaactatgctaccacgtggacctttctagccttccttccttgactgtccataaccatccactttaaagtgaggaatcctatcccaccaattgccttattattacctggttgcacaattttaggacacatgcatagcggtatcagaaatgtaaagctcattggaaatatgtttatctactagaatagagtgctatgtgtagtttctttacattttaaacatacagaatttcctcattttcaaagttaattagactagcaacttcattttctactttcttcagtgaagtcatttcaattacaccrtataatgtcatttatttgaaattcggtataaaccaaaactatagtcaagtaaacagatagaggatattcaaggaatttagagaatgagtattaaataagtaaaaatggcactgtttaagaatagtaaaattatttttagtgctataaaatggttgagacacgatgcagttaatttgtctaagctcataattgtgtgatggaaaatataaacctaaa

SEQ ID NO: 379465 - DNA, 607 bp, Homo sapiens
atgtttatggacgcatcaaaactacttatgtacctaatcttctgtaactttattatattaaaaatgagaacacactggtctcctgacccaactatgctaccacgtggacctttctagccttccttccttgactgtccataaccatccactttaaagtgaggaatcctatcccaccaattgccttattattacctggttgcacaattttaggacacatgcatagcggtatcagaaatgtaaagctcattggaaatatgtttatctactagaatagagtgctatgtgtagtttctttacattttaaacatacagaatttcctcattttcaaagttaattagactagcaacttcattttctactttcttcagtgaagtcatttcaattacaccgtataatrtcatttatttgaaattcggtataaaccaaaactatagtcaagtaaacagatagaggatattcaaggaatttagagaatgagtattaaataagtaaaaatggcactgtttaagaatagtaaaattatttttagtgctataaaatggttgagacacgatgcagttaatttgtctaagctcataattgtgtgatggaaaatataaacctaaa

SEQ ID NO: 379466 - DNA, 607 bp, Homo sapiens
atgtttatggacgcatcaaaactacttatgtacctaatcttctgtaactttattatattaaaaatgagaacacactggtctcctgacccaactatgctaccacgtggacctttctagccttccttccttgactgtccataaccatccactttaaagtgaggaatcctatcccaccaattgccttattattacctggttgcacaattttaggacacatgcatagcggtatcagaaatgtaaagctcattggaaatatgtttatctactagaatagagtgctatgtgtagtttctttacattttaaacatacagaatttcctcattttcaaagttaattagactagcaacttcattttctactttcttcagtgaagtcatttcaattacaccgtataatgtcatttatttgaaattyggtataaaccaaaactatagtcaagtaaacagatagaggatattcaaggaatttagagaatgagtattaaataagtaaaaatggcactgtttaagaatagtaaaattatttttagtgctataaaatggttgagacacgatgcagttaatttgtctaagctcataattgtgtgatggaaaatataaacctaaa

SEQ ID NO: 379467 - DNA, 607 bp, Homo sapiens
atgtttatggacgcatcaaaactacttatgtacctaatcttctgtaactttattatattaaaaatgagaacacactggtctcctgacccaactatgctaccacgtggacctttctagccttccttccttgactgtccataaccatccactttaaagtgaggaatcctatcccaccaattgccttattattacctggttgcacaattttaggacacatgcatagcggtatcagaaatgtaaagctcattggaaatatgtttatctactagaatagagtgctatgtgtagtttctttacattttaaacatacagaatttcctcattttcaaagttaattagactagcaacttcattttctactttcttcagtgaagtcatttcaattacaccgtataatgtcatttatttgaaattcggtataaaccaaaactatagtcaagtaaacagatagaggatattcaaggaatttagagaatgagtattaaataagtaaaaatggcactgtttaagaatartaaaattatttttagtgctataaaatggttgagacacgatgcagttaatttgtctaagctcataattgtgtgatggaaaatataaacctaaa

SEQ ID NO: 379468 - DNA, 558 bp, Homo sapiens
cggtatctcaggatgacagtgatgaagaaacaagtgcagtctccagcaggcatgtccagcgaagctgaagtgctgaaagcactgaagtcattatctgaacagcacaaagctctggatgaaaaggtgagagcgcgattatgagcagcacttgaaagatgtagtttgttagaagaagaattaggtgtcacacacaaagagctaatgattcttaaacaacagaatagtcagaaaaaaaaaacactaacaggtggagtgcttaacataaaccatgaacaagaaaatacatcaaacatgaayggaaagagatcttctgatggttcttcaagctataaggaagaccttgctaaagtaagtgtggtccaagaaatcataaacagtcaagggagcacagccaaatgaaagagcacctggctgccctctccagtcatgtgacagagctggaagaggatctgaaagattttcctcaaatctagaaaagatttcatcaaatttgaagaaatgaactccaaattgcaagaagatgtccataaagccatggcccaaaaggaagacatgaag

SEQ ID NO: 379469 - DNA, 558 bp, Homo sapiens
cggtatctcaggatgacagtgatgaagaaacaagtgcagtctccagcaggcatgtccagcgaagctgaagtgctgaaagcactgaagtcattatctgaacagcacaaagctctggatgaaaaggtgagagcgcgattatgagcagcacttgaaagatgtagtttgttagaagaagaattaggtgtcacacacaaagagctaatgattcttaaacaacagaatagtcagaaaaaaaaaacactaacaggtggagtgcttaacataaaccatgaacaagaaaatacatcaaacatgaacggaaagagatcttctgatggttcttcaagctataaggaagaccttgctaaagtaagtgtggtccaagaaatcataaacagtcaagggagcacagccaaatgaaagagcacctggctgccctctccagtcatgtgacagagctggaagaggatctgaaagattttcmtcaaatctagaaaagatttcatcaaatttgaagaaatgaactccaaattgcaagaagatgtccataaagccatggcccaaaaggaagacatgaag

SEQ ID NO: 379470 - DNA, 552 bp, Homo sapiens
aatggtaaatacatagtgaaattcagaatacactaataccataacgttagtgtacaaatcacttttaactctagtataaaagctacaaaataaaagcattaaaataagtatacctacaataatttgttaatgaatacacagtataaaaagttataaagtataacatatacagtaataaaatgtgtgaaagggagaaaaactgtggagtttttttctatggatagatgttaaattgttatcatcttaaactagactkttacaaatataagatattttatctaagtctcctgataacctctaggaaaaaactgtagtagatacacaaatggaaaaagccatcaaaacataaaaacaacaaaaacaaatccaaaaattaacagaagacagcatgagaaaaaaagaaactataaaacagaaaacaataaaactgtaatagtaaatccttatgtatcaataattactttacatataaagagattaaattatccaataaacagatactggtatagactgaatgtcacctccaaaatttaggataaaatttaatagcca

SEQ ID NO: 379471 - DNA, 613 bp, Homo sapiens
actagactgttacaaatataagatattttatctaagtctcctgataacctctaggaaaaaactgtagtagatacacaaatggaaaaagccatcaaaacataaaaacaacaaaaacaaatccaaaaattaacagaagacagcatgagaaaaaaagaaactataaaacagaaaacaataaaactgtaatagtaaatccttatgtatcaataattactttacatataaagagattaaattatccaataaacagatactggtatagactgaatgtcacctccaaaakttaggataaaatttaatagccattgtgatggaattaagaggtgggatctttaagaagtggttaggccattgggactctgccctcatgaattaatgtccttatgggagtgtgttagttatcacaaaagtgagtctgttataaaagggagctctcttctccctcaggcctttggccatgttactatgcagcaaaaaggccttcaccagataacaatgtcgttttctttgccttccaagctcctggaatcatgagccaaataaactacccctgtttataaattagccaatctgtggtattctattatagaaaacaaaacagactagaataaac

SEQ ID NO: 379472 - DNA, 581 bp, Homo sapiens
tgacaagggcaccaagatacacaaaggggaagtatagtctcttcaacaaataatgctgaaagaaagtagtcatctgcaaaagmataaaatttacttatactatgtacaaaaattaactcaaaagaattaacacttaaatgcaaaaccagaaactgtataacttctagaacaaagcataaggaaaaatctctttgacactggccttggcaataatttttctggctatcacatcaaaaaatcacaagcaacaaaaagcaaaaaataaaaacaagtagcattaaatgaaacaaaaaagtgtatgcacagcaaacacagaacatgaaaaagcgacccagggactgggagaaaatagatctgataagagttttatatccaaaatattaagaatctcacacaattcgatagcaaaaaaaaaaaaaaaagtaaatctgacaaaaatttgcaaaggactcaagtagacatttctcaaaatatgacatggaagtggcaaacaagtttataaaaaggttctcaatgttattattcatcaggaaaatgcaagtaaaaccataataagatatcatctcacacttgttagtata

SEQ ID NO: 379473 - DNA, 419 bp, Homo sapiens
gaggctttggtgtcatttgtagctcccagactggaggcagcaagggccttttgttccccccaagggttcctggcagcagctctgggccttgcattgtccccttcttggcctccccagctcctctgccccctgtcccccctaacacccctcccctgtgtccccagcatgtccccttaatcgtggctgcaygctgtcacattgtggaggcacgagggctggagtccacaggcttttaccgagtgcctggcaacaatgcagtggtgtccagcctacaggagcagctcaatcctgggcctggtgacatcaaccagcaggatgaggtgggtgaagctggggggtctgtggaaggggggctgagatggtgtgtgggtggtgctccgcttggagagttctgtggtctattgtgttgcatgcattgt

SEQ ID NO: 379474 - DNA, 419 bp, Homo sapiens
gaggctttggtgtcatttgtagctcccagactggaggcagcaagggccttttgttccccccaagggttcctggcagcagctctgggccttgcattgtccccttcttggcctccccagctcctctgccccctgtcccccctaacacccctcccctgtgtccccagcatgtccccttaatcgtggctgcacgctgtcacattgtggaggcacgagggctggagtccacaggcttttaccgagtgcctggcaacaatgcagtggtgtccagcctacaggagcagctcaatcctgggcctggtgacatcaaccagcaggatgaggtgggtgaagctggggggtctgtggaaggggggctgagatggtgtgtgggtggtgctccgcttggagagttctgtrgtctattgtgttgcatgcattgt

SEQ ID NO: 379475 - DNA, 520 bp, Homo sapiens
gccgttagttcttgtactcaacaaccatttattttagagtagggtttctcaacctcagtggacattttgggaagaacaattatttgttgtgtggggttgccctgtgcactggaggaaatttggaatcatccctggcctcgatccactagatgmaagtgtcacctcccagttgggaaaatcaaaatggctccagacattgtcaaatgtcctctgggggtggagtgggagtttgggggacaaaattgcctccttctgttagaactactgatttagggccatgtaagtatcaggttaactgtcctagctaggtgataggagcacagtgggaaatgagacagacgggatcctggctcctcctggagcttacagtcctgcagggagacaggcatgaacatagaaacaaaagcagaaaataatgacaaattgggttaagcgccatgaaggaaacaaagtcagggctggggtgcaggtgacagggcagtggtgaaggtggctgctttagctatgagggtcagagaag

SEQ ID NO: 379476 - DNA, 520 bp, Homo sapiens
gccgttagttcttgtactcaacaaccatttattttagagtagggtttctcaacctcagtggacattttgggaagaacaattatttgttgtgtggggttgccctgtgcactggaggaaatttggaatcatccctggcctcgatccactagatgaaagtgtcacctcccagttgggaaaatcaaaatggctccagacattgtcaaatgtcctctgggggtggagtgggagtttgggkgacaaaattgcctccttctgttagaactactgatttagggccatgtaagtatcaggttaactgtcctagctaggtgataggagcacagtgggaaatgagacagacgggatcctggctcctcctggagcttacagtcctgcagggagacaggcatgaacatagaaacaaaagcagaaaataatgacaaattgggttaagcgccatgaaggaaacaaagtcagggctggggtgcaggtgacagggcagtggtgaaggtggctgctttagctatgagggtcagagaag

SEQ ID NO: 379477 - DNA, 520 bp, Homo sapiens
gccgttagttcttgtactcaacaaccatttattttagagtagggtttctcaacctcagtggacattttgggaagaacaattatttgttgtgtggggttgccctgtgcactggaggaaatttggaatcatccctggcctcgatccactagatgaaagtgtcacctcccagttgggaaaatcaaaatggctccagacattgtcaaatgtcctctgggggtggagtgggagtttgggggacaaaattgcctccttctgttagaactactgatttagggccatgtaagtatcaggytaactgtcctagctaggtgataggagcacagtgggaaatgagacagacgggatcctggctcctcctggagcttacagtcctgcagggagacaggcatgaacatagaaacaaaagcagaaaataatgacaaattgggttaagcgccatgaaggaaacaaagtcagggctggggtgcaggtgacagggcagtggtgaaggtggctgctttagctatgagggtcagagaag

SEQ ID NO: 379478 - DNA, 547 bp, Homo sapiens
  misc_feature (1)...(547): n = A,T,C or G
nnnnnnnnnnnnnnnnnnnnnnnnnnnnnnnnntcactcacactgatgtctctgtgaatgaaaacccaacactgatatccagcagattttcctcttacaagattcatattctctctatctctttctttctctgcatgtctctaactccctatttttctgtgccattactatttattactgaatcatcctgaatcctgycaacagactccatctcacattctgcaaatattctgccttaaagataattaggggcaaactcatccttgcccaaggtgggaaaactttctggacttccactaggtttattagagcctcatatgagaaccatgatcaaacactatgtgtttttggattatacctcaaatctaaaactgttcttcatagtggctatgacattctacattcccatcattaccattatgcaaaacagtgtggtggcttctaaataaattaaaacagacataccatatgaccagcgatccagcttatggaaatatacccaaatgggatgaaattaccaccttgtgaagatacctgctctcctgtg

SEQ ID NO: 379479 - DNA, 562 bp, Homo sapiens
cagcttatggaaatatacccaaatgggatgaaattaccaccttgtgaagatacctgctctcctgtgattattgtagcattattcacaacagccaagatatggaaactaagtgtctgtcgatggacaaatggataaagacaatgtggtatgtgtayacaatataacatgattctgccttataaaataaagagatgctgccattttccacaagatgaatggattcccaccaccactagcaatgcattttacccatttcagcccctccctgggagccggcagatccaggcccagtagtaaggactggttgtgatggagtggccagaaacagtgcaggtgatgcagagggacagtgcaggtgatgcagaggggcagtgcaggctcttcaggtccagggctgactcctgcagctgctcctgggacagggcatgtgagtacatggggaatcagtccctgtcagtcacatgtacctacactcaccccatagacccacatctgagacactcaccctgggggagccgtcaccaggcacaggagaagacagacataatgccatcttcttcgt

SEQ ID NO: 379480 - DNA, 562 bp, Homo sapiens
cagcttatggaaatatacccaaatgggatgaaattaccaccttgtgaagatacctgctctcctgtgattattgtagcattattcacaacagccaagatatggaaactaagtgtctgtcgatggacaaatggataaagacaatgtggtatgtgtatacaatataacatgattctgccttataaaataaagagatgctgccattttccacaagatgaatggattcccaccaccwctagcaatgcattttacccatttcagcccctccctgggagccggcagatccaggcccagtagtaaggactggttgtgatggagtggccagaaacagtgcaggtgatgcagagggacagtgcaggtgatgcagaggggcagtgcaggctcttcaggtccagggctgactcctgcagctgctcctgggacagggcatgtgagtacatggggaatcagtccctgtcagtcacatgtacctacactcaccccatagacccacatctgagacactcaccctgggggagccgtcaccaggcacaggagaagacagacataatgccatcttcttcgt

SEQ ID NO: 379481 - DNA, 562 bp, Homo sapiens
cagcttatggaaatatacccaaatgggatgaaattaccaccttgtgaagatacctgctctcctgtgattattgtagcattattcacaacagccaagatatggaaactaagtgtctgtcgatggacaaatggataaagacaatgtggtatgtgtatacaatataacatgattctgccttataaaataaagagatgctgccattttccacaagatgaatggattcccaccaccactagcaatgcattttacccatttcagcccctccctgggagccggcagatccaggcccagtagtaaggactggttgtgatggagtggccagaaacagtgcaggtgatgcagagggrcagtgcaggtgatgcagaggggcagtgcaggctcttcaggtccagggctgactcctgcagctgctcctgggacagggcatgtgagtacatggggaatcagtccctgtcagtcacatgtacctacactcaccccatagacccacatctgagacactcaccctgggggagccgtcaccaggcacaggagaagacagacataatgccatcttcttcgt

SEQ ID NO: 379482 - DNA, 552 bp, Homo sapiens
acaacaaatgcagcagtgactccaggatgtcaatccataggtttattagtgaaaatgaggtgggttacataaattgttttgagagtattttccttgcttgtagagtcaataccaaggttggcatcaatatagggttaaacagtgatttgctgggaagatgtccttgtagatgtgatttttataaggtcatggtggcttctatcaaaggttgtggttaagcagaatccattcatggtcgttcttgttatcaggagtatgtgcatgggaaacctccttcatggtcattcctagttccwtttgtcagggttttaacacaagtggatctattttgattctgacaactttcacaccctctttctaacactactggtgaggaaggtgactcactctgtggtactttgcacagcacaggataaatttcacatccacatcccattttgaccacacaagctcatcctcttcactactgttggccacttgcattcccaggtgagtctccacatgacacactggagggtgctgagcaatgggagagaggaaagtcctatcagc

SEQ ID NO: 379483 - DNA, 552 bp, Homo sapiens
acaacaaatgcagcagtgactccaggatgtcaatccataggtttattagtgaaaatgaggtgggttacataaattgttttgagagtattttccttgcttgtagagtcaataccaaggttggcatcaatatagggttaaacagtgatttgctgggaagatgtccttgtagatgtgatttttataaggtcatggtggcttctatcaaaggttgtggttaagcagaatccattcatggtcgttcttgttatcaggagtatgtgcatgggaaacctccttcatggtcattcctagttccttttgtcagggttttaacacaagtggatctattttgattctgacaactttcacascctctttctaacactactggtgaggaaggtgactcactctgtggtactttgcacagcacaggataaatttcacatccacatcccattttgaccacacaagctcatcctcttcactactgttggccacttgcattcccaggtgagtctccacatgacacactggagggtgctgagcaatgggagagaggaaagtcctatcagc

SEQ ID NO: 379484 - DNA, 670 bp, Homo sapiens
ggagaagggtcaggaatgaaaactgtgaggttctacacgacactgaccctggcccagactctattggctgtgatcacaattcctaaagaccgtcctagtcagggaatctcactgaggtttctgtcctgagtctgactggagaagactcaccaggtatccctgagtttcctcaatactctgatcctggtgacaatggttgagggcttttcatctctgtaagcatcaatctgtgttttgtgcataggagaataggttttcatattaaaataatcattttaaaaatatgtagagatgacattggtaagcacagaattctgaacttagagagattccctagagaaactctaaaaagatgaagtcccacatcctgacaggaaaccagcctccatctgcaacttgcctctggggatgactctgatcagtgggtcctgtgtgccccccrcagctgatttcccccaagcattctgcagagaggtttgtgtctgggctcacactgacttcccctcactgtgtctcttgcacagtaatacacagccatgtcctcggctctcaggctgttcatttgaagatacaaggagttcttggcattgtctctggagatggtgaatcggcccttcacggagtctgcatagtatgtgccaccaccagtaccaatagctgatacccactc

SEQ ID NO: 379485 - DNA, 560 bp, Homo sapiens
gggtcagggctgggctggttttcatcaggagagggagggctctatttgcatgtcacctactatatagcaagctatggggtgggactcctgaggagagggcagggcccagagtagatgagagcgtcctgggggattttgatgacaatgattgtgtttgggaaaatgctgtcttaatgtgaaattgttgtgcgataaacatttaacaactatcatatttttaattatttttacctatgtgtataaatgatgttatttagcastcagtggtttcttcgtttacagatgtaaaagtgaacccacacatggaggggctatgtatgtgtctaagggcttatatctggcatgagtgagtcctagtacctgggcctatgctcctcacagctggcctcaattgctctcttaaccaactattggacagagctaaatgggcctagtgtggtttgcagaatccacttcctgccacgagaacctgtgtgattttgctgcatttacctaaaaatacggaaacatctaggcatcaggcagataaatttttggtgtatctgatatttaatgtattc

SEQ ID NO: 379486 - DNA, 560 bp, Homo sapiens
gggtcagggctgggctggttttcatcaggagagggagggctctatttgcatgtcacctactatatagcaagctatggggtgggactcctgaggagagggcagggcccagagtagatgagagcgtcctgggggattttgatgacaatgattgtgtttgggaaaatgctgtcttaatgtgaaattgttgtgcgataaacatttaacaactatcatatttttaattatttttacctatgtgtataaatgatgttatttagcactcagtggtttcttygtttacagatgtaaaagtgaacccacacatggaggggctatgtatgtgtctaagggcttatatctggcatgagtgagtcctagtacctgggcctatgctcctcacagctggcctcaattgctctcttaaccaactattggacagagctaaatgggcctagtgtggtttgcagaatccacttcctgccacgagaacctgtgtgattttgctgcatttacctaaaaatacggaaacatctaggcatcaggcagataaatttttggtgtatctgatatttaatgtattc

SEQ ID NO: 379487 - DNA, 560 bp, Homo sapiens
gggtcagggctgggctggttttcatcaggagagggagggctctatttgcatgtcacctactatatagcaagctatggggtgggactcctgaggagagggcagggcccagagtagatgagagcgtcctgggggattttgatgacaatgattgtgtttgggaaaatgctgtcttaatgtgaaattgttgtgcgataaacatttaacaactatcatatttttaattatttttacctatgtgtataaatgatgttatttagcactcagtggtttcttcgtttacagatgtaaaagtgaacccacacatggaggggctatgtatgtgtctaagggcttatrtctggcatgagtgagtcctagtacctgggcctatgctcctcacagctggcctcaattgctctcttaaccaactattggacagagctaaatgggcctagtgtggtttgcagaatccacttcctgccacgagaacctgtgtgattttgctgcatttacctaaaaatacggaaacatctaggcatcaggcagataaatttttggtgtatctgatatttaatgtattc

SEQ ID NO: 379488 - DNA, 560 bp, Homo sapiens
gggtcagggctgggctggttttcatcaggagagggagggctctatttgcatgtcacctactatatagcaagctatggggtgggactcctgaggagagggcagggcccagagtagatgagagcgtcctgggggattttgatgacaatgattgtgtttgggaaaatgctgtcttaatgtgaaattgttgtgcgataaacatttaacaactatcatatttttaattatttttacctatgtgtataaatgatgttatttagcactcagtggtttcttcgtttacagatgtaaaagtgaacccacacatggaggggctatgtatgtgtctaagggcttatatctrgcatgagtgagtcctagtacctgggcctatgctcctcacagctggcctcaattgctctcttaaccaactattggacagagctaaatgggcctagtgtggtttgcagaatccacttcctgccacgagaacctgtgtgattttgctgcatttacctaaaaatacggaaacatctaggcatcaggcagataaatttttggtgtatctgatatttaatgtattc

SEQ ID NO: 379489 - DNA, 580 bp, Homo sapiens
aactgttttatgacataattagcccagaatgtaaaggaatgataggcaacctgctaagagattagaaaaatacccactggtgaaaagtcaccataattagtcctcaatagaagacctgacagcaccatttgtcagagagagttcatcctaaattcacctgggaattgggaggccatctgtgttttttaattggctatagtcaaaggaaaaataaacttcatgtctttatgacaggcagatttgcaacttggagccaggtgcctgccctcctagagaaactgtaggatatggatctatcttctttgctatttacattttatatcaatgattcccagttcctagagaaaggcagtactgagtcaaaaagactgacaaatggcctatttagctgttaagagtgatttagacaggttgtaaaacagaaaaataatttacatatgaaagttttccaaagtaaatgctttaagwaaaaaaaaaagaaaaatttctttccttattttcaagaaggattaagtcttgtatttctaatttgtatttgctcttacaacagccagatctagcgccatggtcttgagctcac

SEQ ID NO: 379490 - DNA, 444 bp, Homo sapiens
tcttggccaattccagcagccatacctcaaccactcatacactcttgagtgtgcacattttgtttaaataagacaaaarcaacctgtaaccaatccagctgtttctgtacctcacttctgatttctgtacatcatttttctaatctataaaccttcttccaccatgtgactgcactgaagtctctttgaatctgctgcgattctgggggctgcccaattcatgaatcatccattgctcaattaatctcattaaccttaatttggctgaaggttttctattatccgcattcctatacaattgaatccctttgttctagaatgaggacactcagaaaaatcttcctttcccaaagtgtctgtctgagacagaaggagagcccatactaccgaaatgcgttcagacccacctccctcatcagcactacagaataaagggattaccta

SEQ ID NO: 379491 - DNA, 444 bp, Homo sapiens
tcttggccaattccagcagccatacctcaaccactcatacactcttgagtgtgcacattttgtttaaataagacaaaaacaacctgtaaccaatccagctgtttctgtacctcacttctgatttctgtacatcatttttctaatctataaaccttcttccaccaygtgactgcactgaagtctctttgaatctgctgcgattctgggggctgcccaattcatgaatcatccattgctcaattaatctcattaaccttaatttggctgaaggttttctattatccgcattcctatacaattgaatccctttgttctagaatgaggacactcagaaaaatcttcctttcccaaagtgtctgtctgagacagaaggagagcccatactaccgaaatgcgttcagacccacctccctcatcagcactacagaataaagggattaccta

SEQ ID NO: 379492 - DNA, 579 bp, Homo sapiens
atccattgctcaattaatctcattaaccttaatttggctgaaggttttctattatccgcattcctatrcaattgaatccctttgttctagaatgaggacactcagaaaaatcttcctttcccaaagtgtctgtctgagacagaaggagagcccatactaccgaaatgcgttcagacccacctccctcatcagcactacagaataaagggattacctaccatacaggggcaagccactgaaaccatgattccagaggcactggtggagccccagaggaaatgggataaaaaccaaggttctcaccaaagttccatcgaaatgtacctcctctctgtcatggaatcaaatccttaatctccagggcatcgcagaagatctagaagacgatgataatagtggagactattggaggtgtgggagggaacacctgggaaaaacaggagaaaatatatgtatttaactcagtagacttcaagctacttacatgttaattaactggaatatttcatagctaaatacctgatctagcatgagaaataatagagatgacacatggagaatgcaacagtgggaagctga

SEQ ID NO: 379493 - DNA, 529 bp, Homo sapiens
aatgcaacagtgggaagctgaggttcaagttctgatgtttgtttactgatatttgtccgctggcatgtccagaacttcatgagtacagaactcctctaatagtgaaacaaacactcacaggacatgcatttttgtttgaaataagtgtaattcagatgctggtaaaattttctcctcagactcctttgcaccagctcagggctgacgtctgtgttgagtgggttctgggcctgccctgcagctctgccctcaccctgctggggaggatgctgtttgggctcacagagcatattctcccaatgttgctctcccagaatgaaagggctgtcccctggttcacaatcctctttcagcagcatctsatgcttttgaaattgtctcttgaaacagtgatttgtcattactatacccagtaaactgcagggagagcccaagcacagattcatgaaaccaccagagagtcacttccctgggactgtcagatgcaatgacacagtcaagatccatggtgagtccagaaactttcaga

SEQ ID NO: 379494 - DNA, 529 bp, Homo sapiens
aatgcaacagtgggaagctgaggttcaagttctgatgtttgtttactgatatttgtccgctggcatgtccagaacttcatgagtacagaactcctctaatagtgaaacaaacactcacaggacatgcatttttgtttgaaataagtgtaattcagatgctggtaaaattttctcctcagactcctttgcaccagctcagggctgacgtctgtgttgagtgggttctgggcctgccctgcagctctgccctcaccctgctggggaggatgctgtttgggctcacagagcatattctcccaatgttgctctcccagaatgaaagggctgtcccctggttcacaatcctctttcagcagcatctgatgcttttgaaattgtctcttgaaacagtgatttgtcatyactatacccagtaaactgcagggagagcccaagcacagattcatgaaaccaccagagagtcacttccctgggactgtcagatgcaatgacacagtcaagatccatggtgagtccagaaactttcaga

SEQ ID NO: 379495 - DNA, 604 bp, Homo sapiens
tgatagttttatcaaggggagttcccctgcacaaactctctcttgtctgccaccatgtaagatgtcccttgctttcctgacatgattgtgaagcatccccagccatgtggaacyataagtccattaaacctcattcctttacaaattacccaggcttggttatgtttttattagtagcaggagaacagactaatacatttattttgccaaagttaagaacccacccatggcaagcctcaggaagtcctgagacatgtgcccaaggtgatagaagtacagcttgcttttatacattttagagagacatgagacatcaatcaatatatgtaaaatgtacatttttttttccttcaagacaggacaaattgagagggggttttgcagtttagaagtagataagacacagtagattgcattgttttaagtcctttatcagcctaccactgaatccacaatttagtcagacttagtgaatcttcattttttcataagtgatactgaagaggaagcaatcagatatgtatctgtctcatgtgggcctcagaggaatgactttgaatagaaagggaggcaggtttgcccaaagccctttccagtaaaacac

SEQ ID NO: 379496 - DNA, 604 bp, Homo sapiens
tgatagttttatcaaggggagttcccctgcacaaactctctcttgtctgccaccatgtaagatgtcccttgctttcctgacatgattgtgaagcatccccagccatgtggaaccataagtccattaaacctcattcctttacaaattacccaggcttggttatgtttttattagtagcaggagaacagactaatacatttattttgccaaagttaagaacccacccatggcaagcctcaggaagtcctgagacatgtgcccaaggtgatagaartacagcttgcttttatacattttagagagacatgagacatcaatcaatatatgtaaaatgtacatttttttttccttcaagacaggacaaattgagagggggttttgcagtttagaagtagataagacacagtagattgcattgttttaagtcctttatcagcctaccactgaatccacaatttagtcagacttagtgaatcttcattttttcataagtgatactgaagaggaagcaatcagatatgtatctgtctcatgtgggcctcagaggaatgactttgaatagaaagggaggcaggtttgcccaaagccctttccagtaaaacac

SEQ ID NO: 379497 - DNA, 604 bp, Homo sapiens
tgatagttttatcaaggggagttcccctgcacaaactctctcttgtctgccaccatgtaagatgtcccttgctttcctgacatgattgtgaagcatccccagccatgtggaaccataagtccattaaacctcattcctttacaaattacccaggcttggttatgtttttattagtagcaggagaacagactaatacatttattttgccaaagttaagaacccacccatggcaagcctcaggaagtcctgagacatgtgcccaaggtgatagaagtacagcttgcttttatacattttagagagacatgagacatcaatcaatatatgtaaaatgtacatttttttttccttcaagacaggacaaattgaragggggttttgcagtttagaagtagataagacacagtagattgcattgttttaagtcctttatcagcctaccactgaatccacaatttagtcagacttagtgaatcttcattttttcataagtgatactgaagaggaagcaatcagatatgtatctgtctcatgtgggcctcagaggaatgactttgaatagaaagggaggcaggtttgcccaaagccctttccagtaaaacac

SEQ ID NO: 379498 - DNA, 604 bp, Homo sapiens
tgatagttttatcaaggggagttcccctgcacaaactctctcttgtctgccaccatgtaagatgtcccttgctttcctgacatgattgtgaagcatccccagccatgtggaaccataagtccattaaacctcattcctttacaaattacccaggcttggttatgtttttattagtagcaggagaacagactaatacatttattttgccaaagttaagaacccacccatggcaagcctcaggaagtcctgagacatgtgcccaaggtgatagaagtacagcttgcttttatacattttagagagacatgagacatcaatcaatatatgtaaaatgtacatttttttttccttcaagacaggacaaattgagagggggttttgcagtttagaagtagataagacacagtagattgcattgttttaagtcctttatcagcctaccactgaatccacaatttagtcagacttagtgaatcttcattttttcataartgatactgaagaggaagcaatcagatatgtatctgtctcatgtgggcctcagaggaatgactttgaatagaaagggaggcaggtttgcccaaagccctttccagtaaaacac

SEQ ID NO: 379499 - DNA, 518 bp, Homo sapiens
tttgaaataatatttctctctataattccccaattttattcgagacaaaatcatagtaggaccaatttatttgtaaaatcagttttaggcttatgagacttggcctggtttttttgtataagaggcagcaaaataatcatttaacatattagctctctttttttgttttctattttttgtttgtacataggcaattttattcataaatkgactttgctagaaattttttgtaaggagtcaaagggtagaatctttaaaatcttcaagcccagtcaatattttatctgtgccaccagatagctatgtgaattgggttactttctcttttttcaagtttccaagaaaacttgggagtcctgggtctgtcagaaattaaattgtttacttactacacttcagggccctgtaaaaaaaaaaaaaaaggtacatgccagttttcccaaggggctttatcagctctccaggttagattcattttataaagtaaatatgaaaatatataattcaagttaaagact

SEQ ID NO: 379500 - DNA, 601 bp, Homo sapiens
atttcatctttcaaaattagcttttacaatcttacaaaccacttcttctgtaacagtccctgggccwggagtggttgagtagattcaatttctggccttgtgtcttaagtgtgtgattaatttttattgtcattttcttccacatctctagatggggcttcaattgctgtcagagtttaaaatttagcaagactcggtgtcttttttatttttattgtatttatttgtttttcctgagacagagtctcacccagactggagtgcagtggtgcaatctcggcttactgtaacctctgcctcccaggttcaagcaattctccctgcctcaggcttccaagcagttgggattacatgcgcccgccaccacgcccagctaatttttgtattttttattaaaatgggattgtgccgttttggccaggctcgtctctaactcctgccctcaggagatccaccctccaaagcctcccaaagtgttgtgtatcctttttagacctaggaatcaaagatcagtaatgtagcagcacaaggcctttaaaagttacgcagatagttacattaacgtaataacattaatttatattttctcaaaatctcagta

SEQ ID NO: 379501 - DNA, 601 bp, Homo sapiens
atttcatctttcaaaattagcttttacaatcttacaaaccacttcttctgtaacagtccctgggcctggagtggttgagtagattcaatttctggccttgtgtcttaagtgtgtgattaatttttattgtcattttcttccacatstctagatggggcttcaattgctgtcagagtttaaaatttagcaagactcggtgtcttttttatttttattgtatttatttgtttttcctgagacagagtctcacccagactggagtgcagtggtgcaatctcggcttactgtaacctctgcctcccaggttcaagcaattctccctgcctcaggcttccaagcagttgggattacatgcgcccgccaccacgcccagctaatttttgtattttttattaaaatgggattgtgccgttttggccaggctcgtctctaactcctgccctcaggagatccaccctccaaagcctcccaaagtgttgtgtatcctttttagacctaggaatcaaagatcagtaatgtagcagcacaaggcctttaaaagttacgcagatagttacattaacgtaataacattaatttatattttctcaaaatctcagta

SEQ ID NO: 379502 - DNA, 601 bp, Homo sapiens
atttcatctttcaaaattagcttttacaatcttacaaaccacttcttctgtaacagtccctgggcctggagtggttgagtagattcaatttctggccttgtgtcttaagtgtgtgattaatttttattgtcattttcttccacatctctagatggggcttcaattgctgtcagagtttaaaatttagcaagactcggtgtcttttttatttttattgtatttatttgtttttcctgagacagagtctcacccagactggagtgcagtggtgcaatctcggcttactgtaacctctgcctcccaggttcaagcaattctccctgcctcaggctyccaagcagttgggattacatgcgcccgccaccacgcccagctaatttttgtattttttattaaaatgggattgtgccgttttggccaggctcgtctctaactcctgccctcaggagatccaccctccaaagcctcccaaagtgttgtgtatcctttttagacctaggaatcaaagatcagtaatgtagcagcacaaggcctttaaaagttacgcagatagttacattaacgtaataacattaatttatattttctcaaaatctcagta

SEQ ID NO: 379503 - DNA, 565 bp, Homo sapiens
agcacaaggcctttaaaagttacgcagatagttacattaacgtaataacattaatttatattttctcaaaatctcagtattcctaagtagttgaaaaacttaaaaacarctacagaggaagtatttcaagaaaatataaaatttgttttatgccatttaccaaatgggaaaaaaaaacaccttcagcagtgtgactgtgtttccctgtggggaaatccatgtagataacctgcaagtcaactctaatgaaacgaagtatttgattaattagacataggaagaatgtgtcttggattacaagtgaagattttggtttcatagacaaatatagacattttaaaaaacccaagagtgcagaatactatattgaaataaaacattttattaagaactttaatataaaagatttttagcatcaggcaatcatagcagttagaagctaacaacgttagaagttaactctgttagaggctaactgctgtaagaaaaaaattgttagatgagctcatgaaaaatttgagatcctctcaagccttctcaaaagagaataaaactggcaagacgc

SEQ ID NO: 379504 - DNA, 565 bp, Homo sapiens
agcacaaggcctttaaaagttacgcagatagttacattaacgtaataacattaatttatattttctcaaaatctcagtattcctaagtagttgaaaaacttaaaaacaactacagaggaagtatttcaagaaaatataaaatttgttttatgccatttaccaaatgggaaaaaaaaacaccttcagcagtgtgactgtgtttccctgtggggaaatccatgtagataacctgcaagtcaactctaatgaaacraagtatttgattaattagacataggaagaatgtgtcttggattacaagtgaagattttggtttcatagacaaatatagacattttaaaaaacccaagagtgcagaatactatattgaaataaaacattttattaagaactttaatataaaagatttttagcatcaggcaatcatagcagttagaagctaacaacgttagaagttaactctgttagaggctaactgctgtaagaaaaaaattgttagatgagctcatgaaaaatttgagatcctctcaagccttctcaaaagagaataaaactggcaagacgc

SEQ ID NO: 379505 - DNA, 575 bp, Homo sapiens
tatttatttaagttacatgtacttcagatgcrttagggctcattgacttaatttaaaatagttatttattttaaagtcaattttgtaccttgtagccataacacataacaaaaaaatatatatatatgtacataatacatacaagcacacattcacactaatacaaagatactagagcttttactttaaaactctagctatggaatatcaatacaaactcaacagatgttcaacaaaaaagggttagatgtaaacagtggttgtcatcttaaaaccagtagaaaggccctgtaaaccggaaaacaaaatatttttaagccaaaaacatatcctcatctttctttataaacttcaccataaattgattatactctcttactattctaatttttagtaaccctaattcacagtgagaagcctaggattacttaatttaacatgacatgagtttaagattttaaattactgaagacaattatgagtctaaatttaccaaattaatatttgtaaagcaatgtaaaatgtaaaggtgactctgaaaaatagatgtacattttctttacaaagcatttcac

SEQ ID NO: 379506 - DNA, 575 bp, Homo sapiens
tatttatttaagttacatgtacttcagatgcgttagggctcattgacttaatttaaaatagttatttattttaaagtcaattttgtaccttgtagccataacacataacaaaaawatatatatatatgtacataatacatacaagcacacattcacactaatacaaagatactagagcttttactttaaaactctagctatggaatatcaatacaaactcaacagatgttcaacaaaaaagggttagatgtaaacagtggttgtcatcttaaaaccagtagaaaggccctgtaaaccggaaaacaaaatatttttaagccaaaaacatatcctcatctttctttataaacttcaccataaattgattatactctcttactattctaatttttagtaaccctaattcacagtgagaagcctaggattacttaatttaacatgacatgagtttaagattttaaattactgaagacaattatgagtctaaatttaccaaattaatatttgtaaagcaatgtaaaatgtaaaggtgactctgaaaaatagatgtacattttctttacaaagcatttcac

SEQ ID NO: 379507 - DNA, 575 bp, Homo sapiens
tatttatttaagttacatgtacttcagatgcgttagggctcattgacttaatttaaaatagttatttattttaaagtcaattttgtaccttgtagccataacacataacaaaaaaatatatatatatgtacataatasatacaagcacacattcacactaatacaaagatactagagcttttactttaaaactctagctatggaatatcaatacaaactcaacagatgttcaacaaaaaagggttagatgtaaacagtggttgtcatcttaaaaccagtagaaaggccctgtaaaccggaaaacaaaatatttttaagccaaaaacatatcctcatctttctttataaacttcaccataaattgattatactctcttactattctaatttttagtaaccctaattcacagtgagaagcctaggattacttaatttaacatgacatgagtttaagattttaaattactgaagacaattatgagtctaaatttaccaaattaatatttgtaaagcaatgtaaaatgtaaaggtgactctgaaaaatagatgtacattttctttacaaagcatttcac

SEQ ID NO: 379508 - DNA, 575 bp, Homo sapiens
tatttatttaagttacatgtacttcagatgcgttagggctcattgacttaatttaaaatagttatttattttaaagtcaattttgtaccttgtagccataacacataacaaaaaaatatatatatatgtacataatacatacaagcacacattcacactaatacaaagatactagagcttttactttaaaactctagctatggaatatcaatacaaactcaacagatgttcaacaaaaaagggttagatgtaaacagtggttgtcatcttaaaaccagtagaaaggccctgtaaacyggaaaacaaaatatttttaagccaaaaacatatcctcatctttctttataaacttcaccataaattgattatactctcttactattctaatttttagtaaccctaattcacagtgagaagcctaggattacttaatttaacatgacatgagtttaagattttaaattactgaagacaattatgagtctaaatttaccaaattaatatttgtaaagcaatgtaaaatgtaaaggtgactctgaaaaatagatgtacattttctttacaaagcatttcac

SEQ ID NO: 379509 - DNA, 555 bp, Homo sapiens
gattttattaaaaatgggggtttatcaaaccacaccaggcatgtccagctctgtcctggagttggttcagggaacaggtgggtcctgtgtttagcagccatgacaacaagctcacagcgtcagttctagttgacacctcaaaaaggcgaagggatctcaactaaaatgtcatgtggatgtcacatctgtgggtgctgcrtactccctcgatgtgaatatggaaaagttaattacctcttgaggcatctgttgagattagtgctggtctctaaggaacacccaaaatggctcaatagagccagaaagcagactggctcagggcttttgtgatggtttcgtggtgggtcagagtgaggcttcccactcacaggaaggggattgcacagtgtgaaacacccactggtgtcaaatgaggaagctcctgcgattcctaactagattcacattgtgtgataaaagacacacaatagacataacttcatggtcggatatcacaaaatgctgttaatagatgtggtaaaaaggcaactctaaatttttagtcattggagtgtg

SEQ ID NO: 379510 - DNA, 555 bp, Homo sapiens
gattttattaaaaatgggggtttatcaaaccacaccaggcatgtccagctctgtcctggagttggttcagggaacaggtgggtcctgtgtttagcagccatgacaacaagctcacagcgtcagttctagttgacacctcaaaaaggcgaagggatctcaactaaaatgtcatgtggatgtcacatctgtgggtgctgcgtactccctcgatgtgaatatggaaaagttaattacctcttgaggcrtctgttgagattagtgctggtctctaaggaacacccaaaatggctcaatagagccagaaagcagactggctcagggcttttgtgatggtttcgtggtgggtcagagtgaggcttcccactcacaggaaggggattgcacagtgtgaaacacccactggtgtcaaatgaggaagctcctgcgattcctaactagattcacattgtgtgataaaagacacacaatagacataacttcatggtcggatatcacaaaatgctgttaatagatgtggtaaaaaggcaactctaaatttttagtcattggagtgtg

SEQ ID NO: 379511 - DNA, 555 bp, Homo sapiens
gattttattaaaaatgggggtttatcaaaccacaccaggcatgtccagctctgtcctggagttggttcagggaacaggtgggtcctgtgtttagcagccatgacaacaagctcacagcgtcagttctagttgacacctcaaaaaggcgaagggatctcaactaaaatgtcatgtggatgtcacatctgtgggtgctgcgtactccctcgatgtgaatatggaaaagttaattacctcttgaggcatctgttgagattagtgctggtctctaaggaacacccaaaatggctcratagagccagaaagcagactggctcagggcttttgtgatggtttcgtggtgggtcagagtgaggcttcccactcacaggaaggggattgcacagtgtgaaacacccactggtgtcaaatgaggaagctcctgcgattcctaactagattcacattgtgtgataaaagacacacaatagacataacttcatggtcggatatcacaaaatgctgttaatagatgtggtaaaaaggcaactctaaatttttagtcattggagtgtg

SEQ ID NO: 379512 - DNA, 562 bp, Homo sapiens
agtgactcctgaatatacacatgaatacacgctgggtctacctgtatttttagggaaacactagaatacagcaaaataatgtcatgattttattaaaaatgggggtttatcaaaccacaccaggcatgtccagctctgtcctggagttggttcagggaacaggtgggtcctgtgtttagcagccatgacaacaagctcacagcgtcagttctagttgacacctcaaaaaggcgaagggatctcaactaaaatgtcatgtggatgtcacatctgtgggtgctgcgtactccctcgatgtgaatatggaaaagttaattacctcttgaggcatctgttgagattagtgctggtctctaaggaacacccaaaatggctcaatagagccagaaagcagactggctcagggcttttgtgatggtttcgtggtgggtcagagtgaggcttcccactcacaggaaggggattgcacagygtgaaacacccactggtgtcaaatgaggaagctcctgcgattcctaactagattcacattgtgtgataaaagacacacaatagacataac

SEQ ID NO: 379513 - DNA, 620 bp, Homo sapiens
attattctagcttccatactagttgttttatttgtttgttttctcctttgttggcatttggtttcaaattcatatgtcaggtctctataatgtaggaatttatttaaaagtgtctttttttgtccattttgatggggcttctaggagacataagaacctcctctgcttgcaacacatttcaaaattacacactaatgtagaacatctgtatttaatcctggtttttagttaattgacaagctctaataagagaaktaacttctccattctgggctgattttacatcaggtataggaatataccctaggtgaaagtttgtaccagtaatatgaattattaggtaataacctccacctttatgatttaggtgttattcatcaagaaatagtgttaaatcaggagtctcaatgaaagtattacttaagggatatacaaaatatgttgctaatctacataaaacagatgtgaacacactcttagtatccagccatgtttcctgtcaaccacacagtaactttgacttcacttgggacttgttctaattttcaaattagttacttattaatcttaatgcttctagatattatgtgtgactattttagcagagagtgaagaaagac

SEQ ID NO: 379514 - DNA, 575 bp, Homo sapiens
ggagtcgagtctgaatgcctttcaaaaatgggggctcttgttctctcccagacagacactttgggaaaggaagattttgtgactgccccttttttggggaaagggattcaagaggatagaaaagctcttcagtatgtggtcccttagaatttcaaactacaacaagctaaccatattcaatttcaagcaatcccatatatatttgtatttttatctttaacagcctatatttcatatgccagactctgccttaggtaatctcatatgctggctttgttactctctacaagaacttgcttcttgttaaatttaagattttttttaacttcagttatcctaagcattcagaaatttgcaaaatttcatcttgactgtttatctgttattgttgatgtagttgtaagaaaaaaagaaaatatattcctcatttatgtacattttcaagttgagtagtagatttttagtactaccagagtaataaaataatttgaacattgttaagctgcttaacagaaaatcaaattatggtaaattwgttcaatggaatactacacaacatttataataaataattg

SEQ ID NO: 379515 - DNA, 543 bp, Homo sapiens
aaccttgcccagaggaaatggactcctgcctgtaggctgtgcaattagagctgtaaaggactgtcttctacaataaaggaaagtcttcagttagaattttaaaaatgacaatttctacaaactatcagagctggagtccataattaccactatcctaagctcatcttgccacataactgttygttgtcagctatatgtgcttgtctgaggaaaaagtcaatgtggggacatgtgtgcttatctgagggaagagttcacatgaagacaggggtgcttgtctgagggaagagtcaacctgaggatgcgtttgtctgagggaaaggtccacgtggggacaggtgtgggcattgtctgatggtaaatgcccattcagagacggtgtgtgcctggactgagctgaagtttgagggaaatctttctcagtcaaaggaagatgcgaatcatctggattaattgcttgtcagcagggaaacttggttgcacatgaacctgataaaagaaaagtctcttgtgaatggaaacatcttatgtgcaaatggggaa

SEQ ID NO: 379516 - DNA, 610 bp, Homo sapiens
gtaaatgtatttgatattttatttttgtacactctgcattttatcctggggttcatgatgtgctacatcattttataagttgtatatatttagattcatagtttacatcatagaattatgagaattaacaaattgtgtcatgcgttcactactgcagatcataaaaaagtttcactgtttgcaaacagtacctttttctcctaatgcataccctctctctaaatttctagaaaatcctcatatatttatgacatctacagttttgtcttttacagaatgtcaaataaaatgtatacaacatatttcaaataacctcactgaagaaggtggcacataaagtttctcacctatataacttagaartcagggtgttctgtaaatctaaagtataaagaaactgcacttaaacacttttttctagtcaataaacatacttccaacaggggtacaagttaacaattctaataccacgatgcatatattctaaattgtacaacaaattgaatgaatggccaatgatgggaggggttcctcactttgcagtaggtggttatggacaggcaaggaaggaaagcttgaaacattcatgtatcatcatagtacattgtag

SEQ ID NO: 379517 - DNA, 543 bp, Homo sapiens
agttttgtcttttacagaatgtcaaataaaatgtatacaacatatttcaaataacctcactgaagaaggtggcacataaagtttctcacctatataacttagaaatcagggtgttctgtaaatctaaagtataaagaaactgcacttaaacacttttttctagtcaataaacatacttccaacaggggtacaagttaacaattctaataccacgatgcatatattctaaattgtacaacaaattgaatgaatggccaatgatgggaggggttcctcactttgcagtaggtggttatggacaggcaaggaaggaaagcttgaaacattcatgtatcatcatagtacattgtagataccagtgttctaaagtttgaggcaataaacatacagaagattggatacataaatagattagatgggtccattaacatgggttaatatatacatacacattttctaggcctgttagcttagagattctagaaacactkacagtacattaacaacacacacacccaacatcataattttgtgtgttaatat

SEQ ID NO: 379518 - DNA, 563 bp, Homo sapiens
tgtgattggcgctgattttctcataagactgacaatagcaatgaagggttggcatagcaattaggagttcttcatgaactcccagctctcagaataatttccaaggaatctgtgttttgaataagcttgggttttatttctcactctattgaaaataattttgtgatgtatttacatcaggaaacaagacactctaacaagagagctgtttttaggtgaggtgcaaagtagtggagagatggaggtgtccttgaattctcagaattgctggaacttgaataccaagttcacctctgaaaggcagtagtctatctgtgaggatatcaatcagctctgccttcaggaatctttggatgtggaaaagatcaggagtgtgatttatttttatccatcgtggttagagggaaacttccggtcccaggaagtgggtgattttaacagaagcacctgagacctttccttctgagtcgttttgaatcctgagatctattggagatcgyaggagaaagcaatggggcagatctccattctccttaatgtgtgatcctgaggatgtggcctga

SEQ ID NO: 379519 - DNA, 587 bp, Homo sapiens
tatttttggctctttaatagtagccattctgactggtttaagaaatatcattgcagttttaatttgcatctccctgataattagtgctgtttagcattgtttacttatttatcatccagcattttcccatgtatatcaatacatcaactggtgtaccttaaatacatacaattttatttgtcaactttagctccataaagctgaaaatgtaactcagtcttataataaaaaaatgcatacttatatttctaygtattttatcaatatgtgagaatataaacagaaaaacttgtacgaaaatagttataacagtttgtttataacatttatgttggaaagaaatttaaatttcatcaacaggaaaacaaatatacatattgtcattatttcacataataaactgatttatttacttaataaactgtcatttactgatgttatggattgattcagatatgaaatattcatatgtgtattagtacgtacatatgtatatatatgatgacaaaaccttgagacatgaaattacataaataaacctaaaaataacaaaaataagttcaaaacagaaaaaattaacctatagt

SEQ ID NO: 379520 - DNA, 587 bp, Homo sapiens
tatttttggctctttaatagtagccattctgactggtttaagaaatatcattgcagttttaatttgcatctccctgataattagtgctgtttagcattgtttacttatttatcatccagcattttcccatgtatatcaatacatcaactggtgtaccttaaatacatacaattttatttgtcaactttagctccataaagctgaaaatgtaactcagtcttataataaaaaaatgcatacttatatttctacgtattttatcaatatgtgagaatataaacagaaaaacttgtacgaaaatagttayaacagtttgtttataacatttatgttggaaagaaatttaaatttcatcaacaggaaaacaaatatacatattgtcattatttcacataataaactgatttatttacttaataaactgtcatttactgatgttatggattgattcagatatgaaatattcatatgtgtattagtacgtacatatgtatatatatgatgacaaaaccttgagacatgaaattacataaataaacctaaaaataacaaaaataagttcaaaacagaaaaaattaacctatagt

SEQ ID NO: 379521 - DNA, 550 bp, Homo sapiens
aggttatatactttttgtccaatcatatttctacatagctgtttatactttgttgaacctaagcataaaaatggacaattttctctgtatctttgggtcttcattttgaaggctttcttgccacatagaactattaccaaatccagctgtatgcctttttcacctattaatctacctcttgttagtaaatttcagtgaacctgcagagggcaaaaggaaagattttccttgtccatgacattggcaaaaagaaaagttattttgagaagagtttataaattaagaggtcagaataatggacaaatcttgaatgtgtatattaaaattttaagaattatgttagttgcagtattgaagagagtgtcaataatccaggacaaatatgtaactgtttctttcaaaaatgagtgttattagggagtagcaggggagaaagacatggaatctgcagtaaagtgtagaatatctacctctagtcmcagtaatatagagtgtggggggaaaaaatcaccagttgagaggattgcagaataaaatcttttgtagggtg

SEQ ID NO: 379522 - DNA, 598 bp, Homo sapiens
catgtgccaacatacctggctaattaaaaaaaaaaaaatcgtagaggtggcatttaactatgttgcataggctagtgtgaagttctggtctcaagcagtcytcccaccttggccttccaaattgctggattacagatgtgagccaccacacctggccacgtttatgtattttagatgcttatctctacaatttattatggggattttttcccctactcagaatacagaagaaatgaacctttttgttcctaaagattggtattcttaaaacttccttttctgggagcaacttttctgttgcctgatttatagcataaggtataaaaccttgtttctaattcttccattactattacattaccagctctttttctcaacagtttatatcagattatcatctatggcatcaatttgagggttacatttctgatttaaaaatttctctaaccttccaaatgtataaatccacccagatttgctcaaactaatctgccctaaacctcaacaacttcatcactgtaaaactctggtttccctctctgtagcctcaccacctgtctcatgttccttcagctggcctaatctctactatgtctgc

SEQ ID NO: 379523 - DNA, 598 bp, Homo sapiens
catgtgccaacatacctggctaattaaaaaaaaaaaaatcgtagaggtggcatttaactatgttgcataggctagtgtgaagttctggtctcaagcagtcttcccacyttggccttccaaattgctggattacagatgtgagccaccacacctggccacgtttatgtattttagatgcttatctctacaatttattatggggattttttcccctactcagaatacagaagaaatgaacctttttgttcctaaagattggtattcttaaaacttccttttctgggagcaacttttctgttgcctgatttatagcataaggtataaaaccttgtttctaattcttccattactattacattaccagctctttttctcaacagtttatatcagattatcatctatggcatcaatttgagggttacatttctgatttaaaaatttctctaaccttccaaatgtataaatccacccagatttgctcaaactaatctgccctaaacctcaacaacttcatcactgtaaaactctggtttccctctctgtagcctcaccacctgtctcatgttccttcagctggcctaatctctactatgtctgc

SEQ ID NO: 379524 - DNA, 573 bp, Homo sapiens
accgtgtgactagcttagtaagacacaacaatgtatttgtgtttcctccttccttgcctcactttactgattctttctgccttaatatttatttgtgataaagtcttagcatgtaaatttgccctaaaacaggctaaagcaggattcctttctggcatctacaaatttatatattataaaattatatttacctataataattatgattagtgaagactggttttcaccagatctggtgtcgcattgctgtgaacgaaagctgattttgagggcaagtttgtgagaagtgggctcttttagcaacctgtcccatagaygctgcaatgcctagctggtagtatttaggctagattcatcttaaatgtagtcatggagccataagcaaatatagaagtcaatgtcctagggctttttatggataaaagctagacaaataaagatgttgcgtgttatctattgaaattggcagttaaacccctagagctgagttccaaagaaaaccaaaacaacaataacagagaggcaaaggccctgaggggttaataattttagaaacaagaattagtggcacaa

SEQ ID NO: 379525 - DNA, 364 bp, Homo sapiens
taaaaaaaatctctttgtcaagcacacagcaatcccagtyatgtaactgagtaattcattttcagtaaaataaataaattttatgccatcaaattgatgtaacctctaacttagatttttaaaaaattatttgtgtaaagctttgggaagcatctgctttgatagtcattagctgtacatctggtaaaaaaaatactgtccacatatttgttgctggaaagaaaattcacaaaactataacccgtgactcaatggaatattagcaaagtgttttagttatccattgccatttaaaatgtccatatgggtttgtcagtacagcttttgaaatgtaacaaattaatatctttacttcattctaatt

SEQ ID NO: 379526 - DNA, 634 bp, Homo sapiens
gtgacatgagatttcatcatgttgctcagaatgatgcataatttaaaactgaagaaatgttgatatctgaaatatctcatttaatatttgtgaagcacagttgaccatgattaactgaaacaccaaaaggtgagaccgtggataaggaggactattgtataatgctcaaaatgtgcatatttagaaaaactgatttatttatgataaagtatatttaatatattaaaaataaaaatgactaacagatcaaattggatcattttctgtttttgctcaacctttttgccaartcttttttgtctgaaatatgctgactccactctttttggagtaaaaatgtccctgttattttctttgatcaactaaatttttactttctctaaaaatgttattgaccttgccttgaagtacagaggttgaatttgcctgagtgtaccatggcaatttattactggcaaaaattataattaaattcatatttttttctttgggcttctaattaaattaacactaattaaagaagttatactgcacttgttaaattaagacaattcagattacagtgatgacaatcagcattttaaactcagtagcaatggcgacttaaaatagtaaccttcagtattaagcatcc

SEQ ID NO: 379527 - DNA, 336 bp, Homo sapiens
tgaggctattagcccatggtaaatttgatttcaaaacctgaaaagaatattctaaaaaggaaaaaaaaaaacagataattctttcaaaaaggtagatgaaaatactcaagaaatattagcaaatgagtatccttcaaatataaaaaaaaaaaaatcatgaataagtgggctttactccagataggcaagaatagattagcattagaaaatcaatgcaatttrcatataaataatataaagaaaaaatatgattatttgatcaatgctgataagtatttcaaaaaacgcaatggtaaatcattaaaaaattataagaaaactcaaaataaaagggaa

SEQ ID NO: 379528 - DNA, 351 bp, Homo sapiens
gatctggctcaacatcagtaatcaatgcagatcaaaaccactttgggagatcccttcagctggtgtgaggatatggaaaaaaaacaaaaaacaaaaaaamccaacccttgcataactgttggtgggaatgtaaattaggacagctactatgaaaaacagtaatgaggttcctcaaaaaatcgaaaataaaactaccatgtgatccaacatacacatgggaaatgacgtcagcatgtcagagatatgcctgactcccatgattattacaacttcattcacaaaagccaagatatggaaccaacctacgagtgtgtcagtggatgaactgatttaaaaaaaaattggtatgta

SEQ ID NO: 379529 - DNA, 351 bp, Homo sapiens
gatctggctcaacatcagtaatcaatgcagatcaaaaccactttgggagatcccttcagctggtgtgaggatatggaaaaaaaacaaaaaacaaaaaaaacsaacccttgcataactgttggtgggaatgtaaattaggacagctactatgaaaaacagtaatgaggttcctcaaaaaatcgaaaataaaactaccatgtgatccaacatacacatgggaaatgacgtcagcatgtcagagatatgcctgactcccatgattattacaacttcattcacaaaagccaagatatggaaccaacctacgagtgtgtcagtggatgaactgatttaaaaaaaaattggtatgta

SEQ ID NO: 379530 - DNA, 351 bp, Homo sapiens
gatctggctcaacatcagtaatcaatgcagatcaaaaccactttgggagatcccttcagctggtgtgaggatatggaaaaaaaacaaaaaacaaaaaaaaccaacccttgcataactgttggtgggaatgtaaattaggacagctactatgaaaaacagtaatgaggttcctcaaaaaatygaaaataaaactaccatgtgatccaacatacacatgggaaatgacgtcagcatgtcagagatatgcctgactcccatgattattacaacttcattcacaaaagccaagatatggaaccaacctacgagtgtgtcagtggatgaactgatttaaaaaaaaattggtatgta

SEQ ID NO: 379531 - DNA, 351 bp, Homo sapiens
gatctggctcaacatcagtaatcaatgcagatcaaaaccactttgggagatcccttcagctggtgtgaggatatggaaaaaaaacaaaaaacaaaaaaaaccaacccttgcataactgttggtgggaatgtaaattaggacagctactatgaaaaacagtaatgaggttcctcaaaaaatcgaaaataaaactaccatgtgatccaacatacacatgggaaatgasgtcagcatgtcagagatatgcctgactcccatgattattacaacttcattcacaaaagccaagatatggaaccaacctacgagtgtgtcagtggatgaactgatttaaaaaaaaattggtatgta

SEQ ID NO: 379532 - DNA, 565 bp, Homo sapiens
gaggatcacattattctttgtttataagaaaaaattagcataaatcagaaaatgtttattgttaaattaaattcaatgaaagcaagattttttatgcatcttagtaataaatatgcatcatatgtataatgatcagagaaaataataaaaaaattgttcttgatgtgacattgtttttaaatcttatttatgcaaaaatatttaaagattacattttcttattctcatattaacacctagcacattaacaccttggcacaaatcagatatttggtaaagaaaatgagtattaaatggatttgagtgaatgaatattaaaaaggtttattacaaagacatggacgtttcttagactctcatttcaagttgctctatacattctacatatttatcttttaagagtagttgttttacacttctcrtatcaccccaaaaagcaattacaaaatttgtggaaataagttcatatttgcaggacttccttagcaatccctcatcaagtattaaaaaatttaaaaactagtgagtagtgtatgcaagtgatattcaattacattaaagaata

SEQ ID NO: 379533 - DNA, 567 bp, Homo sapiens
ggcaccaggtgattcacgctgtaggtgtgctaatattttgtgttttcaaggaaaactaactgctaaaatgctggcatatcrtattctgttactccattcttctccttgcccttaaaatcaggccaactttctctgactcttcttctgtctggtttatataaagcaatataaaaatatcctttatgaagtaacttgggtctttctcattcctttttgactaactgtattccccttcttcacacatattctcttaaacctacttctctcttgcttgttctcaaacttgtaccattttcattgcaggcaacctcctaactttgtagttattggcagccttgaaatgaatttgactttgttcattattttggttttaagtgtcaatcatttatttagtttggttccctggaagttcatttttgctcatactcattcctactttctgtttctgacactagctccctcatccctaccccaaacacaaagcaatgaggagaggaggatgtacttgttggcaaaacatcacttccaggttgaagtctgaagcaaaagtaaacaaacaaaaaccta

SEQ ID NO: 379534 - DNA, 512 bp, Homo sapiens
gaccttgcctggtttttaayaaatactcctgtatttgtccactcatatctgaaaaacaatgaaaagttttaacatttctgaatttttagttcccttagtacttcaattccacaggttgctaatatgatttcaaaatataatatttaatatttacccatttattgtctagctgatgcagtggaggcattaattcaccatatactactgtattctgccaagaagcagaattccatgtattttttatattatcaaatataatgtttaaattgagtaagagagagctgtcacaacatgacctattttcatttaaaactaactaaacatcactggagacagtgagcaaaatgagttgtaatgtcctgtggagagggtcagtgtttgtgggctttttttatcatctagctgactagctaaatatagatgagactgcaagatatatggcagaacaaagagaagaaggggccaaaaaccagtcattggtgtaaccagagagcctgaattttccatggatt

SEQ ID NO: 379535 - DNA, 512 bp, Homo sapiens
gaccttgcctggtttttaataaatactcctgtatttgtcyactcatatctgaaaaacaatgaaaagttttaacatttctgaatttttagttcccttagtacttcaattccacaggttgctaatatgatttcaaaatataatatttaatatttacccatttattgtctagctgatgcagtggaggcattaattcaccatatactactgtattctgccaagaagcagaattccatgtattttttatattatcaaatataatgtttaaattgagtaagagagagctgtcacaacatgacctattttcatttaaaactaactaaacatcactggagacagtgagcaaaatgagttgtaatgtcctgtggagagggtcagtgtttgtgggctttttttatcatctagctgactagctaaatatagatgagactgcaagatatatggcagaacaaagagaagaaggggccaaaaaccagtcattggtgtaaccagagagcctgaattttccatggatt

SEQ ID NO: 379536 - DNA, 512 bp, Homo sapiens
gaccttgcctggtttttaataaatactcctgtatttgtccactcatatctgaaaaacaatgaaamgttttaacatttctgaatttttagttcccttagtacttcaattccacaggttgctaatatgatttcaaaatataatatttaatatttacccatttattgtctagctgatgcagtggaggcattaattcaccatatactactgtattctgccaagaagcagaattccatgtattttttatattatcaaatataatgtttaaattgagtaagagagagctgtcacaacatgacctattttcatttaaaactaactaaacatcactggagacagtgagcaaaatgagttgtaatgtcctgtggagagggtcagtgtttgtgggctttttttatcatctagctgactagctaaatatagatgagactgcaagatatatggcagaacaaagagaagaaggggccaaaaaccagtcattggtgtaaccagagagcctgaattttccatggatt

SEQ ID NO: 379537 - DNA, 512 bp, Homo sapiens
gaccttgcctggtttttaataaatactcctgtatttgtccactcatatctgaaaaacaatgaaaagttttaacatttctgaatttttagttcccttagtacttcaattccacaggttgctaatatgatttcaaaatataatatttaatatttacccatttattgtctagctgatgcagtggaggcattaattcaccatatactactgtattctgccaagaagcagaattccatgtattttttatattatcaaatataatgtttaaattgagtaagagagagctgtcacaacatgacctattttcatttaaaactaactaaacatcactggagacagtgagcaaaatgagttstaatgtcctgtggagagggtcagtgtttgtgggctttttttatcatctagctgactagctaaatatagatgagactgcaagatatatggcagaacaaagagaagaaggggccaaaaaccagtcattggtgtaaccagagagcctgaattttccatggatt

SEQ ID NO: 379538 - DNA, 522 bp, Homo sapiens
gacatcctgttacatttggaaatagagttttcttctgagagttcaactattcatttcactgggatatcagaattttaacctgaataagcatagctatctcttattttacatctataccaatgcattaaaatattcccaagaatatgaaaccacccagtcagtttggtgttactctacattgattgtcttcaacttcaaatcttcaatcaagtaatgcacattagctgataaactttttatttatttattaagcttgttctttcactttctgtattgattactcaacttttctttggcttccactctctgctattcaagatcctttatttcaaacaagagaaatacrcaatactcaatataaacactagaaaaggggagcttgggttccgggagggggatcttcatgatcctgcagatttggaaatcagtcaggaactgtggtagacataccagtgctccctcaccctcctgccccagccctgaacccaacataatcccaagaatctgtgaatatgtaagttt

SEQ ID NO: 379539 - DNA, 566 bp, Homo sapiens
ttgcagacggcctattgtgggaccttgtgaccatgtgagttaatacttaataaactatcttttatatataaatatatctatcctattctatccctctagagaaccctaatacagtgtgtgtgtgtgtatatatatatatatatatatatatatatatatatatayacacatatataaaatatgtgtgtatatgtgtgtgtgtgtgtgtgtatatatatatatatatatataaacattcatatatataccaacctattaggagtttgaatagcagaatttagccttactcaatctaaaatctatttcccaatttaaaaagaggctgattatcaacccattgactatgacagatttacccagtatatacttctgtggacccttggagaaaatgaactcttctctggtggtacctctaacctacaacttgtgttttttttttttttaattttaaaaacatatagcttaaaagaaaattatacacttattttactactttaattcttaatattgcctgaaagctgaatatccattgtttcattaaaattgtttttgttacaatcattacc

SEQ ID NO: 379540 - DNA, 402 bp, Homo sapiens
ggtatagtactgtgttctgccagttcctagctattggcaactgacttagcctctctgtgataaaacagaatgaaaggaatacctacttactatttagtattggtcttagtattcattcaaaaatgaatgttatgattatttaaaaagcttaccttgaggtttaggtgtgtgacttaattattgtatttgaacacatcaaattaggacatacacctagaccaataaataacatgaatagggcagctatgtatgctacaaatgtgacacaagctccttactactgtcagaaagaggcttatccatagagaaaaagcatgtggctacacaggtattccaatgagtgctctgtaaaattaaatcagacaaattasgtagaatgatagacacttggcttcattttat

SEQ ID NO: 379541 - DNA, 597 bp, Homo sapiens
ttttaaaacctgtagaggtaatataaaaagcaaatcaaataagactaaatgttcaagagtgcacttacaattgaattagttcttccctggggactgagataagtgtcactagtttgtgagttagtcattggccatactaattctgaagttattttagtagctatgcttgatattatcttatctgtttagctactctttttctcccaaaaatattaaatgctaatgaatgatccacaaattgctatattggtatattattaaaattgtgaaggttctggtaaggtaaggacatctataattttaaatgaaatataattttaaaatatatatgttatctaaattcactgcattggtactagcaygcattttgtaatactgcaaggatatcttgtcttaaccagttatcagctattcaacaaatactttttgtgtatgtgcacttaaaagtattcatcactattttaggtgtcctggaggtgaataaagtatgaaacttttcatatgccttcgaatcagcttcaaattagctgcagatataactaagaaagaacaagagccctgagctatttcagaagaaaggggattatcattgtgggt

SEQ ID NO: 379542 - DNA, 536 bp, Homo sapiens
aaagcaaatcaaataagactaaatgttcaagagtgcacttacaattgaattagttcttccctggggactgagataagtgtcactagtttgtgagttagtcattggccatactaattctgaagttattttagtagctatgcttgatattatcttatctgtttagctactctttttctcccaaaaatattaaatgctaatgaatgatccacaaattgctatattggtatattattaaaattgtgaaggttctggtaaggtaaggacatctataattttaaatgaaatataattttaaaatatatatgttatctaaattcactgcattggtactagcacgcattttgtaatactgcaaggatatcttgtcttaaccagttatcagctattcaacaaatactttttgtgtatgtgcacttaaaagtattcatcactattttaggtgtcctggaggtgaataaagtatgaaacttttyatatgccttcgaatcagcttcaaattagctgcagatataactaagaaagaacaagagccctga

SEQ ID NO: 379543 - DNA, 594 bp, Homo sapiens
catgactaatgtccaaatcacaaggaagcattgagatttagactttaacagtggttcttaatgcttgctcactgcacccatgcccaatccacctacatttcctcaggaatagatatcctctaaccaggatttgtcaaaatcttagatgcttgaaagcacacctaattctatcctcttgtttgccatttcttgaaattcactagcacgtaaagaaaggaatgcataaacatatacttaacagattttaggattaattattagtgataaaaattacctgaatacacatttattgggttctgacatacctgtgaggccatttgtattagatttttaaaagagagctgtgattatttggaatatttaagtcaagacatgggatgatggtagagagctgagtgtgtgcaggttaacacactctctggtgaagtggtaatgggaggggccrctggtggagtaactgccttcttgcaaaggaaaagaagaatctcatatcagcagacaaatgacaaagtagtctgtcatttgctgtaggagtgtcagaaatctaaagctattggcttcataataaatcatgctggaagaaattgtagcaca

SEQ ID NO: 379544 - DNA, 540 bp, Homo sapiens
aagtctttgctaatgtgaatagtactacattgaacacacaagtgcatgtgtctttatggtagaaccatttatattcctttgggtatatacccaataatgagattgccagatcaagtggtaattctgttttaagttctttcagaaattgtgaaacagattttaacaatggctgaacgtaatttacatccccaacatcagtatgttagtgttcccttctatccacaaccttgccagtatctattattttttgactttaataatagccattctgactggtgtgacagggaatcttattgtggtttttgtttgcatttatctaatgattactcatgttgagcattttttcgtatgcgccctgcctgtgtgtgtgtcttttgaatggtgtctattgatgtccattgcccactctttaaagtatttttgttgttttttgcttgtaaatttaagttccttttagattccagttatcagacctttgtcagattyacaatatgcaagtattttctcccattgtgtaggttttctgtttacactgttgat

SEQ ID NO: 379545 - DNA, 607 bp, Homo sapiens
ttcttttttgatacaggcattcattgctatacacctcctgttagaattgcttttggtgcatcctaaatttgggtatgatgtattttcatgtttatttatctcaaagtacttttagtttctttttaaatttctctattgaccaatttgttgtttaggagcatgttgtttcatttccattatttttkaattttctgaagttcttcctgttagtttctagctttacactttttaatattatggtcagaaaagatacttaatgtgatttcagtctcttaaattgcttaagacttgctttgtgcttaacagattatctatcctggagaattttctttgtatgcttgagaaaaatatatatcctgcaactgttggatgaaatattctgtgtatgtcttttaggtttattttgtctagagcatagtttaaatttaatgtttctttattaattttctgtctgaatgatctgtccatggctgaaagtatagtgctggagtcccctagtcttattgcattgcagtctacaactcctttcatatctattaatacttgttttttatatttaggtgctccagtgttagttgtatatatgtgtacagttacattcttgcta

SEQ ID NO: 379546 - DNA, 594 bp, Homo sapiens
cctgggaacactgtagctagcatggtactgggctggaattttgtggccacttagacttgtatagttgtagagctggtgtgtgcctaacacccacttccactgaggctggtgcagtactggggcagaagtccacagctgccaaggcctgcctgcagctgaaggttttctggagtcaaggccattatagtcaacaagtggcaatgcagactgaagattgagtccatcttacagaggttatgggtttctgcctggtgctggggaagccttggagacttagtccatgaatactgtcctggagtcagggaccttggatgtctgcttagtgctgagttttattctggcatgtctrgtgttagggtctaaggaaaagtcttatactcattctcttcttttttttcttaatcagaaggtatctctgccctttgctgcctaaggctggggagaagtgacgcaggtaatttgaaactgttcaatatgtcctttattatttttgtataaactggaactgttacttctcacttagtttccttagttcttgtgaatgtaattgtgtgcatgaacagtttttcaagttaatgtttctgtcaggggatg

SEQ ID NO: 379547 - DNA, 578 bp, Homo sapiens
attggcttacgccattaggaattctggcaaggccagtactaaatccttagggtagttatcctgaagggtaagctgaacctccagacatgagccaaagctgttatccacagatgggatctcttcagggaagttcaattctgcttttaaatccttytacctgactaaacctggcataccccatattatttacattaatctcccttacttgaagtaaattgataatgaacttaaattacatctgcaaaataattttacattttctagataagtgttaatgagtaattataaactatagcctagccaagttaggatataaagcttaccatcactgaatatttgtcaaaaaccagttgaccttgcatatcctcaagttctctaatttttttcttctacaaaattactttttctatttgtgtgtgattgcgtttttgtagaaattgtaaaatcaatctttctttattttcaaaaacaaaacaaaaacatcccatttagattctgcttgggattgcattgaaaatatagattaatttggaaaaaattggcatttttaacaatactgaaccatttggtcaccaaac

SEQ ID NO: 379548 - DNA, 578 bp, Homo sapiens
attggcttacgccattaggaattctggcaaggccagtactaaatccttagggtagttatcctgaagggtaagctgaacctccagacatgagccaaagctgttatccacagatgggatctcttcagggaagttcaattctgcttttaaatccttctacctgactaaacctggcataccccatattatttacattaatctcccttacttraagtaaattgataatgaacttaaattacatctgcaaaataattttacattttctagataagtgttaatgagtaattataaactatagcctagccaagttaggatataaagcttaccatcactgaatatttgtcaaaaaccagttgaccttgcatatcctcaagttctctaatttttttcttctacaaaattactttttctatttgtgtgtgattgcgtttttgtagaaattgtaaaatcaatctttctttattttcaaaaacaaaacaaaaacatcccatttagattctgcttgggattgcattgaaaatatagattaatttggaaaaaattggcatttttaacaatactgaaccatttggtcaccaaac

SEQ ID NO: 379549 - DNA, 572 bp, Homo sapiens
ctttattttcaaaaacaaaacaaaaacatcccatttagattctgcttgggattgcattgaaaatatagattaatttggaaaaaattggcatttttaacaatactgaaccatttggtcaccaaacatggcaaatttctcaattaattcaggtctttaacatttttaagcaatattttaaattttgattttataggtttcacacatattttgctaaatttacttccaagtattttttggtttcttgatctaattttatagtcattgattttttttaattttaatttggaagattttatttctactacataaaaatgatttatttttcaaaatattraacatatctgaagacatggtaaattcacttagttaaatagaatttattgtagttttcttaggcttttctacataactaatcatgcatgttatttataaataaaggaatatatatattccaatatgtgcaagttttatcttttatttcattttcttgccttttatactggctaaaactttcaggatcatgttgcagagaaatgggcatccttgcttgttttcagtcttagaagaacgat

SEQ ID NO: 379550 - DNA, 499 bp, Homo sapiens
acttgcatttcaatctattacttttctggttttaactttatctgctattatatctttattattttatttcatctttatacaaatacttttaatgattaggagaaaatgttaaaaaactgtcattaaacacagatgattttattaagagatgatatggttgtytaaaccaaagacccaaaagatcacactgttaaattgttcaaacgaattagagcatttagtaagcttattagacagaaaattgttatacaatcttcagttgtattttgcagatcaaccaaaaaagaaaactgcaggtacgtaagacagagtccaacaaaaatatgtataataattttatgcaatttaaaagaaacgttaaaattcattaaatatttagtattgatgaagagtcataacatttttatgactagctgcattaaatattatacataagtcattactctactaagttattcattgatataatacaatttcaatcaaattttcaattaaaaac

SEQ ID NO: 379551 - DNA, 444 bp, Homo sapiens
tgggtgtgtgtgtgtatatatatatatatatatatatatatatatatatctacacaatttaagaatcttaaaataagattactgggttttgtactatagggacatctactgtaaacttttgaattattttttctaaygcagagaaattctttgtattgctaccaaacagaaatatgtaggttaaattctccctctacaaaattgcaaaataacacattcaatataagatctatagagacatgaaatctagtaagtgaaaaaacattaatatcatatatatatatattcaagtcagataatttttcaaaaaatataaggcaaaattaaacattagagaaataaaagaatataaactatagaaagatccaataacataataattgaataaaatatgaaaaattaagtaagcatgttagacaatatgttttcaaaactcagtcaaga

SEQ ID NO: 379552 - DNA, 563 bp, Homo sapiens
tatcagaactgataaaccaatttagtcaagttgcaggatacaaaatcaatatacaaaaatcagtagcatttctgtatgtcaacagtgagaaatatgaaaaagaaatttaaaaaggaatcccatttataatagccacacataaaattaaatacatgggaattaaccaacaaaatagaagatctctataatgaaaactataacatattgttgaaagaaatggaaaaggacaccaaataatagaaaaatattccatgttaatagattgtaaaaatcaatattgttacaatgtccatactatgcaaaacaatctacagattttatgcaatcgctatcaaaacaccaatgactttcttcactgaaatagaaaaaaaaaattctaaaatttttggtaccacaaaagattcataatagccaatgttgtcttaagtcaaaagataaaactagaggaatcacattacctgacttcaaattgtatgacagagctacggtaaccaaaacaatatggtactggcataaaaacagacacattgaccagtggaacrtaattaagaacgcagaaacat

SEQ ID NO: 379553 - DNA, 608 bp, Homo sapiens
gaactcacaatctgacaaggaggtagatgcatatatactcttaaaaagacaagacctattaatagtatgaaaaaggggactaatattaattttgtgctattgacttgattcttgattctacacataacacatttcattttattcctccaataacctttgaaagaggaacttatttgtttaacaaacataaatatgatcccttactgtgcgttaartaatattttaggccctggagataaagctgttggtaaaacaagcaaaaacacctttcctgatggagtgtacatctttttggagacagaaaaccaaacataaacaaagtacatatgcaaactctttattgtatgttattatgataagagctatggagaaaagcaaagatgataagagtgatatggagcattgggtgggttataattttagcaggaatgtaaaggatattattccttgttagataatatgtaatgattttgctggattatagattttgctaaacataataatcttcgctagattattattattgaagccaaggttcagagcaggtaaattaatttgcccaagatcatacagtacctagaagagcccacgtttaaattcagatcgcc

SEQ ID NO: 379554 - DNA, 512 bp, Homo sapiens
cattattttcattattatagccttatattgccttaaaattattttgagtcctctagctttgctttccattttaaaaattgttttatcaatttctggttatttaaatttccatacacattttataagtttatcaatttttataaaaatattacttgctttgaatttcattgaatttatataaattatggagaattgttatattaataatactaagtcttcaaatgcataagcatggcatatgtttttatttagatttttaaaaatttatttcaatgttattttttagtgtaaagttttgtacatattttgtttgtttttaagtactttattttatgtgcttctgacatttttattttaattacattttaagttatttcttatagtattataaaactttatgtattttaraactttaagggtactcttatgaacattatgcttttttaatgagtttatctttttattattttataataaccagcattatccctggtattgaagtacaccttgag

SEQ ID NO: 379555 - DNA, 473 bp, Homo sapiens
gaatctaaaaatccaatcacttggtaatccacatggtttaactgtacaggattgaaatatatctttttcatccttatttgcactaacaacaatctaaaaaaatggtattaaatcaagtttcatcaattccatttcctagaaactgagagagccaaagatcatgcaagttgtgacgaaggaagcaattttctagaatcaacaattttatgactagctggatcctctctawagaaatactccagaaatactggtgtgatcatatggcattatttcataccttctgtttggtcactgccacataaatgactactaaaattcacattttgtgcttagtttaccaagattttgaagcttttgtctgtgttgtatagaatgtctataacattatagtatttaatgaaggtgaatgttaatgacgctaatattttctcagtgaaattcacaggacttttcacaggattaagtaagccaag

SEQ ID NO: 379556 - DNA, 550 bp, Homo sapiens
aggttatatactttttgtccaatcatatttctacatagctgtttatactttgttgaacctaagcataaaaatggacaattttctctgtatctttgggtcttcattttgaaggctttcttgccacatagaactattaycaaatccagctgtatgcctttttcacctattaatctacctcttgttagtaaatttcagtgaacctgcagagggcaaaaggaaagattttccttgtccatgacattggcaaaaagaaaagttattttgagaagagtttataaattaagaggtcagaataatggacaaatcttgaatgtgtatattaaaattttaagaattatgttagttgcagtattgaagagagtgtcaataatccaggacaaatatgtaactgtttctttcaaaaatgagtgttattagggagtagcaggggagaaagacatggaatctgcagtaaagtgtagaatatctacctctagtcacagtaatatagagtgtggggggaaaaaatcaccagttgagaggattgcagaataaaatcttttgtagggtg

SEQ ID NO: 379557 - DNA, 550 bp, Homo sapiens
aggttatatactttttgtccaatcatatttctacatagctgtttatactttgttgaacctaagcataaaaatggacaattttctctgtatctttgggtcttcattttgaaggctttcttgccacatagaactattaccaaatccagctgtatgcctttttcacctattaatctacctcttgttagtaaatttcagtgaacctgcagagggcaaaaggaaagattttccttgtccatgacattrgcaaaaagaaaagttattttgagaagagtttataaattaagaggtcagaataatggacaaatcttgaatgtgtatattaaaattttaagaattatgttagttgcagtattgaagagagtgtcaataatccaggacaaatatgtaactgtttctttcaaaaatgagtgttattagggagtagcaggggagaaagacatggaatctgcagtaaagtgtagaatatctacctctagtcacagtaatatagagtgtggggggaaaaaatcaccagttgagaggattgcagaataaaatcttttgtagggtg

SEQ ID NO: 379558 - DNA, 579 bp, Homo sapiens
ctgactgctgccgcctccctccccgcccccatgtggatggcttcctgtctcccagcagaagtatcaccttccccacacgaaactctcctctcccctcacctcatgccaggttgtacttggcagtcccctcaccctgtttagactccaatgccccccaccaagctgtccccagtgggtacatctcctcaccctgctcatgctctcactttccatatacactgcctcactcttgtggactctcggcccactcggactctgatgccccaagccaagctgcccctccacgagctccctgctctgccggtccaagtgtcagcactgaatttttytgaaaggggaaggctgttataatgttagatatgattgggtgttaagtttcttccactatagttttcaattcattatttccaattagtaagtaatttttgtatgttgatcttgtatccaatgatactgacaaactcactttattagttttggtatcttttcttttttttttttttttttttttgagatgcagtctcactctgactcccaggctagagtgcagtggcatgatcttggctcactgcaacctcc

SEQ ID NO: 379559 - DNA, 627 bp, Homo sapiens
atgtgtctctgcccacaagcttcatgcattattcacaagttactggaaaggggaagataaagggcggtttttattgtaccaacattgctagtgctcaggagccttaggttagagaacaggtttggatagagagcaggaagtgctgtgygtcagtaggagacacttgcaaaatatgccaccacaaaatgtgccactttggcataaggattattttgagccggaggtaaatgagaatcaacagatgcagaaagaagccttcctggagctttccttatctgactaaaagcagaaacttctgagaaaagaagactgccataaattccctctcccagggaagttttatggccatgagaaagaggggaaattggcgctgagatggacttgcacacacaaaccttattccattagtttcccccatatatttaccttcccacagtttgctgcccagggaagcctaaaacctatctcctttgtcatgtgacttctctagaaattcattgttttttttgctaaggtgctgtataagcccaagtcgtaaccaccaatgtgagttactcatcaccaaggtttctttcacatcatgtgcacaagttaataaacttgtttgtttttctcttgtcaatctgt

SEQ ID NO: 379560 - DNA, 627 bp, Homo sapiens
atgtgtctctgcccacaagcttcatgcattattcacaagttactggaaaggggaagataaagggcggtttttattgtaccaacattgctagtgctcaggagccttaggttagagaacaggtttggatagagagcaggaagtgctgtgtgtcagtaggagacacttgcaaaatatgccaccacaaaatgtgccactttggcataaggattattttgagccggaggtaaatgagaatcaacagatgcagaaagaagccttcctggagctttccttatctgactaaaagcagaaacttctgagaaaagaagactgccataaattccctctcccagggaagttttatggccatgagaaagaggggaaattggcgctgagatggacttgcacacacaaaccttattccattagtttcccccatatatttaccttcccacagtttgctgcccagggaagcctaaaacctatctcctttgtcatgtgacttctctagaawttcattgttttttttgctaaggtgctgtataagcccaagtcgtaaccaccaatgtgagttactcatcaccaaggtttctttcacatcatgtgcacaagttaataaacttgtttgtttttctcttgtcaatctgt

SEQ ID NO: 379561 - DNA, 519 bp, Homo sapiens
taactggtctagagtgagaccccggtattggcattctgatcaaacgataccagttctggaactctgtggacccagggtctctgtcttcacaagagtttgtgtctgagaagtcacatcaaaatagttcatgcctcgacatgggggcttcacccctcatatccttgggttttagggtactgtgacctcttagaggagggagatcctcacacaggggccacctgtggcagtcagrcccacctcagccctcagcttatagaagcagaggcgtggctcccaggtcaggtgtaggtgcacccgggcctggggaatggatcaagagagcgagggttgtcagagcaggccctgtgggaggggctctctcacctgggagggcgtcaggtgagaaagcactcagagctcctgggcctgagctcctggggactctgccattagcaggggaaggcaaggaagaaggcacttggggtggggagggccctctggcttgattcaccggacaaggtcaggtcactgagagtgtgc

SEQ ID NO: 379562 - DNA, 568 bp, Homo sapiens
attctttgcaaaaaataaatgggccggttataacaatccaaaaatttagcccagtcctgcaataatttgagttgtcaacacatctggactaggaattctaggcaagtcatattctggatacctggttcgtgaaaattcaaagaaattgagcactctatagtcttcataatcactgtggaggttttatgggggaaggctgacttacggactccctggttatcaaacggaccaacasaacagtgataccgtagagtcacaggggagtcccagaactgaatacctctgcactgggctttctatagttggtgtatttgacttgtcttccctcttggccacttctattctccatcatcatctgctttgattgacagcatatttccaatctaagttataacttctacttctctggacataggccatcgctgtccacccgattgttccttgttatttgtttttatttccaccttcattattgtattctctgtacctccgtgtcatcatctataaaatgtggacaataatagcacatacctgatacctgatatggttgttatatagattatgtaag

SEQ ID NO: 379563 - DNA, 529 bp, Homo sapiens
gcctagtggactcaggacacagacctctgaggacggggcacaggcagctggtgtgagtgtctttgaggtgggcatggtggagctagctctgcatgagttggggaagatgccagctggcttcagctgctgtcagtgggatgctaccactgggatgaagaagcatttctaggtgttgctcagaacaacaggtagaagtaaggaagtccaaacaagcaaacttctagtaagtaaatgcatccttcctccaccctaacctagcggagcctaccatgagccacctggcaaagcagagagggggtttgcagggtcccggcttcagcrttgcaaggcaggatagagaagaatggggttagagctgagacacaacagctgaaaaactgggacagtgtgctgggctggaatatagcaaaagaggatttgggagttggcaagaagagaatgaaactagaatttcttttcctttcttttaaaaaattcctgacacttcaagaataacagatttgacgataagccaccaagatgttggact

SEQ ID NO: 379564 - DNA, 521 bp, Homo sapiens
gttggtccccacagctcagcattcatcttatccataggaatctgtgagatccaattaggtaacatctatgtgaccttactagttcttgccattgccaattctagtccatttccaagccccctgtaacctcactctatccatccctttggcctctttgggagtttctgatcastcccacccttcactccagccttactaggccctagcacctgtcgttgtgtctcatctactctcaaatcttaaaagtctattccttttcagcctctttccctctctcttttgtcctgctagcttatccaaaaggcaactttatggggaaggtctcttaatccctcatgctgggtgagtttacccttaacttctcctactgggatatttacttcattgtagttacatgtttgattgtttcttattcttttcagagtgctaaactgtgtgaaggacagtgtatgtcttatttaccactatattcccaggtctagcacaggctgggacactgggtgcttgataaactctttgtt

SEQ ID NO: 379565 - DNA, 521 bp, Homo sapiens
gttggtccccacagctcagcattcatcttatccataggaatctgtgagatccaattaggtaacatctatgtgaccttactagttcttgccattgccaattctagtccatttccaagccccctgtaacctcactctatccatccctttggcctctttgggagtttctgatcactcccacccttcactccagccttactaggccctagcacctgtcgttgtgtctcayctactctcaaatcttaaaagtctattccttttcagcctctttccctctctcttttgtcctgctagcttatccaaaaggcaactttatggggaaggtctcttaatccctcatgctgggtgagtttacccttaacttctcctactgggatatttacttcattgtagttacatgtttgattgtttcttattcttttcagagtgctaaactgtgtgaaggacagtgtatgtcttatttaccactatattcccaggtctagcacaggctgggacactgggtgcttgataaactctttgtt

SEQ ID NO: 379566 - DNA, 521 bp, Homo sapiens
gttggtccccacagctcagcattcatcttatccataggaatctgtgagatccaattaggtaacatctatgtgaccttactagttcttgccattgccaattctagtccatttccaagccccctgtaacctcactctatccatccctttggcctctttgggagtttctgatcactcccacccttcactccagccttactaggccctagcacctgtcgttgtgtctcatctactctcaaatcttaaaagtctattccttttcagcctctttccctctctcttttgtcctgctagcttatccaaaaggcaactttatggggaaggtctcttaatccctcatgctgggtgagtttaccyttaacttctcctactgggatatttacttcattgtagttacatgtttgattgtttcttattcttttcagagtgctaaactgtgtgaaggacagtgtatgtcttatttaccactatattcccaggtctagcacaggctgggacactgggtgcttgataaactctttgtt

SEQ ID NO: 379567 - DNA, 610 bp, Homo sapiens
ttttatacttttagtagagacagggtttcaccgggttagccaggatggtctccatctcccaacctcaggtgatctgcccacctccgcctcccaaagtgctgagattacaggcatgagccacygtgctaggcccccttttcttctcaacatttgctttttatccttcaaggattcactcaaggccacttttctcatggtgatactccaagttttgaacagcatcaatctcccacttttaaatttgaatttaaaatttttaaaaatttcccattgcattcactgtctcttctacacagtttttctctaaatgataaaaatcatttgttctctacatgttttatttttatacatcttcaccctccaaaatactttatagttcttgaagcccaaggacattgtttatacacacacacatgcatacacacaaacacgcacacacacacaatgaaaacaccaggctcaataataatgatgaccgccctggatcttgggttcctcattctaaaaagaagcagttacattaggtgttttctaatatcccttgtagggattgcctatgaatcttaaatattaataagaactcacagctgtatggctttctacagatttg

SEQ ID NO: 379568 - DNA, 574 bp, Homo sapiens
gtctcactttgttgcccaggctggagtgcagtggcacaattttgtctcactgcaacttccacctcytgggttcaagctattcttgtgcctcagcctcctgtgtatctgggattataggcacctgccaccatgcctggctaatttttgtatttttagtagacacggggttttgccatgttgcccagggtggtctcgaactcctgggctcaagggattcacccaccttggcctcccaaaatgctgggattacaggtgtgagccaccgtgcccggccccaccttgtgttctttagatttgaaaacttctatttatctatctttaagttcataaacttttttgtcatttccaatctgccattaagctattctggtgaaatttttacttcagatattgttctttttagttctagaattctacagcctagtagccactagcaacatttgctcatttaaatttaaatgaattaaaaagatttctttagttacatgccacattgccagtgttcaataactacatgtgactaatgacactgattgaacagcaaagatacagatcttttccatcattgcagaaa

SEQ ID NO: 379569 - DNA, 574 bp, Homo sapiens
gtctcactttgttgcccaggctggagtgcagtggcacaattttgtctcactgcaacttccacctcctgggttcaagctattcttgtgcctcagcctcctgtgtatctgggattataggcacctgccaccatgcctggctaatttttgtatttttagtagacacggggttttgccatgttgcccagggtggtctcgaactcctgggctcaagggattcacccaccttggcctcccaaaatgctgggattacaggtgtgagccaccgtgcccggccccaccttgtgttctttagatttgaaaacttctrtttatctatctttaagttcataaacttttttgtcatttccaatctgccattaagctattctggtgaaatttttacttcagatattgttctttttagttctagaattctacagcctagtagccactagcaacatttgctcatttaaatttaaatgaattaaaaagatttctttagttacatgccacattgccagtgttcaataactacatgtgactaatgacactgattgaacagcaaagatacagatcttttccatcattgcagaaa

SEQ ID NO: 379570 - DNA, 586 bp, Homo sapiens
cccttcactgaatggcctttggtttgctgacatgttttgggaacagagaggccctgtcttgcttggagatcaagcagtgtatttgcacatctcctctgtgtgggagactgatatggtttggctccctgtccccacccaagtctcatcttgaattgtaatccccataatccccacatgtcgagggcgagacctggtgggaggtgaccggatcatgggagtggtttccccatgctgttctcatgatagtgagtgagttctcccaagagctgatgattttataagtgtttgacagttcctgttacatacgctctctttctctcacctgccagcatgtaagacatacctgtttccctttctgccatgattgtaatttttctgaggcctccccagccatgcagaactgtgagtcaattaaacctcttttttaarataaatttcccagtctcagggaagttcttcatagcagtgtgaaaatgaacgaatacaaagacctctccaattctcagctcagggctctcttttgccatgggggaggtatgccctgatgcacattgataccacaatgagcatcattttgtattttgag

SEQ ID NO: 379571 - DNA, 551 bp, Homo sapiens
ggcctgtggctgtcccaaatcttcaatacagactctgaacgcaaagaagcctttctccatctccaaaaagaactaaacggggtaacactggggctggaaacagaaagactgtctacacacatattgtactctggtgcccagggaggtgtcacctccacctcctccacatggctggcaaacagtgctttgttcacatctcttctctgcacccaaggtgctcaccaaagcacacacccactaacagaagaagccggagaaccagctgcttaccttggacctggccctgatgctcagcattaggtgggtgggccttttgagaagtttaagaaactcaatactcatcaacctatacagagcaaacatttattctatgtgtaattctatgctragattcagggcaacgcataaagtatattctgtttatgcaaaaaatacccatataggtgatttgtaaggtttatataactgcacagaaagaagctaggaaggatgcatactgctaacggtggttacctctgggagcagcatggaattagaggtagtgctgaagt

SEQ ID NO: 379572 - DNA, 496 bp, Homo sapiens
ctttggtgcataagccttcatgcctgcttaaagatttcacaacccaggcatgtccaggggagaatcggttcygtgtctcttccaccttctggtggctgccggcaatcctcggtgtttcttagtttggggctgcatcattccaaactctgtctctgccttcacgttgccttctctgtgtgtgtctgcctactctcccttgtcccctcttacaacgatacatgtgatggcactcaggaccccctagataatccaggataatcccctctcaagatgcttacctcaacaatttttgccatgttaggtaatattcaaaggttctggggattaggaaatgaatatatctttggggaggggacacttttttttctgcctagcacaaatggagacgattttgatatgtggagaagggaagaagggggttccgggtggaaaggtcagaatatactggtctctggaggcagggaatcatgagtcatggtccagggctggtgaatgg

SEQ ID NO: 379573 - DNA, 567 bp, Homo sapiens
tatactttctacatgtgcagttatataaagcaattgctttgttaagacagtgcttctcatgacccatcaaaagattgagaaccatcacttaaaaataaataaataaataaataaataaaaattttaaaaaacctaattatttctacaagctctagttagtgaaccagggaggtgaaataatttactttaggaaatgttttattaacaaatattcagagtgttagtgctccaccctctgagttgagtgcatggagttaatgatcataccccattccctgggcagtgggcaagagttctccagtctgctcagcaggaccctgaattggaactgctggggcctttctcctctcgccacctgtgacagacacttggaatggggaaggagcactggacctgagccaagagacttgaatcctagatttgggggctgctaagtaggcatgtgatcttggataagctyctttccttatctgtgactcagtttcctatccgaggaaatgtgaatgtgaaattgttagtctagatgctctccaagtttctttattctcagacgctgtgctgttttcc

SEQ ID NO: 379574 - DNA, 621 bp, Homo sapiens
gtctaaacagtttctgctagacctttagtacatgagtgatttgttttattcatttttacatacctgacacatacaggaatttaatacgaatgtttgatgattaaatgaatgaatgagtgatttaattaatgaaccaactgtttataagagtctgtttaactctaaattagaaaattccacatgcaactaggtaaagtacattccagttgctcatgtgttacctgaaatctctagtttcattaaataccagtttacaaacattaaattcagacacatatttcatctctccaaaatggactagaactagttttaagagaataaaatttcagcaatggtgagagaaataatacaatacaggaatactcagtttccttaaaaactgggattccattatcactttttgatccagctaggccaagtaamaaacaagagggatgtcaacagttctggaaatcagcctccactgggggcacagtgggatcttttctagctaaggctgagacttgtttgaaaatacaacacagttcagaagaaaacttggaaaggggttatgcaaggaatggatggacagctgctggctggtcccgatggaagttatgctggaagctccggatatgatat

SEQ ID NO: 379575 - DNA, 533 bp, Homo sapiens
tcaataaataaattacaatgctggctagcgtttatcgtttattttgtgccagctttgttacacagtcacctcatttaatctttacaacaacccccatgaagtggagacaattgttgtcccaatcttacagttgagggaaatggaagggaattcatggaatccgagtcccatcatctgaataccatgggaaggttcagttcaattcagtgtgattctctggggcaccttcagttcctaaactgaactgaactgagatgaaattggyaggccgtttgacatggtgaactcaggcagaggagatgccacatagccagggtttttctattacctcctccaaagacagagccacttctttattcctaaagaaaaagtgctggcagcaacttgctctaatgtgcttaggagcagcgaccccactaagcactaaaaaagccattctaagtgctttctgccagcaggcacaagccaaacactgaatatgactccagaagaaagaggggaaatggcaaagaggctaatacgttatattcgaa

SEQ ID NO: 379576 - DNA, 595 bp, Homo sapiens
cctagtttctaaacaggatttgaggtgacaaacactaccaatagtgaaatgaattttttaaattaaaattatatactgggagcagaaaaacaaatcatacccccaccaaaataataatgtggggctaaatatttgaattgtgatagaatgttaaatgtcactctgtgtttacaasgtgacacagagaaaagtaaagctttacaaaattgttacgatccaatcaaactgtgtttccaacattatttatatgtctagctggcttaggacagagtctataataaaagaacatatgtaactcatgacaatggagatcagacctgtgacctcatgaacagtgtttgaaaattttttacttttgtttattgactgtatctcacctcttgtgaaaagaattatagcaaatgtaaaacaaatgatatatacaacaagttaataaggtggaactacaaaaacaggaagagagaaaacagataatattaaatataagagttaacagttgtctctttgagggcagcaactatgataacacggttcaatctaacatagttctaagtatgtacttggcacttgttatgtgtgaacatttgagcaaatg

SEQ ID NO: 379577 - DNA, 595 bp, Homo sapiens
cctagtttctaaacaggatttgaggtgacaaacactaccaatagtgaaatgaattttttaaattaaaattatatactgggagcagaaaaacaaatcatacccccaccaaaataataatgtggggctaaatatttgaattgtgatagaatgttaaatgtcactctgtgtttacaaggtgacacagagaaaagtaaagctttacaaaattgttacgatccaatcaaactgtgtttccaacattatttatatgtctagctggcttaggacagagtctataataaaagaacatatgtaactcatgacaatggagatcagacctgtgacctcatgaacagtgtttgaaaattttttacttttgtttattgactgtatctcacctcttgtgaaaagaattatagcaaatgtaaaacaaatgatatatacaacaagttaataaggtrgaactacaaaaacaggaagagagaaaacagataatattaaatataagagttaacagttgtctctttgagggcagcaactatgataacacggttcaatctaacatagttctaagtatgtacttggcacttgttatgtgtgaacatttgagcaaatg

SEQ ID NO: 379578 - DNA, 611 bp, Homo sapiens
ggttcttgccccccagaaaagtggtacttgctgttaagggtgaaggaccaaggcaggcatccccgcgtggtcagacacctctgaaacttgggtgaataatcaggcagccatccccgcacgattaaacaccaagggaagactgtcttcctgagtccgtgaccggcgccggagttttaggtccacagataaaatgygtctccttcatctctaccagaaaaggaaaggaactgaaattaagagaagggtgagattgaagtgtggcaccaagattgaaaggagaaagaggttgagggatagtgagagaggttggagaagagagtaaaaagaggccacttaccagatttaaaattggtgagatgttccttgggctggttggtctgatgaccagagatcataggtggatctttctcacagaacaaagagcaggaggacaggggattgatctcccaagggaagtcccccaatccgagtcacggcaccaaaatttcacttgcatccgtatgaagagaccaccaaacaggctttgtgtgaccaacgaggctgtttatttcacatgggtgcaggcaggctgagtccaaaaagagagtcagcgaagggagataagggtgggg

SEQ ID NO: 379579 - DNA, 590 bp, Homo sapiens
ggattggggaccccaagagcctgcttgttgctctaccccactgtggctgagctacatgacaaagtcccctttactttttcctctgcttttctctaacagaaggagactttcctcacatttcaccacattttcaccacagctgggaatgtgctgggtcacagctaaasccagtaagtctgagtctcacctgaggcccacgatgtactacctgggtatcactgctggttattcattcacagttctttaatcaggtgataaatcctgccagggctgaatccttttctccaaggtagtgggtttccttttggcccagggtgtgtctagaagtgtcatctgtgagctaggtccttaaatagggtccttgtgactctgggcggtaccctatcctgctgtggttgagctggtatctaagatgcaagacaaagtcccttctactctttactgtcttctcttaagcagaaaaaaaggagccactttcattgctgtgagctgcactacctgaggttgggggagggtgagcacaagcacttctttggtcttgctagctggtgtctccctaggtcatatgccaccctagtccacttactctc

SEQ ID NO: 379580 - DNA, 587 bp, Homo sapiens
tttttttcaattatcctatatgattagagaactcacatggagaagtcactatgtttactcatatatttgctctttctgttcttctgttatctgaatattccagttttcttcctttatcatattagtcctatttaaagatccttcttttggtgttctctaaaggcaggtctgctagtggcaaattattttagtttttcttcgtctgtctgagaatgcctttatttccycctcacttgtgaatgatatttttgccagatacagactttgacatttcagctgatagtccttttcttttggcacttgaataattttgtgccacttccttctttttctgtggttgcagatgtgaagtctgttgtcattgtaattggtactgttctacaagtaatatatcacttctgcctgcttacaggatttttcctttgtccattctgaatcttaattataatatgtctttgtgtggatttctttatgcttatcttttttggaatttactcagcttctataatttgtagattaatgcttttgccatatttggaaagttttaaattattatttctttaaatgtattctttcaatttcacact

SEQ ID NO: 379581 - DNA, 643 bp, Homo sapiens
atcgtggaatagttaaggcaaagataatgaaagctatttcccagaaaaagatgggagaaactaaatgatacattttagctttatcccaaaattaatttagaatttctcattttatagtccaatcattcaagtattaaaaaatccttctataaaaaatttgttatgaaatgtttcattcagcccaggagtgaaatttttcctgtgttcaagaaaaagtgaaaagaaaaacaacagatgttgaattataggaataaaaatttcagatggtttattttctttggaattcatgtaattttaggacagatccatttatttaaattacattttgcagatgggttatctgagaagagattattcttaggagaggagaaaaatacaataaaaaaaggaaatgtgacttctcttctgctgactcctcatgtttttgggcaagagcttcctcatgaatggattgttttctttagctacacttgtaccaaacatgtcaaggccttacctccactaaaaagcacacacacctgcctctcgaacacccggttgaatcaaatccttctacttttgacaatcaagttttcttttatgcaggtttgtrcgctgtcattctctgtatgagctgcttcttccgtgacagtaaagttcaatt

SEQ ID NO: 379582 - DNA, 505 bp, Homo sapiens
tttgattgtaagtaataatataccatgacattggtatcaataatatatacattctaaaacttagtaattcacattgaagacaaaaggcaaactaattttataagtgaatgattttcaagttttgcagtatttatagctggtgcctccaagttgcttcaattaaaacgcctttgcagtattattttgagaccatcagtttaaacatttaccatttgagaaaataaacaggttcatatacacttaaaagttatcaataatttaaaatttatcagtagaataaaggaaaataaatcatgaattttcttattccctaaaaaatattttgagccaacaataatgttcctaaccattctgccaggcacagaaaacacagagatacataaggcctacatcctgccttcaaggaattcagtttaaatatactgactgctgrgaaacaccagtcatattttaattcacattttatatcttaatgaggaaggtatttggcaactgaaaacaaaga

SEQ ID NO: 379583 - DNA, 531 bp, Homo sapiens
tatttcataatatcaaatgctttaaacatatttaataggcttcccaaaatcaaacttcagtttcaaaattgtctttcctgatgcctggctttttggatacttcagagggcccctacagtgtccagaaaagcaagataaacaggattatttgacatatttargtgcatggtgttgccaaaatgatgttcaattttctttaggttatatttttgtgagtaatgctaacatatgttccaaaattgtatgggatttctcaaattctagtccaagtatatactatcaatcataattaaggtcattatattaagtcattgtaaaccacagaaattaccaaacttctttgtcaattgtgtttgtaactatcctggacattttgctattcatggacaattgttgtcttgttttattcttttcaaaagatggtttataataagctatagaactttaacaggtgctgtcaaatacaagcttctgaaaacttttgagattgtgacattggaataaaggaaagtttacaagactcatgaagag

SEQ ID NO: 379584 - DNA, 531 bp, Homo sapiens
tatttcataatatcaaatgctttaaacatatttaataggcttcccaaaatcaaacttcagtttcaaaattgtctttcctgatgcctggctttttggatacttcagagggcccctacagtgtccagaaaagcaagataaacaggattatttgacatatttaggtgcatggtgttgccaaaatgatgttcaattttctttargttatatttttgtgagtaatgctaacatatgttccaaaattgtatgggatttctcaaattctagtccaagtatatactatcaatcataattaaggtcattatattaagtcattgtaaaccacagaaattaccaaacttctttgtcaattgtgtttgtaactatcctggacattttgctattcatggacaattgttgtcttgttttattcttttcaaaagatggtttataataagctatagaactttaacaggtgctgtcaaatacaagcttctgaaaacttttgagattgtgacattggaataaaggaaagtttacaagactcatgaagag

SEQ ID NO: 379585 - DNA, 531 bp, Homo sapiens
tatttcataatatcaaatgctttaaacatatttaataggcttcccaaaatcaaacttcagtttcaaaattgtctttcctgatgcctggctttttggatacttcagagggcccctacagtgtccagaaaagcaagataaacaggattatttgacatatttaggtgcatggtgttgccaaaatgatgttcaattttctttaggttatatttttgtgagtaatgctaacatatgttccaaaattgtatgggatttctcaaattctagtccaagtatatactatcaatcataattaargtcattatattaagtcattgtaaaccacagaaattaccaaacttctttgtcaattgtgtttgtaactatcctggacattttgctattcatggacaattgttgtcttgttttattcttttcaaaagatggtttataataagctatagaactttaacaggtgctgtcaaatacaagcttctgaaaacttttgagattgtgacattggaataaaggaaagtttacaagactcatgaagag

SEQ ID NO: 379586 - DNA, 551 bp, Homo sapiens
tgataagaagcccctgcaaaccccgcccccgccagacacattttcaattccaagctttggatcaaagccctaggaaagaaactgtatctaagggatccagaggcagatgacaacataggttaaaagggcacagtacaggtaagcatggctacctcctgccgatcaagctaagctcaggcttcccatgtccatggataaaggccatgctagtatccatggcataaatgagttttagggaattcaaggctattgataccaggggagatagggcatacatgggtaagagtggatgattcccactccctaggcagccctgattcatgtgtgcaagccattttggcactcatggmggcacctgccaaggttgccaggactcagggatgcaggatggaagagggaaagaggatgctctttcttctctccctcacgtaccctgtgtatctgctcagaagacgcctgctcccctctttctagaggggtaatcattcatcttcaatctgtagccccctttttttgagatggagtcttgctctgtcagagtgcaatggtgc

SEQ ID NO: 379587 - DNA, 551 bp, Homo sapiens
tgataagaagcccctgcaaaccccgcccccgccagacacattttcaattccaagctttggatcaaagccctaggaaagaaactgtatctaagggatccagaggcagatgacaacataggttaaaagggcacagtacaggtaagcatggctacctcctgccgatcaagctaagctcaggcttcccatgtccatggataaaggccatgctagtatccatggcataaatgagttttagggaattcaaggctattgataccaggggagatagggcatacatgggtaagagtggatgattcccactccctaggcagccctgattcatgtgtgcaagccattttggcactcatggcggcacctgccaaggttgccaggactcagggatgcaggatggaagagggaaagaggatgctctttcttctctccctcacgtaccctgtgtatctgctcagaagacgcctgctcccctctttctagaggggtaatcattcatcttcartctgtagccccctttttttgagatggagtcttgctctgtcagagtgcaatggtgc

SEQ ID NO: 379588 - DNA, 509 bp, Homo sapiens
cttcctgtgcaaactggaaaaaggccttaggatttctgagctgtccttayccctctccttgtttcattttattacatgttttctaacaacctggtttgtctcttcttgacttcaggccatcaaattccaaagggtcatataaccagagccttggatgatggccccttctgctgggaacccttagatatacctctgagggagctctgactgctgcttctcccaaaacagtgccaccgtcaccaggaagcagttaagattggtcttcatccttatctatattttttattctaatgtcagttggatgtactgctttagagggggaaatgagacagacaggtgggaagggctacctggtgaaactccagctggcctgcacactgagaggagtgcatactggggtggagctgcagaagtttgtgcagttttcagcatggaggagtctggcccctctttctgtgtggaacctggagttcaaactgtgaggcaggaagtgcaccagcagggactct

SEQ ID NO: 379589 - DNA, 404 bp, Homo sapiens
ttgtttgaaatcagcagtgcagctagttttttgaaagggctagtttctgttcaacccttaggaaaaaaagcctaatggtgattagtgtgggaggaggcataatgagacctgtccgacctcccattccatcatggcaagaactcagtttacagtttttctctggagttcccttggccaatggaagaggaggggagggggcttaaaatttaatttttatttatcartggtaattaccctgatctgatcactatacattacatatatcaaaatgtcatgatgtatcccatgaatatgtacaattactatttgtcaattaaaaataatattgaaaaaattcagtagaggtaaaataaaaaaaatgctgtcttcagaatcaaatctgaattactatggttagcaatcca

SEQ ID NO: 379590 - DNA, 585 bp, Homo sapiens
tgtgttgattttcatccttgtcttgtatatcattaagcttctttgcaatccatgctttgagtcctttatctgtcattcctgaatttccattttggttatcaaccattgctggatagccagaatgagcctttggtggtgttactacattcagattttatagcaccagaatttttatactggtttcttctcatctggagacactgaaggttctaatttttgtaattatttttgtgtgagtaggattttttcctttttttttctttccctatagtattatggttttatttttctttctctttcagtttcatcctttgcctttggggtgttactatagtgaatgttaggtagggtcttttgtctttgcttctaaagccctatgcamttctattggcaggttttatattgggcttcatgatttgaccttaaagccggtagatggcacttatggataagcacaaactgctaccaatccagcttggtatatacttgatccttgtttaccgggagaagctctctgttgccccaggcaatgagctgatctatggagtgcacagtaatgtgagcttctcgttcagccccaagagg

SEQ ID NO: 379591 - DNA, 594 bp, Homo sapiens
ctacatggtgattacagttaatgacaacatgtcatattcttaaaagtcactaacagagtagattttgtgttctcrccactaaaaatgataaagatgtgagttaatttatacattaattaggttgattcaggcattctacaatgtatacatatttaaagccatcatgttttacataataaatatacacaatttttatttgtcactaaaattaaatctaaaaatgttaaaacttaaaaaaataagataaatattatatgtatattttacaacaaaaatgagaaatatttataaactcatgtaacacaatttttaaaatatgtgaattaaattttatctaaattaaaaacttttatgctttaaaggatactatcaataaagtgaaaacaatacttcaaaatgacagaaaaatttttcaagccatatatctgataatgtttcagtacctcaaatatattttgaactcttataactcaaaaattgaaacacaaatagcccaattaaaagtgggcagcgtggccagtcgtggtggctcatgcctgtaatcccagcgctgtgggaggccgaggcaggccaatcacctgaggtcaggagttt

SEQ ID NO: 379592 - DNA, 594 bp, Homo sapiens
ctacatggtgattacagttaatgacaacatgtcatattcttaaaagtcactaacagagtagattttgtgttctcgccactaaaaatgataaagatgtgagttaatttatacattaattaggttgattcaggcattctacaatgtatacatatttaaagccatcatgttttacataataaatatacacaatttttatttgtcactaaaattaaatctaaaaatgttaaaacttaaaaaaataagataaatattatatgtatattttacaacaaaaatgagaaatatttataaactcatgtaacacaatttttaaaatatgtgaattaaattttatctaaattaaaaacttttatgcttyaaaggatactatcaataaagtgaaaacaatacttcaaaatgacagaaaaatttttcaagccatatatctgataatgtttcagtacctcaaatatattttgaactcttataactcaaaaattgaaacacaaatagcccaattaaaagtgggcagcgtggccagtcgtggtggctcatgcctgtaatcccagcgctgtgggaggccgaggcaggccaatcacctgaggtcaggagttt

SEQ ID NO: 379593 - DNA, 313 bp, Homo sapiens
tacataataaatatacacaatttttatttgtcactaaaattaaatctaaaaatgttaaaacttaaaaaaataagataaatattatatgtatattttacaacaaaaatgagaaatatttataaactcatgtaacacaatttttaaaatatgtgaattaaattttatctaaattaaaaacttttatgctttaaaggatactatcaataaagtgaaaacaatacytcaaaatgacagaaaaatttttcaagccatatatctgataatgtttcagtacctcaaatatattttgaactcttataactcaaaaattgaa

SEQ ID NO: 379594 - DNA, 553 bp, Homo sapiens
gtactggattttgtcaaattctttgtctatatctactgaagtgatcagatagttttctattttactttgttaatattgtgaattacattgattttctaatgctataccaatcatgcattcctgagatatactttacttgatcatgatctattaccattttatgtgattcagttggatccagattgctaaaatttattcatctcttttggttttgtatttgtaattatagggcatatttgtctgtagtatttttatcatatattgtttccgtgtattttttatattaagatagtgttcagttcatcaaatgagtggaaagtatttcacttccttaatgtttgggattacagtgtgttcatgtagtagtcatattatttcttctgtaaatgtttggtacaaytcaccagtgaaagccactttggcattgagatttatttattgaaaattttttaattaaaaattcaatacctttaatataaatagggctatttgggttgtatattttctcttgactgagctttgacggttgatggctttcaaagactatgtccat

SEQ ID NO: 379595 - DNA, 525 bp, Homo sapiens
gattttccccacatagtccaccagcttacacaacagtttcctctaaaaacactttcacagacacacccagaagtaatgtttcaccaattctctaggtattccttacttcatagtcaagttgacacctagcattaatcacagctcccttctctccaagaagaaaaaataagaaaaagaaaagagaaaagagaaataaaaaacatacagaaaaataaaggagaaataatgaaaatgtaaagccacmatggttatagctaatgtaagataaatcctaagcaaatagctattcactgaatcacattactatagattttgtagttatgtggggttaaacaaaaagtaagcaagcatacaatttattttcccaatataaatattaaacaactccaataaatcaaatagtataagctccaaaatagcctttaactgttaattggcccaaacttataaaacaaaatacattagaaattatattgtttattgttgattattggccaaatattctaacgtagtcagtgtcaatga

SEQ ID NO: 379596 - DNA, 589 bp, Homo sapiens
cattgaaaaagtagatacatcggggggaggtgtaggcttgttaaacgtttctgcatatatcatgaaattgagaggagcaagaggatgcccaggggtgcaaccatgaacagaaaaggcctgagaagaccctaatcttttacttcaggctgatctccatgatctggcaagcataaagtgaagactaagacatagttgtaaatggcctggctaagtactgaaagagtactccagcacagaagcaatctgcaataactgggaaagttttttttttttttaattttmtctttattttattttctctttcactggctccaagaatttaaggaaaccttgtcaatattctatttgatcaatgtactaacagaacatagattgcaatggcacacaggacaaagaatacaaacttcaaaaatagtttagaaaagtcaataagcaaacaaacaacaacaaaccacaacaagcatatggagttgcaagtgaaatcacatagccaaaacaatcttgaaaaagagaaaaaatgcaggactcacatttcctgatttcaaaatttactacaaagctaccatatggtagtggtataaggatagac

SEQ ID NO: 379597 - DNA, 443 bp, Homo sapiens
aatggaaagtcaatctaaaaattgagagaaaacatgtgctaatcatacatcagctaacagaaagcagtctcaatcgagaccccaaaagagggttcttgggtcttgtgcaagaaagaattcagggtgagttcataaagtgaaagcaagtttattaagacagtaaagaaataaaaaaaatggctactccatagacagagcagacatgagggctgctgattgcctatttttatggttatttcttgattatatgctaaacaaggggtggattattcacacctaccctttttagaccacataggataacttcctgacattgccacggcctttgtaaagtgtcattgtgctggtgggaatgtcccagtaaacaaaagaaaccaaacccaaacccagtagaagaaaakaaataaccaagaccagggcagagctaaaagaaattaaaacaa

SEQ ID NO: 379598 - DNA, 529 bp, Homo sapiens
tgaataaaagatcgttgtctgtattgctgctaattaacccagaaaagcgtcttagtagtgcaaaagcagttgaaactgatgacatttcgccattgtttccctgtaaaggaaggaaattatacatctgtagtttatcaaattaagcaatttccaaactaccgaaaaacaacttgtttaatcttggttaccaaaataaactgatttcccctaatatgtagagatcaaaaatgtattgaattactacattaattcaaaaatatattyttccaaaaccagactgagaaaaaaaatatatgaaaatacccgttagtgccaaagtttcatatccttccttacatttcctgagcagcccagtaggtaaacatatgaaccctgtctttgactcttatctaaaagcacctcactagtgactttaacaccagaaaatccacacttacactcgaattatttgtgaatgcccagaaagcacccttaaaataaagatggcgacattagcaaacagacacgttggggaggagaagcaagagaa

SEQ ID NO: 379599 - DNA, 622 bp, Homo sapiens
aaatcccaatttgtaatgattctaaccctcaagttctaacattctgagctccagtcccttcacaacctcctaggcctttaaattctcttgggacaacctgttgtcattatgtatagcctctggttacttttcattttctatactggccatgcccaattaactgtataatcattctctgcaccaaggatcttgaagacataacctctgagcctcttgaaccatctggaatgtcaatttcctgtagggtttttttttttttggatcttgaacaatagatcttgaatcaagaatattccacattcacagatgaatatgtgctaattctagagtaggtaaattatttgtgagggttcttgactatagcaggkgctcaaatcagacccagctgctgtagcagtcgtatcttcaccacttgcattcttaggtatagtgtgatgagacagaaaacttgtgcaagtctacaagtaataaagaacctttattactcatagatagggggtaagaatcaacagaaatatatgagctatggcaagctggccctccaatgctcaagaaacctatgcaaggtggatggagtagcatctacacatgccccagtttgcacaacagctttgggatccca

SEQ ID NO: 379600 - DNA, 552 bp, Homo sapiens
tttctacagggacaatgtttctgagttgctaatgctgtaagaaaaattttgctgtctgcataaccctgagttgattgccacatcctccagcctacaagttggtccagcattccacactctgttattgtcaagtcaactcattcggctatggaggcctataagagcccaccaggtttcaattcagtatctaaatcacataaaaactcaaggcatctttgtaaagttaaaccccaggggctctctctacttgactgtgatgtgctacatttctgtgactgagtcctaaagttgatgcatggcataattaatccatttggatgtcaaaagactaatattacctcagtcttatttctctctacttttctttcataaagaattctaactccttccagacaaatgaatgtctccggtagagtaagaagatgctttaattatgasacttttacctacatcttcatcttcacttttgttgtctgataaggtcaaagccttatcctgtgctctgttcactgcacctccaggtgtttagtctggaaagcttgagatgtggaa

SEQ ID NO: 379601 - DNA, 566 bp, Homo sapiens
gagacaagcctgtgcaacacagcaaggtcctgtctacacacacacacacacacacacacacacacacacacacacacaattaaattagctgggcatgctggctcatgtctgtagtcctagctccttgagagactgaggaaggaggattgctttagcccagaagtttgagtctgcagtgagctataatcgtgtcactccatctctgcattcagcctgggcaacagagcaagatgctgtatcaaaagaaaaaaaaaaacaaaacataactgccagcattaacaattccccatccgcttgtcttcctattacaagtttttttgttttgttttgtttttgttttttggtaagtggggcaagagattaaactggctcagcttagttcaaagtccactccaatatctggcttgattcagtcaattatgrcaaaaagagtctttgtggttggggcaagtaagagatttacatggtattaatacatattggaaaaaggttatgagaatgaaatgcacacactgcattatatatggatgttttctaaaataaaacatcaaaaattcacttatatg

SEQ ID NO: 379602 - DNA, 566 bp, Homo sapiens
gagacaagcctgtgcaacacagcaaggtcctgtctacacacacacacacacacacacacacacacacacacacacacaattaaattagctgggcatgctggctcatgtctgtagtcctagctccttgagagactgaggaaggaggattgctttagcccagaagtttgagtctgcagtgagctataatcgtgtcactccatctctgcattcagcctgggcaacagagcaagatgctgtatcaaaagaaaaaaaaaaacaaaacataactgccagcattaacaattccccatccgcttgtcttcctattacaagtttttttgttttgttttgtttttgttttttggtaagtggggcaagagattaaactggctcagcttagttcaaagtccactccaatatctggcttgattcagtcaattatggcaaaaagagtctttgyggttggggcaagtaagagatttacatggtattaatacatattggaaaaaggttatgagaatgaaatgcacacactgcattatatatggatgttttctaaaataaaacatcaaaaattcacttatatg

SEQ ID NO: 379603 - DNA, 580 bp, Homo sapiens
tctacctcttgaacttgaacagcatatatgcccctttcatttactatgtatttcaaccacaaggaccacttgtgtttgtgactctgacagaacatgctctcttgtcccagggcccttgtacgtactttttcctgtctgaagaaccctcttcgcttcaccaacttctactcaacaactctctctgacccaacgtcagtttcttttggaagttctcggatcttcagatcaggactcgcccttaacggtgccacaggtgtccctccccgcaatacacacagcgctgggatccaccaatgtccgcttcgcggcctgaaacagctcccattgctcccgcgagtcactcaccttgttttgcgaggaggccgcaggcggaggtcgtgagattacgggcccaaggcccgcggctactggggccgcctcggcccactcaggctcttcgaacatgagggtcgggagggcagggtcgccgagtccccgctcttctccacgtgcacagcgctcctmtggaagtcggagcgctcagacctgccagaaccgacccggaaaccaaagcgtgacagccaggggttgctagagcggc

SEQ ID NO: 379604 - DNA, 601 bp, Homo sapiens
ctctgtgtagggagggggagatgtgctccacctttatgcaattccaggaggcaggtacactttcagtgggggtgtaaccacctggaatcatgctggaaagcctcactctaagtgcacttatgccaattcacagtgggaaaaaccttggctctgtccacaacagtggactgggggagtgggagaagattcccctcatccatttccagccactggtgttgcctgtctgcttgggcagaacaacacttttccccttcagagacaaccactgcacccatcactcttctgggaggggcacagtcacccactggacacaagtagggggctctcaggcaggagagagctttctatttggtttcctytgttctaaagggtgttttggtgggctgcactgtgccttctcccagcagcagcccatgctgtgaactggatatccaaggatcttgcaactcccaaggatcccactgttcccctgtgttcgctgcacttagagcagcatctggaaaatgtttgttggggatctagtggtatgaagaaacaaagactgaaattctctgggcaggatagtagcccacaatcagtgtacaaccaacacggtgcctac

SEQ ID NO: 379605 - DNA, 534 bp, Homo sapiens
agcttaaaaccaagcttgtttgatgcgccaatatgtcaggtaaatcaggcatagaagtgaagacattaaaagccttcacacctccactagttttytgcagcattttcctttccttgaatgaattcctgccttctctgaatctatatccacaatagaccaaagttgtattattggataggaggaaaaattattgtccaaattattgtctaaatttttccagcatccaaaagtatgggtaaataatctacctctagcacacaagtccttctttgtgggtaacagtagagttgacaacaactaagggacattttcctcctcctcttccatcttcccatcactcgcatacccacttctttctcatttgcatgaccctagcacctgctctggggcatacaaggctacaaagaaggacttgttacctttggagactatcagaacaggttcctaatacaaaagtctcagatgtacacaccattttataggtgtatattttagacagtaagtctgtgaaatgagaaaacatggtcttgaaaa

SEQ ID NO: 379606 - DNA, 599 bp, Homo sapiens
tggtagctatggttagcatgggagtcagaaaaacagcaaattaattcgtcactgtgactgtctatgatgctcttactaagaccagtagttgctttgacactgccaatctgtatctataaaatgatacatcrtgatttccattttttagccttattggaactccagagaccaagaaaagctacaagctgaggcagaaaaggctgcgggtaaattttatggacttaacctggctgatataagggggtaatctctacttgcacacataggtgcctccccagtacataggatgataaagctttagctctgccaggaacaatttcagactggaacacatgggaccaaggcaaggctccttgttttggctcaatttaactactacgtccatctcacacctcctcctaaggaatatatttgcaaggcctaggcttccacctttaaccccacccctcctacccccaattccaaggccatgtgagaaaaaaaatctattctagctctgctcatcagttttatctcctttatttttatttgccagttttatgttgtctattgatcacttactaatgagttgcccatctagcaactatgtctcatgcttc

SEQ ID NO: 379607 - DNA, 654 bp, Homo sapiens
agatttggcctaggcatgcttctttacattataatgatactgtacaagtagatttgctttgtaaaaaggaaggaaaatgggaagaagttccttaatgtgcaggcttttataaccctctaccaggattctaacttaagggctacctgtagaacatgtctggttcatgatacccccaggcacccagaagacatgccagatatcctagatgacctctcctagctactactcctaggagacctgtggccctcttcagatcccccaccagttctctagtgcaaggttccaccttaaggtcgtcaggcacccctcccacttatccaacaagccctggcccrtatcctctactgcctgaagaagtaaacctaaccagtaccaccaggaacggggccccatatcagcccccagaattgaaaatgttttcattgcagtgggtagctgatggagatggaggagtggccggagtgtatgtgcctttttctatgcctgatttggctttgtgcaagcaaaaatatggtcagtttttggaggatccaggcaaacatgtagaggagtttgttaagttgaccatgtctttttatttaactgtgcaaatattatccacttcttgtactgtagaggaaaaacaaagaattctaggtattgctcatgaacatg

SEQ ID NO: 379608 - DNA, 605 bp, Homo sapiens
agaaacttagtttatagtttaaacagagatggtggcagccctttcccagggcagacttcctttttacctggggactaaattgcttttgtaggactaagattagccacaagattataaattatggtttaggagtcatgcagctggaggctgaaagattctgagcctctctaaactgctcctaagatcattgcttgagagattttgcagatcctgtacttaatggatcagccggcaccacccagatcgataaactggctcatctgatcttgtggtccccatccaggaacaaactcagcgcaagaagacagcttcractccctatgacttcgtccctgaccagtcagcactcctggctccctggcctcccccaacctgccaagttgtcctgaaaaaccctgctccccgaatgcttggggagactgatttgagtcataataaaactctggtctcccacacagctggctctgtgtgaattactctttctctattgcaattcccttgtcttgatgaatcagctctgtctaggtaatgggcaaggtgattcccttgagcgattacaatgaaatggaattggttttaataagtaccacaaaggtagggaaaag

SEQ ID NO: 379609 - DNA, 605 bp, Homo sapiens
agaaacttagtttatagtttaaacagagatggtggcagccctttcccagggcagacttcctttttacctggggactaaattgcttttgtaggactaagattagccacaagattataaattatggtttaggagtcatgcagctggaggctgaaagattctgagcctctctaaactgctcctaagatcattgcttgagagattttgcagatcctgtacttaatggatcagccggcaccacccagatcgataaactggctcatctgatcttgtggtccccatccaggaacaaactcagcgcaagaagacagcttcgactccctatgacttcgtccctgaccagtcagcactcctggctccctggcctcccccaacctgccaagttgtcctgaaaaaccctgctccccraatgcttggggagactgatttgagtcataataaaactctggtctcccacacagctggctctgtgtgaattactctttctctattgcaattcccttgtcttgatgaatcagctctgtctaggtaatgggcaaggtgattcccttgagcgattacaatgaaatggaattggttttaataagtaccacaaaggtagggaaaag

SEQ ID NO: 379610 - DNA, 607 bp, Homo sapiens
caatgcccagccttactgtctctgcgccaacagtgaggcctgtcctgggggagggttcatagtctcaccctctcagctgacatgacctcccctgaaaatattgctccaggaaatgggattttaataaatccccttgggcatgtctcctggccygccatttcttcaaactttaccaccaaatgagctctgaaccttgaggccttgttctgccccccatggcttgctgtgtctcaccactcattggagtctaagatctttctcctgccttacaaaaccaaaactataattttaacctagaaatcactgaccggaaaaccagacagaggctgtttctgacaaaatagatagtgtcagtaaccaatctgaaaagcaacacctccctgtccagccctctgtccaaaatataaagtctgtctcatgggttctatagatgctgccactcacatatccctctttgtgccactagcctgggctattaccaactagagggagttaactatgcttctgttaatatcaggtcttccttcactgagctttaatgaggatccagcactaatttatttttcagttctttgtttctcctttctactccctcttgtgtgtgttc

SEQ ID NO: 379611 - DNA, 607 bp, Homo sapiens
caatgcccagccttactgtctctgcgccaacagtgaggcctgtcctgggggagggttcatagtctcaccctctcagctgacatgacctcccctgaaaatattgctccaggaaatgggattttaataaatccccttgggcatgtctcctggcccgccayttcttcaaactttaccaccaaatgagctctgaaccttgaggccttgttctgccccccatggcttgctgtgtctcaccactcattggagtctaagatctttctcctgccttacaaaaccaaaactataattttaacctagaaatcactgaccggaaaaccagacagaggctgtttctgacaaaatagatagtgtcagtaaccaatctgaaaagcaacacctccctgtccagccctctgtccaaaatataaagtctgtctcatgggttctatagatgctgccactcacatatccctctttgtgccactagcctgggctattaccaactagagggagttaactatgcttctgttaatatcaggtcttccttcactgagctttaatgaggatccagcactaatttatttttcagttctttgtttctcctttctactccctcttgtgtgtgttc

SEQ ID NO: 379612 - DNA, 547 bp, Homo sapiens
gtaaacggacaaaccaagaatactccattactataattgtagtgtgcaattcacttaacatgctagtatgaagcccaaaagacaaatctatcaaaaataatagatcctgaatcaaagaccagaggaaaaatataggtatagcaacctattaaaagatagatgatattaaaatatgtaaattgagacaaccaaaagtcaaaatatggggacatggagttaaaatgtagaatttgttgtttttttttggtttgtttatattcttttatatgtagtctaagttgtcaycttttaaaaataattttttatatatataagatgttttctgtaagcctcatgttaaccacagtacaacaggctataataagttcactaaaaataaaaagcaacaaattaaaacatactaccagagaaaattactaacaacaaaagaagacagtaagacagtaaaaaagaaagagagtactctcaaaataaacgaaaacaagcaacactatggcagtagtaaattatcaaaattatttatcaaaattaacactgaatgtaaata

SEQ ID NO: 379613 - DNA, 661 bp, Homo sapiens
tgtgatctctcactctttctctttctgtgattctctttcctcttttgaaaaccttatccaaggagaaatatcaatgacttcagaagggcaatagggggtgatcctaaggcttatactatgactcagataacgtacagaaacattttactctctttattttagtctataatttgatattcgtctcaaatccccatccactggttagcaggagaaaaaaacaacaaaccaaactaayagttcaatctaattttcatttagtctaacctgacaatttagtatatttttaggaattattcattctctgttggataaaatgatgcttgattactaagaaagccttcccctgcttctcatcccaatgtgtggtggaaagagtgtggtttattcaagcttctggtgctgagaaggaactctagcctcagccttgtttttctgttgcagcagctccatctgctggtctctcgagcactgttttttatgaacctagttgttcagcattctgcaggacaccactgctgaactggctagttcacatggggtctacactttctacagggacaatgtttctgagttgctaatgctgtaagaaaaattttgctgtctgcataaccctgagttgattgccacatcctccagcctacaagttggtccagcattccac

SEQ ID NO: 379614 - DNA, 592 bp, Homo sapiens
aggggtttacttcctgcacctgccaaccccacatataggcatgacacacatgccttgcctacatgkttccaaactatattcattcattatacatattcatagccatcatgcactagatactgttcctgcccatggtaataaaaggatgtaaaagaaaatctgatcctgtcaccatggtgcttatagtctaatcagggagacagagtattgatgaaacaactgcactcagccactagttcaatgtggacactgaccacagtaaatttgaaaataaacctagaaaccattatgttttgataggtgatatgttcccaaaacaaaaattcctagtttcttatctccttgccttgtaacacacgctagaatgatatctcctgggcctctgctacctaatagagatcttatcaaaaagtcttgtgttgcttttccataatgaagcctgtgcttccttgattggaaccttgtctatgcaaattacaaagggacagacaatagtggacccagctctatcctgtattttatggccctgtcctgcagaaatccattttctagcttgcaacctattcctctctctcctcttggactagttaaa

SEQ ID NO: 379615 - DNA, 661 bp, Homo sapiens
tgtgatctctcactctttctctttctgtgattctctttcctcttttgaaaaccttatccaaggagaaatatcaatgacttcagaagggcaatagggggtgatcctaaggcttatactatgactcagataacgtacagaaacattttactctctttattttagtctataatttgatattcgtctcaaatccccatccactggttagcaggagaaaaaaacaacaaaccaaactaatagttcaatctaattttcatttagtctaacctgacaatttartatatttttaggaattattcattctctgttggataaaatgatgcttgattactaagaaagccttcccctgcttctcatcccaatgtgtggtggaaagagtgtggtttattcaagcttctggtgctgagaaggaactctagcctcagccttgtttttctgttgcagcagctccatctgctggtctctcgagcactgttttttatgaacctagttgttcagcattctgcaggacaccactgctgaactggctagttcacatggggtctacactttctacagggacaatgtttctgagttgctaatgctgtaagaaaaattttgctgtctgcataaccctgagttgattgccacatcctccagcctacaagttggtccagcattccac

SEQ ID NO: 379616 - DNA, 661 bp, Homo sapiens
tgtgatctctcactctttctctttctgtgattctctttcctcttttgaaaaccttatccaaggagaaatatcaatgacttcagaagggcaatagggggtgatcctaaggcttatactatgactcagataacgtacagaaacattttactctctttattttagtctataatttgatattcgtctcaaatccccatccactggttagcaggagaaaaaaacaacaaaccaaactaatagttcaatctaattttcatttagtctaacctgacaatttagtatatttttaggaattattcattctctgttggataaaatgatgcttgattactaagaaagccttcccctgcttctcatcccaatgtgtggtggaaagagtgtggtttattcaagcttctggtgytgagaaggaactctagcctcagccttgtttttctgttgcagcagctccatctgctggtctctcgagcactgttttttatgaacctagttgttcagcattctgcaggacaccactgctgaactggctagttcacatggggtctacactttctacagggacaatgtttctgagttgctaatgctgtaagaaaaattttgctgtctgcataaccctgagttgattgccacatcctccagcctacaagttggtccagcattccac

SEQ ID NO: 379617 - DNA, 661 bp, Homo sapiens
tgtgatctctcactctttctctttctgtgattctctttcctcttttgaaaaccttatccaaggagaaatatcaatgacttcagaagggcaatagggggtgatcctaaggcttatactatgactcagataacgtacagaaacattttactctctttattttagtctataatttgatattcgtctcaaatccccatccactggttagcaggagaaaaaaacaacaaaccaaactaatagttcaatctaattttcatttagtctaacctgacaatttagtatatttttaggaattattcattctctgttggataaaatgatgcttgattactaagaaagccttcccctgcttctcatcccaatgtgtggtggaaagagtgtggtttattcaagcttctggtgctragaaggaactctagcctcagccttgtttttctgttgcagcagctccatctgctggtctctcgagcactgttttttatgaacctagttgttcagcattctgcaggacaccactgctgaactggctagttcacatggggtctacactttctacagggacaatgtttctgagttgctaatgctgtaagaaaaattttgctgtctgcataaccctgagttgattgccacatcctccagcctacaagttggtccagcattccac

SEQ ID NO: 379618 - DNA, 552 bp, Homo sapiens
tttctacagggacaatgtttctgagttgctaatgctgtaagaaaaattttgctgtctgcataaccctgagttgattgccacatcctccagcctacaagttggtccagcattccacactctgttattgtcaagtcaactcattcggctatggaggcctataagagcccaccrggtttcaattcagtatctaaatcacataaaaactcaaggcatctttgtaaagttaaaccccaggggctctctctacttgactgtgatgtgctacatttctgtgactgagtcctaaagttgatgcatggcataattaatccatttggatgtcaaaagactaatattacctcagtcttatttctctctacttttctttcataaagaattctaactccttccagacaaatgaatgtctccggtagagtaagaagatgctttaattatgacacttttacctacatcttcatcttcacttttgttgtctgataaggtcaaagccttatcctgtgctctgttcactgcacctccaggtgtttagtctggaaagcttgagatgtggaa

SEQ ID NO: 379619 - DNA, 380 bp, Homo sapiens
gatgaatgcacacatcaaaaatcggtttctcagataacttccttctagtttttatcctgggatactcgcttttttgacattggtctcaataagctccaaaatgtccacttgcagaatgaagaaaggcagtgcttccaaactactgaatctaaagaaagttttaactctgtgatatgaatgaacacatcacaaagcattttctcagaaagmttctttccagtatttacataaagatttttcctttttgaccataggcttcaatgcactggcaaatatcttttcacaggttctccaaaaaccgtgtttccaaactgctgaatgaaagaaaagatttaactctgctagatgaataagacatcacaaagtgatttctcagatag

SEQ ID NO: 379620 - DNA, 495 bp, Homo sapiens
tttttttttagtatttattaatcattctttggtgtttctcagagagggggatgtggcagggccataggataatagtggagagaaggtcagcagataaacatgtgaacaaagttctctggttttcataggcagaggtccctgcggccttccacaatgtttgtgtccctgggtacttgagattagggagtggtgatgactcttaacgagcatgctgccttcaagcatctgtttaacaaagcacatcttgcagcrcccttaatccatttaaccctgagttgacacagcaaatgtttcagagagcacggggttgggggtaaggttatagattaacagcatcccaaggcaaaagaatttttcttagtacagaacaaaatggtgtctcctatgtctacttctttctacacagacacagtaacaatctgatctctctttcttttccccatatttcccccttttctttttgacaaaaccgccatcatcatctgcgaaggtatg

SEQ ID NO: 379621 - DNA, 495 bp, Homo sapiens
tttttttttagtatttattaatcattctttggtgtttctcagagagggggatgtggcagggccataggataatagtggagagaaggtcagcagataaacatgtgaacaaagttctctggttttcataggcagaggtccctgcggccttccacaatgtttgtgtccctgggtacttgagattagggagtggtgatgactcttaacgagcatgctgccttcaagcatctgtttaacaaagcacatcttgcagcacccttaatccatttraccctgagttgacacagcaaatgtttcagagagcacggggttgggggtaaggttatagattaacagcatcccaaggcaaaagaatttttcttagtacagaacaaaatggtgtctcctatgtctacttctttctacacagacacagtaacaatctgatctctctttcttttccccatatttcccccttttctttttgacaaaaccgccatcatcatctgcgaaggtatg

SEQ ID NO: 379622 - DNA, 479 bp, Homo sapiens
taaacatgtgaacaaagttctctggttttcataggcagaggtccctgcggccttccacaatgtttgtgtccctgggtacttgagattagggagtggtgatgactcttaacgagcatgctgccttcaagcatctgtttaacaaagcacatcttgcagcacccttaatccatttaaccctgagttgacacagcamatgtttcagagagcacggggttgggggtaaggttatagattaacagcatcccaaggcaaaagaatttttcttagtacagaacaaaatggtgtctcctatgtctacttctttctacacagacacagtaacaatctgatctctctttcttttccccatatttcccccttttctttttgacaaaaccgccatcatcatctgcgaaggtatgtataggagggctttgaggcctatggtgaaaaagaaaatatcttcagataaaaactagaaagaagctttctgagaaact

SEQ ID NO: 379623 - DNA, 479 bp, Homo sapiens
taaacatgtgaacaaagttctctggttttcataggcagaggtccctgcggccttccacaatgtttgtgtccctgggtacttgagattagggagtggtgatgactcttaacgagcatgctgccttcaagcatctgtttaacaaagcacatcttgcagcacccttaatccatttaaccctgagttgacacagcaaatgtttcagagagcacggggttgggggtaaggttatagattaacagcatcccaaggmaaaagaatttttcttagtacagaacaaaatggtgtctcctatgtctacttctttctacacagacacagtaacaatctgatctctctttcttttccccatatttcccccttttctttttgacaaaaccgccatcatcatctgcgaaggtatgtataggagggctttgaggcctatggtgaaaaagaaaatatcttcagataaaaactagaaagaagctttctgagaaact

SEQ ID NO: 379624 - DNA, 546 bp, Homo sapiens
tttaactctgtgagatgaatgcacacatcaaaaagcagtttcccagaaagcttctttctagtttttatctgaaaatatttcctttttcaccatagrcctccatgcggtcccagatatcacttcgcagattctacaaaaacagtgtttccaaactgctgaatgaaaagaaagatttatctcagagagatgaatgtactcatcacaaagcagtttctcagatggtgtccatctagtttgcatcatgggatattcactttttcgcctttggcctcaatgagctcccaaatatcactttgcagattctacagcattttccaaactgctgaatagaaaggaaaatttaactctgggtgatgaatgcacatatcacaaaacagtttctcagaaagctactttcttgtttttatctgaagatatttcccttttagcataggcctcaatgggctcccaaacatcccttcgtggatcctgccaaaacagtgtttccagacggatgaatgaaaacaaagttttaactctgcgaggtgaatgcacacatcacaaagt

SEQ ID NO: 379625 - DNA, 546 bp, Homo sapiens
tttaactctgtgagatgaatgcacacatcaaaaagcagtttcccagaaagcttctttctagtttttatctgaaaatatttcctttttcaccatagacctccatgcggtcccagatatcacttcrcagattctacaaaaacagtgtttccaaactgctgaatgaaaagaaagatttatctcagagagatgaatgtactcatcacaaagcagtttctcagatggtgtccatctagtttgcatcatgggatattcactttttcgcctttggcctcaatgagctcccaaatatcactttgcagattctacagcattttccaaactgctgaatagaaaggaaaatttaactctgggtgatgaatgcacatatcacaaaacagtttctcagaaagctactttcttgtttttatctgaagatatttcccttttagcataggcctcaatgggctcccaaacatcccttcgtggatcctgccaaaacagtgtttccagacggatgaatgaaaacaaagttttaactctgcgaggtgaatgcacacatcacaaagt

SEQ ID NO: 379626 - DNA, 546 bp, Homo sapiens
tttaactctgtgagatgaatgcacacatcaaaaagcagtttcccagaaagcttctttctagtttttatctgaaaatatttcctttttcaccatagacctccatgcggtcccagatatcacttcgcagattctacaaaaacagtgtttccaaactgctgaatgaaaagaaagatttatctcagagagatgaatgtactcatcacaaagcagtttctcagatggtgtccatctagtttgcatcatgggatattcactttttcgcctttggcctcaatgagctcccaaatatcactttgcagattctacagcattttccaaactgctgaatagaaaggaaaatttaactctgggtgatgaatgcacatatcacaaaacagtttctcagaaagctactttcttgtttttatctgaagatatttcccttttagcataggcctcaatgggctcccaaayatcccttcgtggatcctgccaaaacagtgtttccagacggatgaatgaaaacaaagttttaactctgcgaggtgaatgcacacatcacaaagt

SEQ ID NO: 379627 - DNA, 576 bp, Homo sapiens
ccaaaatgtccattcacagaatggaaaaaaaaaagtgtttccaaactgctgaatggaaagaaaattttaactctgagagatgaatgcacgcattagaaattagtttctcagaaatcttctttctagtttttatctgaaggtatttcctttttcaccataggcctctatgcattcccaaatatccctttgctgaytgtgccaaaacagtgtttccagactgctgaatgaaagaaaggcttatctctgtgaggtgaatgcacacatcacaaagcattttgtcatataacttccttctagtttttatcctgtgatattcacttttgtgccattggcctcaaagaactcccaaatgtccactcacagaatggacgaaacagttttgcaagtggctgaatccatggaaagttttaatcctgtgaggtgaatgcacacatcacaaagcagtttgtcagaaagcttctttctagtttttatctgaagatgttcctttttcaacataggcctcaatgtgctcccagatatcccattgcagaatctatgaaaacagtgtttttaaactcatgaaggaaaagaact

SEQ ID NO: 379628 - DNA, 576 bp, Homo sapiens
ccaaaatgtccattcacagaatggaaaaaaaaaagtgtttccaaactgctgaatggaaagaaaattttaactctgagagatgaatgcacgcattagaaattagtttctcagaaatcttctttctagtttttatctgaaggtatttcctttttcaccataggcctctatgcattcccaaatatccctttgctgattgtgccaaaacagtgtttccagactgctgaatgaaagaaaggcttatctctgtgaggtgaatgcacacatcacaaagcattttgtcatataacttccttctagtttttatcctgtgatattcacttttgtgccattggcctcaaagaactcccaaatgtccactcacagaatggaygaaacagttttgcaagtggctgaatccatggaaagttttaatcctgtgaggtgaatgcacacatcacaaagcagtttgtcagaaagcttctttctagtttttatctgaagatgttcctttttcaacataggcctcaatgtgctcccagatatcccattgcagaatctatgaaaacagtgtttttaaactcatgaaggaaaagaact

SEQ ID NO: 379629 - DNA, 576 bp, Homo sapiens
ccaaaatgtccattcacagaatggaaaaaaaaaagtgtttccaaactgctgaatggaaagaaaattttaactctgagagatgaatgcacgcattagaaattagtttctcagaaatcttctttctagtttttatctgaaggtatttcctttttcaccataggcctctatgcattcccaaatatccctttgctgattgtgccaaaacagtgtttccagactgctgaatgaaagaaaggcttatctctgtgaggtgaatgcacacatcacaaagcattttgtcatataacttccttctagtttttatcctgtgatattcacttttgtgccattggcctcaaagaactcccaaatgtccactcacagaatggacgaaacagttttgcaartggctgaatccatggaaagttttaatcctgtgaggtgaatgcacacatcacaaagcagtttgtcagaaagcttctttctagtttttatctgaagatgttcctttttcaacataggcctcaatgtgctcccagatatcccattgcagaatctatgaaaacagtgtttttaaactcatgaaggaaaagaact

SEQ ID NO: 379630 - DNA, 576 bp, Homo sapiens
ccaaaatgtccattcacagaatggaaaaaaaaaagtgtttccaaactgctgaatggaaagaaaattttaactctgagagatgaatgcacgcattagaaattagtttctcagaaatcttctttctagtttttatctgaaggtatttcctttttcaccataggcctctatgcattcccaaatatccctttgctgattgtgccaaaacagtgtttccagactgctgaatgaaagaaaggcttatctctgtgaggtgaatgcacacatcacaaagcattttgtcatataacttccttctagtttttatcctgtgatattcacttttgtgccattggcctcaaagaactcccaaatgtccactcacagaatggacgaaacagttttgcaagtggctgaatccayggaaagttttaatcctgtgaggtgaatgcacacatcacaaagcagtttgtcagaaagcttctttctagtttttatctgaagatgttcctttttcaacataggcctcaatgtgctcccagatatcccattgcagaatctatgaaaacagtgtttttaaactcatgaaggaaaagaact

SEQ ID NO: 379631 - DNA, 533 bp, Homo sapiens
atgcacacatcacaaagcagtttatcaaaaagcttctttctagttcttatctgaagttattttctttttcagtatcggcctcaatgtgcttccagatatcccttcacagattctgtgaaagcagtgtttccaaactgcagratgaaaagaaacgtttacctctgtgagttgaatgcgcgcatcacaaagcaatttctcaaatagcttctttctagtttttatcctgggatattcacttttttgcaattggcctcaattagctcccaaatgttcttctgaagaatggacaaaaagagtatttgcaaactgcttaatccatagaaaggattaactctgtgagatgaatgcacacacccaaagttgtttctcagaaagattctctctagtttctttttttattattatactttaagttttagggtacatgtgcacaatgtgcaggtttctatttgaagatacttcgtttttcaacataggcctccatgcgatcccaattataactttgcagatcctacaaaaatagtgtttccata

SEQ ID NO: 379632 - DNA, 533 bp, Homo sapiens
atgcacacatcacaaagcagtttatcaaaaagcttctttctagttcttatctgaagttattttctttttcagtatcggcctcaatgtgcttccagatatcccttcacagattctgtgaaagcagtgtttccaaactgcagaatgaaaagaaacgtttacctctgtgagttgaatgcgcgcatcacaaagcaatttctcaaatagcttctttctagtttttatcctgggatattcacttttttgcaattggcctcaattagctcccaaatgttcttctgaagaatggacaaaaagagtatttgcaaactgcttaatccatagaaaggmttaactctgtgagatgaatgcacacacccaaagttgtttctcagaaagattctctctagtttctttttttattattatactttaagttttagggtacatgtgcacaatgtgcaggtttctatttgaagatacttcgtttttcaacataggcctccatgcgatcccaattataactttgcagatcctacaaaaatagtgtttccata

SEQ ID NO: 379633 - DNA, 533 bp, Homo sapiens
atgcacacatcacaaagcagtttatcaaaaagcttctttctagttcttatctgaagttattttctttttcagtatcggcctcaatgtgcttccagatatcccttcacagattctgtgaaagcagtgtttccaaactgcagaatgaaaagaaacgtttacctctgtgagttgaatgcgcgcatcacaaagcaatttctcaaatagcttctttctagtttttatcctgggatattcacttttttgcaattggcctcaattagctcccaaatgttcttctgaagaatggacaaaaagagtatttgcaaactgcttaatccatagaaaggattaactctgtgagatgaatgcacacacccaaagttgtttctcagaaagattctctctagtttctttttttattattatactttaagttttagggtacwtgtgcacaatgtgcaggtttctatttgaagatacttcgtttttcaacataggcctccatgcgatcccaattataactttgcagatcctacaaaaatagtgtttccata

SEQ ID NO: 379634 - DNA, 533 bp, Homo sapiens
atgcacacatcacaaagcagtttatcaaaaagcttctttctagttcttatctgaagttattttctttttcagtatcggcctcaatgtgcttccagatatcccttcacagattctgtgaaagcagtgtttccaaactgcagaatgaaaagaaacgtttacctctgtgagttgaatgcgcgcatcacaaagcaatttctcaaatagcttctttctagtttttatcctgggatattcacttttttgcaattggcctcaattagctcccaaatgttcttctgaagaatggacaaaaagagtatttgcaaactgcttaatccatagaaaggattaactctgtgagatgaatgcacacacccaaagttgtttctcagaaagattctctctagtttctttttttattattatactttaagttttagggtacatgtgcacaatgtgcagktttctatttgaagatacttcgtttttcaacataggcctccatgcgatcccaattataactttgcagatcctacaaaaatagtgtttccata

SEQ ID NO: 379635 - DNA, 575 bp, Homo sapiens
tcccttcgcagaccctacaaaaacagtgtttccaaactgcataatgaaaagaaagttttgactctgaaatgtgaattcacacwtcacaaagttgtttctcagatagcttcctactatatttttttctgggttattctcttttttgccatttgcctcattaagctcccaaataccactttgcagattctacaacaactgtgtttacaaactgctgaatccaaagaaagctttgactctgtgagatgaatgcacacagcacaaagcagtttatcagaaagtttatttctagtttttatctgaagatatttcctttttcaccatatgcctcatttagctcccaaatatcccttcacagattctgaaaaaacagtgtttccagactgctgaatgaaaagaaaggcttaactctgtgagatgaatgcacacatcatgaagcggtttctcagatagcttccttctagtttttttcctgggatattggctttttcaccattggcttcaatgagctcccaaatgtccattcacagaaggggcaaaaacagtgttttcaatctgctaaatccacagaaaggatt

SEQ ID NO: 379636 - DNA, 575 bp, Homo sapiens
tcccttcgcagaccctacaaaaacagtgtttccaaactgcataatgaaaagaaagttttgactctgaaatgtgaattcacacatcacaaagttgtttctcagatagcttcctactatatttttttctgggttattctcttttttgccatttgcctcattaagctcccaaataccactttgcagattctacaacaactgtgtttacaaactgctgaatccaaagaaagctttgactctgtgagatgaatgcacacagcacaaagcagtttatcagaaagtttatttctagtttttatctgaagatatttcctttttcaccatatgcctcatttagctcccaaatatcccttcacagattctgamaaaacagtgtttccagactgctgaatgaaaagaaaggcttaactctgtgagatgaatgcacacatcatgaagcggtttctcagatagcttccttctagtttttttcctgggatattggctttttcaccattggcttcaatgagctcccaaatgtccattcacagaaggggcaaaaacagtgttttcaatctgctaaatccacagaaaggatt

SEQ ID NO: 379637 - DNA, 603 bp, Homo sapiens
cagattctacaacaacagtgtttccaaaatgctgaatgcaaacaarggtttagctctttgagatggatgcacatatcacaaagccatttctcagagtgcttctttatagtttttatctgaagatatttcctttttcaccataggcctcaatgggctcccaaatatcatttcagagattctgcaagaacagtgtttccagattgctgaatgaaaagtatgttttacttctatgagatgaatgcacacatcacaaagtggtttctcagatagcttctctctactttttatcctgggatattcactttttcacctttggcctcaatgagctcccaaatgtccattcacagaatggacaaaaacagtgtttccaaactgcccattccacagaaatggttatctctgtgagatgaatgcacacatctcaaagctgtttctcaaataacttccttctagtgttcatcctgggatatttgcttctttgccattgacatcaatgagctcccaaatgtccatttgcagaaagtacaaaaacagtgtttgcaaactgctgaatccacagaaaggtttaactgtgtgagatgagtgcacacatcagaaaacagt

SEQ ID NO: 379638 - DNA, 489 bp, Homo sapiens
ttggcctcaatgagctcccaaatgtccattcacagaatggacaaaaacagtgtttccaaactgcccattccacagaaatggttatctctgtgagatgaatgcacacatctcaaagctgtttctcaaataacttccttctagtgttcatcctgggatatttgcttctttgccattgacatcaatgagctcccaaatgtccatttgcagaaagtacaaaaacagtgtttgcaaactgctgaatccacagaaaggtttaactgtgtgagatgagtgcacacatcagaaaacagtttctcagaaaacttctctctagttttatctgaagatatttcctttatcaccattggcctcagtgcgctcccaaatatccctttgtggattctgtcaaaacagtgtttccagacagctgtargaaacaaaagttttaactccatgaggtgaatgcacacatcagaaagtggtttctcagatggcttctttctagttttt

SEQ ID NO: 379639 - DNA, 554 bp, Homo sapiens
atggacaaacacagtgtttccaaactgctgattccacagaaaaggttaactctctgagatgaatgcacacaatcacaaacctgtttctcaaataacttccttctagtttctatcctgggatactccttttttgtcactgacaccaatgagctcccaaatgtccatttgcagaaagtacaaaaacagtgtttgcaaactggtgaatacacagaaagatttaactctgtgagatcaatgcatacattacaaagcagtttctcagaaagcttctttctagtttttaatctgaagttatttcctttttcaccatagtcctcattgcactcccaaatatcccttyggggatcctgtcagaactgtgtttccagattgctgaatgtaaagtaagttttactctgtgaggtgaatgcacacatcagaaagctatttctcagatggctaccttgtaatttttatccttggatcctggctttttggctattgttctcaaagagtgcccaaatattcctttgcagattctacaacaacagtgttttcaaactgctaaatccaca

SEQ ID NO: 379640 - DNA, 554 bp, Homo sapiens
atggacaaacacagtgtttccaaactgctgattccacagaaaaggttaactctctgagatgaatgcacacaatcacaaacctgtttctcaaataacttccttctagtttctatcctgggatactccttttttgtcactgacaccaatgagctcccaaatgtccatttgcagaaagtacaaaaacagtgtttgcaaactggtgaatacacagaaagatttaactctgtgagatcaatgcatacattacaaagcagtttctcagaaagcttctttctagtttttaatctgaagttatttcctttttcaccatagtcctcattgcactcccaaatatcccttcggggatyctgtcagaactgtgtttccagattgctgaatgtaaagtaagttttactctgtgaggtgaatgcacacatcagaaagctatttctcagatggctaccttgtaatttttatccttggatcctggctttttggctattgttctcaaagagtgcccaaatattcctttgcagattctacaacaacagtgttttcaaactgctaaatccaca

SEQ ID NO: 379641 - DNA, 554 bp, Homo sapiens
atggacaaacacagtgtttccaaactgctgattccacagaaaaggttaactctctgagatgaatgcacacaatcacaaacctgtttctcaaataacttccttctagtttctatcctgggatactccttttttgtcactgacaccaatgagctcccaaatgtccatttgcagaaagtacaaaaacagtgtttgcaaactggtgaatacacagaaagatttaactctgtgagatcaatgcatacattacaaagcagtttctcagaaagcttctttctagtttttaatctgaagttatttcctttttcaccatagtcctcattgcactcccaaatatcccttcggggatcctgtcagaactgtgtttccagattgctgaatgtaaagtaagttttactctgtgaggtgaatgcacacatcagaaagctatttctcakatggctaccttgtaatttttatccttggatcctggctttttggctattgttctcaaagagtgcccaaatattcctttgcagattctacaacaacagtgttttcaaactgctaaatccaca

SEQ ID NO: 379642 - DNA, 507 bp, Homo sapiens
aaaaacagtgtttgcaaactggtgaatacacagaaagatttaactctgtgagatcaatgcatacattacaaagcagtttctcagaaagcttctttctagtttttaatctgaagttatttcctttttcaccatagtcctcattgcactcccaaatatcccttcggggatcctgtcagaactgtgtttccagattgctgaatgtaaagtaagttttactctgtgaggtgaatgcacacatcagaaagctatttctcagatggctaccttgtaatttttatccttggatcctggctttttggctattgttctcaaagagtgcccaaatattcctttgcagattctacaacaacagtgttttsaaactgctaaatccacagaatggtttaactctgtgaggtgaatgcacacatccaaagcagtttctcagaaagcttctttctagtttttttctgaagatatttcctttttcaccataggccacaaagctcccccacatatcactttgca

SEQ ID NO: 379643 - DNA, 507 bp, Homo sapiens
caaaatatcatttagcagatgctacagcaacagtgtttccaaactgctgaatcctaagaaacgtttcactctgtgaaatgaatgcacacatcagaaagcagtttttcagaaagcttctttctagtttttatctgaagacatttcctttttcaccacaggcttcaatgcattcccagatatcccttcgcagattctatgaaaacagtgtttccagactgctctatgaaagaaaggtttaactctgtgagatgaattcacacatcacaaagcggtttctcacatgggttcctctagtttttaacctgagatattcaccttttygccattgaactcaaagagctcccaaatgtccatttacagattctacaacaacagtgtttccaaattgctgaatccaaaaaaagatctgtgagatgaatgcacacatcacaaagctgtttctaaaaatgtttctttccagtttttatctgaagatatttaatttttcaccataggcttcaacacgct

SEQ ID NO: 379644 - DNA, 507 bp, Homo sapiens
caaaatatcatttagcagatgctacagcaacagtgtttccaaactgctgaatcctaagaaacgtttcactctgtgaaatgaatgcacacatcagaaagcagtttttcagaaagcttctttctagtttttatctgaagacatttcctttttcaccacaggcttcaatgcattcccagatatcccttcgcagattctatgaaaacagtgtttccagactgctctatgaaagaaaggtttaactctgtgagatgaattcacacatcacaaagcggtttctcacatgggttcctctagtttttaacctgagatattcaccttttcgccattgaactcaaagagctcccaaatgtccatttacagattctacaacmacagtgtttccaaattgctgaatccaaaaaaagatctgtgagatgaatgcacacatcacaaagctgtttctaaaaatgtttctttccagtttttatctgaagatatttaatttttcaccataggcttcaacacgct

SEQ ID NO: 379645 - DNA, 543 bp, Homo sapiens
tgagatgaaggcacacatcatgaattgttttatcagttaacttccttctagttgttattattggatattcacttttttgcccttggcctcaatgagttcccaaatgtccattccacgaatggataaaaaagtgtgtttccaaactgctgaatccaaagacaggtttaaccctctgagatgaatgcacacatctgaaaccagtttctcattaagcttctttctagtttttatctgaagatatttcctctttcaccattggcctccatagtcttccaaatatctcttggcatactctaagaaaacagtgtttctaaactgctgaattaaaaaaaaagatttaactctgtgagatgaatgcacacattatgaatcggtttgtcagataacttcctgcaagtttttatcccrggatattctctttttcaccattggcctcaatgagctcccaaatatccattcacagaatggacaaaaacagtatttccaaactgtcgaatccaaggaaaatttaactctgtgagatgaatgaacacatcacaaagt

SEQ ID NO: 379646 - DNA, 498 bp, Homo sapiens
aaaacctctttctactttttatctgaagatatttcctttgcctgcagaggcttctatgaactccaaaatataacttcgcagattttacaaaaacagtgcttccagactsctgtacgaaaagaaagtttttactctgggaggtgaaggcacatatcaaaaagttatttatcaggtagcttctttctggtttttatcctggcatatttgctttttcaccatgtgcctcaatgcactcccaaatgtccattcacagaatagacaaagacagttttcccaaactgctgattcaacagatatttactttttcaccatagtcctcaatgtgctcccaaatatcccatcatggattctgccaaaacagtgtttctggactgctgaatgaaaaaaatggtttaactctttgaggtgaatgcacagataacaaagtggtttctcagatcgcttccttatactttttaccctgggatattggctttttcgccatgggccttaatgagg

SEQ ID NO: 379647 - DNA, 555 bp, Homo sapiens
tccattcacagaatagacaaagacagttttcccaaactgctgattcaacagatatttactttttcaccatagtcctcaatgtgctcccaaatatcccatcatggattctgccaaaacagtgtttctggactgctgaatgaaaaaaatggtttaactctttgaggtgaatgcacagataacaaagtggtttctcagatcgcttccttatactttttaccctgggatattggctttttcgccatgggccttaatgaggtcccaaatataccttcgcagattctacaacaacagtgtttccaaactgttgaatacaaagaaatgtttaactctgtgagatgaatgcacatatcacaaagcagtttctcagaaagcttctttctagttttattctgcagatatttactttttcaccataggcctcaatgcgctccctaatatcccttcacrgactctgcaaaaacagtgtttccacactactgtatggaaaggaaggtttatctgtgtgaggttcatgcacacatcacaaagcagtttctcagatagcttccttctagt

SEQ ID NO: 379648 - DNA, 538 bp, Homo sapiens
aaattgctttgtgataagtgaattcttctcagagtgtttaaactttctgtggattcagtagtttgcaaacactatttttgtccattctgcaaatggacatttggaaactcattaaggccaatggtgaaactgcaaatatcctcrgataaaaactagagtggagctatctgagaaactgctttctgaagtgtgctttcacctaggagagttaaaactttcctttaatacagcattctggaaacactgttttggcagaatctgtgaagggatattttggagggcattgaggcttatgatgaaaaaggaaatatcttcagaaaaaaactagaaagaaactttctgagaaactgctttgtgatgtgtgcattcaacttacagagttaaacctttctttggattgatctgtttgataacactgttcttgtagaatctgggaagaaatatttgggaacttaatgaggcaaaaggtgagaaagtgaatatcccatgacaaaaaccagagagaagcttaatgagaaacttgcttgggatgtgtgca

SEQ ID NO: 379649 - DNA, 461 bp, Homo sapiens
cttttcattcagcagtttggaaaaactgttttcaaagaatctgcaaagggatatttgggagctcaaggaggcctacaatgaaaaaggaaatatcttcagataaaaactacatggaagctttctgaaaatctacattgtgatrtgtgcattcatctcacagagttaaacctttctttggattcagcagtttggaaacactctttttgtccattctgtgaatggacatttgggaggtcattgagttcaaaggtgaaaaagagaatatcccagaattaaaactagaagaaagctatctgagaaaccgctttgtgatgtgtgcattcatcttgcaaagttaaactttcttttcattcagcattgtggaaacactattttcatagaaacttcaaagggatatctggaagtgcattgaggcctatggtgaaaaaggaaatatactcagataaaatctagaaagaagt

SEQ ID NO: 379650 - DNA, 534 bp, Homo sapiens
aaccgctttgtgatgtgtgcattcatcttgcaaagttaaactttcttttcattcagcattgtggaaacactattttcatagaaacttcaaagggatatctggaagtgcattgaggcctatggtgaaaaaggaaatatactcagataaaatctagaaagaagttctctgagaaactgctttgtgaagtgttcattcagctcacagagataattctttcagtgaaatcagcattttgccaacactgttttcacccattctgcaaaaggacatttgatagttcattaacaacaatggtgaaaaagcaaatatcacaggagaaaaacttgaagaaagctatctgagaaactgctttgtgatgtgtgcattcatctgggagagttaaaactttcttttcatgcagcagtttggaaacagtactttggcagaatccgtgaatgaacatttggaattgcatagasgactatggtgataaaggaaatatcttcagaaaaaacaagatagaagatttacgagaaagtgctttgtgatgtctgc

SEQ ID NO: 379651 - DNA, 443 bp, Homo sapiens
gtgcattcatctgacagatttcaacatttccttggattcaacagtttgtaaacactgttttagtagaatctgccaagggatatttsatagctcattgaggccataggtgaaaaagtgaaaatccccggataaaaactagaaggaagctatctgagaaaccactttgtgatgtatccattcatctagcagagttaaacctttcttttcattcagcattgtggaaacactgtttgcatagaatatgcaaagagaaatttcaaatcacttttagggctatggtaaatgaaattgtggcaataataaatagcttaccaaccaaaaagagtccaggaccagatggattcacagccgaatcctaccagaggtacaaggaggagctggtaccattccttctgaaactattccaatcaatagaaaaagagggaatccttcctaactctttt

SEQ ID NO: 379652 - DNA, 443 bp, Homo sapiens
gtgcattcatctgacagatttcaacatttccttggattcaacagtttgtaaacactgttttagtagaatctgccaagggatatttcatagctcattgaggccataggtgaaaaagtgaaaatccccggataaaaactagaaggaagctatctgagaaaccacwttgtgatgtatccattcatctagcagagttaaacctttcttttcattcagcattgtggaaacactgtttgcatagaatatgcaaagagaaatttcaaatcacttttagggctatggtaaatgaaattgtggcaataataaatagcttaccaaccaaaaagagtccaggaccagatggattcacagccgaatcctaccagaggtacaaggaggagctggtaccattccttctgaaactattccaatcaatagaaaaagagggaatccttcctaactctttt

SEQ ID NO: 379653 - DNA, 443 bp, Homo sapiens
gtgcattcatctgacagatttcaacatttccttggattcaacagtttgtaaacactgttttagtagaatctgccaagggatatttcatagctcattgaggccataggtgaaaaagtgaaaatccccggataaaaactagaaggaagctatctgagaaaccactttgtgatgtatccattcatctagcagagttaaacctttcttttcattcagcattgtggaaacactgtttgcatagaatatgcaaagagaaatttcaaatcacttttagggctatggtaaatgaaattgtggcaataataaatrgcttaccaaccaaaaagagtccaggaccagatggattcacagccgaatcctaccagaggtacaaggaggagctggtaccattccttctgaaactattccaatcaatagaaaaagagggaatccttcctaactctttt

SEQ ID NO: 379654 - DNA, 443 bp, Homo sapiens
gtgcattcatctgacagatttcaacatttccttggattcaacagtttgtaaacactgttttagtagaatctgccaagggatatttcatagctcattgaggccataggtgaaaaagtgaaaatccccggataaaaactagaaggaagctatctgagaaaccactttgtgatgtatccattcatctagcagagttaaacctttcttttcattcagcattgtggaaacactgtttgcatagaatatgcaaagagaaatttcaaatcacttttagggctatggtaaatgaaattgtggcaataataaatagcttaccaaccaaaaagagtccaggaccagatggattcacagccgaatyctaccagaggtacaaggaggagctggtaccattccttctgaaactattccaatcaatagaaaaagagggaatccttcctaactctttt

SEQ ID NO: 379655 - DNA, 576 bp, Homo sapiens
taaaacattcttttcattcagtggtttggagacactgttttttagaatctgtgaagttatatttgggagtgcatagaggactawgctgaaaaagaaaataacttcagataaaaagtagaaagaagcctcctaagaaactgcttcatgatgtgtgcattcatctcacagagttcaacctttcttctgattcagccatttggaaacatcgttgttgtacaatctgcgaagggatatttgggagctcattgagacaaatttcgtaaatgagaatatcccaggataaaaactagaagcaaactatttgagaaacagctttgtgttgtgtgcattcatctcacagaattaaaactttctttcattcaacagtttggaaatactgttttcgtagaatctgtgaagggacatctgggagtgccttcaggcctgtggtgaaaaagcaaatatcttcagataaaaacttgaaagaatccttttgagaaactgtttagtgaagtgtgcattcagctcacagatttaaaactttctgtggattcagcggtttgcaaatactgtttttgtgcattgtgtgaagggaca

SEQ ID NO: 379656 - DNA, 576 bp, Homo sapiens
taaaacattcttttcattcagtggtttggagacactgttttttagaatctgtgaagttatatttgggagtgcatagaggactatgctgaaaaagaaaataacttcagataaaaagtagaaagaagcctcctaagaaactgcttcatgatgtgtgcattcatctcacagagttcaacctttcttctgattcagccatttggaaacatcgttgttgtacaatctgygaagggatatttgggagctcattgagacaaatttcgtaaatgagaatatcccaggataaaaactagaagcaaactatttgagaaacagctttgtgttgtgtgcattcatctcacagaattaaaactttctttcattcaacagtttggaaatactgttttcgtagaatctgtgaagggacatctgggagtgccttcaggcctgtggtgaaaaagcaaatatcttcagataaaaacttgaaagaatccttttgagaaactgtttagtgaagtgtgcattcagctcacagatttaaaactttctgtggattcagcggtttgcaaatactgtttttgtgcattgtgtgaagggaca

SEQ ID NO: 379657 - DNA, 576 bp, Homo sapiens
taaaacattcttttcattcagtggtttggagacactgttttttagaatctgtgaagttatatttgggagtgcatagaggactatgctgaaaaagaaaataacttcagataaaaagtagaaagaagcctcctaagaaactgcttcatgatgtgtgcattcatctcacagagttcaacctttcttctgattcagccatttggaaacatcgttgttgtacaatctgcgaagggatatttgggagctcattgagacaaatttcgtaaatgagaatatcccaggataaaaactagaagcaaactatttgagaaacagctttgtgttgtgtgcattcatctcacagaattaaaactttctttcattcaacagtttggaaatactgttttcgtagaatctgtgaagggacatctgggagtgcctkcaggcctgtggtgaaaaagcaaatatcttcagataaaaacttgaaagaatccttttgagaaactgtttagtgaagtgtgcattcagctcacagatttaaaactttctgtggattcagcggtttgcaaatactgtttttgtgcattgtgtgaagggaca

SEQ ID NO: 379658 - DNA, 576 bp, Homo sapiens
taaaacattcttttcattcagtggtttggagacactgttttttagaatctgtgaagttatatttgggagtgcatagaggactatgctgaaaaagaaaataacttcagataaaaagtagaaagaagcctcctaagaaactgcttcatgatgtgtgcattcatctcacagagttcaacctttcttctgattcagccatttggaaacatcgttgttgtacaatctgcgaagggatatttgggagctcattgagacaaatttcgtaaatgagaatatcccaggataaaaactagaagcaaactatttgagaaacagctttgtgttgtgtgcattcatctcacagaattaaaactttctttcattcaacagtttggaaatactgttttcgtagaatctgtgaagggacatctgggagtgccttcaggcctgtgktgaaaaagcaaatatcttcagataaaaacttgaaagaatccttttgagaaactgtttagtgaagtgtgcattcagctcacagatttaaaactttctgtggattcagcggtttgcaaatactgtttttgtgcattgtgtgaagggaca

SEQ ID NO: 379659 - DNA, 554 bp, Homo sapiens
attctgaaaccttcctctctcaactcgtcaaagtcattctccatcctgtyttgttccattgctggtgaggagctgcattcctttggaggaggagaggcactctgatttttagagtttgcagtttttcttctctgtttctttcccatctttgtggttttatctacctttggtttttgatgatggtgatgtacagatgggtttttggtgtggatgtcctttatgtttgttagttttccttctaacagacaggaccctcagtgctggtctgttggagtttgctagaggtccactccagaccctgttttcctgggtatcagcagtggtggctgcagaacagtggatattggtgaaccacaaatgctgctgtctgatcattcctctggaagttttgtctgagaggagtacccggccttgtgaggtatcagtctgcccctactgtggggtgcctcccagttaggctactcggggatgagtacccacttgaggaggctgtctgcccgttctcagatatcaaactgcatgctgtgacaaccactactctcttcaaagctgtc

SEQ ID NO: 379660 - DNA, 554 bp, Homo sapiens
attctgaaaccttcctctctcaactcgtcaaagtcattctccatcctgttttgttccattgctggtgaggagctgcattcctttggaggaggagaggcactctgatttttagagtttgcagtttttcttctctgtttctttcccatctttgtggttttatctacctttggtttttgatgatggtgatgtacagatgggtttttggtgtggatgtcctttatgtttgttagttttccttctaacagacaggaccctcagtgcyggtctgttggagtttgctagaggtccactccagaccctgttttcctgggtatcagcagtggtggctgcagaacagtggatattggtgaaccacaaatgctgctgtctgatcattcctctggaagttttgtctgagaggagtacccggccttgtgaggtatcagtctgcccctactgtggggtgcctcccagttaggctactcggggatgagtacccacttgaggaggctgtctgcccgttctcagatatcaaactgcatgctgtgacaaccactactctcttcaaagctgtc

SEQ ID NO: 379661 - DNA, 554 bp, Homo sapiens
attctgaaaccttcctctctcaactcgtcaaagtcattctccatcctgttttgttccattgctggtgaggagctgcattcctttggaggaggagaggcactctgatttttagagtttgcagtttttcttctctgtttctttcccatctttgtggttttatctacctttggtttttgatgatggtgatgtacagatgggtttttggtgtggatgtcctttatgtttgttagttttccttctaacagacaggaccctcagtgctggtctgttggagtttgctagaggtccactccagaccctgttttcctgggtatcagcagtggtggctgcagaacagtggatattggtgaaccacaaatgctgctgtctgwtcattcctctggaagttttgtctgagaggagtacccggccttgtgaggtatcagtctgcccctactgtggggtgcctcccagttaggctactcggggatgagtacccacttgaggaggctgtctgcccgttctcagatatcaaactgcatgctgtgacaaccactactctcttcaaagctgtc

SEQ ID NO: 379662 - DNA, 366 bp, Homo sapiens
gtcctcaaagctctcccaaatgtcccttttcagattctccaagagactgtttccaaactgctcaatcaaaagaaacgtttacctctttgaaatgaatgcacacagcacagagaacttcttagaaagcttctgtctagtttttatgttaagttgtgtcctttttaaccatsggcctcaaagcactcacaaatatccctttgcagattctacaagaacagagtttccaacctgctcaataaaaagaaacatttacctctgtgacataaatggacacatcacaaagcaatttctcacaaagcttctttctagtctttatgtggagatatttcctttcctttttcaacataggaatcaaagcactgccaa

SEQ ID NO: 379663 - DNA, 511 bp, Homo sapiens
atgcaaacatcccaaatcgatttctctgataacttccttcaagtttttatattgggatattctcttttttgwcattggcctcaaagaactctgaaatgtccattctcagaatggacaaaagcagtatttccaaactgctgtatccaaggaaattttaactctgtgagatgaatgaacacatcacaaagtagtttctcagaaagcttcttgctactttttatctgaagatatttccttttttaccatggtcctcaatgtgcttccaaatatctctttgcagattctaagaaatcagtgtttccaaacggctgaatgaatagaaatgtataactctgtaagaggaatgcacatatctcaaagcagtttcctagatagcttccttctagttttaatcctgggatatctgctttttcaccattttcctcaatgagctcccaaacgacccttcaaagaatggacacaaacagtatttccaaactgctgaatccaatgcaaggtttaacactgtgag

SEQ ID NO: 379664 - DNA, 485 bp, Homo sapiens
tgcttccaaatatctctttgcagattctaagaaatcagtgtttccaaacggctgaatgaatagaaatgtataactctgtaagaggaatgcacatatctcaaagcagtttcctagatagcttccttctagttttaatcctgggatatctgctttttcaccattttcctcaatgagctccyaaacgacccttcaaagaatggacacaaacagtatttccaaactgctgaatccaatgcaaggtttaacactgtgagatgaatgcacacatcatgaataggtttctcagataacttccttctagttttatccttggacattcactttttccccattggcctcaatgagtcagcaagtgtaaaatcacagaatggacaaaaacagtgtttcctggagcctctctcattgctaacacagctgtatgagatcaaactgcaagatggcagtgaagctagggtggggcgccagccattgcagaagtttgagca

SEQ ID NO: 379665 - DNA, 485 bp, Homo sapiens
tgcttccaaatatctctttgcagattctaagaaatcagtgtttccaaacggctgaatgaatagaaatgtataactctgtaagaggaatgcacatatctcaaagcagtttcctagatagcttccttctagttttaatcctgggatatctgctttttcaccattttcctcaatgagctcccaaacgacccttcaaagaatggacacaaacagtatttccaaactgctgaatccaatgcaaggtttaacactgtgagatgaatgcacacatcatgaataggtttctcagataacttccttctagttttatccttggacattcactttttccccattggcctcaatgagtcagmaagtgtaaaatcacagaatggacaaaaacagtgtttcctggagcctctctcattgctaacacagctgtatgagatcaaactgcaagatggcagtgaagctagggtggggcgccagccattgcagaagtttgagca

SEQ ID NO: 379666 - DNA, 565 bp, Homo sapiens
tgttcacataaaaactagacagaagctttctgagaaaattccttttgatttggggatacatctcacagagttgaagcattgttttgattgagcagtttgaaaaccatctttttgtagaatctgcaaaggagtatttggtagcactttgaggcctatggctaaaatagaaatatcttctcatgagaactagaatgaagctttctgagaaactgctttgtgatgtgtgcattcacatcatatggataaaactttcttttcacttagcagtctggaaaaactattttggcagaatccccaaagggatgttttggagcacaytgagacctgtggtgtaaaggaactatcttcagataaaagttagaaagaagctctctgagaaacagctctgtgatgtgtgcattcatctcacactgttaaacctctctttggattcatcagttttaaaaaactgttgttgtggattctgtgatgggatatttgggagctcactgaggccaatggcagtaaagcaaatattccaggggaaaaaaaaactagaagaaattaatctgagaaacctcttggt

SEQ ID NO: 379667 - DNA, 565 bp, Homo sapiens
tgttcacataaaaactagacagaagctttctgagaaaattccttttgatttggggatacatctcacagagttgaagcattgttttgattgagcagtttgaaaaccatctttttgtagaatctgcaaaggagtatttggtagcactttgaggcctatggctaaaatagaaatatcttctcatgagaactagaatgaagctttctgagaaactgctttgtgatgtgtgcattcacatcatatggataaaactttcttttcacttagcagtctggaaaaactattttggcagaatccccaaagggatgttttggagcacactgagacctrtggtgtaaaggaactatcttcagataaaagttagaaagaagctctctgagaaacagctctgtgatgtgtgcattcatctcacactgttaaacctctctttggattcatcagttttaaaaaactgttgttgtggattctgtgatgggatatttgggagctcactgaggccaatggcagtaaagcaaatattccaggggaaaaaaaaactagaagaaattaatctgagaaacctcttggt

SEQ ID NO: 379668 - DNA, 590 bp, Homo sapiens
attatgtgctttagtaacaggcctttttgacttgtgaccttgtaaatagtataaactgcsatagtagacctttaactctgtgcaaccattgttaggccagtggcagtaattttaagggttgttgttgttgaattctgttttgttttttgtattttgattttgaattttttcattcagttagagaaaggacagatagaatttagacaatgaaagggactttagcaactatggagtttcagtccctttattttatagatgaggaagttgagagccaaagaggataagtgacttgtccaaggttacacagctagattttgccaatgtcaaccagaacttgtgatttccacacctgtttcttttacccataatttcagtggcaataattaataagactgcctgtaaaggaattcattttgtaaatagggattaattctgttgtaacattctataaccattaaactcagaattagctctgaaagttccttctatgcagtaaggaagtcttagaaagaaaaaggaaattagaaaagcagcagggtgtttaactgtttagctatattctagctggggtcagcaatcactaggctaat

SEQ ID NO: 379669 - DNA, 590 bp, Homo sapiens
attatgtgctttagtaacaggcctttttgacttgtgaccttgtaaatagtataaactgcgatagtagacctttaactctgtgcaaccattgttaggccagtggcagtaattttaagggttgttgttgttgaattctgttttgttttttgtattttgattttgaattttttcattcagttagagaaaggacagatagaatttagacaatgaaagggactttagcarctatggagtttcagtccctttattttatagatgaggaagttgagagccaaagaggataagtgacttgtccaaggttacacagctagattttgccaatgtcaaccagaacttgtgatttccacacctgtttcttttacccataatttcagtggcaataattaataagactgcctgtaaaggaattcattttgtaaatagggattaattctgttgtaacattctataaccattaaactcagaattagctctgaaagttccttctatgcagtaaggaagtcttagaaagaaaaaggaaattagaaaagcagcagggtgtttaactgtttagctatattctagctggggtcagcaatcactaggctaat

SEQ ID NO: 379670 - DNA, 590 bp, Homo sapiens
attatgtgctttagtaacaggcctttttgacttgtgaccttgtaaatagtataaactgcgatagtagacctttaactctgtgcaaccattgttaggccagtggcagtaattttaagggttgttgttgttgaattctgttttgttttttgtattttgattttgaattttttcattcagttagagaaaggacagatagaatttagacaatgaaagggactttagcaactatggagtttcagtccctttattttatagatgaggaagttgagagccmaagaggataagtgacttgtccaaggttacacagctagattttgccaatgtcaaccagaacttgtgatttccacacctgtttcttttacccataatttcagtggcaataattaataagactgcctgtaaaggaattcattttgtaaatagggattaattctgttgtaacattctataaccattaaactcagaattagctctgaaagttccttctatgcagtaaggaagtcttagaaagaaaaaggaaattagaaaagcagcagggtgtttaactgtttagctatattctagctggggtcagcaatcactaggctaat

SEQ ID NO: 379671 - DNA, 525 bp, Homo sapiens
cttgccacacacagatggccagaggtgggatgctctatccctagtggtgacgtgctcagggatcaagaaattcctgctacgtgagtaaaaaatagtggctcgctcaaatgccgaaacttggctktctttctctgagaactgaggacaggggaaaggatttatgatcaccactggtctctgttagtcccaaacaaacttcagactccataacccccatgagtggtcattacacactgcaagagaccaaaagtgagctctggcgaagcgctcaggagaagcctatcctggccggaccaaagagccactgtgggacatcacacatggcccagggagtgggatggtttcagatgaggacaatttcttcttagacacagagcggggtagcgtggaccccaacgccctaagcatcttgtttatggtagaatcatagacttccctgacaaggcctgttcactggctggcctcttttagagccaccatttttccacctttgcttcccaacccccacccgcctccctttcttcc

SEQ ID NO: 379672 - DNA, 604 bp, Homo sapiens
tacatttttaaaaatgtggaatgtggagacaaacttaaaaaatttaaagctctctcagaatgcagaagagataagagaaaggatgaataggacagaactggaggctataggatccaggtgaaatctaagaattagagttatttcagaggaagaaatgataaatttggataaaagcataatcagaaatatacgcacagtaaacattttcagaattggcctaggtaaggggatgttgtgtgtggggatggtagatcagagtaggcagatcgaaacggattcctcttttccagttagaatgtgggggacaggaggagccacccctagacataccccaatacattctttttctggaaaatttattgaatcataaggtgaaacaatcctagaggcacacaggcatcccagagctgactctccctcaggaaccctaaattcagagtcattagaacagttccacagtattttaaatttggatccaccctgtcatttgaatgaggcaaccaaagggsaacaaaagtcattcttggagtttacttttggggggaactcgtttgccagttgaccaaagactgaatcacaattaagatcttaataatgaaatgtt

SEQ ID NO: 379673 - DNA, 573 bp, Homo sapiens
accagaaataactccagtcactcccttgactagtgttgctagtttggtctttagggtttacctaagtgagagcatcaatgatgggttaaagtcacagaccacaatgaataaatcacagtctgtgcacacttttggccaggaagagtggcagtggaatcttgcatgtcatttggttgaaattaagactaaatctctatatgtgcacacacccacactcacacccacacgcacacatatcacagggttatagcagaatgaaaacggtgrgtaggaatcaccagttgaaggctgtaggtttaaatgatcaggattggcacactcagatcagcccaccagtggtcttcactttgtgaaatggaactaatgccacaaggaaactgcatggttacttcatctgtttacacatctgcttatatgttcagctgaactgtcactgaaaacaggagcaccattcttgggacatgaaacaaggaggaggggaaacattcagataatcaacagttaatagaacaagtaaaaaaataagccaacagcaggtgcggcatctctggtatgcaaaacaactaatgaaag

SEQ ID NO: 379674 - DNA, 482 bp, Homo sapiens
gagggaatgatttctgcaaaaaccaaataactgctaattataaattaaaggatgataaagtcacctacagtaaaatttaaaacttctattcatcaaaaatactgtagagaaaaaggcaaggcacacactggaagaagatatttgcaacacacaaactgacaaaattcttattatctagaatatatraataacttttagaatcaatgagaaaaaacaaaaacaagccaatagaaaagtggacaaaagtcatgaatgacacgccacagaagagaaagtatgaatgacaaagaaacatatgaaaggctacttaagcttttatcatggaaacgtaaagtcaagtcttgatgagatcccaattcacccactagtgtggcagagattaaagtcagacaatggcaagtgttaatgaggatatggagaaacaggaactcttatccacctctggtggaagcctaattggcactggcatcttagaaaacaac

SEQ ID NO: 379675 - DNA, 619 bp, Homo sapiens
gagggaagaatggaggcaaggtcagaggtatcattaaggtcagacacaactgtggtgcatgtgataacacctcataattaaaaatgtatcattccaactgggcgctggtggctcatgcctataatcccaacgctttgggaggccaaagcaggtggatcacttgagctcaggagttcaagactggcctggactgtggtgaaatcccgtctctaccaaaaatacaaaaaattagctgcacatggtggcgtgtgcctgttgtattcccagctggtgaggtggaagaatggcttcagcccaggaggcagaggttgcagtgagccaagatcatgccactgcactccagcctgggcaacagaatgagaccccatcttaaaaaagaaaaacaagaaaacatacaattccacattcacatttcgacataattgcaacaaaacaccatccaagaattctgcctttwtacttgggaaaggtttggggtttgatttttttctggcttggaagctatttgctgctactgcactcaactcagaggcccagctcccctggctcagagataagaaagacaaaaagaaggtactcatatcaaagccatggggccatttcccttagaatgggtcat

SEQ ID NO: 379676 - DNA, 579 bp, Homo sapiens
tggtatcagctggggtcacacatgctgttgcattcagctgagagctcagctggggctgcgacattcaagacggcttcactcacatggcacctaggctaagtgtgactggaatggctgaggactggctggatctctttctctctgtctcctggaaatccattatttaacagcacgactcttgcttccatgctggctggatcctaacacaatgaaaatggaagctgccaggtctctaaaaggacagacccaaactggcactgagtattgctgctacattttcttggccaaaacaagtcacaagtgagcccagattcaaagggaagaaagataggttctacctcttgatgggaaaggcaacaygcatgttggtggccgtctttacagacaattttctacaatgtgtcctctggccacaacaactcacgtctctccgataggcaaaagatacccaacctcctttccttctctctacctgctaaagcctcatctagttacccattagacttaaactccagtctgcatccagtcctgatagctctctgtagagaataagagactttgtaaagagagagaccatgc

SEQ ID NO: 379677 - DNA, 495 bp, Homo sapiens
gcctggttttatcctcatgaaatttatttgttgaagaaccacagtcatagaacatgtggaggatttcatggtccagattttgctttttgagttcytgtggtgtagctaagcatgttcctttgtctcatggtatagcttgatatattagaaattggatctgaaacttggattgcttcaggcttgatcacttttgcaagtctttagtattgttctttcattaaaaggcacataatgtctctctttatggtactagccttcagtgccttatgctggctctgttaattcattagggattgcaaagtggtcacattctaatctgtcatctaaagttcatttaggagaagtaaagtaaatgttgatttacctctttatttgcaagttttaaaaataatgaattgattccctgtcatcttccaaatgtaggctctttgggctgtgtatatgtgtgtttaggtttcattaggaacatagggatttaaacattttttatgtatt

SEQ ID NO: 379678 - DNA, 495 bp, Homo sapiens
gcctggttttatcctcatgaaatttatttgttgaagaaccacagtcatagaacatgtggaggatttcatggtccagattttgctttttgagttcctgtggtrtagctaagcatgttcctttgtctcatggtatagcttgatatattagaaattggatctgaaacttggattgcttcaggcttgatcacttttgcaagtctttagtattgttctttcattaaaaggcacataatgtctctctttatggtactagccttcagtgccttatgctggctctgttaattcattagggattgcaaagtggtcacattctaatctgtcatctaaagttcatttaggagaagtaaagtaaatgttgatttacctctttatttgcaagttttaaaaataatgaattgattccctgtcatcttccaaatgtaggctctttgggctgtgtatatgtgtgtttaggtttcattaggaacatagggatttaaacattttttatgtatt

SEQ ID NO: 379679 - DNA, 495 bp, Homo sapiens
gcctggttttatcctcatgaaatttatttgttgaagaaccacagtcatagaacatgtggaggatttcatggtccagattttgctttttgagttcctgtggtgtagctaagcatgttcctttgtctcatggtatagcttgatatattagaaattggatctgaaacttggattgcttcaggcttgatcacttttgcaagtctttagtattgttctttcattaaaaggcacataatgtctctctttatggtactagccttcagtgccttatgctggmtctgttaattcattagggattgcaaagtggtcacattctaatctgtcatctaaagttcatttaggagaagtaaagtaaatgttgatttacctctttatttgcaagttttaaaaataatgaattgattccctgtcatcttccaaatgtaggctctttgggctgtgtatatgtgtgtttaggtttcattaggaacatagggatttaaacattttttatgtatt

SEQ ID NO: 379680 - DNA, 495 bp, Homo sapiens
gcctggttttatcctcatgaaatttatttgttgaagaaccacagtcatagaacatgtggaggatttcatggtccagattttgctttttgagttcctgtggtgtagctaagcatgttcctttgtctcatggtatagcttgatatattagaaattggatctgaaacttggattgcttcaggcttgatcacttttgcaagtctttagtattgttctttcattaaaaggcacataatgtctctctttatggtactagccttcagtgccttatgctggctctgttaattcattagggattgcaaagtggtcacattctaatctgtcatctaaagttcatttaggaraagtaaagtaaatgttgatttacctctttatttgcaagttttaaaaataatgaattgattccctgtcatcttccaaatgtaggctctttgggctgtgtatatgtgtgtttaggtttcattaggaacatagggatttaaacattttttatgtatt

SEQ ID NO: 379681 - DNA, 534 bp, Homo sapiens
atgtatctatagtatctgtagtgatagttcctctttcattcctggtattagatgtttgtgttctatttttttttctgatcagtctggttagaggtatatcaattttattaattttctyaaggaacgagcttttgttttcattgatttgctctactgcttttgttttctgtttcattgatttctactcattctttattacctcatttcttttgcttactttgggttttgctctccttttttcctagtccttttttttttttttaaaggtataaagcaaggtcattgacttgagacctttcttgttttttgtttttaaacacaggtgtttagtgctataaacttttctcaaagtactgctttatcaacatcccacatattttgataaagtacatttttaaatttatttcatgttattgtcatacattttacttaaacatgtgatatagaaatctcaataaatttttgtttttacttaaacagtaaattacctttgaaaagtatttgaaatttttaaaatgttatatatttaccctg

SEQ ID NO: 379682 - DNA, 534 bp, Homo sapiens
atgtatctatagtatctgtagtgatagttcctctttcattcctggtattagatgtttgtgttctatttttttttctgatcagtctggttagaggtatatcaattttattaattttcttaaggaacsagcttttgttttcattgatttgctctactgcttttgttttctgtttcattgatttctactcattctttattacctcatttcttttgcttactttgggttttgctctccttttttcctagtccttttttttttttttaaaggtataaagcaaggtcattgacttgagacctttcttgttttttgtttttaaacacaggtgtttagtgctataaacttttctcaaagtactgctttatcaacatcccacatattttgataaagtacatttttaaatttatttcatgttattgtcatacattttacttaaacatgtgatatagaaatctcaataaatttttgtttttacttaaacagtaaattacctttgaaaagtatttgaaatttttaaaatgttatatatttaccctg

SEQ ID NO: 379683 - DNA, 534 bp, Homo sapiens
atgtatctatagtatctgtagtgatagttcctctttcattcctggtattagatgtttgtgttctatttttttttctgatcagtctggttagaggtatatcaattttattaattttcttaaggaacgagcttttgttttcattgatttgctctactgyttttgttttctgtttcattgatttctactcattctttattacctcatttcttttgcttactttgggttttgctctccttttttcctagtccttttttttttttttaaaggtataaagcaaggtcattgacttgagacctttcttgttttttgtttttaaacacaggtgtttagtgctataaacttttctcaaagtactgctttatcaacatcccacatattttgataaagtacatttttaaatttatttcatgttattgtcatacattttacttaaacatgtgatatagaaatctcaataaatttttgtttttacttaaacagtaaattacctttgaaaagtatttgaaatttttaaaatgttatatatttaccctg

SEQ ID NO: 379684 - DNA, 534 bp, Homo sapiens
atgtatctatagtatctgtagtgatagttcctctttcattcctggtattagatgtttgtgttctatttttttttctgatcagtctggttagaggtatatcaattttattaattttcttaaggaacgagcttttgttttcattgatttgctctactgcttttgttttctgtttcattgatttctactcawtctttattacctcatttcttttgcttactttgggttttgctctccttttttcctagtccttttttttttttttaaaggtataaagcaaggtcattgacttgagacctttcttgttttttgtttttaaacacaggtgtttagtgctataaacttttctcaaagtactgctttatcaacatcccacatattttgataaagtacatttttaaatttatttcatgttattgtcatacattttacttaaacatgtgatatagaaatctcaataaatttttgtttttacttaaacagtaaattacctttgaaaagtatttgaaatttttaaaatgttatatatttaccctg

SEQ ID NO: 379685 - DNA, 526 bp, Homo sapiens
ttctctagctattcctagctagagataagattttctctttaccactgattttgagcagtttgtttatataatgtgccttactatagctttctttatgtttcttgtatttaggattaattgaaattcttagatctttaggtttacaatttttatcaaatttggaaaaattttggycattatttcttcaaatatttttctgcctccccacttcactttcatttagggactctcactacatgcatatggggctgcttgaaattgttcagtggttcatggagcctatgtttatttttgttcttaatttaattttggatagttactattgctgtgtcttcaagagttcactggttgtttttctgcagtatctaacctgttgttaatcacatccagtgtatttctcttttaagtcattgtagttttcatatctaaaagttcattttggatctttgaagtatttttgtgtctctagttaacatgttctttctctgttaccacttcttcaccatgtgtaatacagttatactaa

SEQ ID NO: 379686 - DNA, 526 bp, Homo sapiens
ttctctagctattcctagctagagataagattttctctttaccactgattttgagcagtttgtttatataatgtgccttactatagctttctttatgtttcttgtatttaggattaattgaaattcttagatctttaggtttacaatttttatcaaatttggaaaaattttggtcattatttcttcaaatatttttctgcctccccacytcactttcatttagggactctcactacatgcatatggggctgcttgaaattgttcagtggttcatggagcctatgtttatttttgttcttaatttaattttggatagttactattgctgtgtcttcaagagttcactggttgtttttctgcagtatctaacctgttgttaatcacatccagtgtatttctcttttaagtcattgtagttttcatatctaaaagttcattttggatctttgaagtatttttgtgtctctagttaacatgttctttctctgttaccacttcttcaccatgtgtaatacagttatactaa

SEQ ID NO: 379687 - DNA, 526 bp, Homo sapiens
ttctctagctattcctagctagagataagattttctctttaccactgattttgagcagtttgtttatataatgtgccttactatagctttctttatgtttcttgtatttaggattaattgaaattcttagatctttaggtttacaatttttatcaaatttggaaaaattttggtcattatttcttcaaatatttttctgcctccccacttcactttcattwagggactctcactacatgcatatggggctgcttgaaattgttcagtggttcatggagcctatgtttatttttgttcttaatttaattttggatagttactattgctgtgtcttcaagagttcactggttgtttttctgcagtatctaacctgttgttaatcacatccagtgtatttctcttttaagtcattgtagttttcatatctaaaagttcattttggatctttgaagtatttttgtgtctctagttaacatgttctttctctgttaccacttcttcaccatgtgtaatacagttatactaa

SEQ ID NO: 379688 - DNA, 498 bp, Homo sapiens
tatatatgtgaattctctaaaatgttgccagatgatgttatgtaaaaatgttaagtataaattgggagctgaaataatgcccagagaaatatttgttatccacactaaccaaaattttgaaaaagggtacaaaatrttattagaatgaagaagatctagcattcgatagcacaacagggtgactatagtcaataataatttattgtacatttaaaaataaaagagtaaaactggattgtaacacaaaggataaatgcttcaggggatgggtactccatttccctgatgtgattattacacattgcatgcctgtgtcaaaatatctcatgtaccccataaatatgtacacctatgtacctacaaaaatcaaaagttaaaagtaacaaaacagaggaaggaaagaaacagaagacaccatctgaaaaggcagagatccagcatacagagaagatggggagttagactttctatgtcccttcctaagtcatatgttcactc

SEQ ID NO: 379689 - DNA, 554 bp, Homo sapiens
tttaaatttctatagaataatattamtgatggtatagccacctttccaatactatgtattcactaaaaatattgtttaaaaaagactaagccatacaatggaatactactaagccaaaaaaatgaagtactgatttatactacagagtggtgaaccttgaaaacactgtgctaactaaaagaagccagacataaaaggctacatatcatatgattccacttaacatgaaatgtccagaatagacaaatctatatagagagattttagattggtggtttccaggagttggagaaagagggaaatgggtagttactgccagcaggtatgaagtttatttgggggggctgaaacttctggaattagtgttaatggttatacaacctcaatatactgaaaaacactgaattatattcctttaaagggtgaattttatagtatgtgaatgatatctgaatacatttttttaactatgccaatatggaagatgtatatgacataacatggaggagaaaagtaaggaacaaaattatataaagagtagcaaaaatttctca

SEQ ID NO: 379690 - DNA, 554 bp, Homo sapiens
tttaaatttctatagaataatattactgatggtatagccacctttccaatactatgtattcactaaaaatattgtttaaaaaagactaagccatacaatggaatactmctaagccaaaaaaatgaagtactgatttatactacagagtggtgaaccttgaaaacactgtgctaactaaaagaagccagacataaaaggctacatatcatatgattccacttaacatgaaatgtccagaatagacaaatctatatagagagattttagattggtggtttccaggagttggagaaagagggaaatgggtagttactgccagcaggtatgaagtttatttgggggggctgaaacttctggaattagtgttaatggttatacaacctcaatatactgaaaaacactgaattatattcctttaaagggtgaattttatagtatgtgaatgatatctgaatacatttttttaactatgccaatatggaagatgtatatgacataacatggaggagaaaagtaaggaacaaaattatataaagagtagcaaaaatttctca

SEQ ID NO: 379691 - DNA, 554 bp, Homo sapiens
tttaaatttctatagaataatattactgatggtatagccacctttccaatactatgtattcactaaaaatattgtttaaaaaagactaagccatacaatggaatactactaagccaaaaaaatgaagtactgatttatactacagagtggtgaaccttgaaaacactgtgctaactaaaagaagccagacataaaaggctacatatcatatgattccacttaacatgaaatgtccagaatagacaaatctatatagagagattttagattggtggtttccaggagttggagaaagagggaaatgggtagttactgccagcaggtatgaagtttatttgggggggctgaaacttctggaattagtgttaatggttatacaacctcaatatactgaaaaacactgaattayattcctttaaagggtgaattttatagtatgtgaatgatatctgaatacatttttttaactatgccaatatggaagatgtatatgacataacatggaggagaaaagtaaggaacaaaattatataaagagtagcaaaaatttctca

SEQ ID NO: 379692 - DNA, 372 bp, Homo sapiens
tatttaaaatgcacctcttgcaggcagcccatagataggttttgctcttgtattcagtttgccaatctccaccttttgtttggaagaatttagtcctctttcactttgaaattactgatatggtttgatataggcttgctatwgtgctcttttgtttttttaaaaaaactttttatttcaagacatttggagatccacattaagtgagagataatacaagtagctcttgtacagtctttagacagtgtcctccaccatggtaacattttgaacatttgtataatatcacagccagataattcacattgacagaatggtgaaagagagcatttccatcaccacagagatcccttgtatagccacacatactat

SEQ ID NO: 379693 - DNA, 372 bp, Homo sapiens
tatttaaaatgcacctcttgcaggcagcccatagataggttttgctcttgtattcagtttgccaatctccaccttttgtttggaagaatttagtcctctttcactttgaaattactgatatggtttgatataggcttgctatagtgctcttttgtttttttaaaaaaactttttatttcaagacatttggagatccacattaagtgagagataatacaagtagctcttgtacagtctttagacagtgtcctccaccatggtaacatyttgaacatttgtataatatcacagccagataattcacattgacagaatggtgaaagagagcatttccatcaccacagagatcccttgtatagccacacatactat

SEQ ID NO: 379694 - DNA, 372 bp, Homo sapiens
tatttaaaatgcacctcttgcaggcagcccatagataggttttgctcttgtattcagtttgccaatctccaccttttgtttggaagaatttagtcctctttcactttgaaattactgatatggtttgatataggcttgctatagtgctcttttgtttttttaaaaaaactttttatttcaagacatttggagatccacattaagtgagagataatacaagtagctcttgtacagtctttagacagtgtcctccaccatggtaacattttgaacatttgtataatatcacagccagataattcacattgayagaatggtgaaagagagcatttccatcaccacagagatcccttgtatagccacacatactat

SEQ ID NO: 379695 - DNA, 526 bp, Homo sapiens
tccacacctatttctctcttcacccccaaaatccatattagaatgcccctgcaggctataaagcctttcataaaagtaaaatacccagtcttttcaagagaacaataaaataggcagtctcctacctcttgtcttactctaatataaactccatgaagataagtattgtmtccatactgttcatgctgcacagcagttgcccttatctgcagggcgacgcatcccaagacccccagtggatgcttgaaactgcagagagtaacacacgtgattgccaccatcggaacacatttctgttcacgtcttccacccacagatttaatgccttttccatcttaactaagcactcatcatggactgtggccataacttttgcagttttagatgcaacagcaaaactaacattaattttttcttcttcttcacaatttcatgggtagatttgttcttaccgtagatcttagcaacctcagcatatgatgttttttcttttgagaactttcaccttttctcttaaagaaagcac

SEQ ID NO: 379696 - DNA, 526 bp, Homo sapiens
tccacacctatttctctcttcacccccaaaatccatattagaatgcccctgcaggctataaagcctttcataaaagtaaaatacccagtcttttcaagagaacaataaaataggcagtctcctacctcttgtcttactctaatataaactccatgaagataagtattgtatccatactgttcatgctgcacagcagttgcccttatctgcagggcgacgcatcccaagacccccagtggatgcttgaaactgcagagagtaacacacgtgattgccaccatcggaacacatttctgtkcacgtcttccacccacagatttaatgccttttccatcttaactaagcactcatcatggactgtggccataacttttgcagttttagatgcaacagcaaaactaacattaattttttcttcttcttcacaatttcatgggtagatttgttcttaccgtagatcttagcaacctcagcatatgatgttttttcttttgagaactttcaccttttctcttaaagaaagcac

SEQ ID NO: 379697 - DNA, 526 bp, Homo sapiens
tccacacctatttctctcttcacccccaaaatccatattagaatgcccctgcaggctataaagcctttcataaaagtaaaatacccagtcttttcaagagaacaataaaataggcagtctcctacctcttgtcttactctaatataaactccatgaagataagtattgtatccatactgttcatgctgcacagcagttgcccttatctgcagggcgacgcatcccaagacccccagtggatgcttgaaactgcagagagtaacacacgtgattgccaccatcggaacacatttctgttcacgtcttccacccacagatttaatgccttttccrtcttaactaagcactcatcatggactgtggccataacttttgcagttttagatgcaacagcaaaactaacattaattttttcttcttcttcacaatttcatgggtagatttgttcttaccgtagatcttagcaacctcagcatatgatgttttttcttttgagaactttcaccttttctcttaaagaaagcac

SEQ ID NO: 379698 - DNA, 526 bp, Homo sapiens
tccacacctatttctctcttcacccccaaaatccatattagaatgcccctgcaggctataaagcctttcataaaagtaaaatacccagtcttttcaagagaacaataaaataggcagtctcctacctcttgtcttactctaatataaactccatgaagataagtattgtatccatactgttcatgctgcacagcagttgcccttatctgcagggcgacgcatcccaagacccccagtggatgcttgaaactgcagagagtaacacacgtgattgccaccatcggaacacatttctgttcacgtcttccacccacagatttaatgccttttccatcttaactaagcactcatcatggactgtggccataacttttgcagttttagatgcaacagcaaaactaacattaatttttycttcttcttcacaatttcatgggtagatttgttcttaccgtagatcttagcaacctcagcatatgatgttttttcttttgagaactttcaccttttctcttaaagaaagcac

SEQ ID NO: 379699 - DNA, 288 bp, Homo sapiens
gctacagtccattagggcaggcacccttsgccctgtgactggtggccatctgccaccacgtagatttgctggtcagtcagtgacaagctcagaagtgttgaaggatacacaagatactaaagtcatgttcctgcccttcagtatggtaattttacaaaggagacaaataagacaacattttatatggtgtaaaattattttgtggcataaaaaggaaaagatcagtgtgggctggaaatatttcctatttgatagaactttaagtgggtcttgaggtaaaggtcaact

SEQ ID NO: 379700 - DNA, 288 bp, Homo sapiens
gctacagtccattagggcaggcacccttggccctgtgactggtggccatctgccaccaygtagatttgctggtcagtcagtgacaagctcagaagtgttgaaggatacacaagatactaaagtcatgttcctgcccttcagtatggtaattttacaaaggagacaaataagacaacattttatatggtgtaaaattattttgtggcataaaaaggaaaagatcagtgtgggctggaaatatttcctatttgatagaactttaagtgggtcttgaggtaaaggtcaact

SEQ ID NO: 379701 - DNA, 288 bp, Homo sapiens
gctacagtccattagggcaggcacccttggccctgtgactggtggccatctgccaccacgtagatttgctggtcagtcagtgacaagctcagaagtgttgaaggatacamaagatactaaagtcatgttcctgcccttcagtatggtaattttacaaaggagacaaataagacaacattttatatggtgtaaaattattttgtggcataaaaaggaaaagatcagtgtgggctggaaatatttcctatttgatagaactttaagtgggtcttgaggtaaaggtcaact

SEQ ID NO: 379702 - DNA, 630 bp, Homo sapiens
gtaactttgtcactttacagtgaggcccactgtgttggtactccacctcctcacaccacctcctgctctccctagctcctctgcctgctccattttcttgccaactgcacttattgccttacagtagactatgtaatggatttatttatttgctatttctatgtattgtctgtctttcattactaaatgtagttaaatgtaatgcaaggacagaaattgctcactgctgtatccgaagcacccagaagagtacctggaacatagtagacattcgataaattattgytgaatgaatactgataggcttattactaagttagaagatccttgtcttaatgaataatatagttttaatatacttcattaatttaaaaatatgaaaagtaaaaatgtgattttgtcttatttgtgttttatagctggcttttcacacattgcagttgttagtgtttactgcccttgccattttaattatgaggctaaagatgtttttgacaccgcacatgtgtgttatggcttccttgatatgctctcgacaggtaagggattcattcttgtataacaatactataaaaactatagcagctatacttagtagttactgtggctttgctgactaattcaaaatat

SEQ ID NO: 379703 - DNA, 571 bp, Homo sapiens
taatgaatggcaacacatagcagaatacttaacacaaaataatagctgttattagtaactttttatatatttaatatttccctaaatatagtcttttgcatattagatatcytttaattgttgtattgctttgttatcctcctaagcagaaaggaaaattctttatgaattcatattttgccaatcaactatgaggtaatggcctttcagacatcagctaaaacagacctgtaatttagtacttactcgtgttggatgaggcagatatgattatagcatatagcattttttagggagaatgcattttaaacaatgtggcccttttttgcttttagattttaggagtgaaagcaagaaattgtgttggggaatttcttctagttggggaaactagacacaatatgctgttgttaatccatgaattttaactcaacagcacttttactatcctaatgaagcctttattttatatgctgaagtgtaagacactaaaataatctgctttttagtacatagcgtttgtgagcaacaatagtcaattgacactgagctttcactttgcacagaggat

SEQ ID NO: 379704 - DNA, 571 bp, Homo sapiens
taatgaatggcaacacatagcagaatacttaacacaaaataatagctgttattagtaactttttatatatttaatatttccctaaatatagtcttttgcatattagatatcttttaattgttgtattgctttgttatcctcctaagcagaaaggaaaattctttatgaattcatattttgccaatcaactatgaggtaatggcctttcagacatcagctaaaacagacctgtaatttagtasttactcgtgttggatgaggcagatatgattatagcatatagcattttttagggagaatgcattttaaacaatgtggcccttttttgcttttagattttaggagtgaaagcaagaaattgtgttggggaatttcttctagttggggaaactagacacaatatgctgttgttaatccatgaattttaactcaacagcacttttactatcctaatgaagcctttattttatatgctgaagtgtaagacactaaaataatctgctttttagtacatagcgtttgtgagcaacaatagtcaattgacactgagctttcactttgcacagaggat

SEQ ID NO: 379705 - DNA, 495 bp, Homo sapiens
atcatgccattcattcaacaacttagtggacaaatctttctatattttcaccataaaggatgggagaatgcctccaacaaggagaaaatagcaactccttccattttgttctcttgtattgtgggtaggaacctacctcctcaacttgtaacatttccagacttatcctttcaatatataacatgtaaagatacagttcatttcttctgtcacccagggtggagtgcaatggggtaatcatggctcactgtaaccttccagggctcaagcgatcctcccacctcagcctcctgggtagttgggatcacaggctcatgccaccatgcccaactagtttttctattttttgtagagatggggttttgccrtgttgcccaggctggtctcaaactcctgggctgaagctctctgtccacgttggcctcccaaagtgctgtgattataggcgtgagccagtgtgtgtggcccaaggtttattttttaatagaagaacat

SEQ ID NO: 379706 - DNA, 352 bp, Homo sapiens
ataaatcattagcattttaaagcatattaactgtgttcagtttatagaaataaaaagtagaatttaaataaactgcattaaaaacattgaatcttacccaaaagttgagtttagatactcccagtttttgaatttcatttctctttagaattattgcctaaaatgcacataagggaaaatgaaacaattcaatacaattaacatttatattttgtataaatggtacatttcaaaaattatatagccaccctgttccatctcagctatcaccagccattttcctccttaactgttgatttttcaaattttkgacaaattttggcaaatttccttgaggtgagagttaaatggt

SEQ ID NO: 379707 - DNA, 609 bp, Homo sapiens
gtcacttttttaaaacatgaaaaaaaaagtaggtgaaggacataaacacaaatttctcaaaatcagatatttatgtggccatcaatcatatgaaaaagtgttcaacatcactgatcattagagaaatgcaaatcaaaaccacactaacccaatcggaatggctattattaaaaagtcaaaaaatgacagatgctggtgaggttgtggagaaaaggggatgcttatacactgctggtgggaatgtaaactagttcaaacactgtggaaagcagtttggaaatttctcaaagaacttaaaactgaactaccatttgacccagcaaccccattactaggtatatacccaaaggaatataaattagcctaccataaagacacatgcacatgtatgttcactgcagcactactcacaatagcaaagacatggaatcaacctaaatgccatcaatagtggaacggataaagaaaatgtgktggtacatataccccatgaatattatgcagccattataaagaacaagataatgtcctttgcagcaacatgaaaggagttagaggccagtatgctaagtgaattaatgcaggaacggaaaactaaatactctgtgt

SEQ ID NO: 379708 - DNA, 609 bp, Homo sapiens
gtcacttttttaaaacatgaaaaaaaaagtaggtgaaggacataaacacaaatttctcaaaatcagatatttatgtggccatcaatcatatgaaaaagtgttcaacatcactgatcattagagaaatgcaaatcaaaaccacactaacccaatcggaatggctattattaaaaagtcaaaaaatgacagatgctggtgaggttgtggagaaaaggggatgcttatacactgctggtgggaatgtaaactagttcaaacactgtggaaagcagtttggaaatttctcaaagaacttaaaactgaactaccatttgacccagcaaccccattactaggtatatacccaaaggaatataaattagcctaccataaagacacatgcacatgtatgttcactgcagcactactcacaatagcaaagacatggaatcaacctaaatgccatcaatagtggaacggataaagaaaatgtggtggtacatataccccatgaatattatgcagccattataaagaacaagataatgtcctttgcagcaacatgraaggagttagaggccagtatgctaagtgaattaatgcaggaacggaaaactaaatactctgtgt

SEQ ID NO: 379709 - DNA, 487 bp, Homo sapiens
cattaataaaagcatcttgctagttgggatgaaataaatgaatatatgtcactgggatcaattcaagttttatggacctaaagtttaaataattttgtagtactccttaagagaaagaaaacaaaattttgtgtggaaatatatttaaagtgatgaaagaacaagctacacacacaaaaaaaataaaatacagaatgtagcaagctatcttaagaaaactaagagcctaatatacctctataatttttccttcttctttggctatatgttctttgattgtattttcatataaaaagttaaatattgagataacagaaagattttagtattcagcatagctgattgaagtttgttttttattaatcatttaraaacgtttatctctgctttacagctcatcagtagtgtcatacacatttttaggattattgtcaaatttgggaaagcctctatcaagatattatttctggcctgcaacttcatgtta

SEQ ID NO: 379710 - DNA, 622 bp, Homo sapiens
taatggatgaacagtctgtggtacatccattatccatacaatggaatatttttcagcaataaaaagaaatgcactatcaagctgtgaaaagacttggaggaatctcaaatacatattgctagtgaaaaatgagctatacactgggccgttctaattatatgacattctggaaaaggcaaaattacagagatggtaaaaagattggtggtttccayggtttggggggaaagagggagaaatgaagggatggcacacaggtgatacttaggccagtgaaataactctgtgatgctactgtagtagtagatacatgaaatcatgcatttgtcaaaactcatactactgtgcaactcagagtaagctataatgtaaactatggactttttagtcaataatgcaccaatattggttcatcagttgtaactaatgcactacaataatgcaatagtttaataataggggagactgccaggatgggggagaggggatatacgggacttctagattttctactcgattgttctgtaaacctaaaactgctctaaaaatagcctcttagtaaaacaacaacaacaatgagataccgcttaacaaccactgcgatggctataattataattac

SEQ ID NO: 379711 - DNA, 622 bp, Homo sapiens
taatggatgaacagtctgtggtacatccattatccatacaatggaatatttttcagcaataaaaagaaatgcactatcaagctgtgaaaagacttggaggaatctcaaatacatattgctagtgaaaaatgagctatacactgggccgttctaattatatgacattctggaaaaggcaaaattacagagatggtaaaaagattggtggtttccatggtttggggggaaagagggagaaatgaagggatggcacacaggtgatacttaggccagtgaaataactctgtgatgctactgtagtagtrgatacatgaaatcatgcatttgtcaaaactcatactactgtgcaactcagagtaagctataatgtaaactatggactttttagtcaataatgcaccaatattggttcatcagttgtaactaatgcactacaataatgcaatagtttaataataggggagactgccaggatgggggagaggggatatacgggacttctagattttctactcgattgttctgtaaacctaaaactgctctaaaaatagcctcttagtaaaacaacaacaacaatgagataccgcttaacaaccactgcgatggctataattataattac

SEQ ID NO: 379712 - DNA, 576 bp, Homo sapiens
gatcttccctcactgcagccttgatctcctgggctccagccatctcccacctcggtctcccaagtagctgggatgrcaggcacatggccatgatcagctattttttttttttttttaatttatttagtggagacagggtctcactatgttgcaggctggtgtcaaatgatcctcccaccttagcctgccaaagtgctgggattacaggcatgagccactgcacctagccccattaccccattaatgtcctttgatggaaaagtaaagtgaaggtcagagaagaaaagtgacctgcctaagattagcaaataacagggatggtctgtgtgattccaaaaccctggttcattgtgctgcatcccaccatataaaaggcatgcaggctgaaagagatttcctttttctgttgttttattcactcctcaacctctacttcctaacactcttctttttccctttccatacacccacaatgacctgaaacacttttggcttacttttttattttgcatgctttaaggattctttttaatacacaggtatttctccataacagtttatacgcatttgtatata

SEQ ID NO: 379713 - DNA, 576 bp, Homo sapiens
gatcttccctcactgcagccttgatctcctgggctccagccatctcccacctcggtctcccaagtagctgggatggcaggcacatggccatgatcagctattttttttttttttttaatttatttagtggagacagggtctcactatgttgcaggctggtgtcaaatgatcctcccaccttagcctgccaaagtgctgggattacaggcatgagccactgcacctagccccattaccccattaatgtcctttgatggaaaagtaaagtgarggtcagagaagaaaagtgacctgcctaagattagcaaataacagggatggtctgtgtgattccaaaaccctggttcattgtgctgcatcccaccatataaaaggcatgcaggctgaaagagatttcctttttctgttgttttattcactcctcaacctctacttcctaacactcttctttttccctttccatacacccacaatgacctgaaacacttttggcttacttttttattttgcatgctttaaggattctttttaatacacaggtatttctccataacagtttatacgcatttgtatata

SEQ ID NO: 379714 - DNA, 576 bp, Homo sapiens
gatcttccctcactgcagccttgatctcctgggctccagccatctcccacctcggtctcccaagtagctgggatggcaggcacatggccatgatcagctattttttttttttttttaatttatttagtggagacagggtctcactatgttgcaggctggtgtcaaatgatcctcccaccttagcctgccaaagtgctgggattacaggcatgagccactgcacctagccccattaccccattaatgtcctttgatggaaaagtaaagtgaaggtcagagaagaaaagtgacctgcctaagattagcaaataacagggatggtctgtgtgattccaaaaccctggttcattgtgctgcatcccaccatataaaaggcatgcaggctgaaagagatttcctttttctgttgtttwattcactcctcaacctctacttcctaacactcttctttttccctttccatacacccacaatgacctgaaacacttttggcttacttttttattttgcatgctttaaggattctttttaatacacaggtatttctccataacagtttatacgcatttgtatata

SEQ ID NO: 379715 - DNA, 576 bp, Homo sapiens
gatcttccctcactgcagccttgatctcctgggctccagccatctcccacctcggtctcccaagtagctgggatggcaggcacatggccatgatcagctattttttttttttttttaatttatttagtggagacagggtctcactatgttgcaggctggtgtcaaatgatcctcccaccttagcctgccaaagtgctgggattacaggcatgagccactgcacctagccccattaccccattaatgtcctttgatggaaaagtaaagtgaaggtcagagaagaaaagtgacctgcctaagattagcaaataacagggatggtctgtgtgattccaaaaccctggttcattgtgctgcatcccaccatataaaaggcatgcaggctgaaagagatttcctttttctgttgttttwttcactcctcaacctctacttcctaacactcttctttttccctttccatacacccacaatgacctgaaacacttttggcttacttttttattttgcatgctttaaggattctttttaatacacaggtatttctccataacagtttatacgcatttgtatata

SEQ ID NO: 379716 - DNA, 582 bp, Homo sapiens
tgtgtccaacacaaagcagttgctcagtaaagatgtgtaaacactttaaaaataagcaaatgaaaacctttccttcgtgtttctcaaaggaggtttatttctctttttggtatttaaaaaacttgccatcattctaaacatttcgtcactttccatttattgaatacataccaggaacttggccaagttagcacacattaatcaatcacaaagcctcaaaaggtatgaactcattattctttatttaccagttaagaaaatgaccactgtactgcttcctattcaatccaacagtataggcaaaatgactaaatacattgtctaaatacatgacttgcacttaaaagctraagtcaactggtaggtcttttgataccagagcatcttggaagaatggtttgccagctaacaagatgtctttatttcaaaatgcgattcagggtgtgttaggaaggaaaatgcaaatgaaaccttccagtacataccagggctgatgagaaacttgctaattatgcccatgttatctgagtgtttgttttgtatttcactttgtaagattgtcttctctcggtcgttattatt

SEQ ID NO: 379717 - DNA, 590 bp, Homo sapiens
gtcctaaatccaatggcccaggacatcatactgcagcaaaaatacacatcgagtcctcttggttttgctttcttttacagttgtcaaatgatccagagggtgactcttagtgtatccctgcattgcctagtctttcccaggcactgtgcatttagatttcagatgcatcagcagagaacaactacttctgcataaagctgattttagcaaacaaaacaaaaccaccaccaccgacaccaaatgagctaccagtttctaagtccatgttgattcctgaagtctasgttcttctgaaatcagtgaaaaggattcagaggtacttactgtggtgctatatgccatgaagtgtagccttgcccaggcaccatggtgaaacacagagcaggccacaagtcaccactgacccaggagaaaataatagcattgctttttttataggtcatcttgcccctgattatttttttctcgaagatatcttcactatccactttgggaagacatgagtttgccatttctttgaccagtgttccaccaaaggacaaagctgtgacagggcttggatatcattcatgtttgcagatgtagccaat

SEQ ID NO: 379718 - DNA, 590 bp, Homo sapiens
gtcctaaatccaatggcccaggacatcatactgcagcaaaaatacacatcgagtcctcttggttttgctttcttttacagttgtcaaatgatccagagggtgactcttagtgtatccctgcattgcctagtctttcccaggcactgtgcatttagatttcagatgcatcagcagagaacaactacttctgcataaagctgattttagcaaacaaaacaaaaccaccaccaccgacaccaaatgagctaccagtttctaagtccatgttgattcctgaagtctaggttcttctgaaatcagtgaaaaggattcagaggtacttactgtggtgctatatgccatgaagtgtagccttgcccaggcaccatggtgaarcacagagcaggccacaagtcaccactgacccaggagaaaataatagcattgctttttttataggtcatcttgcccctgattatttttttctcgaagatatcttcactatccactttgggaagacatgagtttgccatttctttgaccagtgttccaccaaaggacaaagctgtgacagggcttggatatcattcatgtttgcagatgtagccaat

SEQ ID NO: 379719 - DNA, 591 bp, Homo sapiens
tgttgattcctgaagtctaggttcttctgaaatcagtgaaaaggattcagaggtacttactgtggtgctatatgccatgaagtgtagccttgcccaggcaccatggtgaaacacagagcaggccacaagtcaccactgacccaggagaaaataatagcattgctttttttataggtcatcttgcccctgattatttttttctcgaagatatcttcactatccactttgggaagacatgagtttgccatttctttgaccagtgttccaccaaaggacaaagctgtgacagggcttggatatcattcatgtttgcagatgtagccaatttgcccatgacatyccagcaatgatagcaggtgcctctggattcaatgaaaagaactacatccttaacatttgacttagagcaatggtgggcttctcagagactcttcctctaagagttaataaatggatgcaaatatcacaaaaggaacaagaagatgcccaacttgaatgcctcattcctagccaagttggtggtgttctccatataaaatgggaggctcttgttcactactcaaaggcactgtgtgttggggattagcttgc

SEQ ID NO: 379720 - DNA, 590 bp, Homo sapiens
tacagaggtagggtagacggcaaggagcaagatcttgccaaaaaattgtactaccggtcatcagaccttgatccaaatctactagtttcagggctcttgtttttaaaaggacaagttctcactctgctacccaggctagagtgcagtggtgtgatcacggctcactgcaaattcttgggctcaagggatcctcccacctcagcctcccaagtagctgggactacaggcacaagccaccatgcttggctaatttttaagtctttttttttaatagagatggggtctcaatttgttgtccaggctgctcacaaattcctggcctcaagcaaccctcccgccttggcctcccaatgtgctgggattacagcatgagatgtgagctattgcacccatccagcaccacccccccccttttttttgtgacamagtcttagtctgtcacccagactgcagtgaagtggcatgatctcggctcattgcaacctttctcctgggttcaagcgattcttctgcctcagcttcctgactagctgggactacatgcattcaccacttcactttaaagtcaagattttcaagcaactgacaag

SEQ ID NO: 379721 - DNA, 590 bp, Homo sapiens
tacagaggtagggtagacggcaaggagcaagatcttgccaaaaaattgtactaccggtcatcagaccttgatccaaatctactagtttcagggctcttgtttttaaaaggacaagttctcactctgctacccaggctagagtgcagtggtgtgatcacggctcactgcaaattcttgggctcaagggatcctcccacctcagcctcccaagtagctgggactacaggcacaagccaccatgcttggctaatttttaagtctttttttttaatagagatggggtctcaatttgttgtccaggctgctcacaaattcctggcctcaagcaaccctcccgccttggcctcccaatgtgctgggattacagcatgagatgtgagctattgcacccatccagcaccacccccccccttttttttgtgacacagtcttagtctgtcacccagactgcagtgaagtggcatgatctcggctcattgcaacctttctcctgggttcaagcgattcttstgcctcagcttcctgactagctgggactacatgcattcaccacttcactttaaagtcaagattttcaagcaactgacaag

SEQ ID NO: 379722 - DNA, 609 bp, Homo sapiens
ttggcattaaatcttctagctcatctttttttttttttttttctcatttgagatggaacattccttgtgcaagatatatggctacagtatacaaagcagaagccatcgtcttttaaaaataccggttgaggttcaagtgaatggatctgttctgtgcagtggcattgatattaaatggttcattggaagggatgttagttttataggtggctactttttccttgagctttgtcttcacgttaggtatcatgcatgagcatgcattttctttacagataaatgtttgatgatcccaaaagaggaatatatggatttctaacaaattaattgcratatattgcaccctaaatagaatgtttaacttaatatttaacatttaaacattctgggtttgaagtgagacaagtggattgtgatatatccagacttctgctacaacagatggatggatgttctggatgccttcacggaattgtcagaaacagttgctcaatgactacagttctcaaatttacacaacacccttgttgattccacagccttactttaggggtcaaaatacagaccctcttggccaggcatgatggtggcttatacctgtaatcccag

SEQ ID NO: 379723 - DNA, 581 bp, Homo sapiens
tctgaatgttttcttctatttccagtgatttttctctgcctaaaactagggcactgaaaatgctctgtaaaggaatattctcttgaccaaaagatctaagtccacagattgcaggatgagtaagctgcacrtttgttggcgtttccattgtgcatgcaagcaatgtgacccctttccatgttctcttctgagtattttctctttggtttcttcctatcctttgcttctctgaacagaagtgctggtagttctttgtttcacaacttgaaatatgtgcgtctgtgattcccccggctgtatagtgtatgggtcctgaggaacgggcacatttctatggcacagaatgacaaacttttggttactttgtcccatagtcagaactatttttatttcaagattgggctgtctgtattcaagtggcatatacatttgtttctactgtttctgggagggtggatttctttgtccattccagaggatagctatctgtatgttctaaataatttgtttcttgaatgttagtaggaccctcttgacattcactctctgtgtctctggatactctatgactgaaacacata

SEQ ID NO: 379724 - DNA, 501 bp, Homo sapiens
ctctatgactgaaacacatagtcaggcaaacctcccctgcttcttgtgtggtctttttgtttgttccttttttatcctgccccacccctcaccccagtcgctctgtcctctgccacacagaagcacgcgtaatgctctccactcaagggagagatggaatacaaaacctctgggggtcataaaggatgcaattaaaatccagaatgcagaagtgaatggaatgataggaaagctcaaaacaaaacaaaaaaagaggatggaaatatttatgttgccctgtttaatttttaatcactcaaagagcatttgctctcattctgcatggagataaaattcccattttatttttccctgggccacagtacatgattttacattaccctctctctcasttgctcgtacttatgcaggttaggctactgtactcaagaaatggccacaatacttcatgtgatctcagaaaactgaaaaaattccaaggttgggggaaaggatttcaga

SEQ ID NO: 379725 - DNA, 570 bp, Homo sapiens
gaaacctgccactgtgttaatcacatacttaattgtaccaaaaattaaagcaatgcagtaagttaaagtatatacacatggtagaatattatacccattaaaatgagcaggataaggaccataaagggtctcataattaaaaaattgacataaatgtttgtcgcataactttagataaatgatgataatatgccagaatgctaatggttgtgctgaattgtgagactggcaaacattttttctttgattcaggttcataaaaataatataactttattacatcaaaaggagatatatggaattttatacttctaaagttttaattgcacatggagatacggattttttaaagtaaaaaaaaaattaaaagaaacgttaaagacaagtctaaaatatattttaaataaccccattgccaccctggtttcctacctcccccctcacaggaagccrctattacagattgttgtctatagttttattttgcgtattcatgcctatatatgtagtagatgttcatttatagtattcatagtgttgtatacatttttatgtgaatgatataaggat

SEQ ID NO: 379726 - DNA, 485 bp, Homo sapiens
tgccaccctggtttcctacctcccccctcacaggaagccgctattacagattgttgtctatagttttattttgcgtattcatgcctatatatgtagtagatgttcatttatagtattcatagtgttgtatacatttttatgtgaatgatataaggatacacctggcatttttaattgggttttttaataaatctatatagagttcctttaatttaatatatacagattagactaattcatttcagtggttatgtaatattacacaaaacagataaataggttcagtcagaactaaatactgattgtttatcrcaataaaagaaaacaatgatctagcaatgtattatcatttggtagttttgattttcctgtttcttttgccagtgactaccaatttgacagtcagtttgctcttaattttaaaaggggcatcattcaacagggacataccgtctatataatagggctctaagttgaaagaccag

SEQ ID NO: 379727 - DNA, 587 bp, Homo sapiens
tgggtgtgagcagctctccatttgttcaatacactattgaacaaagtcacaatgctttttttagggcaaaatcaatgtgaattgtcctaaggagcagtggctccacgctgatcccccaaccatgaaacttagacgattcccttgtaatttttaaactgttttaagcactcttgattttgcccaaagaaatcattcagaacttgttaggataggaattcacttgcttcaggttattttacaaaactcattcattcttggcaggcaaagcacatttagaaaagacygagaagacttcgtgcaaagagaaactctgtacctgcatagaattcgggactgtagactgcacccacaactggattcaatttccagccttaaaacaaatacacaaaaacattattatcacatttgattcaacatcttatataattgcaaatgaatcacaaatcaaatgggttaaagtatctcattttgtattttaaaatgtaaaggaggtgtcgtttgggcatgcataaaaatacttaaaaaccacacataagaaaatatatttatgcccttctttgattttctgccagtgcaagttaatggaa

SEQ ID NO: 379728 - DNA, 619 bp, Homo sapiens
ctgggactttagtattggaatttgaaaataagacaattcaaccaataacagtatgtgttcaataaattcaagtcagatatatgaaaaaataaaaattgagtataaagataatttttggctacattgactggattccaagaatcttccattctgtctaaagaagatagacacgttaaaaatcaaacgagaaaaaacagtaagtgaagrggatgaatgcagccagtgggtagttagactatgcaaaaacaagtgcgccagaatcacaactcaacgtatattaaggctttcatttggtggtgttttgaattagaaatatttaatgtcgatcagcctcagtttccttagcattatctacttcgcagttgttgagacaattaactacaatatcctaagttgcacacaattattgggccagacttctacactgtgagtatctgcaaaaaaaagaaaaaaaaaaaacattgttcactgctgtgcttcttccctctgatttaccaataagggaaacatcttccatatttccaaaaacccctggttttccttgagtacaccttgacatcatgcaaaacatcttcttcctcaagtcagccaggccctgctgtacgctaagctgcaaccc

SEQ ID NO: 379729 - DNA, 619 bp, Homo sapiens
ctgggactttagtattggaatttgaaaataagacaattcaaccaataacagtatgtgttcaataaattcaagtcagatatatgaaaaaataaaaattgagtataaagataatttttggctacattgactggattccaagaatcttccattctgtctaaagaagatagacacgttaaaaatcaaacgagaaaaaacagtaagtgaaggggatgaatgcagccagtgggtagttagactatgcaaaaacaagtgcgccagaatcacaactcaacrtatattaaggctttcatttggtggtgttttgaattagaaatatttaatgtcgatcagcctcagtttccttagcattatctacttcgcagttgttgagacaattaactacaatatcctaagttgcacacaattattgggccagacttctacactgtgagtatctgcaaaaaaaagaaaaaaaaaaaacattgttcactgctgtgcttcttccctctgatttaccaataagggaaacatcttccatatttccaaaaacccctggttttccttgagtacaccttgacatcatgcaaaacatcttcttcctcaagtcagccaggccctgctgtacgctaagctgcaaccc

SEQ ID NO: 379730 - DNA, 594 bp, Homo sapiens
ttgtctatttaagtttttttttcttttctttttgagatggagtctcaccctatcacccaggctggagtgcagtgatgcaatcttggatcactgcacactccacctcccgggttcaagcgattctcgtgcctcagcctccaaagtagctgggattacaggcacctgccacaatgcctggataatttttgtatttttcgtagagatggagttttagcaggttggcctcaaagtcctgacctcaagcgatccgcacgcctcggccttcctaagtgctgggattacaagcgtgagccaccgcgcccggccagttgttttgttgttgtttgtttttgagtattttctgcgttattccctaggacattaatgctttcaccagggaattgtccgtcttggtcttgtctctctttccaaggttgaaggacagaagttggcctctcagttgaggacaagagcttatggtttgtgcgaatggctgctgtcctcgcatactgagctggagtcttgtgagacrgggcctcttgtcctctgtgtttatgtggttagagaggggagctgacacatccttttaaagaaactgaaagggctgcttgtttt

SEQ ID NO: 379731 - DNA, 480 bp, Homo sapiens
ttcatttatttattcacaaatatttwttaagcttctattagggccaggattcatactagctgccatggttgaacaaaacaaaatgatctttacctcttgtaacttagtatgagaggcagaaactgagcatgtggcaaatagcatgtgtgatagatgtcttaaggaaaatatgggtaccgtaggaaaattaaaaaagaacagaggtgctacctgcaaacgtgtagtctgagagcatttcttcaaggagatgatgcttaaggtggtaagacaaagcagcccaggcagagggaataccacagtcagaggtcttaaagttggaaagatctgggctcactcaaagtcctaagaagaggccagtatgttttgggcatgatgaaggggatttggaggtgatgtggcaaaagatgaaccgggaggaattagcagggatttgacatcctacagacctggtgggtccaataaggagttgaaattccacgt

SEQ ID NO: 379732 - DNA, 480 bp, Homo sapiens
ttcatttatttattcacaaatatttattaagcttctattagggccaggattcatactagctgccatggttgaacaaaacaaaatgatctttacctcttgtaacttagtatgagaggcagaaactgagcatgtggcaaatagcatgtgtgatagatgtcttaaggaaaatatgggtaccgtaggaaaattaaaaaagaacagaggtgctacctgcaaacgtgtagtctgagagcatttcttcaaggagatgatgcttaaggtggtaagacaaagcagcccaggcagagggaataccacagtcaraggtcttaaagttggaaagatctgggctcactcaaagtcctaagaagaggccagtatgttttgggcatgatgaaggggatttggaggtgatgtggcaaaagatgaaccgggaggaattagcagggatttgacatcctacagacctggtgggtccaataaggagttgaaattccacgt

SEQ ID NO: 379733 - DNA, 480 bp, Homo sapiens
ttcatttatttattcacaaatatttattaagcttctattagggccaggattcatactagctgccatggttgaacaaaacaaaatgatctttacctcttgtaacttagtatgagaggcagaaactgagcatgtggcaaatagcatgtgtgatagatgtcttaaggaaaatatgggtaccgtaggaaaattaaaaaagaacagaggtgctacctgcaaacgtgtagtctgagagcatttcttcaaggagatgatgcttaaggtggtaagacaaagcagcccaggcagagggaataccacagtcagaggtcytaaagttggaaagatctgggctcactcaaagtcctaagaagaggccagtatgttttgggcatgatgaaggggatttggaggtgatgtggcaaaagatgaaccgggaggaattagcagggatttgacatcctacagacctggtgggtccaataaggagttgaaattccacgt

SEQ ID NO: 379734 - DNA, 480 bp, Homo sapiens
ttcatttatttattcacaaatatttattaagcttctattagggccaggattcatactagctgccatggttgaacaaaacaaaatgatctttacctcttgtaacttagtatgagaggcagaaactgagcatgtggcaaatagcatgtgtgatagatgtcttaaggaaaatatgggtaccgtaggaaaattaaaaaagaacagaggtgctacctgcaaacgtgtagtctgagagcatttcttcaaggagatgatgcttaaggtggtaagacaaagcagcccaggcagagggaataccacagtcagaggtcttaaagttggaaagatctgggctcactcaaagtcctaagaagaggccagtatgttttgggcatgatgaaggggatttggaggtgatgtggcaaaagatgaacygggaggaattagcagggatttgacatcctacagacctggtgggtccaataaggagttgaaattccacgt

SEQ ID NO: 379735 - DNA, 585 bp, Homo sapiens
taattacagctctgttaactcccaagtcaggctaagtggacctctgattattattctgagtataataggagcataactaacattgaagggaaattgtacttctctcttttattaaccgcttttatattcccttgtgcatggctatgatgctatgaartctccttaaatgtgatattcctcaatataatacaataataatgcacacaccgtaatgtattggattactttgcaaacagcccttatgaaattgcatttcccatcatttccctgggccagctcagggctgctgggcttacgggccctttctgtagctgggagcctggaatctgccttcacggtcacttagggtttcatggatgtgagcaattggtccacaccatttttattcacagcgaggatgttggccaaccaagtttccagacatctcgctggacattgcgactcagagatgcaaacagtgtttgatacctcagcatagtttgaaaataaactgggctagatggtgtcaggaaggaagctagatacagggaagggaggccttccatgctggaattaaattgtgaagtcttttccactgactttgct

SEQ ID NO: 379736 - DNA, 542 bp, Homo sapiens
gtacttctctcttttattaaccgcttttatattcccttgtgcatggctatgatgctatgaaatctccttaaatgtgatattcctcaatataatacaataataatgcacacaccgtaatgtattggattactttgcaaacagcccttatgaaattgcatttcccatcatttccctgggccagctcagggctgctgggcttacgggccctttctgtagctgggagcctggaatctgccttcacggtcacttagggtttcatggatrtgagcaattggtccacaccatttttattcacagcgaggatgttggccaaccaagtttccagacatctcgctggacattgcgactcagagatgcaaacagtgtttgatacctcagcatagtttgaaaataaactgggctagatggtgtcaggaaggaagctagatacagggaagggaggccttccatgctggaattaaattgtgaagtcttttccactgactttgctggagagtctatcagatctttgttcctttgtaaactctttcctgacaccacct

SEQ ID NO: 379737 - DNA, 585 bp, Homo sapiens
taattacagctctgttaactcccaagtcaggctaagtggacctctgattattattctgagtataataggagcataactaacattgaagggaaattgtacttctctcttttattaaccgcttttatattcccttgtgcatggctatgatgctatgaaatctccttaaatgtgatattcctcaatataatacaataataatgcacacaccgtaatgtattggattactttgcaaacagcccttatgaaattgcatttcccatcatttccctgggccagctcagggctgctgggcttacgggccctttctgtagctgggagcctggaatctgccttcacggtcacttagggtttcatggatgtgagcaattggtccacaccatttttattcacagcgaggatgttggccaaccaagtttccagayatctcgctggacattgcgactcagagatgcaaacagtgtttgatacctcagcatagtttgaaaataaactgggctagatggtgtcaggaaggaagctagatacagggaagggaggccttccatgctggaattaaattgtgaagtcttttccactgactttgct

SEQ ID NO: 379738 - DNA, 585 bp, Homo sapiens
taattacagctctgttaactcccaagtcaggctaagtggacctctgattattattctgagtataataggagcataactaacattgaagggaaattgtacttctctcttttattaaccgcttttatattcccttgtgcatggctatgatgctatgaaatctccttaaatgtgatattcctcaatataatacaataataatgcacacaccgtaatgtattggattactttgcaaacagcccttatgaaattgcatttcccatcatttccctgggccagctcagggctgctgggcttacgggccctttctgtagctgggagcctggaatctgccttcacggtcacttagggtttcatggatgtgagcaattggtccacaccatttttattcacagcgaggatgttggccaaccaagtttccagacatctcgctggacattgcgactcaragatgcaaacagtgtttgatacctcagcatagtttgaaaataaactgggctagatggtgtcaggaaggaagctagatacagggaagggaggccttccatgctggaattaaattgtgaagtcttttccactgactttgct

SEQ ID NO: 379739 - DNA, 542 bp, Homo sapiens
gtacttctctcttttattaaccgcttttatattcccttgtgcatggctatgatgctatgaaatctccttaaatgtgatattcctcaatataatacaataataatgcacacaccgtaatgtattggattactttgcaaacagcccttatgaaattgcatttcccatcatttccctgggccagctcagggctgctgggcttacgggccctttctgtagctgggagcctggaatctgccttcacggtcacttagggtttcatggatgtgagcaattggtccacaccatttttattcacagcgaggatgttggccaaccaagtttccagacatctcgctggacattgcgactcagagatgcaaacagtgtttgatacctcagcatagtttgaaaataaactgggctagatggtgtcaggaaggaagctagatacagggaagggaggccttccatgctggaattaaattstgaagtcttttccactgactttgctggagagtctatcagatctttgttcctttgtaaactctttcctgacaccacct

SEQ ID NO: 379740 - DNA, 525 bp, Homo sapiens
gaatggtctggaacatgggttggagtcaatatcaaatgaccaaataatctgccagagctctctgtaatatacagtattcacacctgtggacttttgtgacaatttgggacggtatagtcccttgtaatttaattctgagagtgaccattgaggatgtgatgatgctctctttacagtgaggaaactgaggcgtggtcagttgatgtgacwcagtgtgttccctgaggtcatagctgaacaagtctgacttagtaatatgtctgactctagacctacacttataaccacaacttcacactctttttgctgccaccttcttctaaggggctggaagaatggagatgccactgagctgggggtgaagacatcgtaaaaagatctacctggttctatgagatgcatccatcctgaccttgccaagggaagtaggaatcaggaaatggtggcttctaacgtgatttcatccaggcccttatgcttgggtccatctcaggaatagtgtttggaattaacgcaggagccaga

SEQ ID NO: 379741 - DNA, 525 bp, Homo sapiens
gaatggtctggaacatgggttggagtcaatatcaaatgaccaaataatctgccagagctctctgtaatatacagtattcacacctgtggacttttgtgacaatttgggacggtatagtcccttgtaatttaattctgagagtgaccattgaggatgtgatgatgctctctttacagtgaggaaactgaggcgtggtcagttgatgtgactcagtgtgttccctgaggtcatagctgaacaagtctgacttagtaatatgtctgactctagacctacacttataaccacaacttcacactctttttgctgccaccttcttctaaggggctggaagaatggagatgccactgagctgggggtgaagacatcgtaaaaagatctacctggttctatgagatgcatccatcctgaccttgccaagggaagtaggaatcaggaaatgktggcttctaacgtgatttcatccaggcccttatgcttgggtccatctcaggaatagtgtttggaattaacgcaggagccaga

SEQ ID NO: 379742 - DNA, 586 bp, Homo sapiens
tgctactattatgctacttttcctatggtgtccactgttattactgccacaactacctcaacttactgttgaggaaaatgtaattctcctcaacttytattactattatagtgttgctgttattttatttaatgatagatcatacattcgaaattatttgttgagtgcttactgtgtaactggcaccgaagattgaggaacagataaaaaatagctatggtttcttcgtttagaatgttatcttgtaggagagagagatggaaacaaataaacaatgtaactaaataattacaaattgtaatgtttgcttcagttatgcattgctgcctaacaaactaccccaaacaaacattttatttacttacaattctatgcttcaggtatttgggtgaagtttagctgtagagatcagcttggtacatataccacttggaactggggagtaagttccaaggtttcccacagatgtctggaacttggtgattgtctgtacaacacatctcctcccccgcacccccacccccaccccgccactcaatctctccacaagactagcttgagcttcctcacagcatggagttctatg

SEQ ID NO: 379743 - DNA, 586 bp, Homo sapiens
tgctactattatgctacttttcctatggtgtccactgttattactgccacaactacctcaacttactgttgaggaaaatgtaattctcctcaacttctattactattatagtgttgctgttattttatttaatgatagatcatacattcgaaattatttgttgagtgcttactgtgtaactggcaccgaagattgaggaacagataaaaaatagctatggtttcttcgtttagaatgttatcttgtaggagagagagatggaaacaaataaacaatgtaactaaataattacaaattgtaatgtttgcttcagttatgcattgctgcctaacaaactaccccaaacaracattttatttacttacaattctatgcttcaggtatttgggtgaagtttagctgtagagatcagcttggtacatataccacttggaactggggagtaagttccaaggtttcccacagatgtctggaacttggtgattgtctgtacaacacatctcctcccccgcacccccacccccaccccgccactcaatctctccacaagactagcttgagcttcctcacagcatggagttctatg

SEQ ID NO: 379744 - DNA, 632 bp, Homo sapiens
attcaaggagaggggaaaagactccacctttgactaggagatatgacaaagaatgtgaaaccgtcttgagtccaccatgatactttttgaagaaaacacatattaggttgaaaaagagaagattarggagggagggacatgagatcagggaagccttctctgaggaagggtcggttaagctgtgttctgaaggatgggagagtccagcaagagaagacagtgggagcagcattccaggaagagtgaagagtatgtgcaaagccaggtgtccctcatctctctctattcccagtgcagcttcctcaccactccccaaccaaataggagtctcttcttgtaggtggaacacgggataatataaagagcgtatttttgcacatctgagaagcccaggtgacatattgtccatgatctgaagcaacagataatgtgtttcctcatgtatttcccaatgggatcacccaaagtaacatgcttaaatggatgagttgtaatcttctacatagaggtgatgccaccaggcattggtgatccagataaatgaaatgcaggaataaggataccgagactgtttctggccacaaaggaccaggcagagtagtctattgcttggcgaccaagtgcatgatagc

SEQ ID NO: 379745 - DNA, 522 bp, Homo sapiens
gacatcttctgcgtcaaaggatctcattagtgtttgtttttatcaggtttttttttttcccgacttttatctcactcagagtgaattcartgttcactgtcatttacaggataggaaatatatgtccgtttgcattgaaaatcctgcttattccatctagactgtcccagataccactgtattcatgtaggtttggtgttttgtctttcatctatttctgaaatcaaaattttgttaaaaatgtttcgggaaagctcaaaagaattggcccattggaatggagtgaatgcaggctttctccatgcaagcagccatgctttcctagtcattaaccacctgggccttgggcctgtcatgttttttgagtctctgtttcttcctctggcaaatgattttgatgggtgtcatgaggatgaagtgggatgatgtgaaggacttggggtgcttaagaaatctcccaggccattcacaagccacatgcctgcaaagaagtcttgggtgagcagatgccaagtttcccag

SEQ ID NO: 379746 - DNA, 522 bp, Homo sapiens
gacatcttctgcgtcaaaggatctcattagtgtttgtttttatcaggtttttttttttcccgacttttatctcactcagagtgaattcagtgttcactgtcatttacaggataggaaatatatgtccrtttgcattgaaaatcctgcttattccatctagactgtcccagataccactgtattcatgtaggtttggtgttttgtctttcatctatttctgaaatcaaaattttgttaaaaatgtttcgggaaagctcaaaagaattggcccattggaatggagtgaatgcaggctttctccatgcaagcagccatgctttcctagtcattaaccacctgggccttgggcctgtcatgttttttgagtctctgtttcttcctctggcaaatgattttgatgggtgtcatgaggatgaagtgggatgatgtgaaggacttggggtgcttaagaaatctcccaggccattcacaagccacatgcctgcaaagaagtcttgggtgagcagatgccaagtttcccag

SEQ ID NO: 379747 - DNA, 522 bp, Homo sapiens
gacatcttctgcgtcaaaggatctcattagtgtttgtttttatcaggtttttttttttcccgacttttatctcactcagagtgaattcagtgttcactgtcatttacaggataggaaatatatgtccgtttgcattgaaaatcctgcttattccatctagactgtcccagataccactgtattcatgtaggtttggtgttttgtctttcatctatttctgaaatcaaaattttgttaaaaatgtttygggaaagctcaaaagaattggcccattggaatggagtgaatgcaggctttctccatgcaagcagccatgctttcctagtcattaaccacctgggccttgggcctgtcatgttttttgagtctctgtttcttcctctggcaaatgattttgatgggtgtcatgaggatgaagtgggatgatgtgaaggacttggggtgcttaagaaatctcccaggccattcacaagccacatgcctgcaaagaagtcttgggtgagcagatgccaagtttcccag

SEQ ID NO: 379748 - DNA, 522 bp, Homo sapiens
gacatcttctgcgtcaaaggatctcattagtgtttgtttttatcaggtttttttttttcccgacttttatctcactcagagtgaattcagtgttcactgtcatttacaggataggaaatatatgtccgtttgcattgaaaatcctgcttattccatctagactgtcccagataccactgtattcatgtaggtttggtgttttgtctttcatctatttctgaaatcaaaattttgttaaaaatgtttcgggaaagctcaaaagaattggcccattggaatggagwgaatgcaggctttctccatgcaagcagccatgctttcctagtcattaaccacctgggccttgggcctgtcatgttttttgagtctctgtttcttcctctggcaaatgattttgatgggtgtcatgaggatgaagtgggatgatgtgaaggacttggggtgcttaagaaatctcccaggccattcacaagccacatgcctgcaaagaagtcttgggtgagcagatgccaagtttcccag

SEQ ID NO: 379749 - DNA, 560 bp, Homo sapiens
ctttatacaagcagatcttaaaatggtagctgagttgaacagtgtagacacagagtatttgtccctctaagaascaacatgggaatccatggagctcagaccaaatccagcccactgtctctgcttttacaaataaagttttatcaaaacacagccacattcatggttcatttgtttacatattaccccatggatgcttttatgtacagcatggcttatgatgcccaactattcactctatggccctttaaagaaaaagcatgctatccccatctagatgaagagacaagtagaaaggagatgcaggcatttctattttcagagtatatttcttagcatttccatttccgaacatatatttactctccttcccacctgccaatgcaggagaaattagcctactgagaaactccgaaatatcctgactagtgtcaatttgcagaaattgtgcagtttatgtgacaggattctttcactgtcaaatttttgttcagagacatatcggtgttcacaaagaatgatatctccatgtctcagcatatcctggaaaaaccccagga

SEQ ID NO: 379750 - DNA, 560 bp, Homo sapiens
ctttatacaagcagatcttaaaatggtagctgagttgaacagtgtagacacagagtatttgtccctctaagaaccaacatgggaatccatggagctcagaccaaatccagcccactgtctctgcttttacaaataaagttttatcaaaacacagccacattcatggttcatttgtttacatattaccccatggatgcttttatgtacagcatggcttatgatgcccaactattcactctatggccctttaaagaaaaagcatgctatccccatctagatgaagagacaagtagaarggagatgcaggcatttctattttcagagtatatttcttagcatttccatttccgaacatatatttactctccttcccacctgccaatgcaggagaaattagcctactgagaaactccgaaatatcctgactagtgtcaatttgcagaaattgtgcagtttatgtgacaggattctttcactgtcaaatttttgttcagagacatatcggtgttcacaaagaatgatatctccatgtctcagcatatcctggaaaaaccccagga

SEQ ID NO: 379751 - DNA, 602 bp, Homo sapiens
tctttctaatgcagcaaaaatagattgagcatttgatgtatattaatcactgttccaggtgccctgggagaaaattaaataagcctgttcttgcccttatgtaaattagtgatgtagagggagaggcagatatacacacaagtacttataagtaaaggtcaaactttgtattttacttttgtattgtatttggctatctctcccatcagaatggaaattccttgagggcagggatttgggagagaagggtttagtttgttaactattttgttccattcactagaaaatagtaagcacccaataaataattacaaaatcaaggaattaraaaagtaggtataaagggcaacacagaagttccagagaatcagaattgttccaataggtttgctctagaagaaattgtgtttgagcatggatttgaataagacacgatatccttcccagcctctggtagccatccgcctactctatgttcataagttcaactgttgtgatttttagatcccacaaataagtcagaacatgcaatgtttacattgcatccctttatcaaaacatctcatgtaccccataaatgtatatacctactgatatggttt

SEQ ID NO: 379752 - DNA, 626 bp, Homo sapiens
cttttcttaagctgaaaatcattttgaagttgcgagcaactcctttaagaattaatttaacagtctgatcacaagcaaaggattgccactttgcaatcagctttctggagttttgagagatgacatttaaagagctggagatttctcagcactgcagcatttacaggtgcagccaacacattgttatctttgcttctgaaattcaggcagcacatggataattaaaatatatagaaaactcccagccatattttactcttaagagatgcagtagaatattatagttaggcgttcaattggatgtaagattagagatgggaggacatagtattactcggagatggtctctgtaggcaaactgcctgggtttgaatttagattatcccactaaccaatcatgtggccctcttcaaggtatttaatttatttatgaaatatmaattttaataagacacggagactctactgaaaattatatgatagaacatatgcaaagcagttgggatagttccctagcctatagcaaaaatttgatcttatcattgttaacttaaagagagatggaggcagtgcaatacacatctggattctagagatgagggtcaaacactggggaaagtgagtat

SEQ ID NO: 379753 - DNA, 626 bp, Homo sapiens
cttttcttaagctgaaaatcattttgaagttgcgagcaactcctttaagaattaatttaacagtctgatcacaagcaaaggattgccactttgcaatcagctttctggagttttgagagatgacatttaaagagctggagatttctcagcactgcagcatttacaggtgcagccaacacattgttatctttgcttctgaaattcaggcagcacatggataattaaaatatatagaaaactcccagccatattttactcttaagagatgcagtagaatattatagttaggcgttcaattggatgtaagattagagatgggaggacatagtattactcggagatggtctctgtaggcaaactgcctgggtttgaatttagattatcccactaaccaatcatgtggccctcttcaaggtatttaatttatttatgaaatatcaattttartaagacacggagactctactgaaaattatatgatagaacatatgcaaagcagttgggatagttccctagcctatagcaaaaatttgatcttatcattgttaacttaaagagagatggaggcagtgcaatacacatctggattctagagatgagggtcaaacactggggaaagtgagtat

SEQ ID NO: 379754 - DNA, 619 bp, Homo sapiens
ttatcccagcaaactagagaatctgagcaaaaagcatctcctaagagccagagaaattgagttgaatgcttttcattcttaaagcattgtggaggccaaagagaaaaacatatatggagttcggaattatccagacattctgagacccatgtggccaagatttcagaaagaggagaagttcaataacaaagcctgataatctatgttaatttttctctttcattattggctaatttatgasaggagaacaggatgagaggcagaatcactgtgcagaaacttgctgctgggaggctatgaatctagccaacggtaaagaggaggtgaggattaagtttaggattcatcagagtgcagagctctacatgcatggcaggcatttagttaggacaactgaaggaccacatcctagggggagagctgaaataaaaatagaaatgttcttaaaatattacaacatacttcggataatcttgattcttagttgcttgaaggtgatccattcataattaaactttctgctagatgctaaataaatacctccaagagaaagaaaacgcaaatcctttatgcttttcaaaaatttatgttttgaatacaatggtattcatccagaaat

SEQ ID NO: 379755 - DNA, 556 bp, Homo sapiens
ggctgattaatagtctattgtgtctgtaccaggttttctttatccattcatctgttgatggacacttaggtggcttccaaatcttggctattgtgaacaatgctgcaaaacacatggscatgcggatatctcttcgatatactgatttcctttcttttgagtgtgtgcccagtggtggaattgctgattcatgcggcagttctatttttagttttttgagaaactctgtgctggtttttatcgaggcgctaatgattcgcattcccaccaatagtgtacaagggttcctttttctctgcagcctcgtcagcatctgttattgcctatgtacttcataaacagcattttgacggggatgagagcatatctcactgtggttttgattagcatttctctgatgattcgtggtgttaagagttttatcctatacctgttggccctttgtatgtcttcttttgagaaatgtctattcagatcttttgctcatttttaattgtttttgtttagtgtatattccttccttaatgagactgacctctttgatatatgcttatta

SEQ ID NO: 379756 - DNA, 556 bp, Homo sapiens
ggctgattaatagtctattgtgtctgtaccaggttttctttatccattcatctgttgatggacacttaggtggcttccaaatcttggctattgtgaacaatgctgcaaaacacatgggcatgcggatatctcttcgatatactgatttcctttcttttgagtgtgtgcccagtggtggaattgctgattcatgcggcagttctatttttagttttttgagaaactctgtgctggtttttatcgaggcgctaatgattcgcattcccaccaatagtgtacaagggttcctttttctctgcagcctcgtcagcatctgttattgcctatgtacttcataaacagcattttgacggggrtgagagcatatctcactgtggttttgattagcatttctctgatgattcgtggtgttaagagttttatcctatacctgttggccctttgtatgtcttcttttgagaaatgtctattcagatcttttgctcatttttaattgtttttgtttagtgtatattccttccttaatgagactgacctctttgatatatgcttatta

SEQ ID NO: 379757 - DNA, 556 bp, Homo sapiens
ggctgattaatagtctattgtgtctgtaccaggttttctttatccattcatctgttgatggacacttaggtggcttccaaatcttggctattgtgaacaatgctgcaaaacacatgggcatgcggatatctcttcgatatactgatttcctttcttttgagtgtgtgcccagtggtggaattgctgattcatgcggcagttctatttttagttttttgagaaactctgtgctggtttttatcgaggcgctaatgattcgcattcccaccaatagtgtacaagggttcctttttctctgcagcctcgtcagcatctgttattgcctatgtacttcataaacagcattttgacggggatgagagcatatctcaytgtggttttgattagcatttctctgatgattcgtggtgttaagagttttatcctatacctgttggccctttgtatgtcttcttttgagaaatgtctattcagatcttttgctcatttttaattgtttttgtttagtgtatattccttccttaatgagactgacctctttgatatatgcttatta

SEQ ID NO: 379758 - DNA, 583 bp, Homo sapiens
gtgcgatcgtgtcatcatcatgagaaaaatagggatttgattattctttagcatttttctagctctgctatgctgttgtatcgaccctagcgacaagtttgatgtgaatctaaaatagtagttaaaagtgactatggaaaatagtggctcaactcaactgaaccttttagattaaatgcctgattgatagatgatggttatttatgattaaaaaagaaaggcgtggtttcctggaataattggaggccctgcagccccactgacagaaaatctgccagaatgtttctttccaggcttggtcagacaactcagacactccccttttctatttgcctctctgggaaattaaagtctgcagccctttggtgaccatatgctaattactagccacttgcttctaaaaggcagatcttatcttrtcacttggctgctcaaaacttttcagtttgttttccatcaggctcagggtaaagtctaaacttttggacaaagcctcttcttaagactctttctacactaaccctgtactacatgttccagacattctgaaggtctttcattttctgcaaaattataatttatt

SEQ ID NO: 379759 - DNA, 590 bp, Homo sapiens
gtggcctgcatgcctaataatgagacattatgacagccatcgtcatttctgccctgtggaatcagttctggggaaaactaaatagctggcagtcaaatattggtcttagatgatttagcataggccttcctcagcaagtagagggttggaagaaacatcttagcccctcagtttcctcatgtataaaatggtgataagaatagaatttaccttataaagttgttgcagaaattaaatgagttaccatatgtaaagcactgagaacagtgcctggcatagaatgagttctacttaagtgtgatctcacaaccccttcaggttttaggaaggagctttaaatatggtgatggagtctgccaatgccttctttatgcaatcatttaaacaacaaggaagagttgcaaggaactgcaaagtcctgctgtacggggaagcaaacaggcaggatgagcaatggatatatttaamatctctagcagcttcgaagctagtgttcttcaatacaaatcaacctcaatttattttttaaaaaagaactttgtggataaattatcatgaatctgatattagctaagtttaaataaatgaga

SEQ ID NO: 379760 - DNA, 533 bp, Homo sapiens
attcaatctgagtatgcatccctcccctaccaggactttgattaatagaggtgcttacctgggcaacaagactagaagcacctgcagcctccaatataataaggtaatggaatgcggacatgtgtgcatgcctgcacacacacacacacacacacacactatacatatgtttattgggggagtggatgagaagagaactcacctttgcaattaacttgtgttktgctgctcactgaaccagaggctgggtgtgcatttttgtttggaagcttcttcatcacatttttatttaatttcattttacttttttaaaaaatatggagatgaggtctcactatgttgccctggctgctctcaaactcctgggctcaagtaatcctcactcctcagcctcccaaactgctgggattacaggcgtgagccaccacgcccagcatcttcatcacatttggagggaaaatgtattcttcccatttcacagataaagaaacgaaggcttagagaacggaagcatcttgcccaatgcaacaaaa

SEQ ID NO: 379761 - DNA, 395 bp, Homo sapiens
gtaaactgggggggtccacgccctacctggagaaaaagatattactcacttccatctgaatactgccatttcaacagacagtatcactggagcttttaaatctttaagagaagtcaaatatccagaatttcatgtaacatctcctgatttgtaaatgttggagactaagtcaaagcaccatgtgggctgaataaaactcattcatcctgtggcctgtcactttgcaaattccattataaattctattaagtacttttcactttttaaacctaagacaaaaaggggaagttttcatccagtgaaatgacatgatcacatttgtgttgaatttatttctaakgcaaccacatatacacagtgacacacacatttacacaaacctctgagtgtatgaa

SEQ ID NO: 379762 - DNA, 489 bp, Homo sapiens
ggacctggtgggaggtaatttaatcatgagaatggttacccccatgctgttctcatgatagtgagtgagttctcacaagatctgatggtcttattaggggcttttcccccttttgctcacacttctccttgctgctgccatatgaagaagtacatgttggcttccccttctgccatgattgtaaatttccggaggcctcccagccacactgaactgtgagtcaattaaacctttttcctttataaattacccagwcttgggtatgtcttcattagcagtgtgagaacgaactaatacaacttaactatttgatgaagggaaaaatggacacacttatcttttaagtcattttaaattatttcgccttagtaccaacatagttacattatgaggtaggaaccaaaatctgcatgaatttttaagatcaaattcagagaaaaggccacaaagggcacagcctgatgtgcagagcgtgtgtttatcagacgc

SEQ ID NO: 379763 - DNA, 629 bp, Homo sapiens
cttggctccccgtctcggtacctaaagcagctcctctgagataaggtagccatattctcctctcagaagaaggtctgtaaatggcaggacactatgcagggaagggcttcttctagactttttcattatattttacattttattgctggaaatgttttcttctttgcattaaaagatttcaaaattttcccccaggcatatatttaaagtytccgtccaccctaactttctttccaagaggttagtatcctttgtcatttactaaatgttttcctcccctgaagcgtcctctccagggacaaggagatgtcagggctcctgtatttctgaagggctttccccgtccacacctttctacaggttgccgtgactggaacaaaaaacaaatggtcaaaagctccatgaagaggaactggcaggaactgagcctgggctggactgaatgctaactttcaatctggtctggaaaaaggatttggataggaaaattaattgtaaaaatgagtaaattgtctatcatctcccggctgaatgaaataatagtgttctggaattacattatgattaacagaggctgtcacacaaactctggagacagcccacatcacccagcttagcacagagaaggt

SEQ ID NO: 379764 - DNA, 629 bp, Homo sapiens
cttggctccccgtctcggtacctaaagcagctcctctgagataaggtagccatattctcctctcagaagaaggtctgtaaatggcaggacactatgcagggaagggcttcttctagactttttcattatattttacattttattgctggaaatgttttcttctttgcattaaaagatttcaaaattttcccccaggcatatatttaaagtctccgtccaccctaactttctttccaagaggttagtatcctttgtcatttactaaatgttttcctcccctgargcgtcctctccagggacaaggagatgtcagggctcctgtatttctgaagggctttccccgtccacacctttctacaggttgccgtgactggaacaaaaaacaaatggtcaaaagctccatgaagaggaactggcaggaactgagcctgggctggactgaatgctaactttcaatctggtctggaaaaaggatttggataggaaaattaattgtaaaaatgagtaaattgtctatcatctcccggctgaatgaaataatagtgttctggaattacattatgattaacagaggctgtcacacaaactctggagacagcccacatcacccagcttagcacagagaaggt

SEQ ID NO: 379765 - DNA, 504 bp, Homo sapiens
ggccctgccccctaactggtcccgccccactctggccccgccccaggcgaactccccctggttctagccccgccccttatttttagatgtcgcttgtttgaccacgccctcagcccagtcctttctctagattggtcacacctcaggaagtcccctcccccttcactggccccgccctccaaggccctcagcctcggggaatggtmggccacaggacgaccccgccctaatctagctctgcctccaagcagaccctgagtccgggccgacccgccccggaccctgcgtctggccgacagtactgtttacatttgtagataagcagaatttacgcttttcttgctcagattaacctcgccctcgtcccgctgcacttgggtctgactggctcctccacctgtccccgccccacggcccgcgcatgcaccttcgcccactctgcacaccttcacagagcgcctgctgggggtcagccctgtccaggcgctggagagccgccggtga

SEQ ID NO: 379766 - DNA, 545 bp, Homo sapiens
ggagacgtggacaacctccctgcacttgagtcgctggcagtcacatcacagagataagatggagttaagcttcagtacatgtatggttacatgagcgtcggactgatggggccaggcaggagcaatggagcatagagccggacagatgaggtctccaccctggccactcacatactttgtgacaggcctcaagtgagagttgtcacagtcagagcacagatgctgggaggtgagggaggacttcacagaggaggcatctgacctgtcacggggtgggatggagtggccaagacccagctctgcagtcaggctcaattctgcctctgcttgaaaagaaacatagcrtccctgagccccagcgcttctgaatttgttgaatgggattaatcttgcccctccacccagacctgggtcccagtaaacacccagcagcctggccttgcctagacgggtcttgcaacactggggccgccctgatggagcgctcctgcatgggaggcaggaccccaggctttgaggggagagctggcaaaagggaagcatgc

SEQ ID NO: 379767 - DNA, 582 bp, Homo sapiens
aatgaggtttattataaaaatccagcctggaaagtcattttgggggaatagacaagccccaagcagtgggcccttacagattccagtttacaccaagcagtgggcccttagagattccagtttgcacgaagggtcagtatagcttggtgcataaagaggagggaacattccaaatacagagcccactcatggacaaggcccagggccaagcagactttttttttttttttttttttttgagacaggstcttactctgtttgcccaggctggagtgcagtggcataatcatagctcactgcagcctccatctcctgggctcaagcaatcctcccacctcagcctcccgagtgtctgagactgcaggcgcacaacaccacgctcagctaatttggttttgttttttttttatttttttttatttttttgagacggagtctcgctctcgtccaggctggggtgcagtggcgcgatcttggctcactgcaagctctgcctcccaggttcatgccattctcctgcctcagcctcctgagtagctgggactacaggcacctgacaacatgcctggctaattttttttt

SEQ ID NO: 379768 - DNA, 564 bp, Homo sapiens
agacatgaattctcattttcccagcatcccagatcctcttaccctagtaatgactctgattttgaacttggagtcaacccttctcttcattctgagtccacatggtctggaaggatctccaggatgaggttcttgactcaggtctggtcaatccagcactaaatggaccttgacacagtgattgattcaggaatggtctcaccacccagggtggtccaatcagaaaggctctcaaaagtttagtgggagtccacaataagatatgactgcacaacacaagcatggctacagccaaatagagagatctcaacaagactggcaaggaagtggagaaactgaacccttagacactgctgatgtgagtgtaaaatagtatagctgctttggaaaacagccagtttctcaaaaggtgaactgtgtcacccagcaattccactcttcaatacctaccctagagaaatgaaaccaaatgttcacataaygcacacaaatgatcccagcagcactgtaataaacaaaaggtggaaacaaaccaagtatctttcaaccagtgaatgtataaac

SEQ ID NO: 379769 - DNA, 557 bp, Homo sapiens
gctagatggggacgaccaggagagggtcccgagcagtggagtgagcaaatctaagccctgcagatggctgcggatgctgctgccccartgcctgcacagggtgaaaagaaaccgccaggaaatggtgcattttcctgctgcaccttcccactcacccactttcttctcctcataatcaactgaacctccaaactaaagaaacacctgcagaatagaccaagaagtccttttcccttctgtgagtaacatatttaaataagtttctaacagaagtattctcaagttgtaacagtggatcaacagttttccctctgcaaatacatacaataaaagaaaatgtaacagaggtaggaaaagtttctgtgatttaaaaaagagagcttattttgagaaatcaaaacatatactctctcatgatgtaaaactatcccaataaacaagggtaaaagtgatcgctaatttttgtatttcccataagattagagatattgtttcttttaatggaaatccctgaaatccagaaagacagtttcccagtgaaaagcataatcatggaa

SEQ ID NO: 379770 - DNA, 623 bp, Homo sapiens
tactagttgtgagattttttggtggttttttttgagacagggtctggctctgttgcccaggctggagtgcagtggcacaatctctccactcactgcaacctccacctcccaggctcaagcaattctcccaccttggcmtctcgagtagctgggactataggctcatgccaccacgcccggctaatttttttttttttttttttgtatttttcatatagacaggtttcgccatgctgcccaggctggtctctaactccgtagctcaagggatctgcctgtcttgcctcaggctctcaaagtgctgggattacaggtgtgagccactgtgcccggctggtcttagatatttggtttctactttcgcatcctcttgaattcaggtgtagtcatgtgacttactttgaccattaacgggaacagatgtaacatgtgccacatagaaacagaagcatggagaactagcagaagcgacctcatgctctatttccctctgccacagggcctaggattgttccaggtgctggcaacccatccaccgggctcccagaggacaacaatgcaaagcagagcccattttgccttgcaagggacacatagagtgaatgagagttcatgtatgtttg

SEQ ID NO: 379771 - DNA, 623 bp, Homo sapiens
tactagttgtgagattttttggtggttttttttgagacagggtctggctctgttgcccaggctggagtgcagtggcacaatctctccactcactgcaacctccacctcccaggctcaagcaattctcccaccttggcatctcgagtagctgrgactataggctcatgccaccacgcccggctaatttttttttttttttttttgtatttttcatatagacaggtttcgccatgctgcccaggctggtctctaactccgtagctcaagggatctgcctgtcttgcctcaggctctcaaagtgctgggattacaggtgtgagccactgtgcccggctggtcttagatatttggtttctactttcgcatcctcttgaattcaggtgtagtcatgtgacttactttgaccattaacgggaacagatgtaacatgtgccacatagaaacagaagcatggagaactagcagaagcgacctcatgctctatttccctctgccacagggcctaggattgttccaggtgctggcaacccatccaccgggctcccagaggacaacaatgcaaagcagagcccattttgccttgcaagggacacatagagtgaatgagagttcatgtatgtttg

SEQ ID NO: 379772 - DNA, 623 bp, Homo sapiens
tactagttgtgagattttttggtggttttttttgagacagggtctggctctgttgcccaggctggagtgcagtggcacaatctctccactcactgcaacctccacctcccaggctcaagcaattctcccaccttggcatctcgagtagctgggactataggctcatgccaccacgcccggctaattkttttttttttttttttgtatttttcatatagacaggtttcgccatgctgcccaggctggtctctaactccgtagctcaagggatctgcctgtcttgcctcaggctctcaaagtgctgggattacaggtgtgagccactgtgcccggctggtcttagatatttggtttctactttcgcatcctcttgaattcaggtgtagtcatgtgacttactttgaccattaacgggaacagatgtaacatgtgccacatagaaacagaagcatggagaactagcagaagcgacctcatgctctatttccctctgccacagggcctaggattgttccaggtgctggcaacccatccaccgggctcccagaggacaacaatgcaaagcagagcccattttgccttgcaagggacacatagagtgaatgagagttcatgtatgtttg

SEQ ID NO: 379773 - DNA, 623 bp, Homo sapiens
tactagttgtgagattttttggtggttttttttgagacagggtctggctctgttgcccaggctggagtgcagtggcacaatctctccactcactgcaacctccacctcccaggctcaagcaattctcccaccttggcatctcgagtagctgggactataggctcatgccaccacgcccggctaatttttttttttttttttttgtatttttcatatagacaggtttcgccatgctgcccaggctggtctctaactccrtagctcaagggatctgcctgtcttgcctcaggctctcaaagtgctgggattacaggtgtgagccactgtgcccggctggtcttagatatttggtttctactttcgcatcctcttgaattcaggtgtagtcatgtgacttactttgaccattaacgggaacagatgtaacatgtgccacatagaaacagaagcatggagaactagcagaagcgacctcatgctctatttccctctgccacagggcctaggattgttccaggtgctggcaacccatccaccgggctcccagaggacaacaatgcaaagcagagcccattttgccttgcaagggacacatagagtgaatgagagttcatgtatgtttg

SEQ ID NO: 379774 - DNA, 534 bp, Homo sapiens
aacaatcatcatcatagcactagactattgttttccactgtggcctcaaaaatgggaagattgtttactgtgctcatactacctgcctgatctygtgctaggtgccaggaaatcaaccatgaattagaagcatgagaagcttgacaggcattcagcatcctggatcctcctccagcaaaaacaagatcaggcatgagatggcaactcacctacccttccaaggacacttttcaagtgtgtcttttggagtcatagcagtagaatgaagaaaagaaaaagaaaagcaaaccctgacccaggtgcttttaacctgtgtgattttgggcaactccttttatttctctgagcctcagtctcctcgtctggaaattgggatcatagtcctatttcatgagggaagatcgaatggcaaaacatatgtgagagtgtctagcatagcaggtgctttataaatgttagaggaaagggaagttaggacatgatttaaatatatcccatcagtaggggccaaggtaaaatattaatagtgaacaa

SEQ ID NO: 379775 - DNA, 642 bp, Homo sapiens
tgggtctcattatgaatttccactaaggaaagacaatgtagctactgctgctactgaatacctaacttgccagcaccatggaccaatactgagcctctagatctggcactattcctcaaggagaacactgagccacttggtagcaagttgactacattgggccccttctattctagaaggaccagtggctcaaccttataggatagatacctgttacaggtatagttctgcctttctgcctgcagagtctcagctggcacaactattcagggatttgtagaattcttgattcacagacatggaatcccacacaatgtagcatctgtctagggaacccattttatagtgaagaaggtgtaaaattgagtcagtgaccatagggtctactggttatatcacataccatatcatccagaaagagctggcctcatakagtgctagaatggccttccaaatgcacaagtaagtgccagcttggaggcaaggccatcagatgccatctttcagaatgcaatacatgcattctatcagagatccctgggtcccagataggaaaagtacatggactcaggaaccaaagaatgggaacatcccttaacattattcccactgaccctgcagggaactttatgctttccatcc

SEQ ID NO: 379776 - DNA, 608 bp, Homo sapiens
attgaattacaaaactaccactgctacaagggtgctttaaatactttgtatccaggggccagcaggtaagagaggagtcaccatcatggcagagataattgatcctatcatcaggaagcgayagagctgctagtacacagtggggatgaagaggaatatgtgtggaacttggtattccctttccccattgtaacagtgaaggaacacatgcagaaaacacaacgtaagaaatgcatgataaggccggttatggtggctcacacctgtaatcccagcactttgagaggccaagatgggcagatcgcttgagcccaggaattcaagaccagcctgggcaacatggcaaaaccccgtttctacaaaaaatacaaaaattagccaggcatggttcacctgcaatcccagttacttgggatttgttgcttggatgcatctgtaatcccagttacttgggaggctgaggtgggaggatggctttagccgggaggcagagtttgcagcaagccgagatcacgccatagcactccagcctgggtgagagagcgagactctgtctcaaaattgtacctaaattggtacaccttctctgcccaactctcctaaacacc

SEQ ID NO: 379777 - DNA, 608 bp, Homo sapiens
attgaattacaaaactaccactgctacaagggtgctttaaatactttgtatccaggggccagcaggtaagagaggagtcaccatcatggcagagataattgatcctatcatcaggaagcgatagagctgctagtacacartggggatgaagaggaatatgtgtggaacttggtattccctttccccattgtaacagtgaaggaacacatgcagaaaacacaacgtaagaaatgcatgataaggccggttatggtggctcacacctgtaatcccagcactttgagaggccaagatgggcagatcgcttgagcccaggaattcaagaccagcctgggcaacatggcaaaaccccgtttctacaaaaaatacaaaaattagccaggcatggttcacctgcaatcccagttacttgggatttgttgcttggatgcatctgtaatcccagttacttgggaggctgaggtgggaggatggctttagccgggaggcagagtttgcagcaagccgagatcacgccatagcactccagcctgggtgagagagcgagactctgtctcaaaattgtacctaaattggtacaccttctctgcccaactctcctaaacacc

SEQ ID NO: 379778 - DNA, 513 bp, Homo sapiens
acttctcagagtcctagaggctgcaagttcaagatcaacgtgcggcacatttggtgtctggtgagggcctcttcctggcttataggcagtcactgttatgtctrtaaacccccatagctcatatgtcgaaacctctgatgtatgtgtaccccataaatttatatgttgaaatcgaatccccaacatgataatgttaagagatgggccttttggaggggattaagtcatgagggatccaccatcacggatgggatcagtgccctcatgaaagaggcctgagggagcttatttgcccctttggccatatgaggacacatagaaggcatcatctatgaggaacaagccctcatcagacacctaatcttttcttaccttgatcttggacttcccagtcttcagaactttgagcaataaatttctgttgcttatcaattgcccagtctaaggtatattgttatagcagccctaatggacttagacagccaccttagacaaccctcatatggctgagag

SEQ ID NO: 379779 - DNA, 513 bp, Homo sapiens
acttctcagagtcctagaggctgcaagttcaagatcaacgtgcggcacatttggtgtctggtgagggcctcttcctggcttataggcagtcactgttatgtctgtaaacccycatagctcatatgtcgaaacctctgatgtatgtgtaccccataaatttatatgttgaaatcgaatccccaacatgataatgttaagagatgggccttttggaggggattaagtcatgagggatccaccatcacggatgggatcagtgccctcatgaaagaggcctgagggagcttatttgcccctttggccatatgaggacacatagaaggcatcatctatgaggaacaagccctcatcagacacctaatcttttcttaccttgatcttggacttcccagtcttcagaactttgagcaataaatttctgttgcttatcaattgcccagtctaaggtatattgttatagcagccctaatggacttagacagccaccttagacaaccctcatatggctgagag

SEQ ID NO: 379780 - DNA, 618 bp, Homo sapiens
agtgttctagaccaagaaagaggaaataacaaaatactgaaatagtgaattgggcagatggacgctccgcatccactgtaccagaggcaggtgatggaagacagaacgagctaaatttgctgtctgtaaaatattaggaaagaggaactcaagagaaagctgggtcattttcagaagatacagacctccttgggcttaatgaagaaaaatattaacagaaatctaaggcacacacacatactcccatctggcaataatcaaatgcctaaaataggcttatattgctgccatctggccatggaaggtggtgattctcactgcccaatgcagagccgcccctccatcacaccttgaaatcctggggcaggctggagagcctgagaattccccagccacagaaacaggggcagaggtctcatctgcggagatgggaggaggctgggacagaggcaacctgtgctttcaagtagtgagaaaagagactaatttcccatttatagcaatrttatagagttgctgaccccaataaatgaatttaagttttatttattcagaacaagcctcttcaaaaaaattcaatattatagtacaggaggcacgtggatatgaagaaaattg

SEQ ID NO: 379781 - DNA, 637 bp, Homo sapiens
cagcatctcagttgagaggcctcccagatctcgtgctccaccacttcacgaaacaggaaactccgaggcctgtggaaagagcttgctctttgggaaaactgaacacccagctcaatgaggagccaccatcaggaactttggagatttagcctaaactcagaggtagctactttgatagcttggtgatttgaggaataatgttacaagctttgtggatcaaacgtctcacaataccttgcaatttttttaggagaggcagatggctgcaatgaacctcaaaaggtcaaccartccaggaatgataagtcatctcatgtgttaattctgattaggtgcacggtgttaagagagattctgaggctgcattctggttcaggggaaattagattgactagtaatgtctgccatggtctttggatgctaaagtgatggtgtgcatgtcaagaacttggtattcttggtatagtttaaactgtgttccttgcccagagtcactgctcctttctctgctctattatttctagattctccatccacccatccctttaatgatgcagttttgtgtacctttatgcactaagtgccaggacatagtaaggaataaaacacataccagttctcaaacagctcaagggtc

SEQ ID NO: 379782 - DNA, 588 bp, Homo sapiens
tatgcaaaattttgcagcagctttttgcttatttgtttgtaaatatccattactaggtrtattcgggttctctagagggacaggactaataagatagatgcatatatcaaagggagtttattaaggagtattgactcacacagtcacaaggtgataaaagtatttaagaattaacctaaaaaagaatgcttaagaccgttcttgacaaaattgtaaaaaaaaaatagaaaaacaaataataggtataaataagtgaagagatctgttacatgcatgaatgaggtgactcaatatgataaaaatgtcaatttccccaaaatttagtctaaaaattcagtacagtttaaaataaaatgccagtagaaacttttacacctttgacaagcatatttcaaaatatgtaagaaaagaatgctttgaagaatttcaacaaacattttaaaaatacatttggaaaaataagactgaattgccatgtaaattttgaaattttgaagaatacgatcgaaagtgggtgaggttggtgtatcatagcagatattaaaatatgttataaaaccatacgtttatttattttttttttgagac

SEQ ID NO: 379783 - DNA, 588 bp, Homo sapiens
tatgcaaaattttgcagcagctttttgcttatttgtttgtaaatatccattactaggtatattcgggttctctagagggacaggactaataagatagatgcatatatcaaagggagtttattaaggagtattgactcacacagtcacaaggtgataaaagtatttaagaattaacctaaaaaagaatgcttaagaccgttcttgacaaaattgtaaaaaaaaaatagaaaaacaaataataggtataaataagtgaagagatctgttacatgcatgaatgaggtgactcaatatgataaaaatgtcaatttccccaaaatttagtctaaaaattcagtacagtttaaaataaaatgccagtagaaacttttacacctttgacaagyatatttcaaaatatgtaagaaaagaatgctttgaagaatttcaacaaacattttaaaaatacatttggaaaaataagactgaattgccatgtaaattttgaaattttgaagaatacgatcgaaagtgggtgaggttggtgtatcatagcagatattaaaatatgttataaaaccatacgtttatttattttttttttgagac

SEQ ID NO: 379784 - DNA, 537 bp, Homo sapiens
gggtggctcccggcagggacacctatggagagttctgggagcagactgaggcaaaagagaagctgaacatgaggcagtggcagcagagccctcagccagttctatagggagctctggagccctccagaactgtctagaattgagggaaaggtgctgagcctctgtacccaagcccacccccagcactgaccagaaattaaacatgggctgtccccagacatgagtgttacctgggcaagacagcttcctacagttaaaggcaattattgraaaggaactcagctgttaggagtcatgagtcaaccacccctggaacctggaagaatatgtgtcttggtcatggaggggattgtgtgtcatgccacagagccattttggtcatcttgatctggatattgattgtcctcaagcagatgtaagcctcctgaaggcagggctgccgctagcatatggtctccagctcagaaggtactttatggcttatggtggatttttatgcatgggtcatctggccacgatttcctcagcagctagtag

SEQ ID NO: 379785 - DNA, 597 bp, Homo sapiens
agcaaccccagttcccaaatgcatggcaagctcattcactttcgaaatcaatttattacagagtgtgtagaaggggatggagctgagggctgcttctgactcctgagatggtttggatactgtcctctctccaatttcttgttgaaatgtgatccccaatattggacatggggcctggtgggaggtgtttggtcccagcagtaatgagagagttcttgctctgttagttcacggagagctggttgtttaaaaagcctggcaccttctctctctctccctctctctctctctctttctctctctctcattccctctctcaccatgcaayaggcttgccccctccttgccttccacaatgagtaaaagcttcctgaggtcttgaccagaagaacgccagtgccgtgcttgcacagcctgcaggaccatgagttaaataaacctgtttcctttacatatctcccagcctcagatattcctttagagcaatgcaaaatgggctaacacaactcctcttgccagcaggggacacatgcaatttacttggcagctaccacacaaagaggatctgcaggctaattatcaggaaatagaaaaaac

SEQ ID NO: 379786 - DNA, 596 bp, Homo sapiens
tctcacacaggccatctggctgtgatgtctgtgctctaaccactatgctacagggttgcttctctgatcagactgtttctgttttcgtccttacctaattccattaaactatatagatagctgttaccatttttttaaatgtcatgttttgtatgtgaggagaatatcatggtagaattcctggttttcttcttggggaaagtatgctgtgggagacctgcagaaaatgttctccgcgatgccacacatgattatgaatagaaagatttgcttgcctggaagaagcctgaattgtttcacagtaatgracaaagaggaaggtaactgctctcagattgtaactgcccagaagagcagttaggcagctgagagctactcagggggcagaattaggagttggggatgaaaataacaacggaggtagattttgttccctttaaagaagagctgcctagcaaacagaattggatgacaactctccattgtttgagaaaagactctgttcctggtactgtagataaaattcagtgcagaggtgaaaggaatggggcacattgctctttcaagtcttgagaacctaagattttatgaaaaag

SEQ ID NO: 379787 - DNA, 626 bp, Homo sapiens
tttgaccttgtgcttaatttgttgcattgatgatgttttaagattgatgcattttgttttcttgcttcttgattagaatgggtgttgagagtctgtgagtgtgttcactaatgaggttaggacatgatagaaatcactttggcgatagagatacgcgctcgagtgctgtggggkactgtgtgcaaatttaagcttgcagagggggaaatgtctggaagcagatacaaaaccaccgttgattctttttccaaactgccatataatttcataatattttacaaagatatgatcctctctgtcaactcacacttatgatggagaatttgaccttagattgattttataatgtgtgtatgttacagaaatacaaatacacaaatacattaaatggtgtgttttgtatagatacatacagacgcataccttcactttcataacaatatatgtgagggtgttacggcctgtttataacagccagccttttgtaaacaggttgcttttatgaaagcatgttttctctgctcctgaataatagatgaaatgtgtccatctcaatgcaaaattagaaagtccttaaaagaaggctgaatattagaaccctgagtattcatcatacagaaatggtc

SEQ ID NO: 379788 - DNA, 481 bp, Homo sapiens
tgagactaggtaaaataagccaggcacagaaagacaactactgaataagctcgctttatgtggcatctaaaaaagtccatctcatagaaacagaaactagaaaggttgccatcaggggctggggtaaagggggaagttgaggagagggtaaagggaggggaagttgaggagagggacttcaaaacatgctgttcaaagggtasaaagtttcagttagactgaagactaagtgtttgcaatctattgcactgcatggtgaccataagtaataataatgtattatatatttcagattggttaaaagaatagattattaacatttttaccacaaaaataagttcacaaagtaatggatatattaattagcttgattaagtctttctacaaggtatacatagatcaaaacatcgcctcataccccataaatatacacaatacttatttctcaattaaaaataaatttaaacaacaataatgcctg

SEQ ID NO: 379789 - DNA, 412 bp, Homo sapiens
actatattagcatgacaacaaattctttatgttgtgagattctactgatcctcaaaactgccactgaattagaattatttccagatgctctgttcaatgaaagagtcttaaaaataatgcaaaacgatggtgatcccaggctacactggcaacaggttaaatacgcaatcgtagcccttctcccatccattctgcatctcccctccrcttgcctgcagcttttcctggtcactcacggccctccctcggctccccacagcctcatactcacaactggcattttccttccacactttctcaattgtcccttaacactcctgtgaggggacaaccctaaagcctgggaccccaggagctgcacgcagggctcgctccttgctccttggtgtagagttcatggccaagcttcctc

SEQ ID NO: 379790 - DNA, 515 bp, Homo sapiens
cgtttggctttatttctgggttctctagtctattccattagtctatgtgcctattttaataccagtaccatgctgttttgatgactatggtcttatagtatagtttgaagtcaggtaatgtgatgcctccagatttgttctttttggttagtcttgctttcgctatgtggacacttttttggttccatatgaattttaggaatattttctagytgtgtgaagaatgatggtggtatgttgatgggaagtgctagacttcagcaatcaaatcttactctccagtgttacttcttaacaatagtttggggttcttcaagagttatgtccatttataaaataagagattatatactaaataaaagtgcaaggtaaagaaaaaatatttaaaacaataattatcaataatgtgatacacatttgcaaagaaaatacttttttcaaaaaataaatggtaaatcaatatgcaaaacagttgtttataatgcattataatacttttacattaacgtttgata

SEQ ID NO: 379791 - DNA, 584 bp, Homo sapiens
agtggccagtattgaagaatggacctggcagaggactggcagagtaygtaaggacattcttccagggaaataacatgggcaaaggcatggccaggcaatagaaagcttattggaattggcaacgggaaggaggagatgagaaccatggggtagggagaagtacagaaatacagctttcctgcagctcttcgcccgtctagatgagcccattgccctgcatgcacacgggtgcccagggccccggcaccctccatgggtgaccctggatgctatcactacatttcttcctttttttcacaacttaactcttctgtttttgctaagtctctttatctgcaaatgagtaaaatatcaaggactagcaggactataatgcagaatcaagacattataaatatgcctggaacatagtgggaaattatacatggaagatgttatctactgatttagagcaaaacttagaacaaaaaagatgtttctcacacacacacacacacacacacacacacacacacacacacacagctgggtgtgagatatggtgagtcaggagaaagaggaaggaaaggaaggcttgttagagt

SEQ ID NO: 379792 - DNA, 651 bp, Homo sapiens
gatttctgaaaagagacagggaatagaggaaaagaggaaataatggctgagaattttccaaagttgcttaaacaataacccacagattcaggaagaccaacaaatttcaagcagtataaataaataggaaatctgtaggtaagacacattcttgtgaaactgcagaataccaaagacaaaaaaagatgtttttagaaaaaaataggaaagaaagcaatcaaattaccttgaaaggaacaagaattaggctgatagcatattcctcaacttcagtaatggaagccagaagatcatgaaacaaaatattcaatgtggtgacaggaaaataattgctgcaccaaaatttcatatgcagtgaaagtatctttcaagaatacgaatgagataaagacattttctcatgagagaatgagataaacaaaaactgagaaaaagattagaaacatcttttgaacaaacttaaagaaaattctacaagatgtacttcaggcaaaaggaaaatgtttccagatggacagtctgagatgcaagaaaaaattatgagcaaaraaagcagtgaaggagatcagaacatgccatctcagaatatactgcattggcatattgattattttgagccaaaggcaattgagaaacaacagatgcaagaag

SEQ ID NO: 379793 - DNA, 555 bp, Homo sapiens
gacaaactgcgtggactttaaaagaattccaagtttcaaaaaacacttggttattaccaaattaagtcaccatatcttaacratttgaacaggttcagttaaaaacgatgaacaaagaaaaagcagtgcaatgtacaaactgcaagctgagagagcaagctgaaataagtgaaaagaggaaaaacaccaacatttgattcaaaatgaaacctcagttagtgttaaatgcagtgaaaaactttaataaatccaagaacaagatctagggctgtttcttcccaatgggttagtagtaatcataccagcaactgctccacacccagctctagctttaccacaggcccagccatatgctaaatgcttccgtacattcattcacttactcctctcaacaccatggcaaagaaatcacgcagatctcattttacagatgagaaaactgaggctcaagatttatagcttaggcaagggcgcctatctagtaagtggtaaaggtatgagtcaaagcccatagtatgaaccatattatgctacactgtccctcctcaagctcct

SEQ ID NO: 379794 - DNA, 551 bp, Homo sapiens
aaagtaaaggggtaaggacagacgttcatcaagtcttaggaagtttcagggctgggagtatattgcaggaccaagccttagtttttccctgtctttccatttttttttctctttccttttttcctcatttccccactccctccttggtccaggttctcgcctgcagaaaggtatagtttacctctagttctcaaacttcagcgggcatcagaattccctggagggtttgtgcaaacacagattgctgggctccactcccacagattctaagtgtgtgtgtgtctgtgtgtgtgtagaggggtggtggacgaaagcgctgagattttgtatttctaacaggctcccaggtaatgcttgggaagaactgttgcttcttggacagcaacacttacaaggcaacgtgatcttgagctccacctcgaaggatgtgagctgggaaagttccagctcacagagatttagtcacttgagaaayggtccacttcctccaaggtgtttcttggatgccccaaagggatgaaaacaagaagtgaccgtgggcgaggaggagg

SEQ ID NO: 379795 - DNA, 592 bp, Homo sapiens
ccccacagctgggaatgtactgggtctcacctgaatccagcacagctctgagtctcactcaatgcccatggcaagtactgcctgggtactgctgatgtttattcgagacccaagggctctttagccagcaggtgatgaatccagccagaactggggccttcccttcaaggtagcaagttcccttctggcacagggtgtgtttagaaatgtcctttgggaactagrggctggaatgggggcctcaggactttgcctggtcccctattctactgtggctgagctggtatccaaggtgtgagacaaagtcctctttactcttccctctcctgaagcagaaggaaggagtctttccaggagatgcaagctgtgcagcctggggttaggggaatggtgatgcaagcactcccttggccaccccagctggtgtgttactgggtcacatgtcccccaactccactggctccaaggccagcacagcaccaggacttgcctaggaattacagtctttgtggtctagactgcctttcaagtgtatttaggaccccaaagtactttagcttgccagcactcaggttctgaccactgggatgcg

SEQ ID NO: 379796 - DNA, 617 bp, Homo sapiens
ctctatattgtgagtatgtctttaatcaatgcagtcttataactggcttccactagttgctatcatgatgtagttgcacgtgtacaatcttggtcatacacattaatattattgtcgctttagctaagatttacttatagtgttaaatttcatttccattttatatgtctttacatgtaactcaacattgaaacaaaaagttattgtataagtagaaaagcatagaaatgaagttggaggataaatttgatattagtggaatacatatttttctttggaagaatgaccacaattctgtattttattgcaaacagcaatcagttgtcttacagratctataacaaaaggtaaatgaagttgagttgcattttgctacacagacatgtgcaaagaattgtctatcttatgccaagccatacaagaaggcaggcaaaagtgccaaatatcccagaagaaaggcaggaaatgtcaaagcaataagaagccagtatgaccaactcatgtgtagcgcagcacaatcattaaacatcattgacagcacttttttcttaaaggtacataaaatagtggtgtactttcaactgaggtcatgttcacatcaaatactatagtcaagt

SEQ ID NO: 379797 - DNA, 458 bp, Homo sapiens
catgcttgtgttaccagtgtatagggactgaaagggcaatcaacagaacgtagtgagaaagggcttgcatttgaatgttagcaaagttgtgtttaaggcatttatataagactttatttcactggaaagcttaggagcacctaaygtggacgcatggccaagtacactaatcatttgaagttaagcaatgtgaaggattaacatgcttaaagaagacttcctggccgtgccatttgttgctattgatgcaaacattgtactcagataataagaaaatgctattaatttctttattctgaaagctattaaattattacatatacaaaagtacgagggagttagggcagatgaagaacttgtaatgcaagtgtttgaatgagtaaacctatagcatatggtgtgacagtcattacatctcccagtcttgttcagctttctctcttcattctatattcagg

SEQ ID NO: 379798 - DNA, 428 bp, Homo sapiens
aaagatcccatagatctgaatttagatacctgggggtgtgagatggggaagcataacacatgtattttacaatgatagttgttttactctgtttactaaatgccartcagaagtgtttccctgtgtcccatgctaagtaataacacagattgatgtctgtggtcatgttgctgcagtattctcagagatgcagctacaaccggggttcagtagcagatcagctgctcagacagaggagaccatatttgccctaatttgtaacaaatttttcggccactcattctgcgactctctgagtaatcttgactcaacttcccatacctaataacccaataacagaaactaccttaagacaatgcatagtatcataattgtgcctacagttttttaaaaaaacaaattaagtagacaatttaaagtttattgaa

SEQ ID NO: 379799 - DNA, 458 bp, Homo sapiens
catgcttgtgttaccagtgtatagggactgaaagggcaatcaacagaacgtagtgagaaagggcttgcatttgaatgttagcaaagttgtgtttaaggcatttatataagactttatttcactggaaagcttaggagcacctaacgtggacgcatggccaagtacactaatcatttgaagttaagcaatgtgaaggattaacatgcttaaagaagacttcctggccgtgccatttgttgctattgatgcaaacattgtactcagataataagaaaatgctattaatttctttattctgaaagctattaaattattacatatacaaaagtacgagggagttagggcagatgaagaacttgtaatgcaagtgtttgaatgagtaaacctatagcatatggtgtgacagtcattacatytcccagtcttgttcagctttctctcttcattctatattcagg

SEQ ID NO: 379800 - DNA, 564 bp, Homo sapiens
tacagttcaataaaattggtttcttttatcatcctctctatatttttttcatttaaaaatgttactctaaaaaggggtccataggctttaacaaaccaccaaaggtgtccatggtaccatgcactagatgaaaagagtctgggtccacacacaagcccactgcccttcattagccccccaccaaatcaccctggatagtgtgatgagtgagatacaaatcactataagccactgagcgttgatgtctgtttcagcagttagaccattctaattaatgtacaactgaaacatggcttcaggccactgccactggttaacattgccaccagcttccctgcattgaagagaagacaccagcagtgatgtgctggtaaactgggtctcaaaaaccaacaacaacacaaaaagactcccaccatcgctggtttcaagctatcaatgtgatatcactgagctcacagttargaaaagatgcctggattcagctgttgccagccagtgtgagctggctcctagcacagcactggggttgctctccctcacaaccattccgagaagggtgtc

SEQ ID NO: 379801 - DNA, 499 bp, Homo sapiens
caataattttatttccttctaaaaattacccttgaatttttaacgaatcaaaaagaaagcaaacctgaaagatctcccacataagaagtcctgtggagggtcagaaaagtactggacagtcagtgccgcagctgaaaaccatgggataaacagatcctagtgggcacttgcaggcctgccagcagcaaataccagttaggaaaactgttttcccccactggatttattattgcatagtcagttacataatatataaagggcccagyggcttcctccaaaagcttctcaatgatctgatgcttataaaataagaaatgagtttcagctttaaaatagcacatatttttctcagggaagttccctcttatttatacaagggttaacttaggtggctagatataaagtttaaagtgatgtgtctagaatgaagtctccatgggcaaggtggaggatggggagagctgtacacatctatagtctacttagtgtggatgtgtcg

SEQ ID NO: 379802 - DNA, 600 bp, Homo sapiens
attatttcaaactcatagaacagatgtttcaagtgattccctacttttctgcctgctkcccttcctaaaactgtgcttccccttttgtaaatcttagtgtgcagcctatgattgcaagctgagctgtgggccttgaaagactcgtggtgaaagtgaatctgaacagcaaagctgctgcaattcaggagcaggggtaaagaaggaagggccagtagcatgagtggatgtgtagaatactgctcagattcacaagaaatagtttaattgagccaagcaaaattttaggagtgatgtgggaacacattttttaaaaacacttgaaaaatttagacactccctcccatattctttttttattttttcctttttctttgtttcagtcccattaattatctcataccctcccataaatgttccaaatatttgtttgttccaaaatattggttattgccttctttttcctttttcaaactgtatccagtcttattaaagatgctttttgtaagcaatcatcgtatattagacaggccatgagcagacaattgctaacagtatacaacaacttccaaactctcttcttcaatgaaccaaaatcagaca

SEQ ID NO: 379803 - DNA, 600 bp, Homo sapiens
attatttcaaactcatagaacagatgtttcaagtgattccctacttttctgcctgcttcccttcctaaaactgtgsttccccttttgtaaatcttagtgtgcagcctatgattgcaagctgagctgtgggccttgaaagactcgtggtgaaagtgaatctgaacagcaaagctgctgcaattcaggagcaggggtaaagaaggaagggccagtagcatgagtggatgtgtagaatactgctcagattcacaagaaatagtttaattgagccaagcaaaattttaggagtgatgtgggaacacattttttaaaaacacttgaaaaatttagacactccctcccatattctttttttattttttcctttttctttgtttcagtcccattaattatctcataccctcccataaatgttccaaatatttgtttgttccaaaatattggttattgccttctttttcctttttcaaactgtatccagtcttattaaagatgctttttgtaagcaatcatcgtatattagacaggccatgagcagacaattgctaacagtatacaacaacttccaaactctcttcttcaatgaaccaaaatcagaca

SEQ ID NO: 379804 - DNA, 600 bp, Homo sapiens
attatttcaaactcatagaacagatgtttcaagtgattccctacttttctgcctgcttcccttcctaaaactgtgcytccccttttgtaaatcttagtgtgcagcctatgattgcaagctgagctgtgggccttgaaagactcgtggtgaaagtgaatctgaacagcaaagctgctgcaattcaggagcaggggtaaagaaggaagggccagtagcatgagtggatgtgtagaatactgctcagattcacaagaaatagtttaattgagccaagcaaaattttaggagtgatgtgggaacacattttttaaaaacacttgaaaaatttagacactccctcccatattctttttttattttttcctttttctttgtttcagtcccattaattatctcataccctcccataaatgttccaaatatttgtttgttccaaaatattggttattgccttctttttcctttttcaaactgtatccagtcttattaaagatgctttttgtaagcaatcatcgtatattagacaggccatgagcagacaattgctaacagtatacaacaacttccaaactctcttcttcaatgaaccaaaatcagaca

SEQ ID NO: 379805 - DNA, 551 bp, Homo sapiens
cagtaagggttctaaaaaatctttatttatttaatgaaaaattcattctggcaaactttgaaaatttgaccatggacatttaggaagaaagcaacaaaggtgacacattcaaaacatggggaaaaattttaagctggaaaaaaggtgataactaattgatgcagaaatgagaaaatcataattcaaccaaattattcctcctatcacctaatcattattatatattcactcactcccctaacactggttgaacatattctatgtatgagtcactgtgagggattctctgaatataagggaacaagatttggttcatgggcataaagtttgagtgggaaagaataataaatccaccacctgttccccattggatccccggcactctgaacaatcacaaggcaggtgcctggtaagtgtttggcraaagaaggcataatgatctgtaacacaacagcgagtgtgataaatgctactagtgaaagcaatgggccatgggagtctggtttggaatatggatgttttcatggaacagggagctaagtagacatggg

SEQ ID NO: 379806 - DNA, 571 bp, Homo sapiens
aaaatattttgtatcttaaaaatcctaacagtgtatatatattaagtatttactgtatgtcagtcattgtactaagtactgtcttttcattatctcaggtaattttcacaataactatatgaatgggcactgacaatacctctgtcccactgatgagaaaattgaagagtaatgagagtgagtaacacagatcctaagtggtggagccaagatctgaatccaaaatagtctttcaaaatcaaattccaaatactaagcttacaaacaccacaccataatacctctttccacaaacaggaaattcatttgaaatatgcaatctcaagttttggagaaagtttcttgtctgcttagagtctacttcatgatgagacacacattatcacmcccaagtaatttgtgcccacacatgtttcagtcatacaaagtccacggcccaccctacctgaaaaggcatggatcaaatgaaatattgtagctcttattttcaagtattttctagaccaggggtcagcaaactttttctgtaaaaggcaaaatagtaaacattgtaggctttgtgagccattca

SEQ ID NO: 379807 - DNA, 566 bp, Homo sapiens
ctacagacatgtgctcaattctttctgactaatcctagaaataggatcctgtgcccttggtcatcagaccatgctgcaccacagcagggaggcacaagggaccagattctctttcctctgcacggtgtattatttcccttgatttccaagtgagcttctgagagaaagttgcctgataaacagagacagaaatttacaacaggacatacagtgtaacttcatcaatttggatacaaatctgtgaaatatcaggcagcaaaacaaaggcagaattacctttgatggacaaaccatgtttcattcrtattagtcccccgactgtgccttgctatccacattgatggcgtcattcccgtgcccattcgtctcttccttccagctctttggcagtctaggtctaacctcccctgcctttgctgatgcaaatctttataactctagctcaaattccactttctgtaggaagacttccctcttccaccttcccattattcttgtcctgccttcttaagttacttttgttttaaacctgtattgcctaaagccttatttggcccttgatacta

SEQ ID NO: 379808 - DNA, 566 bp, Homo sapiens
ctacagacatgtgctcaattctttctgactaatcctagaaataggatcctgtgcccttggtcatcagaccatgctgcaccacagcagggaggcacaagggaccagattctctttcctctgcacggtgtattatttcccttgatttccaagtgagcttctgagagaaagttgcctgataaacagagacagaaatttacaacaggacatacagtgtaacttcatcaatttggatacaaatctgtgaaatatcaggcagcaaaacaaaggcagaattacctttgatggacaaaccatgtttcattcgtattagtcccccgactgtgccttgctatccacattgatggcgtcattccygtgcccattcgtctcttccttccagctctttggcagtctaggtctaacctcccctgcctttgctgatgcaaatctttataactctagctcaaattccactttctgtaggaagacttccctcttccaccttcccattattcttgtcctgccttcttaagttacttttgttttaaacctgtattgcctaaagccttatttggcccttgatacta

SEQ ID NO: 379809 - DNA, 357 bp, Homo sapiens
acaattcgtagtcagaaagacatgataggcttctgaattttgaacatcaaaatgcatggctgtgaaatatgcaagtagttcacctttrtgacaaagcgggggttctatttggacccctttgttcctttcaaagtgagacagcacttgttaacagaactcttccctttgttaccaatactttgctaggcacgatagggggaaataagattaaggtcaaaaatcttgacctgaaagaaactgcagtgtcactgggaagaaaacattgaaacactaagtgtactcagaagatgctgtcaagttagtagccatttgatgaaatgtctagaaatgtcccacccctactccccagcataggtg

SEQ ID NO: 379810 - DNA, 587 bp, Homo sapiens
taaattaatgtactctggtttcttgacaatttttgatgcaaatatacacatttttaataaaaaagagtgttctatttataccattctgttgctttcttttacaattaaaaaatattggccgggcaccgtggctcacgcctgtaatcccagcactttgggaggcagaggtggtggatcacgaggtcaggagttcgagaccagcctggccaagatggtgaaaccccgtctctcctaaaaaaaatacaaaaattagccaggcgcggtggcagcacctgttatcccagctactyaggaggctgaggcaggagaatcgcttgaacctgggaggtggaggttgcagtgagtcgagatcacaccactgcactccagcctgggcgacagagcaagactccgtcttaaaaaaaaaaattcacatgttcaggtgagacagatgagtcatgaggatctgtatcaagttttgctctatgtatccaatattatctcttcatttccttttcaagaaaatttccaataacaaccactgatagattccaaaacaaacaaaaaagaacaaatgtgtcacaagaggcattctcagttcctgtagt

SEQ ID NO: 379811 - DNA, 468 bp, Homo sapiens
tcagacctaagttattttggtctgcagtggtagtaatggccttgaatttgtttaaacttactgcccacgacaccctctccccaaatccccctacacccacacagtacgctccatcacggccaccaccactcccactccatttgcatttgaaaacctctggaaacataagcgctttcaggatgaactctctctctctctctcactctctctctctctcactgtctctctctctctctctctctctctctctcwcacacacacacacacacacacagcccgccaagtggaaactgagttgagtcataggatgcatatgaataggattggatggtcctttgcttctgcggataagaatgtttaataacccaggattccgggcaataacagcattacagggtttctagaactctgttctgatcctttagaaattgttagaacaatagtaatgatagtaggaggagaagtagg

SEQ ID NO: 379812 - DNA, 546 bp, Homo sapiens
gactaatatgtaccaaagtacacaaggatgagaatgcctggcctctcccagaataaacgatgaagactcaaagctatgagagaagagacmgaagaacaaacctgtgagagtgtgaagaaaaggagtgtttgtcagtttcttatttcgtctactaagtgcatgctgctttaaatttattaaaagtgttaatgtaactgttaagatagatagatgatagatagacagatagataagataggtaaataatagatagatagatagataattagagacctatcatgcatatcagatgttcccaagtgaaaaagaagataatccaactcatcagtttttcatgaaaataattagtaatgacagtggataagaattcaacagcactgttgttatacaaattaaaaaatcggaaatctgaaatgccttctcaagcacacgctcttttcctcacttaaaaattattttatcctgaatatagaaaagaagaaagtgtaatgattctccatacaaccatcaagattttgttccatttgatttggctattttttactt

SEQ ID NO: 379813 - DNA, 610 bp, Homo sapiens
catgggggatactttccaagtccctcagtggatgcttgaaacctcgaatggtaccgaactctatacatactatatattttcctatatatacatacrataaagtttaatttataaattatgcacagaagagattaaaaacaaaaacataataaaatggaataattataccaataacaatatactgtaatgaaagttgtgtgcttgtagtccctctctctctctctctcataatatactgcgctcacctattttcaggatgcagctgactgcaatcaactgagactgtggaatggtggattaggaaggactacagtatactgaagggtgagggtgaggacaagagaagggaaggtggtggagatgattattcaacagtcaagactctgctagtacacaagacaccagaaatccggaagacctctccctgccccgccaaaacaggagaaaaaataaatttctgaaagattttgatatattttaaatgaggaaagaagtaatcattttgagtacattctaagaattgttaggcctcattatgttgatttgtagtttggtattgtttttatttcaaatctgacattgaagatgcaccataacctttataaggctt

SEQ ID NO: 379814 - DNA, 543 bp, Homo sapiens
tatttctgagctagaagcaacaagttttcttctgttttgtttgacatgaagaatgaggaaaagcaagcatttaaatataagacaggctttaatgtatgggctttagcttttcacctcctggtggagtctctaagcttgcttcaccgcagagttcagttttccacttcttaatagtaactatttagactcaatcaccaattctgtaccttttgcttagccttttgccttcaagcttaaataaatgcagcagtgttttatgttgaagaaataaatcctttggatctcaaagaagaatgcccaacataattgatttgcctttgcatgggtttagaaatcgtcactgcttgtgccaaatccygtagatcatgagcagggccctagcattctcgggaagtcagcctatgtcagccaggaagatagattgggaatcttggcttgtcgactctttgttggattttatgtgcctctttataggttgagaaaatgcagtggggctttcagaggccaagaaaagtcaggaagagcatgaaacctcaacaattt

SEQ ID NO: 379815 - DNA, 591 bp, Homo sapiens
tgtggtggtcagaaaaggcttctttgaggaaggtgactggatttacaagtccacattaacctatcctggaaagaacaagggaataggtgaaaataaatcatcatctgaaagaaataagaaggacaaccccagcgtggaattcgcaggcatgtttgtagtatgagcaggactttagaacatttggttttgtggcttgaggtggaattcataaggcatctcacatttttttttaaacaaggtcaaagggatccatgaggaaaccatgaaagaatatggggatcatgagtcttgtgtatgtccttctatggataccagatccaaaggggcctgtgggttttctgcaccaaagaccatctaatggcttatagcctgaaataatacttgcattaatgctcaacatactctgtcactctcttcttcaagatggagcattgtgtaaaatatcagtactcataatgaatagctaagacatactgagtgttatgtgccaagcactaagtattttacatatwttatctatgttagccctaagagcactgtgcataggtcctattatatccctattttacatagaagatgcagggagtttac

SEQ ID NO: 379816 - DNA, 478 bp, Homo sapiens
ttggcatttcctcatatcttttgcatattacctcttcggaaagtagctaatactgcagagtaaagaagaaaaaaaaaaaaaaaaacctctcttgtctgagttacaagggatacatactgtggccttagttattaattaaatgttttaaaacattatttatcagtgtgctttttcactgtcagaatgccttagggctccgcacagcaggtcctccacagctttcagggaagagctgccaagagtccttgcccagtgttcacggctatatttgttcattctattacaatatatactttgcttctcctagtgattttactttaatctatgtagcaaatcatgcaaaaacataaagatatttcagtggagtagatagcaaagaaattgagattatgtaaattggacattttctcttcttcctcaagaaaacaaaatatttataygcctgttcattaaaaattgtccagaggaaatttgcaag

SEQ ID NO: 379817 - DNA, 355 bp, Homo sapiens
cacaacaataagacatatctacatcatgtatcacctgacatgaagcacagagacaaccaaagattaaggtcatttctgtggtattctggcccaaaatgcataatctgaacttaatcatagaaacatcagacaacctgaaatgaagatcagtctacaaaataactggccaggattctttaaaagtaaagaactgtacgtgccactgcactccagcctgggcgacagagcragactctgtttcaaaaaaaaaaaaaaaagtaacaaactgtagactgggaaagaatatttacaaaccatatatccaatgagcagcttatatatggaatatataaggaactttttttatgctttggtg

SEQ ID NO: 379818 - DNA, 691 bp, Homo sapiens
gtacaccctgttgttgtaatgttttctatcatttaaaagaaaaataaaataaaaagcacttttttgtgctgttaaccatttgtgacaayggttacaaatgcaaactgtaaaacttgtaaaagttctcatagtatttctgatcactcaaaggtgataaaaaagattttttaaaattaagtattagtatattctagttttcaattaacttttcactgaagtactagggaaacagctaatcaggagctgagttgggtaatttgatggaaaactacgcacaaagattattcaccttcgaatatctctaatattttttcttacatttccttgtgtttctgttttctggttccagcctaacatttttttacaaaaacatctgtattaagttattttatcattgtcatagtaccttattacatttcctctatctgtgacttatgatgctatgacaacaccaagagagtgaaagtagttcatcaaacctaaaacttagcctgttttgcaatggtgagaccattatatattttactggaggtttgcattttattagcctttagccattaaagtatactcatttaaaatgcacttttgatatttttccacccgtgtgagtgatcaggctttccacctgaggtcacttttcaaaccacacaggtggaagccctgtgcagaaaatgggcttgctgaaatgaac

SEQ ID NO: 379819 - DNA, 579 bp, Homo sapiens
ggttttttttttttttatttgatgtactttgcagaaaccaacaattgaaaagaagatccaaaaggaagaagaaataaaggaggcattagtgtctacaatttcctgtgtttttaaactttaatgaatgtacaccctgttgttgtaatgttttctatcatttaaaagaaaaataaaataaaaagcacttttttgtgctgttaaccatttgtgacaatggttacaaatgcaaactgtaaaacttgtaraagttctcatagtatttctgatcactcaaaggtgataaaaaagattttttaaaattaagtattagtatattctagttttcaattaacttttcactgaagtactagggaaacagctaatcaggagctgagttgggtaatttgatggaaaactacgcacaaagattattcaccttcgaatatctctaatattttttcttacatttccttgtgtttctgttttctggttccagcctaacatttttttacaaaaacatctgtattaagttattttatcattgtcatagtaccttattacatttcctctatctgtgacttatgatgctatgacaacacc

SEQ ID NO: 379820 - DNA, 691 bp, Homo sapiens
gtacaccctgttgttgtaatgttttctatcatttaaaagaaaaataaaataaaaagcacttttttgtgctgttaaccatttgtgacaatggttacaaatgcaaactgtaaaacttgtaaaagttctcatagtatttctgatcactcaaaggtgataaaaaagattttttaaaattaagtattagtatattctagttttcaattaacttttcactgaagtactagggaaacagctaatcaggagctgagttgggtaatttgatggaaaactacgcacaaagattattcaccttcgaatatctctaatattttttcttacatttccttgtgtttctgttttctggttccagcctaacatttttttacaaaaacatctgtattaagttattttatcattgtcatagtaccttattacatttcctctatctgtgacttatgatgctatgacaacaccaagagagtgaaagyagttcatcaaacctaaaacttagcctgttttgcaatggtgagaccattatatattttactggaggtttgcattttattagcctttagccattaaagtatactcatttaaaatgcacttttgatatttttccacccgtgtgagtgatcaggctttccacctgaggtcacttttcaaaccacacaggtggaagccctgtgcagaaaatgggcttgctgaaatgaac

SEQ ID NO: 379821 - DNA, 567 bp, Homo sapiens
aaagatgaagagaaaattataaaagcagccagagaagacagatattacatacaaacgaataataagtctaacaggtaacttctcatctgaaataatgaagcccaatagataataargtgataactttaaattggtgcaagcaaaccaaatttctacatccagtgaaaatattaatatttttcaaatatgcaggcagaataaggacatttgcaggtaaacaaaagctgagataatttgtctcatctgtgctacaagtaatgctaaagaaagttcttcagcactggagggaaatgatacaatatggaaatctgtatctataacaaaaaatgaataacaaatgataaacatgcaggtaaatattaaaaccttttctatttcttctattaatttttgaaaaagacaaactacttcccaaagcaaaaagcaataaaattttattgtggagtttataatgtgtatatatatatgtgaaatatacgactctaagacattttcttgcattcaagaaaaatctgattagtttaactgctttatatgtttctatacagtatttccccctcatccaac

SEQ ID NO: 379822 - DNA, 567 bp, Homo sapiens
aaagatgaagagaaaattataaaagcagccagagaagacagatattacatacaaacgaataataagtctaacaggtaacttctcatctgaaataatgaagcccaatagataataaggtgataactttaaattggtgcaagcaaaccaaatttctayatccagtgaaaatattaatatttttcaaatatgcaggcagaataaggacatttgcaggtaaacaaaagctgagataatttgtctcatctgtgctacaagtaatgctaaagaaagttcttcagcactggagggaaatgatacaatatggaaatctgtatctataacaaaaaatgaataacaaatgataaacatgcaggtaaatattaaaaccttttctatttcttctattaatttttgaaaaagacaaactacttcccaaagcaaaaagcaataaaattttattgtggagtttataatgtgtatatatatatgtgaaatatacgactctaagacattttcttgcattcaagaaaaatctgattagtttaactgctttatatgtttctatacagtatttccccctcatccaac

SEQ ID NO: 379823 - DNA, 567 bp, Homo sapiens
aaagatgaagagaaaattataaaagcagccagagaagacagatattacatacaaacgaataataagtctaacaggtaacttctcatctgaaataatgaagcccaatagataataaggtgataactttaaattggtgcaagcaaaccaaatttctacatccagtgaaaatattaatatttttcaaatatgcaggcagaataaggacatttgcaggtaaacaaaagctgagataatttgtctcatctgtgctacaagtamtgctaaagaaagttcttcagcactggagggaaatgatacaatatggaaatctgtatctataacaaaaaatgaataacaaatgataaacatgcaggtaaatattaaaaccttttctatttcttctattaatttttgaaaaagacaaactacttcccaaagcaaaaagcaataaaattttattgtggagtttataatgtgtatatatatatgtgaaatatacgactctaagacattttcttgcattcaagaaaaatctgattagtttaactgctttatatgtttctatacagtatttccccctcatccaac

SEQ ID NO: 379824 - DNA, 568 bp, Homo sapiens
tattacaccttttttgagatataaatgcattacagagtactataagtggaatatattactgtaaggtgatacagtttggatatttgtccccacccaaatctcatgttgaaatgtaatctctaatgttggaggtgaggtgtggtgggaggtgttttggttatggggtggatccctcatgacttggtgttgtctagcaatgttgaatgagttctcatgagatctggttgtttaaaagtatgtggtacctcccactccctctctctcttgytcttgctcctgctcctgccatttgacatgcctactcctccttcaccttctgctatgattagaagcttcctgaggccctcacaagaagcatattctagcactatgcttcctgtacaacatgcagaactgtaagccaattagacctcttctattatacattttcctgcttcagatatttatttatagcaacacgagtggcttaatacataactaatttatattttacagtaactcatataatattcattctaaccacgctagtcagttagagatgtgtattgcaattcttagatgaaccatt

SEQ ID NO: 379825 - DNA, 640 bp, Homo sapiens
tgttttggttatggggtggatccctcatgacttggtgttgtctagcaatgttgaatgagttctcatgagatctggttgtttaaaagtatgtggtacctcccactccctctctctcttgctcttgctcctgctcctgccatttgacatgcctactcctccttcaccttctgctatgattagaagcttcctgaggccctcacaagaagcatattctagcactatgcttcctgtacaacatgcagaactgtragccaattagacctcttctattatacattttcctgcttcagatatttatttatagcaacacgagtggcttaatacataactaatttatattttacagtaactcatataatattcattctaaccacgctagtcagttagagatgtgtattgcaattcttagatgaaccattggctgaaaggtcaaaaggaaataaaatggaacgcaaaaaatttgaatacaaaaggagaaaaatacagagggcaaagagcaaataaagaagacagactcaaacccaatcatatcaataattacattaagtgtaaatgaactaaacacttcaactaaaatcagagatcttttcagactggattttaaaaagcaagtacctgtttgctacaagagatattctct

SEQ ID NO: 379826 - DNA, 640 bp, Homo sapiens
tgttttggttatggggtggatccctcatgacttggtgttgtctagcaatgttgaatgagttctcatgagatctggttgtttaaaagtatgtggtacctcccactccctctctctcttgctcttgctcctgctcctgccatttgacatgcctactcctccttcaccttctgctatgattagaagcttcctgaggccctcacaagaagcatattctagcactatgcttcctgtacaacatgcagaactgtaagccaattagacctcttctattatacattttcctgcttcagatatttatttatagcaacacgagtggcttaatacataactaatttatattttacagtaactcatataatattcattctaaccacgctagtcagttagagatgtgtattgcaattcttagatgaaccattggctgaaaggtcaaaaggaaataaaatggaaygcaaaaaatttgaatacaaaaggagaaaaatacagagggcaaagagcaaataaagaagacagactcaaacccaatcatatcaataattacattaagtgtaaatgaactaaacacttcaactaaaatcagagatcttttcagactggattttaaaaagcaagtacctgtttgctacaagagatattctct

SEQ ID NO: 379827 - DNA, 535 bp, Homo sapiens
ttttaatggctgagtagtattccacgtgtatgtataccacatttgcttcatccactcattagctgatggacacttaggttggttccacatctttgcaattgtgaattgtgctgctataaacatatgtgcctgcactaactttgcatattattaacttcttataagagttttgttcatttgttacagttaatgaaccaatattgatatattattaaagtccataatttattcatatttccctagttttcccctaattgtccttttttctgttctaagatctcatccaggataccattttacatttacttgtcatatctataagctcctctwggctgtaacagtttctcaagtttctcttgtttttaatgaccttgaaaagttttgaggaatattggtcaggtatttcataaaatgcccctcaattgaaatttgtctgacatttttctcaaaatcagacatgggttatgagtttgaagtagggagatcacagaagttaccactttcatcatcttacatcaagaatatatattatcaa

SEQ ID NO: 379828 - DNA, 591 bp, Homo sapiens
acactacatcctagatgattttttttttaaatttgcaccctctaagattaacttcttgtggtataaaatttaatgggttttgaaaaatacataatgccatgtatgcaccattacaatatcaaactgcatggtttcatcgccctaaaaatgtctgtattctttatttaatcttctcttctttctcccaaatctacagraaccactgagcttttacagttacttagttttgccttttgcagaatgttatgtgattgaaatcatacagtatgtattctaaaagaagactggcttcttttatttagcaatgtggatttaagcttcatctacacttaacagcttatttccttttatggctgatcaatgttctattgtatggacataccatcgtttatccattcacctactgaaggatatctttgttgcttccagtttttagcaattacgagaaaacttctataaacatttgcatacaggttttatgtggacaaaaattttcagatcagttaagtaaatacctatgagtaccattgctggagaatatgttaaaattatgtgtagctttgtaagaaatcaccaagctgtattccaaag

SEQ ID NO: 379829 - DNA, 526 bp, Homo sapiens
tctgtttttaattattggtaactaaaataatcttgcctgcctgagaaattggggargtgggggatctgtgtctatgcacttctaattttgaagtccttacagaggctcacatcttccctttagtgtccacctttgaagttcttttttccaaagttgcattcccttaattagttcccaaatagacaaaattattggagttacctttatcttccccagatcagctgttttcagttatggcatttctaatttccagaaagattcagagtgaaaaaatttgtcctgatggactcactcaacttaattccaattacagaatggattttttgaccttagttttaacaattaggtgtctctctttctgaaataactaaggttatgagtgtatttccctgttttagcatctcgatattttcctggctatctgaaatagattaataacatccttctaatgacttgccattttttttctttttaagaatacttatattggtattcattggctatcattttagtcattttcttcagg

SEQ ID NO: 379830 - DNA, 592 bp, Homo sapiens
ctttgtgtgatatgacccaattaaattcctactgaaacaatcttagctattagaattctccattccaagtttttagaattgtagtcatttgcaaaaggatgtagcaggttagttgtaggttatttgctggtctatatgggggagggcactaattggcttttaattaactaggccaatatgttctatgcctccaaaccaytgtttttcaattattagcaacttccaaaaaccatatctgtttctgagacagtgaccttacccaggctctttcttaagggcttatctctcctggatgataaacaccccacaggtcttgggagttcacattttgcatgcacgataatgtaggaagtgatatacctagccaagactaatggcttatctactataaaccatagatgggcattggcaggttttcagctttctactcaacatttttgcaatttaaggcagactctcagcatctcttggatgtactttttgcagtttactttatcattattcagtgccatgtgatttcatgtcacagtcaaagtgaataatggaagttttgcattattattagccacaagcataactcaaatgtcctggg

SEQ ID NO: 379831 - DNA, 518 bp, Homo sapiens
agttttctctacaattaattttcaacttactctacatattggccatcaattgctcatactagctaaaatctatcattataaattaatccttttggattttgaaagctacttattttcaagagtactttactaaaatgaaagtttttcaggtagaggaaactctttaaaaaattatgccatctgtgaatgaggccataaggtatgataatggcttacaagaagggaaagccaaatatggcttgattcacacctctgcgtatggttctcttattatcacaaaacaaacaaacaaaatctaaatgataatatatttccacctgtgtatgcattgaatcctgctaaagttacgtaaaaatcgattaaacaaaagttctgtatctcgactccttacaaaggaacacagttaagaaagttataggaggagttaatggatcccaagaacaggactagaattaggctgtaaygtgctggaaaaacttagtgatttatttggggctgggaggcataagcaggcagga

SEQ ID NO: 379832 - DNA, 477 bp, Homo sapiens
tgggacgaaatttatccagagtcagtttctattgttaggaacttagaatggagatttggctgagctgcaattctggtgaaaaacaacaggaaatgcagttgtatataaggacaacatgagtaaactggagccacctcggaaacaaagaagcaaacaacaaagtaacaaaacaagcaccttkgtagacatacagaattcagatctaataatgtgatgctcctactttactctgcagtaaagtattttgtccagtttggggtatcacatttagacaagcaaacatgtatttaaacaatgtttattggattctacatgacaaatcatactaagcagtgaaaattaaaagattagtaagattcctgtccttttgaagtttattctactgggaaagataaagtgaagtgccgtattaatataaaagaagtactggtagtgcagaggaggtgtagccaaagctgctttgaggcacaggaatag

SEQ ID NO: 379833 - DNA, 386 bp, Homo sapiens
gaaagatggaggtacttcttttcctttcctgaaaaaaacacaagagttacacaagcggttacaccttcatcaaacatattcattgattattcagacactgtgaaatctacaaatcagtcatattttctgcagaaatttaaaagtaaatrgaaacaaataaatgtccaaaacctaaagccataaatccaatatcattaaaggaaccacataagtgaggtaaagaaatatttagtccataaaacaattcattgctattcttcatagccaatgaattcattgagttttacctcttgatcaggaaactccaggtttggaatttttaaaaataggaggtcagagaagatgtatatttctcaccaatttaaaggctttcccactgggtggca

SEQ ID NO: 379834 - DNA, 549 bp, Homo sapiens
atgcagcctttcaaatgaggctctgctgcgctctcctgacacccctcctcaattcttctctggggtggcatggaggtatctgatgttcctatttaaatccctgagttcatacactgtccttatctgtcatttcctctttgaaaggcactgagaactcaattcagggaaaattgaaaacctttccagatattactgtttygaaagtggttttgccaaaaaatataacagcaaataaactctagtaagaatgagattcatttagctcttgttgcctttgacctcagaagaaaacatctaacaggaagcctagaaagtcacagttaaatatataaattcattttgaactaagagtccttttttttttcttcagcactagaattcctgcagtagaacaggtatatatatatgtatatacatttttttacatcaaaaccacttagaccaggtgcggtggctcatgcctataatcccagcaatttgggaggccaaggcaggtggatcaccagaggtcaggagtttgagaccagcctggccaacatggtgaaaccc

SEQ ID NO: 379835 - DNA, 549 bp, Homo sapiens
atgcagcctttcaaatgaggctctgctgcgctctcctgacacccctcctcaattcttctctggggtggcatggaggtatctgatgttcctatttaaatccctgagttcatacactgtccttatctgtcatttcctctttgaaaggcactgagaactcaattcagggaaaattgaaaacctttccagatattactgttttgaaagtggttttgccaaaaaatataacagcaaataaactctagtaagaatgagattcatttagctcttgttgcctttgacctcagaagaaaacatctaacaggaagcctagaaagtcacagttaaatatataaattcattttgaactaagagtcyttttttttttcttcagcactagaattcctgcagtagaacaggtatatatatatgtatatacatttttttacatcaaaaccacttagaccaggtgcggtggctcatgcctataatcccagcaatttgggaggccaaggcaggtggatcaccagaggtcaggagtttgagaccagcctggccaacatggtgaaaccc

SEQ ID NO: 379836 - DNA, 583 bp, Homo sapiens
caggtgactgcaccagaaacattatctgaaagcggaagactgaacaccttcagtgtcacatgaaggacggtgaactttattcaacaggcaatagagacttggaagcttgtgagaagtcttgtaaacagaactatgctttaaaaaataaactgattaccacagataagatgaattatagtttgaagaaaaagttgagcatctagagaagaatcccagtgaaatgaaatgagtgtaagccaaagtcaacaggatctacgtggagaagagaaaatgaatrcaagagatgtaacagaggttggtaagaaattaacagtggttcaatgcagagcataaaaggaagaaggacaagtttgagagtggaaactatgaatttacattaaaaaacatacacataaggattaaaacatttggttatatgcatttgatttgctctgaggcaacctaatagaaacataagaataatgataataatagtaatgataatgatgatgatgatgtaatagtaatagccaaaaatttcatgtcacttagtaagtaccagggcaactattaaatgccttacacatgttagctcacttagaac

SEQ ID NO: 379837 - DNA, 509 bp, Homo sapiens
gcgactagttatcactgctggttacacgggttggtcccaacctgaattctgtactaccctttcaatgagagacgcaggtatgggagaagggacttgacaggagacggaggtttacttttctcctaggaccttttgtttgttttcagaaattaaaaaaaaaaaaacmcaataaccacaatcatataagatgtttaaatccaatatatgagcatgccattattttcattgatctttgaaacggattcagtacattcctatgaagcaatgcaacacaatttgggatgagaatttctccaagtgagattcacattatcattatggctgtcaaggatttagaaattaggttgtttgctgattactcttcaatcattcactcaacaaaaaggtatgctgggaatataatgagttttcttaacctcaaattgaagatgaacatcagtttgttttttatttttttggttttgtacaacatcataattgaagagatcatcacaatcaaagtatgtttg

SEQ ID NO: 379838 - DNA, 577 bp, Homo sapiens
tgccactacactccagcctgggcaacaaaagcaaaacccgtctcaaaaaacccaaaagtttaattctactgaagtttttctgttaacactgtgttattattttatcttttgatgaaaggcaaatgatataaacaagaacttggaatatttgtgaataatgtataaataaatagtttctgtttattctctgtattctgttaaaagtttttgctctgctcaatatatctggccataaaattcttttaaatcctgtataattttaaaagcaaatttgakgcatgtgcaacttattttattttattttttttgaggctgtttgttacaatggaaattgccttaacaagtctcatgtggcacatgtggtgcccagagcattctgaaagttatggttttgaaagcagtcgttgtggcgacattgtcctaattaaagttctcgggcagttttgccgacattcaaaaccatcttccatttttatccttttgtggtaatatttatcatttataaaaaggaattccaacacctcttttctatgtataatctcccaacgttcctggtcaaagcagtttgctcccaaat

SEQ ID NO: 379839 - DNA, 577 bp, Homo sapiens
tgccactacactccagcctgggcaacaaaagcaaaacccgtctcaaaaaacccaaaagtttaattctactgaagtttttctgttaacactgtgttattattttatcttttgatgaaaggcaaatgatataaacaagaacttggaatatttgtgaataatgtataaataaatagtttctgtttattctctgtattctgttaaaagtttttgctctgctcaatatatctggccataaaattcttttaaatcctgtataattttaaaagcaaatttgaggcatgtgcaacttattttattttattttttttgaggctgtttgttacawtggaaattgccttaacaagtctcatgtggcacatgtggtgcccagagcattctgaaagttatggttttgaaagcagtcgttgtggcgacattgtcctaattaaagttctcgggcagttttgccgacattcaaaaccatcttccatttttatccttttgtggtaatatttatcatttataaaaaggaattccaacacctcttttctatgtataatctcccaacgttcctggtcaaagcagtttgctcccaaat

SEQ ID NO: 379840 - DNA, 599 bp, Homo sapiens
  misc_feature (1)...(599): n = A,T,C or G
agtctagggaatgggaggagatattcgcaaagtatgcacctgacaaaggcctaatatccagaatctatagggaacttaaacagttgaacaaacaaaacccaattaaccccattaaaagatgggcaaagacatgaacagacatttctcaaagaagacatacatcaaatgtgtgaaaaaaygctcagcatcgctaatcatcagagaaatccaaatcaaaaccacaatgagataccatctcataccagtcagaatggctattataaaaagtcaaaanaacagatgctggcaacattgcagagaaaagggaaagcttatacgctgttagtgggaatgtaaattagaccaatccactgaggaagcagtctggagatttctcacaacttaaaacacagctaccatttgactcagcaatcccattactgggtatacactcaaaagaaaataaatcattctgccaaaaacacatttacactcagatgtccactgcatcactattcacaatagcaaagacatggaatccacacaggcgaccatcagtaggaaattggacaaagaaaatgtggtacataaacaccatgaaatactatacgccataaaaa

SEQ ID NO: 379841 - DNA, 511 bp, Homo sapiens
tttagaaaaggtttaatgtaaaaatatttttcttctttatatatttccctgccatgataatgttaaaacatatcaagatgctcctcaaagtttaggagtgaacagcataacattccattttagttgaagcattctttcacatagccaacatattttttcaagacactctaagaactcgtgaggatactacaggaaaaatgttcctcttgcctactgagcttttagtcatattttccctcaaacttttctaaattaaacattgttatawctgggtttgttttttttttgaaatttaattttccacggtgcagtcctcaagttattcttttattcggagccactccttcagtttcaacttgctgagcaggcaagcaactgcttttggtttctatggaaactggattcctgtggctgcctgtaggtattctcgttccaccaaccttttgttgtgttgtggtatccagtgatttaggtggaaaagtacaagttattcttccatgatggatatgat

SEQ ID NO: 379842 - DNA, 510 bp, Homo sapiens
tattgaatattcttggcacccttgttgaaatcatttgaccatgtatgtgaaggtttatttctaggctctctattccattttgttggtctatactcttgtctttatgacaataaccactgttttgattactgtagctttgcagtgagtttttaaatcatgaagtacgagacctctaaccttgtttttctatttcaagattattttggctatcatagattcctttaatttccatttgaatttaacaatgaatttttccatgtctgcaaaaaaggtcgagattttgatagggattgcattgaatctgtagatcattttggggaacactamtatcttaacaatataagtcttctaattcatgaatatcgatgtctttccacttatgtatatatttcttttatagttttcagagtacaagtcttttgcctcagtggttaagtttgttcttaagtgttttattctgtttaatgctattgtaaattgaattgttttcttaatttcctttgggttgct

SEQ ID NO: 379843 - DNA, 510 bp, Homo sapiens
tattgaatattcttggcacccttgttgaaatcatttgaccatgtatgtgaaggtttatttctaggctctctattccattttgttggtctatactcttgtctttatgacaataaccactgttttgattactgtagctttgcagtgagtttttaaatcatgaagtacgagacctctaaccttgtttttctatttcaagattattttggctatcatagattcctttaatttccatttgaatttaacaatgaatttttccatgtctgcaaaaaaggtcgagattttgatagggattgcattgaatctgtagatcattttggggaacactaatatcttaacaatataagtcttctaattcatgaatatcgatgtctttccacttatgtatatatttcttttatagttttcagagtacaagtcttttgcctcagtggttaagtttgttcttaagtgttttattctktttaatgctattgtaaattgaattgttttcttaatttcctttgggttgct

SEQ ID NO: 379844 - DNA, 562 bp, Homo sapiens
tacttcttggtcctgtgtctctatcaaaactgaaaatgtcaaagatcaaccaaaaaaaaaaaaatgcacttgtggtttgtctcacatcaagcctacttctctcatttatattcctgtgtacctctttagatatctgaatttgtgattgatctgggtgtctattcctatgcccagcttaaaaattattatgacattctataatctgttctatattttggaataaataattaaaatattgwttatctgttttttaaccatattaaacaatatttaactaatataaatatggtttatctgttaaatattgtttatctgtttttccaactcacttaaaaaccatgtcttgaggtcctatttaaagaataatagcaactagtaaactagtaaataatagcaactagtaaagtgttgccatattctcgcaatagtcttgtgaatagctatagattaggaacctagatcatagacaggttaaacaatttggctaaagtgacactgctaatagtggtagagtcagaatttgaatcctgctactgatatcccagagcacagcacaaactct

SEQ ID NO: 379845 - DNA, 533 bp, Homo sapiens
ggcaactaaatgatccagttctgaagtaacatgaattatgacttccactcaaactcattggctagaactagtcctgtggtcccacccaagcaaaaaggagcaagagagtacaattctactatgtgccccccaaatgggagagctgatatgtatgatgaatagcacagatgaatggtttgaggtatggaggcagggaataagaaaaataatgagcagaactgttgctgctctaatgacattccgaagttctgaactcaatggtttcactttgagaatatcttcaaacaaaaggacaaatattcacaaccagtgtggttcagggacttttcagctgaaaatggttagaaacaatgcccatttcacaatgttattaacatgtaaaagcaatcatcatggtgcttaattgctaagaaatactctttaaacccttgtccctcctccttyctttacagagtagattaacagcaatagcatagctaaagaatgaacttataaaaaatgggctatttgttttccattatgtaagagagaaa

SEQ ID NO: 379846 - DNA, 548 bp, Homo sapiens
tcttcttctgcctccctcttccatttgtaaggatgcttattgggtccatgcagataatttgggatcatgtccgtattttaatatcatctgattagccatcttaattctacctcaaccttaattcacctttgctttataacctaacatattcacaggttctgggaattaggatgtagacacctttgcggggagggctcttttctgcytagtacagttcccttcaccaggtgtcttttcctcttgatattttgtatctgtctatagcctatccatttatttccctcattccttaagtctcatcctccaagtaaaagtaacctgaccctacattttacccctacaacatgttttcccaaacttctcttaaggaaggtaatactttttatcttatattacatattttcatgtgcatgccttattaccgaaatcagagtgctagctcctggatggcaataactggtcataatttaagacttccatgtatatttaagtgtttaacagaatttgttgttgaagaatgaattagatgaaaagtaagtaggaaagaa

SEQ ID NO: 379847 - DNA, 447 bp, Homo sapiens
tttaatttttatggaaattattatagcacattcatcaatggtcatgatctaggagagaaggataaagtaatgaaatagaaaaggaagggaataattacaagatcraaatccttgaggaggtgaaagtggacaaggtccatgatggttaattttaggtgccaacttgactggattaagggatacccagaaaggtggtaaagcattatttttgtgttcatctgtgaggatgtttacagaggagactggcatttgaatcagtggactgagtaaggaaaattcacccacacccaatgtgagagcctagatagcagaggaaaaatttttctctcttttctgctggagctggagcacccttcttctcctgcccttcaacatcagaactccaggttctctggccttgggactctaggacttacacaggcagcaccccaagttctcaggcctgtg

SEQ ID NO: 379848 - DNA, 568 bp, Homo sapiens
atcaatatacctggtaacctgtcaatgcagataagacaacatgtccaaacttccaaaacatagctcagctaatattgcagaatggaataacctaaaggaatagagaatgagagatccacgaggctcaatgtgattctaacttcttcaaagtaggtttttttttcaacctgcatgcaatttatttcctaagatactttctcatcatacattatataaacatgatgatataaaaacaattcttgaggcaatattaggaaacactaaagttagggtctaacttaaacggactgtcaaaagcaaaggtataaaatgatggtgtccataggtaacccccgtttatgtccctcttgctctgcgatgcttcagacattgtgaactatggactttcatcacgtgtttctgcttaaatggaagccacattgctgccctgtacaaaagaataacttttagcagattttatttgtaaaaaaaaaaaaatcccctctacactgcttaacacaatgtgatagtagtggcactrtatcagtagtgtattaaccattggataagacatagtatcaaaaatgaa

SEQ ID NO: 379849 - DNA, 346 bp, Homo sapiens
tttactattccaagtctatttactgattttacaataagcagtgattttgtaaatctgtaattttgatcttgtgtttggatcaaaatatagtacaaatcaaacacaattggtgtgagtgcatttaataaatgaagtcttgaccatttgtgtgttgccaagctccaaaaagcagtctgatcattcatgtacttgcagggtccatttatttctaatcatcctagcttaacttcatttaaagaataaattaatcgtttttaaacttatgcsagcagttgttaattcccagatggcaggtgaactctctaaacatttttttaaaacttttcatcaaatagtaattccattt

SEQ ID NO: 379850 - DNA, 531 bp, Homo sapiens
agttttagtgacagttctagtctcttgggcatgagaaatacagtcttgtttgctcgtttaagtcaacaagctgtgggatttattgtgtgttttgtagtatgcatgcataatgttttgatttttaaaagtctaaaataattgaaactgtcttgtgtcattcaaccctgtaataagtacctatagtttaaaacctcaaaattggttggttttgaaagatgtttgtataatgcataataataagcgcctctggattatttttaatgcatcagatcctgtgctatkgtctgtgtaagagaaaggaaccctgattacagttttggagagtgttcctggtgcccccagcatgcccatggtggataccacatcattatgctgtgctctgaggggcctcattctgacagcatgcttggttacataccgtaatgaaaagccttgtttggggaacatttgtgcttttaaatattggtttcatcatgtccagggaatgaagctgatttaaacatagctcacagtaaatctgagagtggaaag

SEQ ID NO: 379851 - DNA, 447 bp, Homo sapiens
tacactggtatctacttaagggcggagggtggatggtgggaggagagagagaagtggaaaagatatatattgggttctggccttaatacctggattatgaaaataatctgtacaacagacccccgtgacatgagttaaactatgtaataaaccttcacatrtacccccgaacctaaaataaaagttaaaataaataaatacatacatacaaaacattttttaaaaacagagaaaaaaaatttgccatgatttttagtactattagtacaaaatatgtagtattttaaaactatacttcataaaaaaggcatttagtttttaaagcaaataaaaattgtctttgcactgtttcttgcagagatcatcacagagtcccgaggagacatggtgaattctgtctttatatttcttccccagaatattacagatatccatatataaaaatct

SEQ ID NO: 379852 - DNA, 447 bp, Homo sapiens
tacactggtatctacttaagggcggagggtggatggtgggaggagagagagaagtggaaaagatatatattgggttctggccttaatacctggattatgaaaataatctgtacaacagacccccgtgacatgagttaaactatgtaataaaccttcacatatacccccgaacctaaaataaaagttaaaataaataaatacatacatacaaaacattttttaaaaacagagaaaaaawatttgccatgatttttagtactattagtacaaaatatgtagtattttaaaactatacttcataaaaaaggcatttagtttttaaagcaaataaaaattgtctttgcactgtttcttgcagagatcatcacagagtcccgaggagacatggtgaattctgtctttatatttcttccccagaatattacagatatccatatataaaaatct

SEQ ID NO: 379853 - DNA, 529 bp, Homo sapiens
caaggaattgctcttggcctgctctggcttgtgacaagtctcagcccatgctgggcagactgggccactgtcacttgacgtcccattgccaaatgctcaatctctcctagggcccaggagcacacaaaagctgctcttcaaaccgttctctgctgtaggaggcagggmctctaggctctgggctgaactcttgaattgggaactgccacacgatgcatcctctagcactattgggtggcctgggccattcagcctgagtgacagggcatagaccacagcagaggtctcccactcaaaacaggcagatttctaagtcatctgcagaatgggttggagcagtagtcccaagcgtggtgcaatttgtctccacattcacatggcaggtattaagatataccctaacagacagacaaaatgaactccctgcacccaaaatgagacacaccaaaaataaacccgaatctcatggctagcaggatgaaggattagtcatatatccttcattaattgctataagttttctttcctg

SEQ ID NO: 379854 - DNA, 629 bp, Homo sapiens
aatctggcttgtccagacccttaaaattttacaatgcagcaggccactcctgctttacaaggtttatctgctactctctgactccctgtgtgtcactagggcacccagattacttgccacttcttgtttaccaggttcaatcagcacagtgttatcaatatagggaccagtgtgatgcgctgaagaaagtcagagcatcaaggtccctggaagcttcattttaaaagcattacatgggtcaaacaacaacttttgacatttgcttcttataattgtatgtatttcttttcacctgacattatttcataagtattttctcctgtcattaaatattcctttaaaagtatttttaaatggttctataatattccatcatattattatgatatttattattctctgcttatttggatatttgcatttttaaatgtttgctattataaataattttatgataagtgtgcatataactsttttcatctttgtttccctaaaatacattcctggacatgaaattacttaactagagtataaagatgtttagggttttggattcatactgacaaattgttcttaagaaatggagtactgatttatatccaaccaactgtgttttagagggctcattc

SEQ ID NO: 379855 - DNA, 491 bp, Homo sapiens
tcataagatgctattttataaccatcagatcaagaaaaaggaaaatatgagaatacctaatgttggcaagggtatggaacaatgaaaatgcatacactgctggtggaaatataaatgggcacaataccttggtaaacaagttggcattatctactatagttgaacacaagcataatttatgacccagcaattcttctaggtcaatatatttggcttcaagaaactcttgcaygagggcacaaggacagaggtacatgagtgttcagagcaggactctgttctgttgttgtaaactggcaacaacccaaatgcccattagcaagagaacagatagatagatagatagatagatagatagatagaccatgttatattcacacaacatttcatacagcagtgcatagtaacaaacataataatggccatctttctttgagcttttactgtgtgctaagtactactctaagcatgtatcaactcatttaactcat

SEQ ID NO: 379856 - DNA, 491 bp, Homo sapiens
tcataagatgctattttataaccatcagatcaagaaaaaggaaaatatgagaatacctaatgttggcaagggtatggaacaatgaaaatgcatacactgctggtggaaatataaatgggcacaataccttggtaaacaagttggcattatctactatagttgaacacaagcataatttatgacccagcaattcttctaggtcaatatatttggcttcaagaaactcttgcacgagggcacaaggacagaggtacatgagtgttcagagcaggactctgttctgttgttgtaaactggcaacaacccaaatgcccattagcaagagaacagatagatagatagatagatagatagayagatagaccatgttatattcacacaacatttcatacagcagtgcatagtaacaaacataataatggccatctttctttgagcttttactgtgtgctaagtactactctaagcatgtatcaactcatttaactcat

SEQ ID NO: 379857 - DNA, 594 bp, Homo sapiens
tttcttgttgcccagaaagcaaaggtgggtagggggtgatttgcagtagtatctgagaaagagtaagacgaaaaataaatgttactctagaatttcatagtgatctaaatgtcttccatcatactattattattatttttttaggagtcaggatcttgctatgtcacccaggctgtagtgcagtggtgagatcatagctcactgccacctccaactcctgggcycaagtgatcccacctcagcttctctagtagctgggaccagaggtgaacactatcacatcaaagttaatttttaaattttttgtagagatgaagtctcactatgttgcccagactggtctcaaactcctgggctcaagtgatcctcccacctcagcttctcaaagtgctcagagtacaggcctgagtcactgagcctggttatagtatcaggcctcagccactgagcctggttgattatagttttagcatttaatattaaaaaaaagtttactgttttattatcaatagttttaccaggacattttatccatttcttgttctttgttgtctcttggatatttcatcctttcccttctgtaactccaggttt

SEQ ID NO: 379858 - DNA, 529 bp, Homo sapiens
acctcctgaacccgcggaaaatcttttgttgcatttagctaacttacatttttctatagaaaaaaaacttttaaaactgcatattctagcctcggcttattcacctctagttcggtctctggtatatgttggaattcacattgcccttccaaatcatggaggacagttccctcctgcgaagacaggtttctccctgwttatgctgcgggcacaagtgtgctgttccgggtgtcctgagttttgcaaggtggcctacagacacttggtgctccaggaagtggtcaggtctccaaaatcctctcccctggtagctggggtgggagtgggggccaaaagggtgaagaggacagcagttctcaggagtgctgatgccctgcttggtcctggctgtctaagggtgcagctaggcgacaaggccagttggcagaagcagccaggtgccccacgtgtgctctctcgctgacctgatctggcagggttaggaaggggccagccctggaagtgccaagctggcgccatgcactgcggt

SEQ ID NO: 379859 - DNA, 619 bp, Homo sapiens
gcagctctgcatctttgaggcattgagcctcgttcagctgggccgaggagggaaatatmcatttcaattcggtccctgaatgggggcagcggctgcggcaaccacaacagtgcctcctttatccgttcggccacttctcctgcttgctcattccctggctgttgcaccttgtctccttatgggctgggatgtggagcgggaggggcgcaggaaggataagggagcagaagtggggggccccgattcacagccgtgctgggacaagaagcgttgtcatttgagcccccacgagaatgataaatgaggctttctagggcctgaggaaattttcgttctgctggggagcggaagagtggagggtcaagacctgggtgcatttttcggaggctggaagggagtggatttgggggtcgtgccccattttcttgcctatgtgctaagcgagagatgccagcattagggcgttttcctatcagagctcggattccagcatctggagctataggatttcccataggtaagggcctaggctctggaatccgggtgcaggcagctggtttcgtagtggggaccgcacatatcttggactccaaagccgaagcgaacacagtaagagcat

SEQ ID NO: 379860 - DNA, 552 bp, Homo sapiens
taggcacaacagcatctttttaaaaaaactggtatatttatcactagatacagacttctttaaccattagcaacacagcrcagtaaaattttctcaaaactttttaagcttgatttaacatgccaagaaaatgattatttttccaccgagatgcatttatgtaaattatgtaaattggattgaggtcagtgtaacacctggaatttacaacccctagcagaagtaccagctgctaataatgcttatactatatttgtagcttaactagatgttaaactatggaactgttggtgccaatctgcttataaaggcaatgctctggagacaaagtcttctcacaaacagtgggcaagcaggtttcattattatgtgttcaacaacaatcctcagttcattaaataaggtcctgcaagacaaaatagttttctttgagaaacacaaggaaaaagcaatacacaggcttacctcattttattgtactccatagatatttcattttttacaaattgaaggtttgttgcaacaccgcatacagcaagactatcagtgcca

SEQ ID NO: 379861 - DNA, 554 bp, Homo sapiens
gaaaccttataagcctgaagggattggggtcccatctttggcttcctgaagtaaaataattgtcagtcaagaattttgtatccagcaaaactaagcttcataaatgaaggaaaaaaaaaaatctttttcagacaaacaaatgctgagaaaatttgccactaccaagccaacactccaagaaatgctaaaagaagttgtaaatcttgaaatgaaactttgaaatawaccaaaatagaacctccttaaggcataaatctcacagggcctatgaaacagttacacaatggaggaaaaaaacaaggtattgaggcaacaactaacatgatgaatagaacaatatttcacatctcaatactaacgttaaatgtaaatggcctaaatgctccagttaaaagatacagaatagcagaatgaataaaaactcactaaccaagtatctgctgttttcaagggactcacctaacacataaggacttacataaacttaaggtaaaggggtgaaaaaagatattccatgcaaatgaaaaccaaatgcaagcaggaataactattct

SEQ ID NO: 379862 - DNA, 566 bp, Homo sapiens
aaaaagatattccatgcaaatgaaaaccaaatgcaagcaggaataactattctcacatcagacaaaacagactttaaagcaacaacagttaaaaaaaaaaaaaaagacagagrggccaggcgcagtggctcacacctataatcccagcactttgggaggctgaggcaggccgatcacaaggtcaggactcaacagatatttacagaatattttacccaacaacttcagtgtatacatatttttattcagcacatggaacattctccaagatagaccatatgataggttacaaaacaagtctcaataagtttaagaaaatcaaaattatattatatatcctctcagaccacagtggaataaaattgaataataactttaaaaggaatccttaaaactatacaaatacatggaaattatataatctgctcttgatttttgggtcaacaagatcaacatggaaattaaaaaaatatttgaggtgaatgataacagtgacacaacttaccaaaacctctgggatacaacaaaagtggtgttaagaggaaagctcatagcattaaatgcct

SEQ ID NO: 379863 - DNA, 626 bp, Homo sapiens
ttttattataggtcatagtcactattcatatttatctattttatgtgtttttttaaagagcaagtggtattctttatgatgagaaatacaaacatgtatcatagatgattttcatgaaaagtgattgaaataagaaaaataacacttaacatggttgaagaaatatagaatccttgttaccacattaagaattttaacatttctaaatgtcctcatgacaatggctagtgaagatgactcgggataaacatgtttaaactatggaaaagagcatttgaggtagatgataatagataataatgtgaattaatagtaaattcaggctatataatgacagtattcacatacatctttctgttttctataagattaaatacttyttagaattatcagtaggaaatttgtgtgaattcaagcaccaagaggaaggtatggccgttgggtccgggtaaaatcagctgacagtgaggcttttagggacaaaatgaaggtatgatacaagtgaaaacttagaaccaggtgatgctgcagaagagattcttgtactggaagaagacactgcaaattcgaaatgtcatgattctatacttaaatctagcagttttcattaaataactaacaaaaaa

SEQ ID NO: 379864 - DNA, 626 bp, Homo sapiens
ttttattataggtcatagtcactattcatatttatctattttatgtgtttttttaaagagcaagtggtattctttatgatgagaaatacaaacatgtatcatagatgattttcatgaaaagtgattgaaataagaaaaataacacttaacatggttgaagaaatatagaatccttgttaccacattaagaattttaacatttctaaatgtcctcatgacaatggctagtgaagatgactcgggataaacatgtttaaactatggaaaagagcatttgaggtagatgataatagataataatgtgaattaatagtaaattcaggctatataatgacagtattcacatacatctttctgttttctataagattaaatacttcttagaattatcagtaggaaatttgtgtgaattcaagcaccaagaggaaggtatggccrttgggtccgggtaaaatcagctgacagtgaggcttttagggacaaaatgaaggtatgatacaagtgaaaacttagaaccaggtgatgctgcagaagagattcttgtactggaagaagacactgcaaattcgaaatgtcatgattctatacttaaatctagcagttttcattaaataactaacaaaaaa

SEQ ID NO: 379865 - DNA, 515 bp, Homo sapiens
tataatattagaagcatcaaagttaaaatttaaaataaacatagtaaaagtgatcattggaaaaaaatacgactccaagaacagaaaacagcctttaaaaatctttagacagggagagggatagcattaggagaaatacatagtgtaaatgatgagttaatgggtacagcaaaccaacacagcacatgtawacctatgtaacaaatctgcacattgtgcacgtgtaccctagaatttaaagtacaataaaaaaaagaaaaaagaagctttagttatataatcaatgattttaagaatatatcataaaatagtaaaataataacagaatgatatttatttaaacataaacaagaaaaagctcttagaaaaaaattctccaaaaaggaataaaattaaactacaaaatagagtagaagaaagttcctaaaatattttaaaaatgcagaaagagaaaatatgaaagaaagaataaacaaaacagaagaatcttctaagaaatccaacatgtgagagta

SEQ ID NO: 379866 - DNA, 475 bp, Homo sapiens
tctttctgattagtttaagcagccaattcagggatgatagacaatcagtgttgagagaaaggaaaaaaaaagtctgtctatctatctatctatctatctatctatctatctaatctctctcactctctctcatctctctcatctaccgtatctatcatcaatataatctaacatctatctcatggatctgccagggtcttgtcgagaaaacaaaaactacatttagaatttcaaatamagatgacctaatttatggaattgtgtacaaatatattatagggctcaaagagtatagagagaaagctgtggtatcccataaatttgtaactgtaggaaggaacaactacccttagaaaagagggtatgctacgagaaactgggagattgaaagaatggtccctgcagggctgatgctcgggcctctgaggtggaagtgtggcctcgtgcatgcttgcagctcccagggacgcaggca

SEQ ID NO: 379867 - DNA, 545 bp, Homo sapiens
gtctcttaatattttgaaagtatccatacttctagatgctgtaagagatctagacataggtttttaacctgagacacatatagtctatttttgtaagacagggaaaacatttagggcaaaataaaaggcaattaagaaacacttactaggttatttaccagagaccctgtggcagctaactagcattataggaacaggagaaaaggagaggtaattaatggaaatctctgtttaagtttaataagaatatccatattatcwtcaggttgactacaacctactttccttagaaaacctaccatccaatggaattatatacaaaggaatatatatttattgtatactttctatatacctaattaacaatgtattttaccacatgattttccattactatttcattccatcactgttggctcttcttccaagctttgaatctctaaactctttggaattctttttaatcattggtccaggaagtcactcaatgttacccagcaacagagtgggatagggaaagctagaatgcaggtttgctgactatt

SEQ ID NO: 379868 - DNA, 519 bp, Homo sapiens
aagtatctgatatgtaatatgcactaaaagtggtagctatttttgctgtgattttaaatgtggttgtaaggatggtgatgttggtagaaatggttagttttttttaatgaaagatgatcaccaaaaataaacttttgagcacctttaaaatgtttatatatgtcacctgggttagagttaggattacgttaagtttaggtcaccytggaaaattatatttcaatatctgtttttaaaacaatgtgtattttttgcatatctccatatatatttaaagacaagtccaactatttaaatatctatgatttcagagacaatttttatttatgaaacttgtttttaaaggaatgaacatccattcatcagagacatatgctgaatgtgaattttcttaaaacatgcttacctgcaattatataaaaaatatacatatatattaagcatacatttatgtcactctgcatagtttcatttttctcatggattgccatttattccttttaaaaatctagtgatatg

SEQ ID NO: 379869 - DNA, 617 bp, Homo sapiens
ccttgtaaagatatctgcactcacagcagcattattcacgacagccaagataaaggaacaaccaaagwgttcctcaacaagaaagtggattttaaaaatgtgtttaaaaaacaaaactaaaacataaattagccagatgaggtggcatgtgcatgtagtcccagctactcaggaggttgaggtgggagaatcactttggcccagaaagttgaggctgcagtaagcttgatcccaccactgcactctgccctgggcaacatagaaagaccttgtctcaagaagaaaaaacaaagcataaaaatgtgatgtgtatgtgtatatacatatatatatacattttttttctttttacacccatacacatagatataaatatagatataatggaatattatttaaccttaaaaaaggagatcctgccatttgctacaacatgagtaaacctggaggacattatgctaagtgaaataagccagacatgaaaagaaaaattctgcatgatctcaatatatgtggaatcaaaaacatttaaaacagaaatagagaatgaaacagtggttactggggtgggtgtggaggaatgggtgaaaatgggcaaaaattacatagtagcagat

SEQ ID NO: 379870 - DNA, 418 bp, Homo sapiens
aagggccccattgtattcttttgcatgtggatatctagttttcccaacaccatttagtgaggaaactattccttttcccatgtgtcttcttggtggccttgttgaaaattagttacccttgcttagatttatttatttcttggctctttattctgttctattggtctgtgtgtctgttttcatgtcagtactgtattctgattactrtagctttgccctattgaaaccaacccaatagtctcatagatagtttttttttgcataaacatagaaattgactcttctagtcttaaagcttgaaacttacattcattttatctgacttcctttctcaggaaaggacccccaggcctctcaaaataccaaataactgaaactcaccagatcatcacatccagacaatgagaagccctgcccc

SEQ ID NO: 379871 - DNA, 569 bp, Homo sapiens
catgatcttggacaatttctttttctgagcttttgtttccccctacataagatgcagaaaagcacagtttgcacctcatggaacagatatgaggcttaaattgttaatgtatgtaaaggtgtcatarcacatagttagcactgcatacaaattaactatgatatttccaattattttctattttcagtaatttatacattttgcatatttctacttaaattagcagaattaacttatttcctatagtccttcatcatacaagatgcctctagaaaaatttattcacatctttaattctatgttagaaaagtttggaagtttattttctatggggccacatatttattgttaagtttattgttaaatgttttatattatatttggtggctattctgaatgaaatattacctctttattgcattttccaattgcttgttgtttgtaagccagttattgatttctagaaattgatcctgtccagcaatttgctaaacttttagtaatacctgaaattaaatatttctttaatgatataaggagcctcttggtaaaatagtctgtttctagtc

SEQ ID NO: 379872 - DNA, 529 bp, Homo sapiens
agctgggattacaggcatgcgccagcacagccagctaagtttgtatttttagtagagatggggtttctccatgttggtcaggctggtctcgaactcccaacctcaggtgatccacctgccttggcctcccaaagtgctgggattacaagcatgmgccactgcgcccagctagagccactttttatatttaattttatttgcccattatttaatcttttattcttggctaggttttctagagatttattaacattattattttaaaaaatataagttcctggatttattttattgttttctctgtttcaattttatttttactcttatttttaaaacttaattaatttttaagtttctccagataattgattagctcaagtaattattatgagtatcataagacaatgttttcatcataaatttacctctgaatattgctttgcttgcatttagtacatcttgctataaattaatttctttctctcattttctcatatgctcataaatttttaaaaagtgttttttatgt

SEQ ID NO: 379873 - DNA, 529 bp, Homo sapiens
agctgggattacaggcatgcgccagcacagccagctaagtttgtatttttagtagagatggggtttctccatgttggtcaggctggtctcgaactcccaacctcaggtgatccacctgccttggcctcccaaagtgctgggattacaagcatgcgccactgygcccagctagagccactttttatatttaattttatttgcccattatttaatcttttattcttggctaggttttctagagatttattaacattattattttaaaaaatataagttcctggatttattttattgttttctctgtttcaattttatttttactcttatttttaaaacttaattaatttttaagtttctccagataattgattagctcaagtaattattatgagtatcataagacaatgttttcatcataaatttacctctgaatattgctttgcttgcatttagtacatcttgctataaattaatttctttctctcattttctcatatgctcataaatttttaaaaagtgttttttatgt

SEQ ID NO: 379874 - DNA, 529 bp, Homo sapiens
agctgggattacaggcatgcgccagcacagccagctaagtttgtatttttagtagagatggggtttctccatgttggtcaggctggtctcgaactcccaacctcaggtgatccacctgccttggcctcccaaagtgctgggattacaagcatgcgccactgcgcccagctagagccactttttatatttaattttatttgcccattatttaatcttttattcttggctaggttttctagagatttattaacattattattttaaaaaatataagttcctggatttattttattgttttctctgtttcaattttatttttactcttatttttaaaacttaattawtttttaagtttctccagataattgattagctcaagtaattattatgagtatcataagacaatgttttcatcataaatttacctctgaatattgctttgcttgcatttagtacatcttgctataaattaatttctttctctcattttctcatatgctcataaatttttaaaaagtgttttttatgt

SEQ ID NO: 379875 - DNA, 529 bp, Homo sapiens
agctgggattacaggcatgcgccagcacagccagctaagtttgtatttttagtagagatggggtttctccatgttggtcaggctggtctcgaactcccaacctcaggtgatccacctgccttggcctcccaaagtgctgggattacaagcatgcgccactgcgcccagctagagccactttttatatttaattttatttgcccattatttaatcttttattcttggctaggttttctagagatttattaacattattattttaaaaaatataagttcctggatttattttattgttttctctgtttcaattttatttttactcttatttttaaaacttaattaatttttaagtttctccagataattgattagctcaagtaattattatgagtatcataagacaatgttttcatcataaatttacctctgaatattgctttgcttgcatttagtacatcttgctataaattaatttytttctctcattttctcatatgctcataaatttttaaaaagtgttttttatgt

SEQ ID NO: 379876 - DNA, 394 bp, Homo sapiens
gctctccacagtggctggattaatttacattcctaccaacagtggattaatttacattcctaccaacagtgtattagcgtccccttttctctgcagcctcaccaacatcwgttagtttttgaatttttaacaaaagccattttcactgatatgagatggtatctcattgtggttttgatttgcatttctctgataagtgatgatgagcatttcatacatttgttggctgcttgtgtgtcttcttatatgacatgctaattctcacaagcattaaaaagttttacttggtcatttattttccaaatgacctttaatgtacctctttaaaaattttaagtgaactaccagaaggtcttcttacagcataacttttgccctgttaagcatttttttc

SEQ ID NO: 379877 - DNA, 609 bp, Homo sapiens
cttttcaaccaatcaaatggtgcttgttccaagaccacccatggaccaatcagcatgcacttccccattctaagtgtgtaagaaccctagactcaacctcatagatggctattcattttcacatcccctcacagtgctgagaactttctttgtgttgctcagtaaaattctactctgccttactcattctctggtatccacataccttattccttctggttacaggacaggaacctggaactccccgaaattgcgggagcaaaagaggtgtagtgctcctgcttgctgagcagcgggtggtgggagttaaaagagctgtaacactccctccaactccccaaacaacggtagagaagaagccrttgggtgctacttcctcctgctcaccgaactacgggagtgaaaaagccttaacaatgggatagtgtgagatttcattgcattacacagaacagcacacaatttaaaagttatgaattgtttatttatgcaacttttcatttaatattttcaattatggttgaccatgggtaagtgaaacctcagaaaatgtgaatgcggaggactgctgtatttatctttagccctaaatagaatcatttgttatct

SEQ ID NO: 379878 - DNA, 612 bp, Homo sapiens
atggagagagcctggtgcccccacatctcctacagagcagctatatcccttcccagggggagagraagccacctctgagagcaaagccacctcagaaaaaagactagagggaaacactgaaaagtccatagtagttaatactgtgtggtccgccatgatggcaggtaacctttattttatattcttttgattattgtgtattttccaaacttttaatacttgtaaatttaagggaaaacaatttttgttttcagagaaagaaagaggaagaggcagtcccaccctcccaggaacaggcaagctggggctcccatcagcctgagctccagcctgggaacggcctgctcccacccaggcaaggccctgctggccaccctgctctctgttcttcttcccaaatcactgtgtctgtcacctgcctccttggctctgccctgtcgggctgtggagcaagggtctgccccgggctgcgcagagccatgcatacagtaggtgctcaggaaatgcttgtgacctgaggtgtggtcccaatctgcagacagtttccctggagaggtgggcctacgtccccagcggacttaggatgtgaggtgggcgaattggttgctgctg

SEQ ID NO: 379879 - DNA, 612 bp, Homo sapiens
atggagagagcctggtgcccccacatctcctacagagcagctatatcccttcccagggggagagaaagccacctctgagagcaaagccacctcagaaaaaagactagagggaaacactgaaaagtccatagtagttaatactgtgtggtccgccatgatggcaggtaacmtttattttatattcttttgattattgtgtattttccaaacttttaatacttgtaaatttaagggaaaacaatttttgttttcagagaaagaaagaggaagaggcagtcccaccctcccaggaacaggcaagctggggctcccatcagcctgagctccagcctgggaacggcctgctcccacccaggcaaggccctgctggccaccctgctctctgttcttcttcccaaatcactgtgtctgtcacctgcctccttggctctgccctgtcgggctgtggagcaagggtctgccccgggctgcgcagagccatgcatacagtaggtgctcaggaaatgcttgtgacctgaggtgtggtcccaatctgcagacagtttccctggagaggtgggcctacgtccccagcggacttaggatgtgaggtgggcgaattggttgctgctg

SEQ ID NO: 379880 - DNA, 608 bp, Homo sapiens
ttggaaaagctgctctagagagagctattggatccaccatgggctataagcactgtgggggcggggaaattatcttctcaaggacctaggaaattgtattgagatttcaaaggaaaatttgctggatcctaaatacaaaagggaaaagcacaacattgaaatgaatcaattcgtaattgacagtctagaaaatataaattatgactcaacttttaaatagttccattagcagtaaacatttacatagctcttaactctatgtcagccactgtctaagtgttttccatacctttgctcattttgtttatatatgtatttgagacaggktctggctctgtcttccaggctggagtgcagtggcataatcttgctcactaaagtctctgcctcccaggctcaagtgatataccttagctcatttaatcctcacaaccctataagacaaaagctcttatgaggcctattttacagatgagaaaactgaaccccagagagattaaggcatctgctcaggtcacccacccaggcagcctgcatccagagcctgcgtggctcgccaaagcacagtagctatgaattaatggacgtttcctcaggtcaaggagcat

SEQ ID NO: 379881 - DNA, 596 bp, Homo sapiens
cattcactcgtgttcactcggcaaacatgtactgagcacctctggggggcckagtgcctctgggccctgcagctcgcctgagtcctcatccgagtccgcaccccacctccgtcctctgcaggtccccttctctccctgactctcctccgccaccctcatcagccccagggctcggggagctgggacagaacccaaagagagatgagctcgtggtctcagctgtgaagttggctttggtttttcggttgcaaatcacacccatattaggaaccggcgggaaggaagatgactgcgccagagcctgtgttttctggaaacaccgcagggcggtgagaggttttccaggccctgcctcaagccaagaggcaagatttgaatcactgaactgtcatgaggtgtctcccaagtcctgggtccagcattgctccctgagagcaccaggaagtaaaatgccctcaacacagaggtcccctgagacccacagagagcccacgaaacactcaccgagcgccgacttggcgccaaacccttcccattcacttggccatttaattttcaaaacctgttgtgtgacaagtggtgactctcactccaca

SEQ ID NO: 379882 - DNA, 569 bp, Homo sapiens
tatacatttcaacgtagaatagtaaggcttgatataaaatatgtattgtaagaaaggctcctcrtgtctggcagggcagggacctcagccctaatcactgcaggagacagcaatgacctggttttcctcccttccttttcttggttcacaccttcagccctgttgttaagagctctgtggtgttactgggtgcgtgtctttcatggaaagccatcttcctggattcagacagaatgtagaactaaaaattgaggcaacaagcagaggtttccatcagacttcttagttctggcagaagtcaagagacccaggcaagggttctgggtcccaacccccagtcttaactcccaaagtgtcccatctcctaaagtggcccagattgtcactgtcaaccactgactgttctctcaggtgggaatttcccagtcagcaggatgggcactgcagatgtgtgtctgcatgccagcggacccggcaccctccttcctccctgccaaccgcctccacctctcccactcagcagttcacaccttctgggtttcccccacccccgcccaaaccacacagta

SEQ ID NO: 379883 - DNA, 569 bp, Homo sapiens
tatacatttcaacgtagaatagtaaggcttgatataaaatatgtattgtaagaaaggctcctcgtgtctggcagggcagggacctcagccctaatcactgcaggagacagcaatgacctggttttcctcccttccttttcttggttcacaccttcagccctrttgttaagagctctgtggtgttactgggtgcgtgtctttcatggaaagccatcttcctggattcagacagaatgtagaactaaaaattgaggcaacaagcagaggtttccatcagacttcttagttctggcagaagtcaagagacccaggcaagggttctgggtcccaacccccagtcttaactcccaaagtgtcccatctcctaaagtggcccagattgtcactgtcaaccactgactgttctctcaggtgggaatttcccagtcagcaggatgggcactgcagatgtgtgtctgcatgccagcggacccggcaccctccttcctccctgccaaccgcctccacctctcccactcagcagttcacaccttctgggtttcccccacccccgcccaaaccacacagta

SEQ ID NO: 379884 - DNA, 569 bp, Homo sapiens
tatacatttcaacgtagaatagtaaggcttgatataaaatatgtattgtaagaaaggctcctcgtgtctggcagggcagggacctcagccctaatcactgcaggagacagcaatgacctggttttcctcccttccttttcttggttcacaccttcagccctgttgttaagagctctgtggtgttactgggtgcrtgtctttcatggaaagccatcttcctggattcagacagaatgtagaactaaaaattgaggcaacaagcagaggtttccatcagacttcttagttctggcagaagtcaagagacccaggcaagggttctgggtcccaacccccagtcttaactcccaaagtgtcccatctcctaaagtggcccagattgtcactgtcaaccactgactgttctctcaggtgggaatttcccagtcagcaggatgggcactgcagatgtgtgtctgcatgccagcggacccggcaccctccttcctccctgccaaccgcctccacctctcccactcagcagttcacaccttctgggtttcccccacccccgcccaaaccacacagta

SEQ ID NO: 379885 - DNA, 569 bp, Homo sapiens
tatacatttcaacgtagaatagtaaggcttgatataaaatatgtattgtaagaaaggctcctcgtgtctggcagggcagggacctcagccctaatcactgcaggagacagcaatgacctggttttcctcccttccttttcttggttcacaccttcagccctgttgttaagagctctgtggtgttactgggtgcgtgtctttcatggaaagccatcttcctggattcagacagaatgtagaactaaaaattgaggcaacaagcagaggtttccatcagacttcttagttctggcagaagtcaagagacccaggcaagggttctgggtcccaacccccagtcttaactcccaaagtgtcccatctcctaaagtggcccagattgtcactgtcaaccactgactgttctctcaggtgggaatttcccagtcagcaggatgggcacygcagatgtgtgtctgcatgccagcggacccggcaccctccttcctccctgccaaccgcctccacctctcccactcagcagttcacaccttctgggtttcccccacccccgcccaaaccacacagta

SEQ ID NO: 379886 - DNA, 598 bp, Homo sapiens
attttttctcactaaattttattaaaatacaagttcagatgattgattttctcaaacactagttagaagtcagagtagcaaaattttgtgtaggaaaagtctttttkctttttttctttttttttttttgcatagggttgggagaagtagataagcctagatgtgaaatagagaggctatgcactaggacctttgaaagccattttgttcatgtaagattgtagagatgatacatatgtattggaagaggtgactgtggcataatttgttcttattaatttcacaggtttgaaaagatttggtgacatttatgatccagttctactcaccagtatttatcacctttgtctgcaataagtatgcttgcaatcacagatacttcatgtagcatgccttggatagttgtctacttctctcctttaagataattttaaggcttttcaacttttaaaaactgttgatattattataaggaacctaagtttttgatgacaataaaagttggaaagagaagaccctcaaaaaattaaaattaaaactactatatgatttagcaattccactactgggtgtatatccaaaggatgtaaaatgagta

SEQ ID NO: 379887 - DNA, 580 bp, Homo sapiens
tctgtgtgggggcaccaaccccacattttccctcttgactcccctaatggaggttctccatgagggctgtgcccctgtagcagacttctgcctggacatccaagtgtttccatacatcctctgaaatccaggcagaggttcccaaacatcaactcttctgtgcaccctcaggcccaacaccatgtggaagcttccaaggcttggggcttgcattctctaaaaccatggcacaagctgtaccttggtcccttttacccatggctggagcaggagtggctgggactcagagctctgtgtctcaaggatgcacagagcagcagggccctggtcctggcccaggaaaccattcttccctccttgacctctgggcctgtgataggaggggctgccataaacatctctgcaatgccctggagacattttctgcttcactttacttatgcaaatttctgcagccacagcttgaatttctccctagaaaatgggtttctctgttctactygtggttggtctgcagattttccaaatttatatgctgtggttcccttttaaacataagttctgatttcagatcatctct

SEQ ID NO: 379888 - DNA, 603 bp, Homo sapiens
gttcactaaaaacatcttttacactgtatagtttctaactttatcaatataataaatatggagcttcatcatggtagatttatcttgtcaataaaatattaaaatgaatatagtcttaattttaaaaacatttttataacaatttatacattttattttagaatgattagagaatataggtcagataaaataacaaaataaaaaaatctcataattttacagccagagatattaactgttaacattttagaagaactacataatataaatacaaatgtaaacataaatgtatacgtttacgttttaacaaaatagggccatggtttacttttaaaaaattaccttcagttacaatctgtgtgcacatttaaaaagattatttgattatcaaggtagagaagtatataacatacttaagactgattttcttccagtaagtataacaacatgcacacacattwatctgctgctttaaggcaaaatacatattaatccagaaaattattttatgtgaatcagctcattgatgctacatcaatgaggcactactgtactttggctatctttatgccatgtaactttcattattcttctctatacatt

SEQ ID NO: 379889 - DNA, 574 bp, Homo sapiens
agcaccttgatcttggacttcccagtcttcagaactgtgagaaaaaaaaatatattgtttataagccacccagtttatggtattttgttatagcagcctgagttgactaagacagggaggtatgtcagcctgtggaccttaggggtcttctgggaagacaggtggaaatgatttaraatcagattctctggctagaagagtcttcttcctggaagttttcaaaattgacagggaacttatactaagataaaatatatacttgacctttatcttattttttttaaatcagcagttattctttaatattatcaaatattcagtagttgttaaaatttccaatcatttcataagagtcataaatgtactttataatgtgtttgtttgattaaagtccatatatggtgaatgggtgatatgtctttcaaaactgcaagtcccttgcccaaccccatcatctcttttcttttctttgtacatttttatttaaccaagttggaaaacactctgcaggatattatccaggtgaacttccccaacatagcaaggcaggccaacattgaaattcaggaaatac

SEQ ID NO: 379890 - DNA, 615 bp, Homo sapiens
ttacctcaaatgtgcccaaatatgtaagattgctttcaacatgtcaacaatccatcaaatgtttatcaaatacttatgtgtacaacaatgctaaatgctgggatgattaaaaactacatggcatgatctcagcccacaagatgcttacaatagatttagacatatgtaaaggctcacaactgtggaaattttgccatatttaaatagctttgactaagtagaagaaataactatgcaagctaatgagtacccttctwtagttccatggatgctaacagaagacaggtgactctttgtcagagacaaggaactgtattactaacaaccaaaacaaaagcaggagtaccagcatatttgtattggttctgtaagttcctatagtccttcaatagggatatatggagggccaggaagcccctaaacatggagtaggatgtaccacaggagttccatgagcttagggaatctgtcattttttagaagcagtaagcaagctgctctttgtctggaaggtaaacagctgcattgtatgagacctgtgattatttaccttgctttccatgtttgccactctcaggattcccagtccagtaaaaaaagcaaggccataatgga

SEQ ID NO: 379891 - DNA, 655 bp, Homo sapiens
tctcaaataactcacaaaagagctaccatttggcccagtaatctcattaatgggtaaatactcaaaagaaaataaataattctaccaaaaaattacatgcattcatatgttcatcactccactattcacaatagcaaagatatggaatcaactcaggtgcccaaaagtagtatactggataaagcaaatgtggtacatatacaccatagaatactatgcagccataaaaaagaatgaattcatgtcataagcagcaatagggttggagctggaggccatagttctaagcaaattaatgcaggaacagaaaactaaataccacatrttctcagttataagtgggagctaagcactaagtacacatggatataaatatgagaacaaccgattctgtggattactatacagtgggattgggttaaaaatctccctattgagcactatgcttaccaccagggtgacaagattcatattccaaacctcagcattacacaatattctcatgtaaaaaattgacccagtatccccagtatcaaaaataaaagttaaatttttaaaaagtgaacattgcaaatattttccactgataattttttctcactaaattttattaaaatacaagttcagatgattgattttctcaaacactagttag

SEQ ID NO: 379892 - DNA, 655 bp, Homo sapiens
tctcaaataactcacaaaagagctaccatttggcccagtaatctcattaatgggtaaatactcaaaagaaaataaataattctaccaaaaaattacatgcattcatatgttcatcactccactattcacaatagcaaagatatggaatcaactcaggtgcccaaaagtagtatactggataaagcaaatgtggtacatatacaccatagaatactatgcagccataaaaaagaatgaattcatgtcataagcagcaatagggttggagctggaggccatagttctaagcaaattaatgcaggaacagaaaactaaataccacatgttctcagttataagtgggagctaagcactaagtacacatggatataaatatgagaacaaccgattctgtggaytactatacagtgggattgggttaaaaatctccctattgagcactatgcttaccaccagggtgacaagattcatattccaaacctcagcattacacaatattctcatgtaaaaaattgacccagtatccccagtatcaaaaataaaagttaaatttttaaaaagtgaacattgcaaatattttccactgataattttttctcactaaattttattaaaatacaagttcagatgattgattttctcaaacactagttag

SEQ ID NO: 379893 - DNA, 655 bp, Homo sapiens
tctcaaataactcacaaaagagctaccatttggcccagtaatctcattaatgggtaaatactcaaaagaaaataaataattctaccaaaaaattacatgcattcatatgttcatcactccactattcacaatagcaaagatatggaatcaactcaggtgcccaaaagtagtatactggataaagcaaatgtggtacatatacaccatagaatactatgcagccataaaaaagaatgaattcatgtcataagcagcaatagggttggagctggaggccatagttctaagcaaattaatgcaggaacagaaaactaaataccacatgttctcagttataagtgggagctaagcactaagtacacatggatataaatatgagaacaaccgattctgtggattactatacagtgggattgggttaaaartctccctattgagcactatgcttaccaccagggtgacaagattcatattccaaacctcagcattacacaatattctcatgtaaaaaattgacccagtatccccagtatcaaaaataaaagttaaatttttaaaaagtgaacattgcaaatattttccactgataattttttctcactaaattttattaaaatacaagttcagatgattgattttctcaaacactagttag

SEQ ID NO: 379894 - DNA, 304 bp, Homo sapiens
gggagacctggggaggctcctgcaaatgtccaagagaggggacactgggggatcagggcaacagcgacagagaaggggaaatgggcaggtggrtgaaagtcaggagggaggctgactctgcaggccgcggaaacagctcgctgcaggagtcccgctgcacaggcccgctgcgaggaccctgtgcctgtggcataccgagaggtgcctggggaacagcaggtgctcagccatgcagagtcaggagggtcaggcctccgaggagaacaagacggtgcctgggtgaggtcaagggacttgtagatct

SEQ ID NO: 379895 - DNA, 633 bp, Homo sapiens
ttttggagttaggaatatatgttcaaaatctttagtttgacaatgggtctcaatttattatttatatgaccttgggttgtcatataayctaagtttaatttttcttttctgtcaagtgcaatttataataattttatttacctcagagttatgacggataacctatgatataatgtttctaaaatatttagaaatggcaaagttctgaaagtattggaagggtcaaacccctcaccttagacatgagaaaaataaagcccagaaaaattggtaggaagggctaagactaaaacctgagactcttaatgagattgaggaaccagaagaatatatgtttccaaatctagactttgagtttattataacctattggatttcatgcaataaataatgcacagaatgcatcatatattactgacatacaatagtcccacaaagagtgaccaagaccctgagagacctgccgggcttggatatgagtgatataaatctgtggcttgtttttgagtgatattcccaaactgtgtatgagaatggctacccaacaaattccttgaggatgaagaaactgcagatccctggaagttctctctaatgcaagacttattggagagccagccagtgaaagagaac

SEQ ID NO: 379896 - DNA, 633 bp, Homo sapiens
ttttggagttaggaatatatgttcaaaatctttagtttgacaatgggtctcaatttattatttatatgaccttgggttgtcatataacctaagtttaatttttcttttctgtcaagtgcaatttataataattttatttacctcagagttatgacggataacctatgatataatgtttctaaaatatttagaaatggcaaagttctgaaagtattggaagggtcaaacccctcaccttagacatgagaaawataaagcccagaaaaattggtaggaagggctaagactaaaacctgagactcttaatgagattgaggaaccagaagaatatatgtttccaaatctagactttgagtttattataacctattggatttcatgcaataaataatgcacagaatgcatcatatattactgacatacaatagtcccacaaagagtgaccaagaccctgagagacctgccgggcttggatatgagtgatataaatctgtggcttgtttttgagtgatattcccaaactgtgtatgagaatggctacccaacaaattccttgaggatgaagaaactgcagatccctggaagttctctctaatgcaagacttattggagagccagccagtgaaagagaac

SEQ ID NO: 379897 - DNA, 184 bp, Homo sapiens
actattcaatattatatctgaggccagtgggggaagaaggttccgtcattgtggagtatatggttttaagctctttgaagtgagraaatttgaagaggggccatgttattaaaataagtgggcattgtcaaatcaaggatggctttgggtaggaagttataaaattcaagagtgttaataagag

SEQ ID NO: 379898 - DNA, 596 bp, Homo sapiens
gcttgttgtggcttgtgcattctactaggtggtttcacagagtcatttcatgtactcctcacagtaactgttgcagaggtaaaatatgaaaataagtaactttttcaagtaaacacaagatgaagaaatagatctaagatctatagatgtcaacgcttttttttccttttactatgccgaagtatttattcaatgactactcattgagcacctaccaagtgtgccttgcactgagaacacactagtgaacaggtaacaattttyctgacattgtagggtttatgtgttagacataagtaaatctatagtcaaataggagttagggtaaatttctgtgaagaaatataaaactgctgtgaagaaagcagggtgaaacaaacagcaacaagatagaggatgtggtggaggtactatggtatgcaatcaaggcttctgtgagaaagggatgtttcagagatctgagcaaagtgaggaaatgagacacaggactctgccaaaaattcattccaagcagaatgaacagtaagtgcaaaggtaagtgggcagaaatgaagagtgatcttgatgtcttcaagaaacaagaatgtgactagaga

SEQ ID NO: 379899 - DNA, 594 bp, Homo sapiens
tttgcagaatgtgcaggtttgttacataagtatgtatgtgccatggtggtttgctgcacctatcaagccatcatctaggttttaagcctctcatactttaggtatttgtcctaatgctctccctcctgttgcctcccacctcttcccgacaggcttcggtaygtgatgttcccctccctgtgtctaagtgttctcattgttcaactctcacttatgagtgagaacatgcagtgtttggttttctgttcctgcattagtttgctgagaatgatggctttgaccttcatccatgtccctgcaaaggacatgaactcatttttttatgactgcatagtattccatggtgtatatgttagattgcacattccagctgctgagagagtactttttctcacgaaaaaaaaaaattaaggtaacaaatacgttaattagcttgatttaattattccatattgcattcataaacataatatcactttgtaccccataaacatatacaactatattttgttaatttacaatttataaaacaaagattgaaattgccaaagctttggaactctccatattgtacccttaaagtctattaacaat

SEQ ID NO: 379900 - DNA, 594 bp, Homo sapiens
tttgcagaatgtgcaggtttgttacataagtatgtatgtgccatggtggtttgctgcacctatcaagccatcatctaggttttaagcctctcatactttaggtatttgtcctaatgctctccctcctgttgcctcccacctcttcccgacaggcttcggtatgtgatgttcccctccctgtgtctaagtgttctcattgttcaactctcacttatgagtgagaacatgcagtgtttggttttctgttcctgcattagtttgctgagaatgatggctttgaccttcatccatgtccctgcaaaggacatgaactcatttttttatgactgcatastattccatggtgtatatgttagattgcacattccagctgctgagagagtactttttctcacgaaaaaaaaaaattaaggtaacaaatacgttaattagcttgatttaattattccatattgcattcataaacataatatcactttgtaccccataaacatatacaactatattttgttaatttacaatttataaaacaaagattgaaattgccaaagctttggaactctccatattgtacccttaaagtctattaacaat

SEQ ID NO: 379901 - DNA, 564 bp, Homo sapiens
ttaattcagctcttactgcctacagacttcaagacccttcagctttaaccattgctttatgttaccagactcagaagcttactaccaattaagtatgtctagatgaatgcttgatgcccaaacccaggctgtaaaaaaacaactcttcactcgcctgtccaaatggccgctctttaagtgtccttgccaacactccatttcccagccttaagccctcaggatcactgcatcttttcctttagcccaccctacagaagttagcagtttctaagactcactgattttacttctatttcctttgttttctatcgtcactgcttaaatcctagttcaaactcttttgtcttagggataggaatactcccttctctggtcactctgcctcctgtctttcccacatacaagcaccttacgtattattcttgaccrattttcctcaactgcagtcattttcttttgactatgaaaccaaaactttcctcctaatatgctataatatataccaacatacttttccaaatttatttaggaatccatttaaaggctacagtccaaataacttct

SEQ ID NO: 379902 - DNA, 564 bp, Homo sapiens
ttaattcagctcttactgcctacagacttcaagacccttcagctttaaccattgctttatgttaccagactcagaagcttactaccaattaagtatgtctagatgaatgcttgatgcccaaacccaggctgtaaaaaaacaactcttcactcgcctgtccaaatggccgctctttaagtgtccttgccaacactccatttcccagccttaagccctcaggatcactgcatcttttcctttagcccaccctacagaagttagcagtttctaagactcactgattttacttctatttcctttgttttctatcgtcactgcttaaatcctagttcaaactcttttgtcttagggataggaatactcccttctctggtcactctgcctcctgtctttcccacatacaagcaccttacgtattattcttgaccaattttcctcaactgcagtcattttcttttgactatgaaaccmaaactttcctcctaatatgctataatatataccaacatacttttccaaatttatttaggaatccatttaaaggctacagtccaaataacttct

SEQ ID NO: 379903 - DNA, 632 bp, Homo sapiens
caatggaatagaaagccactaaacatagctaatcaatctccaataaaggagcaaagggaataatacaatagaataaggatagatttttttaacaatggtgctggaacaactgggcatcgacatgcaaaaacataaatctatgtttttatgctcttcacaaaaattaactcaaaatggattacagacctaaacataaaacacaaacttataagcctcctagaagatagcataggagaatatataggtgacgttgggtttgacaatgacttttgagatataaaaccaaaggcatgatctatgaaaagaagaattgataatctgtacttcattaaaattaaaaatttctgctctgtgaaatacactgtccagagaataaaaagacaaaccaaagactgggagaaaatatttacaaaaattataactgatatgaactgttatccaaaatatatcaagaacacttaaaattcagaaataagaaaacaaaaaacttgaataaaaaatgggccaaatacctttggtaagggtaacagacaccttaccaaagaagcacatagatggyaaataagcacatgaataaatattttgcatcttatgtcaccagggaaatggaaattgaaacaacaataagaagc

SEQ ID NO: 379904 - DNA, 588 bp, Homo sapiens
cttctttgctctgcattatactcttggcttatgctattgcatgtggttagaatatgttcattttcaatggagtaaactattccattgtctcatattttttactttgtttgacatttggtttgtttcctataatttttgcttttactacttcartgaacattttggtacacatgcttgatgacatgtgaaagagtttttctataatagagcttttcaagagttgtgccatgttaagttacagattgtgctacaaaatagtggtctccatcctgagattatctagtgaggcctgggttagctagaatccctggacaagttgctccaaacactggctgcttcattacactcttctcagaggattaccagagcaaaatggagtcagatatggtactccatgttctccttcagttgtgagcacactaagtgtcctgagatgctaaaatgcttgtcacatggacatctattttaaacgttggcttcaaagtgaaccattgcccatggtggataaggggccctaggaactgctgagagcttgtgttccagatggccaaaaagcacagcctaaaaaacacagccaaaaaagcagag

SEQ ID NO: 379905 - DNA, 554 bp, Homo sapiens
taaatgtcaatccaaatattttgcttacctttattgcttatctttttcttgtagagttatgtgagttctttgtttatcctggataatagtcctctgtaaattatttgcattgcagtcatcttcttcccataggttggtagacttctcattctctttctggagtcttgaagagcagaagattcttaagtattccttatggtttatatatttatatcttttgtaagatatgtctcctatagcaaaattattttcctatattcctkctgagaaagttttatggtttcaccttttacattagattttaatcactcatgaattcgtttgggggtaagtagctagagatcaatttattttttaatttcatataaatatttccatcactgatctacagtatagttctatcataagtcaagtttctgtatattttggggcactgttttgagactctccagtctgttttcatttataacttaaatctctgcacatatactccacagtcttaattactatcttattaaagtaactctaagaatgttagaatttttactgtaatt

SEQ ID NO: 379906 - DNA, 496 bp, Homo sapiens
ttctgcaggtctgagaatgagaacctcaaatttatatttaaaaagaaaatattcctcaagtgagtctaaagcatagcagtggtagtagccactgaaatatgcaattttgtagatacaaatgtctgtccatacaggacagatttaaaagcctatctaaaggccattaytgagaaatattttctatcttaccctgttagtcaagcattggacaaccaaacataatatctgatattttgtcagaaagaggaaaaattagaaagattcaaagctgacaaaaattatggaggcacagtccaatgacaggctaataactcatatggcaaacaatacatgaaccagcgcttgatagcacaagtattggctgtccctttgcactgatcagaaatgaaatttgcattaaaaagttggcctggcctgaaataagtaagttaaagacgtttctgccatttttggagataattaaactgttgtagtatgtaataggtgtcgtgaatga

SEQ ID NO: 379907 - DNA, 555 bp, Homo sapiens
gatcataagattgacaaaacactctttgtaacaataaagtgtcaaattccaacctgtctctggtatagcatcacatgacagggagaagaccctgaagaaaatcgaagtgttctaccctaaaatatatttctttgacatattttgaaatagacttgcaaagttgtctcttgtggggaaaatttgcatcctgtagagagtctccttccctttccaggtcttttccagattcaggagacatttaactaagactttgacaccttttaatgccctgaaagagacatttatgatctattgtctctgaagcttgctacttagaggcttcatttacataacaagaacattggcttccataaccctccttatcttaattcaagcatttytttctgctgattcaactctttaggcaaagcttaattctttttttttttttttttgagaaggagtgctctgttgcccaagctggagtgcagtggcatgatcttggctgactctaaactctgacccctgggttcaagcgattctcttgcctcagcctcccaagtagctgagattaca

SEQ ID NO: 379908 - DNA, 546 bp, Homo sapiens
atcttgtggtcaatggtttaaatggaaaaagaaatgagaaaaatatatttggtattccaagggcaccagcgagacagctcaacaactcactttgaactagaggaaacctctttgctttaagatccatgaattatgctaagcatgaaagtattttagtaaccttgttatttctaccagctggttgtacctaagtcaaaagtggccacatgtaattgacctgatgkttctctccattattatctcattttaaaaaaggatatgagttgtttatttacctatgtcagatttcaataacatgaaaataaaacactactttgtactcaataaatatttttgatattttaaatacaatttatttgatctacaaattcaggtattactaaaaaactgattaaataaccgattttattgaaatttaattttattactgatttatatagtaaatgctatgtagatatccatccagctgtatttttatattctaatttaagggtaagcagtaggtgtagttagaataagaatgcagtcttctcatacacatggtta

SEQ ID NO: 379909 - DNA, 487 bp, Homo sapiens
tactttgtaccatttgatttttaaattttatccgcattttatggcccgtaatacagtctggcttagtaaatgttctctgtgcactttttatatgcattcttctattgttgagtagaggttttataagtttcaattaggtcgaatattttgagagtattggacatcttctatatccttactggttttttgtctaattgttttatcacctrttaaggaaggttgattcaatctccaagtataattgggagttttgaatatttctccttgaagttctatcagtttttattttcgtattttgaagctctgttattaggtacataaacatttaggattgttatcctaaatatcctaggattgaaatatatccatttatcatcaggaaatgtccacctctatccatagtgatatattttctatgaaacatactctatctgatataaaatagccactctgactttatttgactattattagcggtgtgtaactt

SEQ ID NO: 379910 - DNA, 487 bp, Homo sapiens
tactttgtaccatttgatttttaaattttatccgcattttatggcccgtaatacagtctggcttagtaaatgttctctgtgcactttttatatgcattcttctattgttgagtagaggttttataagtttcaattaggtcgaatattttgagagtattggacatcttctatatccttactggttttttgtctaattgttttatcacctattaaggaaggttgattcaatctccaagtataattgggagttttgaatatttctccttraagttctatcagtttttattttcgtattttgaagctctgttattaggtacataaacatttaggattgttatcctaaatatcctaggattgaaatatatccatttatcatcaggaaatgtccacctctatccatagtgatatattttctatgaaacatactctatctgatataaaatagccactctgactttatttgactattattagcggtgtgtaactt

SEQ ID NO: 379911 - DNA, 557 bp, Homo sapiens
taggtgatgcattagaacttaacgtttgaggcccagtctgtgtgttggatatatcactttgtgtcagttaatttctcggtggtattctttgttacttacaaaatagaaacaaataatcctagttgccgctgcagattgaatacctgcaatgcgtgtttcttgttagggtgggctacacagaatggttggaggatagagcraggcagcagccatatagtagtagtacacaccctctctcagttattctgtcaaacatgaatctaggtgctactgcgaatgtattctgaagatgtgaatgaaatatttaatacattgactttaagttaatcaaaaaatagatcattctgagtagccgtgcccaataaggcaagctctttaagaaagggcataggtctttcttgggtccagaaacttcaaacagctgttggctatgcaattgctctccctaccctctgggttttccttcttgactgaggcatgtggacaaaaaattcagcctgtatgcctagggttccagtctgcttgtgatctgcccttcccaattgcctcgtctatga

SEQ ID NO: 379912 - DNA, 618 bp, Homo sapiens
ggctgtatcctttgaactagcaactcccctgcatcacagagtacactagttgtcctacaacaaaagacggcatcaaactctctccacaaaggcctgagacacccaacaatatttaaagcagatgtagtatttagcatctctgcactatgtaagacgcccttttaagatctgttagagccagggtttataaaatttatgaaaacaaaygttttctcctttccttcgaatgtttccctgggatttttggactttcaatgagagagatatataaacgccaagctggctgtcccagagttcaggtagcacacgattaaatccggaattaatgcaggaataggtgtgcccctcggactgagcttctttttattgtactccttccattttcactaaagccaaataattcagatctagggaaagagcatggaaaggtcaaaatgaagcccaaatgtccagtagaagttttataagttgccataaagatataaaataaaaattaaaagtactgaaataaactgagatgcctccggtttcatgtagagtttttgcccattttatttctgctcttcagaatcaaaacaaagtagattcaaggtgcatgttaatcaaattacctatgtc

SEQ ID NO: 379913 - DNA, 620 bp, Homo sapiens
tggtctcattctcttacgcatattgaaatagctcagaaagatttataaccgtgtttcgtacagtcaaagttccagtaaacgagtccccttttgaaggttaaatatttatgctctcattttcctgcctgacacagaaagcaagagtaaacccatgttagtcaaaaagccatggtgacagactggcttagaacaagaaaagccagtgggcacaatattcagatcatcccccatgctcttatactcttatttatcggggaaatgaatgagtgaaagaatgaatgaaaactcttacatggcctgtctccggaagcagaaktaaatcactttggcaaatgtgattttaagtcaatctaaaatttcccacatatttagcctattgagtcagatctttgaaataataatcattatccatcaaggaacagcaattatagctagtgaaatactttcacatgtacttgagcttcataccactctatagagtgagcaggcagaaattaggttattttataaatgaacaagttgatgttttgagctgatgaatgatttgtcctgtttcacacaggcagtgagtgacaggattgtgataaggtctccattttcttgatacctattatagtgat

SEQ ID NO: 379914 - DNA, 554 bp, Homo sapiens
tttgcttagctatttagtaatttgttaacatttatttcatatctaggtcctgaacactttcattagtttcatttctagagacttacgtatgtagatgtgattgtcctcccattttcctactgtacgttggtacaatacagaaaggactattgatatgtttatcttgtaaagagcaccaaactctcttcttgcttttttctttgtttctgttgtattaaatttggttccaattttatgtagctatcagataatctacaaatattttttcactctttctttataatatttaaacatcatctttcttttccttttcttattttattgtgtaaggtatccataacagtgctgagtaatagtggagctagcaagcatccttatctaatttctgaatctaggggctatgccccatgtgtacattagaacatttaaaaatataccgtcaaattaatgaaacaagaaatcacataaaactgaaaataaagattactttccaattacaaayctaacatatccttattgtggaagaaagaaagaaataattgttaaaataattg

SEQ ID NO: 379915 - DNA, 563 bp, Homo sapiens
aataaactactgacacataatatgactctgaaaataattatgctgagtcaaagaagtgatatataaaagaataaatacggcatgtttccatttactttaaagtctacaaaatgcaaactaatctacattgacataaagcagatcrttcatttactaggagcagaatgaacttcaaaggggcaacaggaaatgtacgctggttttggaaattattggcattgtgatggtagcagtggtttcacagtgaatacacttatcaaagtactttgaattgtacaatttacatgaatgaagtttattgcacataaattatatcttaataattgataaaaatattcttctgcagcaatactgggaaatatttattaccagatattaaaatattataaatgaactataaagaaaatggtatgttttgatgcctgcataaatgaacaggtggacagaacaattacaaaacccagaaagagtctacaattccaaatagaaatttggcttatataaaaatgacatctgaaatatcagtgggaaaaaagtcgagcttttaataaatgatgttagga

SEQ ID NO: 379916 - DNA, 563 bp, Homo sapiens
aataaactactgacacataatatgactctgaaaataattatgctgagtcaaagaagtgatatataaaagaataaatacggcatgtttccatttactttaaagtctacaaaatgcaaactaatctacattgacataaagcagatcattcatttactaggagcagaatgaacttcaaaggggcaacaggaaatgtacgctggttttggaaattattggcattgtgatggtagcagtggyttcacagtgaatacacttatcaaagtactttgaattgtacaatttacatgaatgaagtttattgcacataaattatatcttaataattgataaaaatattcttctgcagcaatactgggaaatatttattaccagatattaaaatattataaatgaactataaagaaaatggtatgttttgatgcctgcataaatgaacaggtggacagaacaattacaaaacccagaaagagtctacaattccaaatagaaatttggcttatataaaaatgacatctgaaatatcagtgggaaaaaagtcgagcttttaataaatgatgttagga

SEQ ID NO: 379917 - DNA, 523 bp, Homo sapiens
attccaaaatggatcagagattttaaaaagtagatgaattcttccataacctcagaagagaaatgtttttctaactataattcaaaatcagtaagttataagggaaagaattataaatttgactacaataaagacaatgtgtcatagtaaaaaaaaaaaagtaaagtaaaaagacaaatgtcaaatttgggaaaatatttctaatttataccacggatggaagatttacacccttagtatacatagacctgttaaaaatagaggccaaaaaacccactaagaacctgattgaaatatgagcatgagatatgaattgccagttcacagaaatagaaaaccaagtaaccctcaaacacgtgaaacatgccaagatctcacacaaaragaaccataaatgaaaactaccctggaatacaatttctcacctagcagaatggcaaaaatctgaaagtttggcaacaggttccattgagggaactgtaaaaaaagaggcactttcataattggtgagccatatagttaa

SEQ ID NO: 379918 - DNA, 528 bp, Homo sapiens
gggtgacttaacgatgatatttaaataacacttaagttttcagaaactcagttactatctcttcaaagcggggaccgtgcttctttcatagaatttgtgggtgtttaagaagccctgacctccccctacctgtccaccactgccccacataatttgcttcatacccagagcttcattgttcctgacaggygtgcacgggggatgaaggtctggagaagcgctcagggtcctggtccctggatttttagtcatgagtgacatgccatagatgtgaaccacctcggtgaccagctattcttcctgtagattttccacgaaaggactgaactccggatgagacagaacacagggtttattgggattggctgttcattacttcattactgggaggtcctctgccctacttacacttaagttcacttggttggatcagctcaactctcttggggcagcagacttcggggacacttcattgactattctgggatcaatctctccgtccccttgtgtgcccaaagtcagttcaga

SEQ ID NO: 379919 - DNA, 554 bp, Homo sapiens
aggaaacacacgctgattggtagaatttggaggatactgcrtcaaaatgaattagaattatttctgtatttagtgactcccccaggctttgattgggaagacactgaactcgaaacagtcaccaaggggagacacacggactatcgcatttctcttctggatctagaatctaaaaagcctcactggagaagttttgcagcaactgaagccaccatctccccatctctggatccgcaaactggcaggaaagaaggggctgtgaatttataaactctccttcctcccctatacgtgggcagagacacatatttcgtaagaaatttctttgttaggcactgtttaaaactatttaaaaatcaatttttatttacaaaaatgctatctagtgtcactgcagcttagattcaacgcttttacccttcaaacttaataacaaaatacaccaaggaaaatgacttctccattccctccaacattcatattcaggcaggcgccaagggccagcacttttcatattaaggtaatccacatttgttcatatctcctgcacccaa

SEQ ID NO: 379920 - DNA, 428 bp, Homo sapiens
agtatccaagttgctgtaatgactgtctttttaaggaacgaccttgctagggagagtgcaattacgtaggttgaaatatagccagaacctaatatctctccttttgtaagacgtgctaagacattgttaatgacctagggtgaggacctaggtttgccrgaaagaagagactgaaagaagagagggtgttaggctaaaaggaagcaggcttggcttttccagccttcttatccggcatcaattcagagctggctcagagggacgagcaatagcactgaggttgccttgaaggcctttctcatcaacttggtatattgacttcttttgaagctattcattggcattgctgttgagttggtggggggtgggtgggcttgtctaatggtgtgggggaataaaacgaataattgttaattagattaattact

SEQ ID NO: 379921 - DNA, 573 bp, Homo sapiens
cccttttacttttccatatgcttttctcaagcaaaaggagtttggccccatagccaccacagctggtaatgtgctgagtctctcctgaagccagcragtctcagaggctcacccaagtccctcaatgtagaacctgggtatcgctgctggttatttagggcccaagggcccttcagttagcaggtgatgaatgctgccaggactaggtccttcccttcaaggcagtgggttctcctcttgcccagggtgtgtctagaaatgccatctggaagctagggcatggaatgggggactcacgattctgactggcgccctatcctactgtggctgagctggtatcttagacgcaagacaaattcctccgcactctccctctcctctcttcaagcagaaggaagaggtttcctttgaagcctcaagctgtgcagcctgggtttggatcagggggtggtgtgatgccgacactcctttggctgtcccagctggtgtcttaacacgttgtatgcaccctcagtccactgtctcggcccagttcaccactaggtcttgcctaagagttgcagtccttatgga

SEQ ID NO: 379922 - DNA, 573 bp, Homo sapiens
cccttttacttttccatatgcttttctcaagcaaaaggagtttggccccatagccaccacagctggtaatgtgctgagtctctcctgaagccagcgagtctcagaggctcacccaagtccctcaatgtagaacctgggtatcgctgctggttatttagggcccaagggcccttcagytagcaggtgatgaatgctgccaggactaggtccttcccttcaaggcagtgggttctcctcttgcccagggtgtgtctagaaatgccatctggaagctagggcatggaatgggggactcacgattctgactggcgccctatcctactgtggctgagctggtatcttagacgcaagacaaattcctccgcactctccctctcctctcttcaagcagaaggaagaggtttcctttgaagcctcaagctgtgcagcctgggtttggatcagggggtggtgtgatgccgacactcctttggctgtcccagctggtgtcttaacacgttgtatgcaccctcagtccactgtctcggcccagttcaccactaggtcttgcctaagagttgcagtccttatgga

SEQ ID NO: 379923 - DNA, 573 bp, Homo sapiens
cccttttacttttccatatgcttttctcaagcaaaaggagtttggccccatagccaccacagctggtaatgtgctgagtctctcctgaagccagcgagtctcagaggctcacccaagtccctcaatgtagaacctgggtatcgctgctggttatttagggcccaagggcccttcagttagcaggtgatgaatgctgccaggactaggtccttcccttcaaggcagtgggttctcctcttgcccagggtgtgtctagaaatgccatctggaagctagggcatggaatgggggactcacgattctgactggcgccctatcctactgtggctgagctggtatcttagaygcaagacaaattcctccgcactctccctctcctctcttcaagcagaaggaagaggtttcctttgaagcctcaagctgtgcagcctgggtttggatcagggggtggtgtgatgccgacactcctttggctgtcccagctggtgtcttaacacgttgtatgcaccctcagtccactgtctcggcccagttcaccactaggtcttgcctaagagttgcagtccttatgga

SEQ ID NO: 379924 - DNA, 573 bp, Homo sapiens
cccttttacttttccatatgcttttctcaagcaaaaggagtttggccccatagccaccacagctggtaatgtgctgagtctctcctgaagccagcgagtctcagaggctcacccaagtccctcaatgtagaacctgggtatcgctgctggttatttagggcccaagggcccttcagttagcaggtgatgaatgctgccaggactaggtccttcccttcaaggcagtgggttctcctcttgcccagggtgtgtctagaaatgccatctggaagctagggcatggaatgggggactcacgattctgactggcgccctatcctactgtggctgagctggtatcttagacgcaagacaaattcctccgcactctccctctcctctcttcaagcagaaggaagaggtttcctttgaagcctcaagctgtgcagcctgggtttggrtcagggggtggtgtgatgccgacactcctttggctgtcccagctggtgtcttaacacgttgtatgcaccctcagtccactgtctcggcccagttcaccactaggtcttgcctaagagttgcagtccttatgga

SEQ ID NO: 379925 - DNA, 601 bp, Homo sapiens
gcaagataaaataatagattttaatagtatagaatatgaatattacattgattttttaaaaaattctacattgcaactaatttttaagaaaccatgacttataaagttttagtatattatttaaaaatcatatctgaaattatcttctaagcctattaaaatggtttgtcttgtccaaactacatttaggtgtgaggctagattttcttcatayattttaactaaaataatatattttaactggttatacacagaaacatatatgaaaatatagctgatttatttatttatttatttgagacagaatcttgctctgtcacccagactggagtggagtgatgccattttggctcactacaacctccgccttccaggcccaagggattctcttgcctcagcctcccgagtagctgggattacaggcagctgccactgtgcccggctgatttatgtatttttagtagagacagggtttctccatgttggccagtctggtctcaaactcctggcctcaagtggtccacctgcctcggcatcccaagtgctggggttacaggtgtgagccaccacgcctggccctagctgatttctactcgtttaa

SEQ ID NO: 379926 - DNA, 601 bp, Homo sapiens
gcaagataaaataatagattttaatagtatagaatatgaatattacattgattttttaaaaaattctacattgcaactaatttttaagaaaccatgacttataaagttttagtatattatttaaaaatcatatctgaaattatcttctaagcctattaaaatggtttgtcttgtccaaactacatttaggtgtgaggctagattttcttcatatattttaactaaaataatatattttaactggttatacacagaaacatatatgaaaatatagctgatttatttatttatttatttgagacagaatcttgctctgtcacccagactggagtggagtgatgccattttggctcactacaacctccgccttccaggcccaagggattctyttgcctcagcctcccgagtagctgggattacaggcagctgccactgtgcccggctgatttatgtatttttagtagagacagggtttctccatgttggccagtctggtctcaaactcctggcctcaagtggtccacctgcctcggcatcccaagtgctggggttacaggtgtgagccaccacgcctggccctagctgatttctactcgtttaa

SEQ ID NO: 379927 - DNA, 544 bp, Homo sapiens
tttgggtcccacccagagaggctggaaactagacactaggaacagccatttgagttaacaatgatgcctacataatggaacccaaataaaacctgtagtgatggggctcaggtgagcttctctggttggcaatcctgtgtgcatgctgtcacacgtcaataccaggagagtaatactgtcctgactccacagagatagggcaatgaggacacttcacattaggtgcttccctagactttgccctgtgtgcttcctcctttgtctaattttaacttttattggtttcagtgtaataaatctttgcaagaagtacaacagttctcggtgatttctgtgagttttctagttagtgtatgatcaaacatgagcatgctttatggggagcccccaaattgcaatttgtgtgataaataaaagggaaattgtgtggactgctccctttaactttgcagttggctaaactcttcataccacctacacttatccctcaacttcattacaaagtaaaaaawaataaaataaatcaaaacaaaactattttgtt

SEQ ID NO: 379928 - DNA, 594 bp, Homo sapiens
atgagttccttagtcccaaatctaacaaaagaaaaattctaaattaagaaaaattattatgtttgaacgggaagtattagcagtataaatagataatcctatctaattaggtttataaaataaattatatgacagctaaaatcctcaaaggatttttttattggattggacaaattgattctaaaatattagaataaataaaccaacaatagaaatcccaggagcagactcaggtatacatatgaccttgatatatgacagaggtagccctgcaaactagtacagaaatgatggactatatcatatgtagcattgggaccactggatattcacattggaaaagtaattagatgcaacaatactttcagatggattgcagttataactaaagaaagcaaatcttccaagccttcagaaaatatagaagaatctattgataayatttggatagaaatcatttttaaaataagatacaaaaattacaaagagaaattaggataagttcaactcacaaaaagtataaaattcaatgtaacaaaaccattaataaaagttgaaaaaagcattatgttggcaatatctatttgcaacacc

SEQ ID NO: 379929 - DNA, 594 bp, Homo sapiens
gccctcacttcccaatgcttcatcccattcaagcttcgtttcttaacatttccaaggagaacatacttaacagtatggaactgttggttggctaatctatttgctgtggtggtatcttaggaaaataagagtcagcaaatatctgggtgacttttataaggagatagagaaacaaatcaatattcaacagtacaagtgaggactggaaaatgtcctagtgaagacatattttcagtattggttagttctttctactcagaatmtctagaggaaaagaactaatcttacatgtaatacagatcgttggactagaaatcatagataacctggatttatgccccaactctatttctatgagagctgggattcttgttggtggatcaaatgacttctttgggcaattccctctttggcaataaaataaggataacagtccctctccacctgcctcgaaagagtgctaaatctcaagtaagattatgcatataaaagcatactgtaagaagcaaacactcacaaaggatactgagtacttggtacttgggccacggagcttgggctaacatcattcaccaattgtcttttaaaaaaaga

SEQ ID NO: 379930 - DNA, 600 bp, Homo sapiens
ctcatggctctggagaatgggacgtccaagagaatggcactacatctggtgaggaccttcttgccacataattccatgatggaaggtggaagggcaaatcagtgcaagagacattgagaaaaagtggatctaacacccacaataactaacctgttctggtrataatgacactaatccattcatgagggcagagccttcttgacctaatcatgtcttaaaggccccatctcttagtatgattacaatggcaattaaatttcaacatgagttttggagggggcattcaaaccagagcagataccaagttaaatatgaatttcatgtatacaacaatttttaataaatatattccacaaaatatatgggacatacttgtactaaaaaagtattaatgtataactgaatatcccctactttgtgaatatttaatattgcatctaatacaaatgggcatcatgtattgtatctgaaaagcctacttccacctgacttactgaattctgatgttctgcatcttgtcactgccttttgtctgaccttctcctatctcatctttccaactacctgcaagatgaggctttccaaacctcttcactctga

SEQ ID NO: 379931 - DNA, 600 bp, Homo sapiens
ctcatggctctggagaatgggacgtccaagagaatggcactacatctggtgaggaccttcttgccacataattccatgatggaaggtggaagggcaaatcagtgcaagagacattgagaaaaagtggatctaacacccacaataactaacctgttctggtaataatgacactaatccattcatgagggcagagccttcttgacctaatcatgtcttaaaggccccatctcttagtatgattacaatggcaattaaatttcaacatgagttttggagggggcattcaaaccagagcagataccaagttaaatatgaatttcatgtrtacaacaatttttaataaatatattccacaaaatatatgggacatacttgtactaaaaaagtattaatgtataactgaatatcccctactttgtgaatatttaatattgcatctaatacaaatgggcatcatgtattgtatctgaaaagcctacttccacctgacttactgaattctgatgttctgcatcttgtcactgccttttgtctgaccttctcctatctcatctttccaactacctgcaagatgaggctttccaaacctcttcactctga

SEQ ID NO: 379932 - DNA, 563 bp, Homo sapiens
tcattatcaacattattaaatcatagctttacctgaattcaataaatttcaaagacgattataaagctttctcggtgaatatgaccagccacgaggtgagaaaagacatttgggtgtgtttctcaaatgttcataacaacattttctctatagtagccaatttcatttatggggtggtgtagcaaggacctctcaaccaaagattgcctcatcaaaacttgagatactttacaatagccaacactctcagaatgagacccattatttgtggagaacagatgcccttcatcactctagcaactgggttaatatcatcagctccaactctttccagccaatgtaaatccatcatcaagctttggcgaccagaaaagaaacaagcagaaaaaccatttgccaggatgatttaaggcctggcatttagaagttcctcattcaattgctctcttgatgtggctcttggcccttcctcttcttgaagaaagccctcatrtattcactcacaaatggcctacatgtggggatgcacaaaaacaaagcagagagatgttcttttcaagact

SEQ ID NO: 379933 - DNA, 549 bp, Homo sapiens
aataaaatagacaaaatgccacttcaaattacagcttatttttctttatatcaaagtttctgaaaagtggcactgttgacatttggatcagatcattctttgttgtagaggctgtcctatgcattgtggatgtttttcagcctctctgcctccataactcactactcatcagtagcacactcccccacccatgaggacaaacaaaactgcctccagacattatsaagggtcacctggggcaaaatatcccaccgttgaaaaccactgttctataataaagctcatcaaacaaattttattttattttgtacaacacaatagttctgacataatctagctatcgtagctatagattcaggtatgcaatatttagtaattaaggattttccagttttataaagaaacctgttttcagttttataatttcataatagcaccaaagtttatgattaaagatgtagataccagtgtagcaaaaagtcatggtagttaatggttttgaactattgattcgataatcaataaaatttctagatctaaataaaatat

SEQ ID NO: 379934 - DNA, 549 bp, Homo sapiens
aataaaatagacaaaatgccacttcaaattacagcttatttttctttatatcaaagtttctgaaaagtggcactgttgacatttggatcagatcattctttgttgtagaggctgtcctatgcattgtggatgtttttcagcctctctgcctccataactcactactcatcagtagcacactcccccacccatgaggacaaacaaaactgcctccagacattatgaagggycacctggggcaaaatatcccaccgttgaaaaccactgttctataataaagctcatcaaacaaattttattttattttgtacaacacaatagttctgacataatctagctatcgtagctatagattcaggtatgcaatatttagtaattaaggattttccagttttataaagaaacctgttttcagttttataatttcataatagcaccaaagtttatgattaaagatgtagataccagtgtagcaaaaagtcatggtagttaatggttttgaactattgattcgataatcaataaaatttctagatctaaataaaatat

SEQ ID NO: 379935 - DNA, 595 bp, Homo sapiens
gcttgcccctgccatcccaggcccagtcaagaaggcaccagaggctcacataycatgcttctaaatacatgaagtgtatcaaacaacaagctgctaagaaaaatgcattctatctttctacattgacaaatacacctttatatgataaaataaaaaagctatgtgtacagctatgtttttaggtaactaaaagtcagaaaaatactagacgccttaactattactgcacatcactggaagttctattgttgagtgaagagtaaagaataatttgtaatctacaaatttattaatgtatttgtatacaatgtatttgtatttctattatgtcagcaaaattaccaattatgttgttataacaaaacctcacataatttgtgttctaccaaaaataatgacaatttgtgaacaatattttaatagaagcataaaagtgagtatattttatcaaacaacattaactgcataaagtttaaacatcaaaattattttaacatattgttttaaaattgtttttctaaatgtttaaaattatttaatttaaaaaattataataaatgtttcttaataacatataataattatattatatatg

SEQ ID NO: 379936 - DNA, 599 bp, Homo sapiens
tcactggaagttctattgttgagtgaagagtaaagaataatttgtaatctacaaatttattaatgtatttgtatacaatgtatttgtatttctattatgtcagcaaaattaccaattatgttgttataacaaaacctcacataatttgtgttctaccaaaaataatgacaatttgtgaacaatattttaatagaagcataaaagtgagtatattttatcaaacaacattaactgcataaagtttaaacatcaaaattattttaacatattgtyttaaaattgtttttctaaatgtttaaaattatttaatttaaaaaattataataaatgtttcttaataacatataataattatattatatatgattatattatatatttaatgatatgatatataattatgagaaataaatccttaaatattatttaaataaaactgaaattaatcaattttttgaaaattaaattaaattgatttataacaataaatcaatttacaattctggagtttaatctatatctagtggtcaatgtaagatgttggaatcaaacaatgcctgtcattcattgatctatctgcaatctatctgtattagtca

SEQ ID NO: 379937 - DNA, 621 bp, Homo sapiens
tttggtgctaatgtatatgactaatgcactaataaatattgcaagcaaatcaattgtacttcctaatagcaaggtgaacagcaatagcattktatgcaagatcataggagattgagcactaaacctgaaaaaagatgattctaaccctgacatatcattatttcttgggatttgtgcatctcccttaatgtacggttaatgtaatttgaagttatgaatcttttttatagtcttactctatattcttaaagtaacaaatctcaagttgtaattatagcacagaaagcattcacagaattctgaccaggaaaccaaacactcaaacattttcatccttcctgcagaaaatatataaattctacttatttttcactggaatatatgttttatgtgaataatgtctgacatgtatttgttgttagtaaaattcttagaatctatcccaatcagctcattgtttcttccagggaaacatggagttgaaataagaagaaagaataaacaatggaaatactggttttagctataaatgcagtataattgatcatttcaggactctctgtgcccatggagttgtagtcccagcatcaatttaagtggctgagcaccttacatgaccaa

SEQ ID NO: 379938 - DNA, 621 bp, Homo sapiens
tttggtgctaatgtatatgactaatgcactaataaatattgcaagcaaatcaattgtacttcctaatagcaaggtgaacagcaatagcattttatgcaagatcataggagattgagcactaaacctgaaaaaagatgattctaaccctgacatatcattatttcttrggatttgtgcatctcccttaatgtacggttaatgtaatttgaagttatgaatcttttttatagtcttactctatattcttaaagtaacaaatctcaagttgtaattatagcacagaaagcattcacagaattctgaccaggaaaccaaacactcaaacattttcatccttcctgcagaaaatatataaattctacttatttttcactggaatatatgttttatgtgaataatgtctgacatgtatttgttgttagtaaaattcttagaatctatcccaatcagctcattgtttcttccagggaaacatggagttgaaataagaagaaagaataaacaatggaaatactggttttagctataaatgcagtataattgatcatttcaggactctctgtgcccatggagttgtagtcccagcatcaatttaagtggctgagcaccttacatgaccaa

SEQ ID NO: 379939 - DNA, 483 bp, Homo sapiens
actaagaagtctgtgcctatttaaataactaataggaaaaataagcagaagcaagaaacaagttaagtgtttagcaaagaagtaacatgatgtctctttatttccttttttgtttttaaaatattactctgtcaactgtgtatatgaaatcagagacagaaactagaagttcagcggaaagagtattgaagcaaagcattccagagttagaaagcacaatcaggcaaaggcaaaatcctagaggaaggggtttagggtctggacagaagagaagttaagtgcatgaaaagaatgataattgaaggtgaayactagaaagagtgaggaaaatgaaacaaatggacaatatttctgggtttctggtctgtagttctgagtggagaaagcaagtttgtgagtttatttctctagaatttggggtatattgtttatacatgtatgtttataaagaatgttatttttgcttttccagtgattcaatta

SEQ ID NO: 379940 - DNA, 547 bp, Homo sapiens
aaaaagatattttaatattgagtaaatggaatgttaataagtatgtatatttgcaaatatctaaaaaatagcttttaagaaatgatattcaatctaccctagccagtgagatgtggcayattaattacaatattttaatattataaagattctgatataattcctctttattcccaatgtatctttaataatagatcagctgtagagctttgatttacctacctcacacacttggtagaagtgaatatgcctgtttgcactcattattcactaataattgtgaaaacacattacctttcagcactgagtatgccaatctaaactaaaattactcagttgttctgggatttggggatttgttagttatgatctttgaattggaaaaaaatgatatcatttttctgcatgccaggatattcaactgtgaactccagaaaacagtgatgctaaatctaacttaatcatttgaagtaaaggccagcatgatttctaaaatgttaaaccacttaaaagacatgaagaagtgctgtttttaaaaaccaggcaa

SEQ ID NO: 379941 - DNA, 538 bp, Homo sapiens
ataattttccaaagcaataaaatcagttatcagaattaatgatacataaaattcattttatgcttttacttacattaccttgcttctcttgattatctattttcaaacgaactcctataactctataactccaatgaccctggctgtggcagagaggacaacgggtttcaatatatttctttaaaacatcttcctgtttgtgttcaaaagttgtgtggaacatatatagaaaatgcaatagattacatagtctgctaastctgcaaatatgaaatccccctaaagtggcagttgcacactaagtggccttccctggggttagcagtgatggagtagctggcattacccgctgagtgaatggagcagctgccacttgaaaaatcaagggatgggtccctgttgcttaatgacccttttcataactctcctaaggacacagctcttccctttcttctcttattaaactatgatgccaaatgaaagatatgttgcttaaacaatgtagtctatcattcattctgtcattgagcctatgagt

SEQ ID NO: 379942 - DNA, 609 bp, Homo sapiens
acactaagtggccttccctggggttagcagtgatggagtagctggcattacccrctgagtgaatggagcagctgccacttgaaaaatcaagggatgggtccctgttgcttaatgacccttttcataactctcctaaggacacagctcttccctttcttctcttattaaactatgatgccaaatgaaagatatgttgcttaaacaatgtagtctatcattcattctgtcattgagcctatgagttcttcactgttaaagtaggtatgaagcacctactatgtacaggtgatgccacaaattaaagctactgaaacagagatagcaggtctctgtgttcaaggagactgtcttatgaggagacagacacataatccgcaagacaggaatgaagttctacaattgcacaaaagggagagttaattattctacattaagatgttaagaaagcctccacataggatattcttccgagcttcatgaaaagatagtttttagatacttggtggctttgtcattcattctttgtcatgaatgtatattagaaaaaattacagttattaattgctcaaaaataaagcattcacttttcttagtaaagatgttatttat

SEQ ID NO: 379943 - DNA, 609 bp, Homo sapiens
acactaagtggccttccctggggttagcagtgatggagtagctggcattacccgctgagtgaatggagcagctgccacttgaaaaatcaagggatgggtccctgttgcttaatgacccttttcataactctcctaaggacacagctcttccctttcttctcttattaaactatgatgccaaatgaaagatatgttgcttaaacaaygtagtctatcattcattctgtcattgagcctatgagttcttcactgttaaagtaggtatgaagcacctactatgtacaggtgatgccacaaattaaagctactgaaacagagatagcaggtctctgtgttcaaggagactgtcttatgaggagacagacacataatccgcaagacaggaatgaagttctacaattgcacaaaagggagagttaattattctacattaagatgttaagaaagcctccacataggatattcttccgagcttcatgaaaagatagtttttagatacttggtggctttgtcattcattctttgtcatgaatgtatattagaaaaaattacagttattaattgctcaaaaataaagcattcacttttcttagtaaagatgttatttat

SEQ ID NO: 379944 - DNA, 613 bp, Homo sapiens
cccacgttgaggctaacaatttctttccttttctcctattcaaagggaaaagtattttttaaaccaaattttaagaaatctttcattcacaatgtaaaaaaagttttaattaccccccaaaattaatttatggaaacacaaaagtatcatagcaatggttagcctggaatggaattatagtacaattaaaatttagagttggaaacctctgaatttggttcttcactttaccacttactagctatgtgaggatctaatcttttttgaacctctatgtcttctctcataaaatttgaaaaatactatttaccttgaagggttactgtgaaaattacaactaacatttataaagcaccttctggatacacagtaaatgatcaacaaatgatacctattttatttatttttaacttttccaaaatgtgatatgattatatatttaagaataagtctaagaggacttaagtttttgrcattaataatccaaaagaaatatttgcccactgtatatttcattatatatccatttaatttcaaaagcaatagaagctcaattgttaaaaacaagtcccatttttgttaacactaacagcatctggagccaacacaccag

SEQ ID NO: 379945 - DNA, 533 bp, Homo sapiens
ttgcccatgagttatcactggacagaaaaatactagaggatactgtaatgaactcctgtattaaaaacatatctccctttctccatcatgtatttgcaatcccaacttgtcacagtaatctgggttgattacctcagccgatagagaaattatttcttctgccacctggcagaagagtccaaactagattttaaatacagcagagcataatttggcataaatggaaagcaaaaactctacaagtagatgatgagagcgatatggagaagggtccatccttattcatcccttaattcctagacttgtagtttctcaatatgaggaaaacaccatcctgtactgtgtattttgatattaccttaaccattcaacatggtttgtccaagctgcagatctagttgagctaagtcttcagtaggtccttccaatgttctgttagtcatctgcatctctgtgaagaggtacatgatatatttsatatgatcctacaggtttcagcccattaattcattcctgggctataaatgtgtctt

SEQ ID NO: 379946 - DNA, 632 bp, Homo sapiens
ataatagctgaatcaatattggcgcattattattaaggaaatttatggagtttacattagggtttactctctctgctgtatagttctgtgggttttgccaaaagcataacgacatgtatccatcaatgcagtataacacaggatagtttcaccagcctcgctattgcctgtgctctgcctattccttaatcccctctcctgcccagsccctgctaactactgatctttaactgtcagtagaattttaccttttccagaatgtcatgtaattggaatcatatagtatgtaggtttaacagattggcttctttcattgtaagtttcttttttaattaaaaaatatgtcaaatctttttattgtctctgccaattgatattatttatttattttgagatcttggaaatttttcttattattttattagtgtcacttgtataaatggatttttaattttttctttttttcactaattatgaagacacacatttttaacagcataacatttttaaaagctttttagcacctcttatagcttcaaattactcattagttacttagacttataatgaaaatgccatgtatggtgcaatttttcttttaaatatatttattactttagaatatcatagca

SEQ ID NO: 379947 - DNA, 631 bp, Homo sapiens
agggaaggtggtaatatcagcttttacatgtccaaactaatggtttaatttctgtatttcttggcatatgttagttacttaaaagagaaatttcctccaatttgtctctgtctctcctgctccagcattctcatctaaactccgagtacttattttttctccatattggaagtcttacaacctaagtacttaccacagttttagatttgcttcaacacataattagcctttcaaaaaatagtttaaacaatttagaatacatttgtctctaaatgatgaacaaagaaaaggttatttctaccataatttgaatatctgaaaaatgataccaaaaattcagaaattagtmtttataattgcctttttagagaaaattaatttggcaatattcaaattaatttaaaattctaattgtactttgccaaaatgtgtttgcctctatagcattaaacatccttctcttttaatttatgcacagggataaacgcagttgtaacaaatccctcaaagtatatattttattcctcagttctataggattagtaaattaaccagcaagccagttgcctgtttttgaaaataaagttttattgaaacaaggtcatgcccatttatatacctactttctgtg

SEQ ID NO: 379948 - DNA, 631 bp, Homo sapiens
agggaaggtggtaatatcagcttttacatgtccaaactaatggtttaatttctgtatttcttggcatatgttagttacttaaaagagaaatttcctccaatttgtctctgtctctcctgctccagcattctcatctaaactccgagtacttattttttctccatattggaagtcttacaacctaagtacttaccacagttttagatttgcttcaacacataattagcctttcaaaaaatagtttaaacaatttagaatacatttgtctctaaatgatgaacaaagaaaaggttatttctaccataatttgaatatctgaaaaatgataccaaaaattcagaaattagtatttataattgcctttttagagaaaattaatttggcaatattcaaattaatttaaaattctaattgtactttgccaaaatgtgtttgcctctatagcattaaacatccttctcttttaatttatgcacagrgataaacgcagttgtaacaaatccctcaaagtatatattttattcctcagttctataggattagtaaattaaccagcaagccagttgcctgtttttgaaaataaagttttattgaaacaaggtcatgcccatttatatacctactttctgtg

SEQ ID NO: 379949 - DNA, 619 bp, Homo sapiens
caaaaaagtgcattttgcctgatatataatactttatatacaatcaacaacttgatattttacccgctgtcttataaatttacaaaggagaaacatggtaattattaatgatttgttctctctatgctccaggactatttaatccatcagtaaaaattgtgtgttttacttaccaaattaccttaatctgaccctctgcctgtatcctagaaaagataatatcatctctcacctcaacttctttaactatcacctaatcttttaaagttatgggtagaatcaagcattcctcatctgaaagccctataatgagtttctatttggttctaccgaaataggaacttcttgccttgacctacctttccaacatcatctcacctctatctaaccttagaatattctcacatcccgcatttgctcaatcacagtcctgacttttagttgtcaatatttcccaaagttttattttacctttgctttatcttctggatatctgaagaattcctggagccaccattactttggctccatgctttcyttcagttattcttttgaaacttatctttttggtgtggccttccctcagttaccaagcccaatgacattggctcatgccacg

SEQ ID NO: 379950 - DNA, 547 bp, Homo sapiens
tgacttgtggaagaggtttttttccttagagaataatctctctgaaaaacttggagccagaggaaagtcaggaaaaggggggaaaatggaggcagagaaattaggaggcttcagcaagattttagacaaaaatgactattgttgactaagtcagaggaacagctcacttttaggacatccatttaggaggcaaactggaagtacatcatagacagttttagtactgaagtcaaagttaacatatcaaaactgggttcttacttaatgtacctatgacctcctacttttaaaaaaattgatagcagtggctgctctagatagcctgcctctgccttcaagctggaggtagttgaggctgtgtgttccatgtagctggtgggagccacaccccttcccagttggggcgggagcttcacaggtgcctcgggagctccayggttgccacagcagctgcccaaaccactgctgtagacccaggcctcccactccacagagtaggccggatccccaccctcctggacagggctgcagccacccaaatggtgac

SEQ ID NO: 379951 - DNA, 534 bp, Homo sapiens
taacatatcaaaactgggttcttacttaatgtacctatgacctcctacttttaaaaaaattgatagcagtggctgctctagatagcctgcctctgccttcaagctggaggtagttgaggctgtgtgttccatgtagctggtgggagccacaccccttcccagttggggcgggagcttcacaggtgcctcgggagctccacrgttgccacagcagctgcccaaaccactgctgtagacccaggcctcccactccacagagtaggccggatccccaccctcctggacagggctgcagccacccaaatggtgactgtggattggagcccctgtttgctcttgggaggcctggagccagcaggagtcctgcgttcctgggcacagctgcagctgtccaaatggtggctgcagactcaggcattcctgaacacttgggagcccaggaaggtctctttgccctcacagcctccaaagtgccagcttgcactgcctggctccttcctactgtcagcacccactcctatcctagggtaaagt

SEQ ID NO: 379952 - DNA, 586 bp, Homo sapiens
tttttcccttgaattgcatttgctctattgccaaaacatttagagagagtttattttgccttttctaatccaaaataagtatatgtaaagggttaacaggatagggcattcactcattcaaytgaagttcattgagaactctatttgtgttagtcactattttatgcaccacgagaagttagaacaggtaaaacactactttaaaattattcattttctctttttgcatttgaaagtaaacagaaagaaaacatgaacattattctgtttacccatgaattttatttatttatttattgttctctagttctagaatcaaagtctcgagtatgagtaattagaattgccaaattgattttaataaaaagtctcattgtaagaccatagtttggaattcagaagaaaattgtttctataaactgtgggtaagttattagacaagcacacaaatgccaattttgcagttcattttgtgttattctttcaaagaacactgggctgagaattataaaatatgattcaaatttctcattttctacttgctgcgtgactttgtgtgactcagttgatctttgtcagttgcacg

SEQ ID NO: 379953 - DNA, 547 bp, Homo sapiens
tttggtggtttgctgtcagtcttcagccttctttggcttataggtacattactccaattttccatcttcacatggcattctctttgggtctttctctgtcttccttgaccatcttcttataagacacaactcatattggactaggggccctccctactacagtgtgacctcaacttattacaattgcaacggccctatttgcaaataaggttacatgctgaaggttaggacttcaacctaastttcttgggggcacataattcaattcataacataaatatttaaatactatactgattactagtgtataagttatggtacaatatagataaactgttcccaaaaggaaaaaaatgtatgtcaaaagaaactaattttctttgtccatacctaccatcactaatctgatgaatccatactaaccacaaatgactttcattcctataataaacctgtgaggtattcatagaaccatttttttacataagtggactgaatctcagaaaagtattgactaatttgcttaacattataaaactggtaaaat

SEQ ID NO: 379954 - DNA, 463 bp, Homo sapiens
aagtgtaatgtacacagggctttggacaccttccaagtgacaggggcataaggaacacatgacagttgatccttcctctggtcaccttgggcaagttccttcccctctccagggctcaagtccctcctcttaacatgtgggggctggaccagaagcctcgaacatcaccaggaatgtcatcaacctgtcctgccctcaaaacagtcaagaaaggaaacaggccgagcgyggtggctcacacctgtaatcccagcactggcactttggaggctaaggtggaaggaatgcttgattctaggagttcaagatcagcctgggcaacatagtgagactctgtctccaacaaaaataatacaaaaactagcccggtgtggtggtgtgtgcccatagtcccacctactcaggaggctgaggtaggaggattacttaagcccaggaggttgaggctgcaatgagctgtgtt

SEQ ID NO: 379955 - DNA, 463 bp, Homo sapiens
aagtgtaatgtacacagggctttggacaccttccaagtgacaggggcataaggaacacatgacagttgatccttcctctggtcaccttgggcaagttccttcccctctccagggctcaagtccctcctcttaacatgtgggggctggaccagaagcctcgaacatcaccaggaatgtcatcaacctgtcctgccctcaaaacagtcaagaaaggaaacaggccgagcgcggtggctcacacctgtaatcccagcactggcactttggaggctaaggtggaaggaatgcttgattctaggagttcaagatcagcctgggcaacatagtgagactctgtctccaacaaaaataatacaaaaactagcccggtgtggtggtgtgtgcccatagtcccacctactcaggrggctgaggtaggaggattacttaagcccaggaggttgaggctgcaatgagctgtgtt

SEQ ID NO: 379956 - DNA, 537 bp, Homo sapiens
atttatttatttattatttatttatttatctatcttttgagatggagtcttactctgtcacccttgctagagtgcagtggtgcaatctcacctcactgcaacctctgcctcccaggttccagtgatgctcccgcctcaacctcccaaatagctgggattacaagcgtatgccaccatgcccagctaattttgtaattttagtagagatggggttctaccatcttgcccaggctggtctcaaactcctgacctcaagtgatccgcccttcttggcctcccaaagcgctgggattacaggtgtgagccaccgcacctggacccatacccagtggaacattttaagagcccttcatggatcacctttctttagagagaactgttcttttttttttttcttttgagacacagtctcactctgtcgcccaggctgaggttcagtgtctcaatctcggttcactgcaacctccgcttccagggtcaagtgattctcacgsctcagcctcctgagtagctgggcacatgccgccacacctgact

SEQ ID NO: 379957 - DNA, 544 bp, Homo sapiens
cacgttaccttgcaccatggtgacccaaaaaggtacatgcacccttcaaggcttgtgggctgaatttaaggggtctctgtgactggaaggggtgcaggcagccctggccatgaaaaggggctggctgctgccttgttctgcttattcctgaggcctgggrctaagcctttccaggccgaagaggcctccaatcagctgacctcctgtctagaacagaagctttgcctgagcctagcccctaagttatgattgctgagaagttctccccctcatcctgctgttttttatgacacttacgtaatcacagattatatttagtctacagcccaaggttggtgagatgggaaccacccagcacagcgggatctccttggaacctaaatccagtgatggaatcttattgtccacagtcttttgtggtatgtgctaccaccgaagatcctctcctaacctatcatgtgttcaatacgtctcagctcctagacttgctgaagccgacggaataaaagaacctctcaacactggggccaatactgacatgatg

SEQ ID NO: 379958 - DNA, 636 bp, Homo sapiens
ggcccctttgttaccactgatattagtgaaccgtgtccagcttcatggtggtggcattgtgggaaggaacacgaggtccttactctgattgcagctgtgttcattctggctaggaatttctgacagggaataaaattcagggccttcagctgtctagttgtgtcttgaggctatacaacttgaagttttgccaaatccctccccttcacccttcatgggtttttggcaattggttacagggcatggaactttgcctgtaatcacatggcagggaccaagaattctaggttctttatcatctgcaggtgcagcccctcaggtattatgcagctgcagtgaggggtgtttaaagcagggaaccatactgactagagtttagacaagtgattctcaaagttttgtgtgcgtcagaatcaactggagggtctgtaaacatatagattgctgatctctgacccctgagtttctgatccattagctgtaggtggggcctgaaattttgcatttccagcaagttcccaggatatgatgttgytaatccagatacctagaaatatttctctattaatatttgtattgtgtcctctctccataggattttaccactcaaaaatctttttattaaccaatatgata

SEQ ID NO: 379959 - DNA, 629 bp, Homo sapiens
ctgcaaataggaatagtttgactttctctcttcctattcagatgccctttttctctctctctcttgcctggttgtgctggctaggacttccaattctatattgaataggagtggtgagaggagtcatccttgtcttgtgcttgttttcaaggggaatgattccagctttccccagctaattaattttttttttctcagagattaggtctaattatgtttcccaggctggtctccaactcctggcctcaagtgatcctcctaacttggccttccaaagtgctgggattacaggtgtgagccactgtgccctgctcaaatccatgaasttttgagagtggagatgtacgtgactttcttatcagaaagctaagacctgttccatgtctgagtctcactgctcataatttctttgagtcatttgctgacatgatcctgctcacacccagagaaagctgggtggcactgtggaaggaatcatggagtgagagcccagaaacataaggtgtagactgtctgggccctgtgagcaactggtgatagcccagatgctggacttccctgctttattttatctgtaaaacaatcttaatagtatctacttgtgttaacttccaatggctgatgtaaca

SEQ ID NO: 379960 - DNA, 552 bp, Homo sapiens
gtgaaccctattgtgaactgtgcatgtgagggatctgggttgtgcactctttatgagactctaactgacacctgatgatctgaggtggaacactttcattccaaaaccgtcccccaaacaccccaccatctgtggaaaaattgtctcccatgaagccagtccctggtgccaaaaatgttgggtgtctgtttgatctgttgatagtttctttygctgtgcagaagctctttaatttagttagatcccatttgtcaatttttgcttttgatgctattgtttttggcatgtatgtcatgaaatctttgccaattcctatgaccagaatggtattgcctaggttgctttccagggtttatttagtttggagttttacatttacgtcttcaacaaatcttgagttgattatggtataaggaaggggtctaatttcagtcttttgcatatggctagccagttatcccaacatcatttattgtatagggagtccttaccccataacttgtttttgtcaactttgtcaaagattagatggttgtaggtgtacagcattat

SEQ ID NO: 379961 - DNA, 593 bp, Homo sapiens
acagcggtcatataatcaaaaattgcaaagatatacaccttgaccctgaaggtctccaaaacatggccacaaggataaatgtagtagaccagatgagggcctcaatccaagaaaagcatcatagagagatgaattttcagctaaattttgaaagatctgtggggttgtgggagatacacaaataactatcagagtactgctgactcgcctttcaacattcctaggcttgtgtctagtcctaatcacacaaatttaaatgagttttagagaaactggaaagatccaagagatgttaaaatttgtccagtagatggaatatcagcattatgaacaaaaattaaatggagttgcttcatttcacataaaaaatacacgtgtgctatgttcaagttcttctttgaaagtacgtaaaatatttcggaaggaaattaagttactgttcccagtgaggaaaaaagatccaaattggaacagaattgatacacaaaaggcagactctatgactttcaagatcataaacgctgaaatwggctatcagatcaggaactaacttccatctctaggcacaatggaacagaacagagtcctcagaa

SEQ ID NO: 379962 - DNA, 552 bp, Homo sapiens
tttaaattacaaaatatttttaaactgytagtattagatatacacatataataaatacctacatgctaataagaccaagtatgaattaatgaaatagcatgattcacagattaattttttaaaatctcttctggccttctaatgtaatatgacaagtggaacacatatgtttatctcctttacctcctgaggcttcattaaaatgatgatagtgcttttttaaggtataagccatcaactacaaatatcacaggacagaggctattagtaaatgagcaatttcaataaatcaaatgagcaattcactaaaaaatgcattacaaatctatttataaagtttaaaagcaggcaaaactaaataataattgtttagtaatacatacataggtggtaaaactatttttaataacaaaggaatgattatcacaaccttcagtgtagatgttacctctggaggggaggggcacatgatgaagagggagaacacaggaacttttatgctgtttaaccaaggcaagaggtgcatgggtattcattttgttatacatttat

SEQ ID NO: 379963 - DNA, 609 bp, Homo sapiens
aattttttaaaatctcttctggccttctaatgtaatatgacaagtggaacacatatgtttatctcctttacctcctgaggcttcattaaaatgatgatagtgcttttttaaggtataagccatcaactacaaatatcacaggayagaggctattagtaaatgagcaatttcaataaatcaaatgagcaattcactaaaaaatgcattacaaatctatttataaagtttaaaagcaggcaaaactaaataataattgtttagtaatacatacataggtggtaaaactatttttaataacaaaggaatgattatcacaaccttcagtgtagatgttacctctggaggggaggggcacatgatgaagagggagaacacaggaacttttatgctgtttaaccaaggcaagaggtgcatgggtattcattttgttatacatttattgtacgcatatacattattatatatgtatatcacattctcttgaatgtgacttattttcctctaaaataattaaatttttaaaaaatactgcattcataaaataactataacatggtatgaaagaggaattattgaattacaagaataaaaactttggaaatcaaaata

SEQ ID NO: 379964 - DNA, 558 bp, Homo sapiens
aaaagattatcacagaaatgctaatagataatttccctaagatggatccagtcttcagactaaaagaactcattctgtatccaggacttaaatgtgtcctggaaaaaaatgttatatatctaaggataaagagaagacccaaataactgccaaggagaaaatacagctcacatgcaaaggaataagagtcaaagacgttagctttctcatcagaacacagaatgtggaaagtcaatgaagaaaggtcgtcaaagttcccaggaaaaaattattttcaacmcatatttctataactaaccttataaccactgaaaagaacatcataaaaatgttttttaacatgcaaggactcagaagtttactcaaatgcaccatttcttagaaataaaaatgtatctcaagaaaataggcaagtattccatcaaaacaaaggaagaaagcataatggcctcagaaacagtgatacccaaactaagagaggaatgaagcaaaattccaggatgacatccacactgctgttctagagagtgctagtaaagattggggccagagaacaga

SEQ ID NO: 379965 - DNA, 541 bp, Homo sapiens
ccccagggctgctgcttattattgacaacataagtaggtggtctagaagtaaatgaatatatgggaagagcacagcagctacacgtttcccaactccatgggggcatcattcacataaaagacatgtgagcagtgacctctagaattgtacattaccctcagtccctgagggtttgagattttttgagactgtatactcttcagcctgtcacactcataaactgcctccttgttcatggatggaaaaggttgtcccttaaacactgtgatttgaggaagaaagaaggatccatcttcttgataatccccctccccacaagttaaaaggctgaaacttcacctcaaatttgttccctcagactgtagtttttctaacttcaagtatctttttatgacttttattgtttacacttaaatattatccacttattgtagaatagtgctgcaatgaacatayatgtgcatgttctttatcacagaacagtttatattcctttgggtatgtacccagtaatgaattgctgagtcaaataattgttct

SEQ ID NO: 379966 - DNA, 620 bp, Homo sapiens
ccactacctcttaccatgctaaaaaaaaaaagggggaggcgggtgaatatcttcatgagtgtggagtaaagatttgtttacactaggccaaaatatgtgtgtgtgtgtatatatatatataaactttaataaattttacttcatcaaaattaaaaactataactattcaaaaacaccattatgaaaatgaaaaggtgatccacagattgggaggtaaatctttccaaaacatgtatctgactagtattaaagatatacaaagagttctgtatcaatcagggcttgattaatgaaacagaaccactaagagtcccatacatatgtgtrtgtatatatatatatatatatatatatatatatatatatatatatatatatgtatataaacatatttcattatatggatttgatctcatacatttatgggagactgtctctgtgaaactgttgtctgtacatctgatactagagtctgagatctgctaataaagcagtcaggaagagaaattaaatgcaatgtgagagaagcaagaagaaactcacctataaggatgggctgaaatctccaaggacagactgtaccaatctctcaccaacttcaatcaagcttccaacttcaa

SEQ ID NO: 379967 - DNA, 620 bp, Homo sapiens
ccactacctcttaccatgctaaaaaaaaaaagggggaggcgggtgaatatcttcatgagtgtggagtaaagatttgtttacactaggccaaaatatgtgtgtgtgtgtatatatatatataaactttaataaattttacttcatcaaaattaaaaactataactattcaaaaacaccattatgaaaatgaaaaggtgatccacagattgggaggtaaatctttccaaaacatgtatctgactagtattaaagatatacaaagagttctgtatcaatcagggcttgattaatgaaacagaaccactaagagtcccatacatatgtgtatgtrtatatatatatatatatatatatatatatatatatatatatatatatgtatataaacatatttcattatatggatttgatctcatacatttatgggagactgtctctgtgaaactgttgtctgtacatctgatactagagtctgagatctgctaataaagcagtcaggaagagaaattaaatgcaatgtgagagaagcaagaagaaactcacctataaggatgggctgaaatctccaaggacagactgtaccaatctctcaccaacttcaatcaagcttccaacttcaa

SEQ ID NO: 379968 - DNA, 620 bp, Homo sapiens
ccactacctcttaccatgctaaaaaaaaaaagggggaggcgggtgaatatcttcatgagtgtggagtaaagatttgtttacactaggccaaaatatgtgtgtgtgtgtatatatatatataaactttaataaattttacttcatcaaaattaaaaactataactattcaaaaacaccattatgaaaatgaaaaggtgatccacagattgggaggtaaatctttccaaaacatgtatctgactagtattaaagatatacaaagagttctgtatcaatcagggcttgattaatgaaacagaaccactaagagtcccatacatatgtgtatgtatatatatatatatatatatatatatatatatatatatatatatatatgtatataaacatatttcattatatggatttgatctcatacatttatgggagactgtctctgtgaaactgttgtctgtacatctgatactagagtctgagatctgctaataaagcagtcaggaagagaaattaaatgcaatrtgagagaagcaagaagaaactcacctataaggatgggctgaaatctccaaggacagactgtaccaatctctcaccaacttcaatcaagcttccaacttcaa

SEQ ID NO: 379969 - DNA, 526 bp, Homo sapiens
agagaggagtaggccacttctacaggccaagaggattgaagggggtttgggattcaagatattcaagtgaatctacttggttatcttcatccagtgtttcagggctcagtctgggctgggaccttaccattacagactttcctagtttgaggattcagcctttatactgccactatccttgcagtaaactctgggccagatcctcagttgtgtttccccccgttagctacaggagatgaaaggctatttgtatgctgccaaggaatgtgtctagatttcatatttgggttttattggtaattaatcaccctccgactttcactttctttctcaaatgcatttattgtcccagaaacagctattcaattccccattatttataactatcatgcatataattactctgtgcccccaatttttytaatgcctgggattctgccaatgccagtatgttgcttcttccacattcccagttagtttgccattgattaagatcttatttgctttcctgtaacatgccatgggc

SEQ ID NO: 379970 - DNA, 576 bp, Homo sapiens
aacacactacccttcataccactcttgtatgtgaattcattctattccttctctaattatgcattttcagaaagttaatgtttaacatttcccagaaaagaccatttaaaccactagacattccagacactttagcagttgcttcaagcacttcaaaaagttctcatataaaaacatggatttgatctttgaaggctcctctggggcacaagyagtacctcctgaattgatcagaactttctgccccagatcctttaatcctcattataggaaaagaaatatctacttgcgaatactttttgaggctcaaatggtgatgttctaaattcaattaagatatatgaatcccaagacaacgaagtacctgagtatggtattatgaagttataaattaccaatttctcatcaccacctttaaaagcaagtttaaaaaaatgaacctacttgcaaatgaacctgtaaaataccaccagccaagcatgggattggaataaagcatttcatcaaaatgtccatagatcatttcttctagatgagtatcttgcagattgtcacacagtgcacatttttatagcc

SEQ ID NO: 379971 - DNA, 348 bp, Homo sapiens
gctcctcaaataccaccaaagtgggagcccgggcaggggaggtgcckagagcaagcgagggctctgaggactgccaggatgctgtcacctctcaatataagcatcctacagtttccacaccaggacaaataagcaggaatcccttaactctaagagccatggtggggaggagggtcggtcgggataccatgtgttttttctctgttctaaaagccgcatccacatgaataggcttctgttttaaatgctggatattaataacatgttttaattagttctacaagttaggaatagctgaaagctctatatttgcatttaaaaatttgcacctagttggccgggcacggt

SEQ ID NO: 379972 - DNA, 570 bp, Homo sapiens
tattcccctctttgtctactctcttccctgactacacgttcctggtctatttctttgaaactctggccctgttagacagaaagctctgaccttggttgagacaggaaggctacagggaggtggctgtgaagaaattacattccctcagctggaataaggttttgataaagttttyctttgttatggagaatgcactggatatatttcacagtcattgatcttcctctatccctaccagagccaggaagatctttctcagatctttactgtgagaacctcatggaatttctgtaggtaaaactcaagaaagtgtggagaccaaccccatgcacatactgtggtccccagaagtttcaaattatcaagctagaccatgctcagtctccaaaaattaatcaaaattaatatttaagtgttcctaccagtattaacttcagcagttattctctaagtatgcagatcttcaagtatgcagatcttggctgtgattttctgtatctatgggtcttttcagatttcaggttggctgtttcctttgcaacttcagttacctagtgggtctaagtcatt

SEQ ID NO: 379973 - DNA, 570 bp, Homo sapiens
tattcccctctttgtctactctcttccctgactacacgttcctggtctatttctttgaaactctggccctgttagacagaaagctctgaccttggttgagacaggaaggctacagggaggtggctgtgaagaaattacattccctcagctggaataaggttttgataaagtttttctttgttatggagaatgcactggatatatttcacagtcattgatcttcctctatccctaccagagccaggaagatctttctcagatctttactgtgagaacctcatggaatttctgtaggtaaaactcaagaaagtgtggagaccaaccccatgcacatactgtggtccccagaagtttcaaattatcaagctagaccatgctcagtctccaaaaattaatcaaaattaatatttaagtgttcctaccagtattaacttcagcagttattctctaagtatgcagatcttcaagtatgcagatcttggctgtgattttctgtatctatgggtctttycagatttcaggttggctgtttcctttgcaacttcagttacctagtgggtctaagtcatt

SEQ ID NO: 379974 - DNA, 595 bp, Homo sapiens
tttgcttagtctttgatgatgttgcattcattttagagcccttctggaaggaagttccagatgctttataaatattaacacatttatgttgaaatgaccactccctttgtttcataactgaactaaccaatattttcattttttcctatgaattccttattgcctctttatttttattttttggtttacttacatggtttcctctctgtaagagtgtattatttaaggaaagggaccatgtcttatcgatttttgtatccccaggacctgatatagaacctggtacttcatcagcactgtttctgaaatggatgaagaaaaaatcgtatatggcatttagtataatgctttaagcatgaaaaagtagaaatgcttttacaaagtggttctatatgagtttataaataaatacattttagtttaagtcctatgaattaatctacaccctcttgaattccccaccctsatcttttcttccagacataattggaagtcagtaataaattccaattcataaaacaaatctctagtgttacatcctgtctgccgggtcactagctttccaacaatcatctgaggtagtcggggtgtagta

SEQ ID NO: 379975 - DNA, 589 bp, Homo sapiens
tgagaaaataagcaggctggccttgtatgactacaaagaaacattcaactcaataacattgcagcagtattctcaaaagccacaaagaaagtataacccaaacattgtattcttagccaaactattgtgcaagtataaaggccattgaaaaatttttctgaatatgtgagaacccagagaatatattttccatcacttctcttacataaactgttagaggacaaacttcagctgaccaagagttgtctggaaataccatgcaaactgactagcaatgactattaattccttttatttgtggtaactaaaacaaacataaacatgtgtattatggttactgaacacaatgtagaaattatttttaaaaaatagctatagctggaattaaaaagaaaaagggtggagatagcgtaaaagtatattgattctctcacctactaatattatttaaagataagayaatatgataggcgtttatttccaattcaaacatgtgtcaaatatttaaatttaaaaagatgtttatatcttctttagtaaaatggccaagtcaaatacagataaatatttgtattcaatttatactcat

SEQ ID NO: 379976 - DNA, 449 bp, Homo sapiens
ggctgcatctaattggaaggatgtggggtaacagaaagcttaactgttttggggctcagaaagtctttattggcccagttctatatcttggattagttgccttgtacacaagtcacttaatatctctaatcttcactycagcaagaagagcatttgggagctaatatgagatagaaagaaatatactgtgctcaagaaactaagagaaaaccaccaaagttggagaaaccgatgagaagctgcaccttagaggaggatgaagacgatcaaatgaataatggacagaaattgtatttgtactaatgctctccctatcccttgcccccaccgcctgagaggcccttatgtgtgatattcccctccctgtgtccatgtgttctcattgttcagctcccacttatgagtgagaacatgcagtgtttggttttctgttcctgtattaggataaa

SEQ ID NO: 379977 - DNA, 592 bp, Homo sapiens
ttgaattctttagtatatagagaataaatttaaatttcagggccagaaagtctrtttttttcttaatatgaggaatatgtattttgtataggtttgacacaaatctctaccaatatctactgttctctaactctttaaattcactaaaagaatcccataatttgactgtaggttgatttctcaaattatttggtttgctagaagctgaacagtattgcccacagtagattaaaaacctaggaataacctatcatagcatggccacttttcctgttcttgcatctaaaatctctctctctctttctctctctctctctctctctgtctgtctatgtttgtctatatatgttttttggttttttttttttttttttgagaagggatctcactctgttacccaggctggagtgcagtggtacgatctcagctcaatgtagccttgacttcccaggctcacatgatccttccatctcagccttccaagtaactgggattacaggcatgcaccaccacgcctggctaattttttgtatttcttgtagaaatgaggtttcagcatgttgcccaggttggtctcgaactcctgggctca

SEQ ID NO: 379978 - DNA, 624 bp, Homo sapiens
ccaatttggagaagttattccagcattagagctccccaggtaatcagtttagacttctattgcaactgtttttagtttaatttatccctgtctgcaacgttattttctttactctcttaggcattgttcctgagagtagcttcaataagccacgtggatgcaattatccagctcaggggttgtttcttatggaatccaacctatgactgttgacgccaggagtggtcctgggaaggagactctgaaaattttggagctggctgggaataasagtcctgttgctgttggtaggtagaatatggttagccactgtcctgcaattattaaaactctcataggtgataaattgatgtgggaataggcaggtgaaatatctcagtccttggaaaggtagaaggagcatagcaattacaagaaaaggtgaatcaaatggctcattccatcaatgcattggaggataataaacagctaagggagactaatgatcaatttaaggcaaaatatgaaagttagttttggtggcaaaaagtctttttctactattggaaaggggagaaaaatttgaagagttaattataagagtagtggatctcttgaaatagttgaattctctatcctggccag

SEQ ID NO: 379979 - DNA, 576 bp, Homo sapiens
atataaatatgctgtgaattgttacatatatttgagcattaaaaaaaaaaagatggacagtgggcactaaattagacaagcacgctggtatgtgtccctgatgtgacagaatagtagtttcctagtagtggtcaaatgccatgatgggtaatccagatcaggagttggaattttagacctcagggacatctgtgaagagttaccagaactctagccactgggctggggttcggatagaaagttccagttttgaatatattaagatgctaggcaaacctttggttattcaaaaaggaagagaccagatcttgggtatcagctggactagtagtaagagttccatgttctgtgctccataacgtgggctaaaaagtgccttcaatcttttcgactagtaggtagagttgagtctgaagatggagctctggctgtgggttaaaagggaccctgccaartctgggaacctgatcctagccttccaaagtaatggattggctgggcacagtggcttacacctgtaatcccagcactttgggaggccgaggcgggcagatcacaaggtcaagagttctaaac

SEQ ID NO: 379980 - DNA, 567 bp, Homo sapiens
tacatcctcatgttatgtacctttaaaaataactcactacgttgctggttcatgctttgcctagatctcagattttctcttttccttagataaattcagtttcccccatctctcgagtggttagtttttactaccctccggattaaacttgtttctgtaatctttacgatagtgtcagcaattggccactatcaacaggaattgaaaaatgccaatccaaaatgcaattgctttaatacatatttgtgatcatatggatacctgatcttaaacacatatataccttgtttattacatttattttgaatattctctggccccatttggtattgttctctaattaattgtgctttagtgttgtctcctgtaccaagttataaggaacttgagatcaggagctcttttgaattttatacctcttttctgctcatgactgtggaaaaagtagtaggtggtcagttcagtaaatacttcttgatggaactgatagatgactactcacattccagaattccaaggtccatyggaacacattcacatccttgtaagttggagtgtctaaccaca

SEQ ID NO: 379981 - DNA, 563 bp, Homo sapiens
tctcaggggtgttccggtggtctaaacagagactgagagttaacagagtgacatcagaaaggaaaaacaacaacaaaaaatcaggagtgcttttcagctgtgaatcagaatggcagttggagggtatctcagaatacaggatggggaagcagatggtaactaacagggacagaaaatggtttatagctgctctgaggcaggggcggaaatagagaaatcgtgggggaaggaagaccctcagacttacctgaaagctagattttcaattacgtctcttaatgaaatgtcagcttgtaagggcagagctgacaagtatgaaagagtaatggttctgtgaaataatagggtagagggaggtggtttgctgattaagttgctcattacctggaggcaatgaagaaaatcagtcaatgaattattgcagtcaaatataacttccatttttycagaagccaaacaaccaaagccatctaagacaaccacatttgttttttatgacttacaatgacaattcgtgtttatcaatgagttaaatgaagtaaagtgtaatgcaatgagttaat

SEQ ID NO: 379982 - DNA, 589 bp, Homo sapiens
gaccatcactagccagaatccatctatagagtttttttagcttccccagctaaaactctgtatccattaaacagtaactccctattcccttctcccaggccaatgttttattcctcatatctgatgctcagctagccaggaccttgtagtcctttgccttattcctttgtccagaacccctggtttagtaacttgtcttgtacacctttcaggtttaggcttttctttctgtctctagtacttcctattctttcagttacccgagttccagactcgtgtcctgggcccttttgccaactgactttccttgattttgtctcccgttacctgccttgatttcctgtttctctgacctggtgacacacatttctgatggtgacagctttgttggaccagttctctgttgcccagtgacaagctttggtgttctgctcgttggcttctagatttcttcccaggtccgtccgctcttcccacaattgcctttayctctgggtcaggtctagtgctagtcctgtcaagccaacccagctcagggtgttgaaccaagccttgtctgactatataagaaatagcaagaaaattttaa

SEQ ID NO: 379983 - DNA, 589 bp, Homo sapiens
gaccatcactagccagaatccatctatagagtttttttagcttccccagctaaaactctgtatccattaaacagtaactccctattcccttctcccaggccaatgttttattcctcatatctgatgctcagctagccaggaccttgtagtcctttgccttattcctttgtccagaacccctggtttagtaacttgtcttgtacacctttcaggtttaggcttttctttctgtctctagtacttcctattctttcagttacccgagttccagactcgtgtcctgggcccttttgccaactgactttccttgattttgtctcccgttacctgccttgatttcctgtttctctgacctggtgacacacatttctgatggtgacagctttgttggaccagttctctgttgcccagtgacaagctttggtgttctgctcgttggcttctagatttcttcccaggtccgtccgctcttcccacaattgcctttacytctgggtcaggtctagtgctagtcctgtcaagccaacccagctcagggtgttgaaccaagccttgtctgactatataagaaatagcaagaaaattttaa

SEQ ID NO: 379984 - DNA, 617 bp, Homo sapiens
cttggccagttctgggatatttttatttgctctttcaactacaaagagcaagatgctttgagttatgagttgatactctgtgatacactttagcagctatgtgaatgtgtggcttactaaataacagcatgttcttaagtgttttctgtgagacgtttggtcaaataattttggaaaatgcttgtttagcattttcttaacaataaacaggtttctttgctgcagaacttctcagagcccttccatgcttaccatagacctttttttctccaagagctgtctatcccaaatagtgttcaggaggatatacattgctatctagatacagaatgctatgtcttcttcctttagatatatacattttaaattgttttcctgctcagaaagcacacaattgccagttttttaaagtttcttttattgaagaccacctcarcatttataatggtaaatttattaagctttactttaggtacaaagtttaagtatctgatgacaacaacatatctaagggattcaaaggggttaggttttctttttgtcataagctatttctccacttttcttgaagttgctaggtaaaattattgtgttatttctgtagaaatagggaggca

SEQ ID NO: 379985 - DNA, 508 bp, Homo sapiens
actgcaccctctgcctcccgggctccagcgatcctctgacctcagcctcccaagtagctgggaccacaggccgcgctaccatgctgcctggccaattttktgtgtgtgtatttttggtagagctggggtttgccatgttgcccaggttggtctggaactcctgggcttaagtgttctgcccacttcggccttccaaagtgctggaattacaggcatgagccactgtgcccacccgtgaattgattagtgtttatctcctcagtttaataagggctttttgtatgttaaaaagttaaccacttatctgatatttgcattgctaatacttttcccagttggtaaatagtcttttcactttctctataactttttaattttaaacaattttgaaacactttcaaacttacagaaaagttgctagtacaatataaagaacttttattttcctgagccatctcagaataatttgccaatgtgatgccctggcatctcacagacattctcctac

SEQ ID NO: 379986 - DNA, 591 bp, Homo sapiens
ctgttctttttctaagtattgcatcaattgcatcaactcagactactgaataggtttgtttttgtcctccatcctcccccagcaaagtaacagacatatttcctgttccatccacctcaactattttatcccagttataaggctcaagtttagttgagtttcttggcaagtaatttttctcatgctaaagaagaaacatgaagtaaattaggaaaagcatataaaccagaaaaataatactaacatgatcaaaatctccaaataatttacctatgaagttcaattttgggagcttarcagttcagataaatgagaattacatagtcaatttccatgttagcaagaaaacttaaaattcaaaagacattaagttgagtgtttgagcctctccttaaattcctctttatcagtgaacaaacattcaatgcattcctcacaacaggtaaggcagtgtcaacaactaagatacagtattccaggaagccatgccttccctagtctaattaacagggaaacaaaacctttccaaagatgcaaatctacacctttattaagctaaacagacctacatcaggtgtctcagaaattatc

SEQ ID NO: 379987 - DNA, 485 bp, Homo sapiens
tgtgttccagtaaaacgttattcacaaaaacagccagatttggtcctcaggcaggtccatactttgctgacccttggtctacaccaaagttggccaattaaggaaagcctatctggaagtaactttcaaaatgtagcaatagtagttaaaaatttgagggtagcactgatatccattgttatgtttactaattagaattatagcctctaatcccagtctattaatcaaaattcagaatattgctatattttcccctgaattatttatcataaattacttagaaaatctctctagtttmttttcttttaacacaatttttatattcactgcagcttctgaaatactgtttttctacatcatttgagttgcagctaattaaaactgaaataggacttaaattttttccatttagtttctcaaaatatttccatttcttgtacttactaaaattgctgtgtcattctttattaatttttcttaagtga

SEQ ID NO: 379988 - DNA, 485 bp, Homo sapiens
tgtgttccagtaaaacgttattcacaaaaacagccagatttggtcctcaggcaggtccatactttgctgacccttggtctacaccaaagttggccaattaaggaaagcctatctggaagtaactttcaaaatgtagcaatagtagttaaaaatttgagggtagcactgatatccattgttatgtttactaattagaattatagcctctaatcccagtctattaatcaaaattcagaatattgctatattttcccctgaattatttatcataaattacttagaaaatctctctagtttcttttcttttaacacaatttttatattcactgcagcttctgaaatactgtttttctacatcatttgagttgcagctaattaaaactgaaataggacttaaattttttccatttagyttctcaaaatatttccatttcttgtacttactaaaattgctgtgtcattctttattaatttttcttaagtga

SEQ ID NO: 379989 - DNA, 612 bp, Homo sapiens
ggagtggaagatcaggccacaggttctgaagcacatgcaaatatgatctgatttaaccagccactgtgggcctggctccccagtgtctcagaataatgtaaggctcaagtataatgtcaagccttcaaactgagctttttactgttcttcatctagtattcctcctgmacatacttacctgttaaatttcagcacctttgtgggtagatcctgattttcctccattcctgacctcccttataaaagatggtcattcctgaccatctttgaaaattctatcaaactgacataaccagcccttttgagacctttacttgtctctgaataaaaacacattgcctatacaatgcaaatattattcacaaaaatgtttcaaatagtaaatactaaatagtttagtttttttcatttaaattgtattcattttaaaatatttaatatattcctatgctagtgaagggcagtttctcgcatggtctagacgatcctgtttgcagggcagctttgattctatccccattccaggcacttgatatcaatggaattgctattcttgcctcccaaatcctaaaatgtaagtttcaagggttaagcttgagaagtggctggtca

SEQ ID NO: 379990 - DNA, 612 bp, Homo sapiens
ggagtggaagatcaggccacaggttctgaagcacatgcaaatatgatctgatttaaccagccactgtgggcctggctccccagtgtctcagaataatgtaaggctcaagtataatgtcaagccttcaaactgagctttttactgttcttcatctagtattcctcctgcacatacttacctgttaaatttcagcacctttgtgggtagatcctgattttcctccattcctgacctcccttataaaagatggtcattcctgaccatctttgaaaattctatcaaactgacataaccagcccttttgagacctttacttgtctctgaataaaaacacattgcctatacaatgcaaatattattcacaaaaatgtttcaaatagtaaatactaaatagtttagtttttttcatttaaattgtattcattttaaaatatttaatatattcctatgctagtgaagggcagtttctcscatggtctagacgatcctgtttgcagggcagctttgattctatccccattccaggcacttgatatcaatggaattgctattcttgcctcccaaatcctaaaatgtaagtttcaagggttaagcttgagaagtggctggtca

SEQ ID NO: 379991 - DNA, 588 bp, Homo sapiens
cagcaatatgtctcagaaaaacttggggaagccataattgaagagtttaaaaaaaagaaagttaaggtttgtgatgaggttactgtactctcatccctttgccaagttgccattgaatattagccaaactttggaacactctcagatatgaagcccaccaaatgaccttgctggacccatcytgtaggtcctacatcccactcaaggcaactttgttatctccactaagagaagtatacaatctgctggaggtttaaggaatcaatcaacaataccttctttccactctcaagattagagcaagttgagagataggactcaaacagatggcagcaatatattagctttattactgataaaagctctttagagaatgtgactgtgttttgcttttgtttttgtttatgagacagtgtcttgctctgtcacccaggctgaagtgcagtgatgcgattatggccactgcaacctcccgtgctcaatcgctcctcccacctcagcatcccgagtagctgggcctacaggtgtatgtcaccacactcggctaatcattgtattattcacagagacaggatctcactatgttgc

SEQ ID NO: 379992 - DNA, 588 bp, Homo sapiens
cagcaatatgtctcagaaaaacttggggaagccataattgaagagtttaaaaaaaagaaagttaaggtttgtgatgaggttactgtactctcatccctttgccaagttgccattgaatattagccaaactttggaacactctcagatatgaagcccaccaaatgaccttgctggacccatcttgtaggtcctacatcccactcaaggcaactttgttatctccactaagagaagtatacaatctgctggaggtttaaggaatcaatcaacaataccttctttccactctcaagatyagagcaagttgagagataggactcaaacagatggcagcaatatattagctttattactgataaaagctctttagagaatgtgactgtgttttgcttttgtttttgtttatgagacagtgtcttgctctgtcacccaggctgaagtgcagtgatgcgattatggccactgcaacctcccgtgctcaatcgctcctcccacctcagcatcccgagtagctgggcctacaggtgtatgtcaccacactcggctaatcattgtattattcacagagacaggatctcactatgttgc

SEQ ID NO: 379993 - DNA, 588 bp, Homo sapiens
cagcaatatgtctcagaaaaacttggggaagccataattgaagagtttaaaaaaaagaaagttaaggtttgtgatgaggttactgtactctcatccctttgccaagttgccattgaatattagccaaactttggaacactctcagatatgaagcccaccaaatgaccttgctggacccatcttgtaggtcctacatcccactcaaggcaactttgttatctccactaagagaagtatacaatctgctggaggtttaaggaatcaatcaacaataccttctttccactctcaagattagagcaagttgagagataggactcaaacagatggcagcaatatattagctttattactgataaaagctckttagagaatgtgactgtgttttgcttttgtttttgtttatgagacagtgtcttgctctgtcacccaggctgaagtgcagtgatgcgattatggccactgcaacctcccgtgctcaatcgctcctcccacctcagcatcccgagtagctgggcctacaggtgtatgtcaccacactcggctaatcattgtattattcacagagacaggatctcactatgttgc

SEQ ID NO: 379994 - DNA, 582 bp, Homo sapiens
tagtgtatctctatgtacacaaggcagagggaatggattttggtgaaaacatagcagtcttggccaaaataactggatcttagccaagtgggcttgcaaatatttcctcccaaacttaggcagactaatccctcaacagtaacagctcattcctacaagggtagactctgcctcactaagcttagagcatagctgagagagagagaaactcagaatgcaccctctctgtgggcaggcagatttcagaggggaggggaaaaggctgattgaacattactaattttttcttccaatctcatcactgaaggaggaagaaaaaatccaaaagtgctactctaggaaaatcatctactcagaaatatgaggcgtagagaataagttttctcccaggagttgaataaaaacttttaaaccaattcatgtcatcctttattctttaaaaccatatattggttggtaacatccttaaaatattttctygtgtctttccttaattttaggatatattataataattggcttattaaaattattaacaaaagattatttaaattactaataaaattagtcttaatacaactt

SEQ ID NO: 379995 - DNA, 461 bp, Homo sapiens
ccttccaatgggacaatatatggaggtagaggayggtgatattgactatcctgaccctgtgtaggcctaggctaatgtgtgtatttgtgtctttgtttttaacaagaaagtttaaaaaataaaatgaaagatttaaaaatagacaaagtatagaataaggatattaagaaaatatttttgtacagctgtacaacatgtgttttaaggcattattacaaaagagtcaaaaaagttaaaaagtaagcttataaagtaaaaaatttacagtaagctaaggttaatttattattgaagacagaataattttaaaataaatttagtgtagcctgagtatatagtgtttataaagcctacaatagtgtatagtgtttataaagcctgcaatagtgtatagtaatgtcctacgccttcatattcacccaccactcactcaaagcaactttcaatcttagaagcgccat

SEQ ID NO: 379996 - DNA, 543 bp, Homo sapiens
acacctttcttgggaccagtctctgttrttatgcaacacatgacgtacatctccttccctagcatgcctctttgtatagtacccttagtcagatccatcccaagttagacattgttgaggctgagcaaatgttaaaaatggaaaggatgcaataaaaccgttcctgcattgactttgcaatgtattagatcaatctacagaatgaaagtgtgaacgtccttgatagcattacttatttagtagtagatgtacagtacttgtgatcagcagtgtttgggtttactgtcacttggatgtggtagaaggaagaatattatttttttctatttgtggaatccattccagaatttcatctccagttgaagaggagaactccttacctgttcttctgagacagaattatatatttaactcttcctggaagttactgcttttcttaggaaagacttagaagcaacttagagatgttgattaaatatataaggactagaacataattaccacactaaagagctaggcaaatagcatttgggtaaagaagca

SEQ ID NO: 379997 - DNA, 592 bp, Homo sapiens
ttcttttgaatcactatgctttctacactggaaattcccacctcatgctatatttgtcagctatagtttgtcaatgtcatctaccttgcttgataggtaaaccatcactagaggaagtacccacacaagttccattatctgtgatccctcagggcatcatatttagtcacggcaccacggcctgatcagccatcatgttaatcccagctacatcaggtgagccagggacatggtaccaagtagaagacagragtaaaaaggagcaatggaagaagtggaaataggcttggatgaaggggaaaggactcttcatggctacagccagtctttcatcagttttctgcgaagggtcaaggaaaatggcagtgactatcccagagataggcacacaaggggtaagccacagataccgggcattatctcctttgctttcttcctaacccatgtttccaatccaaaacaaaggtttcagcacaggcctcatccccagagtaaaatatcacagatcaactcttatctgctttctgagatccctgtgcctcagtatttaaatttttatagtggcaataatctccccgcttccatttcatgg

SEQ ID NO: 379998 - DNA, 381 bp, Homo sapiens
atttttgtatcccgagagtctagcataataatttgtgcgtagtatgttctaaataattagttggttcctactgatagacccagtwttgtctggtccttcttgaaaagctataataaaacaacgtccacccccatccagccctttcccaggtggctactggaaatgtaaggtggcacaatgtttcagaaaaacaatttgcttatttttatcaagaatcttttttaaaggtccatataatttgtcctactaatttaacttctgagactgtatcataaggaaatagtagctttaccataaagatatttatgtctgtatctgcttattcaaaaagaaaaattttggcataacctaaatggctgtaagaacagaaaggaagataat

SEQ ID NO: 379999 - DNA, 381 bp, Homo sapiens
atttttgtatcccgagagtctagcataataatttgtgcgtagtatgttctaaataattagttggttcctactgatagacccagttttgtctggtccttcttgaaaagctawaataaaacaacgtccacccccatccagccctttcccaggtggctactggaaatgtaaggtggcacaatgtttcagaaaaacaatttgcttatttttatcaagaatcttttttaaaggtccatataatttgtcctactaatttaacttctgagactgtatcataaggaaatagtagctttaccataaagatatttatgtctgtatctgcttattcaaaaagaaaaattttggcataacctaaatggctgtaagaacagaaaggaagataat

SEQ ID NO: 380000 - DNA, 381 bp, Homo sapiens
atttttgtatcccgagagtctagcataataatttgtgcgtagtatgttctaaataattagttggttcctactgatagacccagttttgtctggtccttcttgaaaagctataataaaacaacgtccacccccatccagccctttcccaggtgrctactggaaatgtaaggtggcacaatgtttcagaaaaacaatttgcttatttttatcaagaatcttttttaaaggtccatataatttgtcctactaatttaacttctgagactgtatcataaggaaatagtagctttaccataaagatatttatgtctgtatctgcttattcaaaaagaaaaattttggcataacctaaatggctgtaagaacagaaaggaagataat

SEQ ID NO: 380001 - DNA, 595 bp, Homo sapiens
tgtttatgtgtgtatttcatgattgcagtgttagaaaatacctattctgagatcacatttagttaattcttatttcttcatcttctgggatagcctgatagtcaacaaaccttactggttttacctgattttgctctacaacatgtgtgtgtgtgtgtgtggttgtgttaccagcacccggggttcttgcagtcttccaggatagaaatcgagagagatcaccaaacatagcagcaaaggtaagtttaagtttattccagcttgtgcataaggaagatagcatggagaaggaaaaaggagcgggcttctctctgagggcagtttgtgggttcattttctagggtttctctatgtggggaaaggttacatcagggcacgcaggggaggagtttttctagcacttgcacattggctcaacgtgcttcttcctatattacatgtagtrgtagcattttaaatctccacccctgggcctgaattttagcattcagaggagtaagaggtagctttaagttggggttttaagcctaactgctcatatgggactctggggaaatcatcagccccctgaaataggagcttgcagttaataact

SEQ ID NO: 380002 - DNA, 601 bp, Homo sapiens
gcacacctgatattaacaatatttcataatactggctgctcagaataggcatacccatgaacaactgcactggccataccagtgttgagcagatgaacatcaggcctgactgctgctctcactgccaaccttggtgtcagattttatcacaaaggagagttagcaatgagagaagtattatgttggcttcaatcatcttggtatacctargtagcttccacaaagctatatacgtgtctaaaaagctactaggcaatatatcttcttcttgtcatgtattaatagttgcaacagccaattctttctcactcacatacagttgttttttgtttgtttattttttagagacagggtctcactctgtcacccaggctggagtacagtggtcagaccatagctcactgcagccttgaactccagggctcaagggatcctcctgcctcagcctcccaactagtcaggactatagtcacacactaccatgcctggttaatttttaaattttttctctagagacagggtcttgctatgttgttcaggatggtctcaaactcttagcctcatgcagtcctcccgccttgttctcccaaagtgttgggat

SEQ ID NO: 380003 - DNA, 601 bp, Homo sapiens
gcacacctgatattaacaatatttcataatactggctgctcagaataggcatacccatgaacaactgcactggccataccagtgttgagcagatgaacatcaggcctgactgctgctctcactgccaaccttggtgtcagattttatcacaaaggagagttagcaatgagagaagtattatgttggcttcaatcatcttggtatacctaagtagcttccacaaagctatatacrtgtctaaaaagctactaggcaatatatcttcttcttgtcatgtattaatagttgcaacagccaattctttctcactcacatacagttgttttttgtttgtttattttttagagacagggtctcactctgtcacccaggctggagtacagtggtcagaccatagctcactgcagccttgaactccagggctcaagggatcctcctgcctcagcctcccaactagtcaggactatagtcacacactaccatgcctggttaatttttaaattttttctctagagacagggtcttgctatgttgttcaggatggtctcaaactcttagcctcatgcagtcctcccgccttgttctcccaaagtgttgggat

SEQ ID NO: 380004 - DNA, 601 bp, Homo sapiens
gcacacctgatattaacaatatttcataatactggctgctcagaataggcatacccatgaacaactgcactggccataccagtgttgagcagatgaacatcaggcctgactgctgctctcactgccaaccttggtgtcagattttatcacaaaggagagttagcaatgagagaagtattatgttggcttcaatcatcttggtatacctaagtagcttccacaaagctatatacgtgtctaaaaagctactaggcaatatatcttcttcttgtcaygtattaatagttgcaacagccaattctttctcactcacatacagttgttttttgtttgtttattttttagagacagggtctcactctgtcacccaggctggagtacagtggtcagaccatagctcactgcagccttgaactccagggctcaagggatcctcctgcctcagcctcccaactagtcaggactatagtcacacactaccatgcctggttaatttttaaattttttctctagagacagggtcttgctatgttgttcaggatggtctcaaactcttagcctcatgcagtcctcccgccttgttctcccaaagtgttgggat

SEQ ID NO: 380005 - DNA, 579 bp, Homo sapiens
tgttatgtaaatattcagcataggtgattgagagaattaaagtggatattaaaattttatgtattcattttttgtatrttaatgtttgcattacatgaaattggtaactatttctccatttccaggattttgatgtagacccagagttcatttataaagattaccattttgagaatttgaacagtgctcatctatagaatttgcagctaggaagtaccactgaactcagttctgttcatgggctactaagtggttaagatcatgacaatacatgttgcttgaaggatgtgctttaattaaaagatttgcatttaaaaactaataagacatttagctaacattatatgtgtatgtgcatgccttcccgtttccagaaggcatcctctctaatgtgtttgatatatcactttcaatgttaatgtgtcatttaaaaatatgtatagatgctttgcctatgtgtgtttaaatcacatgaagaagaaaaggacattttgatagatatcaatagaatacatttacttcaaccctattatacaccattcaaggatgttgtgagtgttagatgagacaatgtatata

SEQ ID NO: 380006 - DNA, 586 bp, Homo sapiens
cagtggcttaggggccttgctttaaaaatattttaagaaagagccgtgaatcctgtgtagttacaaaacaaagagaagagcagttctcatcctttaaagggtgggaaaatgtgggaagatagtagaatctgttcccagattcctctcgggtctgctggtgccttctctgggcccataagcaagtgctgtctccagtaaggaaggattgacgtcctgccattaggaggcagaccgaggctgaggcagtgttcccctgcattttcagtgtctttgacataacagtcctaaatattttggggtgaaatattttgtttccttcagagccatcagatgcctcaagaagaaattgcctgcagattgttcttactactctctggttccctgttgtcctggtccttrgtctctcatatcctggcaactttgatagccctgaactccaatttgtttctccccagatcagtaagacttcagcaagccagaggctactgctttctgtttgggcactatgtttggagacctaacttggcaaagaaacagaggtaaatacaggattcactttactgtattttctttctttctcgaatct

SEQ ID NO: 380007 - DNA, 615 bp, Homo sapiens
tggttcaatctaacctattttatagatcaggaaattgaaacatagagattacataacttgaccaagktcatacagccagtcagtggcagaagtaggatttgaagcatcagcaaacctccttaaacccatttcactgacagtttggtttaaatgtttctaagatctcagattatcagagaagtagagggaaattctaaaggtattaatgttgattgacactggtattgctggaagtaagtggcactattgggtagaccagaggctgtagtgcatttttcctggtcctcccttgtgagtatcctgtgatttctttgccagcagagacagtaatcagcaaagacaaataccttttgggttttttttaaaagagccgttgtggtttcttttcttcagctactttagtttcttatacatactgtaatttctagtgccaatactgtacttaggtgttttatcagtattaatgaccttccaaacatctttaaaaagttggtatttactaactggagaaactatgacagagtaagtataaaataatctaatgaacttattgaaatgtaccccatatttattttcagcccctcaaagacagatagatttcctaaaatcttatgg

SEQ ID NO: 380008 - DNA, 615 bp, Homo sapiens
tggttcaatctaacctattttatagatcaggaaattgaaacatagagattacataacttgaccaagttcatacagccagtcagtggcagaagtaggatttgaagcatcagcaaacctccttaaacccatttcactgacagtttggtttaaatgtttctaagatctcagattatcagagaagtagagggaaattctaaaggtattaatgttgattgacactggtattgctggaagtaagtggcactattgggtagaccagaggctgtrgtgcatttttcctggtcctcccttgtgagtatcctgtgatttctttgccagcagagacagtaatcagcaaagacaaataccttttgggttttttttaaaagagccgttgtggtttcttttcttcagctactttagtttcttatacatactgtaatttctagtgccaatactgtacttaggtgttttatcagtattaatgaccttccaaacatctttaaaaagttggtatttactaactggagaaactatgacagagtaagtataaaataatctaatgaacttattgaaatgtaccccatatttattttcagcccctcaaagacagatagatttcctaaaatcttatgg

SEQ ID NO: 380009 - DNA, 606 bp, Homo sapiens
tttgttatttagttgtctaacttcaaagagacagtcaacaataatgctcttcctatggcaaaattaatatagcatcaagccactttcacaggtgctatgtttcttttttcctsctttttactccccaggatgaaatgggacctagaatcaaagaagcaatagtttttctctatacctgtaaaagattagcttttcatcattggggatgatgcaagcaggaaaaccaagtgcaagaaaacagagatgaagccaaaaaggacaatttctgattgtaatagctggtttctgtttcatatcactgagcaagatgagaaagttttgcagagttttagaggaacagcttctgcggttctaaatgatgacctcaccctcaatgcccttgccaggtggttagccccactgtgaaaacacaggttgattttcagcatgaaacaagccagagtatggaatgatattttcaggtgacagttggggttctatttcctgtaattagcacctcttaaccttcagacttgcccctgcccttttcaggctgttgaagctcaaatccgaagttttggacagactccttctcaactactcatagagccccatcctcccagaggt

SEQ ID NO: 380010 - DNA, 606 bp, Homo sapiens
tttgttatttagttgtctaacttcaaagagacagtcaacaataatgctcttcctatggcaaaattaatatagcatcaagccactttcacaggtgctatgtttcttttttcctcctttttactccccaggatgaaatgggacctagaatcaaagaagcaatagtttttctctatacctgtaaaagattagcttttcatcattggggatgatgcaagcaggaaaaccaagtgcaagaaaacagagatgaagccaaaaaggacaatttctgattgtaatagctggtttctgtttcatatcactgagcaagatgagaaagttttgcagagttttagaggaacagcttctrcggttctaaatgatgacctcaccctcaatgcccttgccaggtggttagccccactgtgaaaacacaggttgattttcagcatgaaacaagccagagtatggaatgatattttcaggtgacagttggggttctatttcctgtaattagcacctcttaaccttcagacttgcccctgcccttttcaggctgttgaagctcaaatccgaagttttggacagactccttctcaactactcatagagccccatcctcccagaggt

SEQ ID NO: 380011 - DNA, 442 bp, Homo sapiens
tcatgtatcaaaacctagaaacatataaataaaatagttaaaaataaaaaattaaaaataaataaatgtaacaggataaatggtttccatttaaaaaattctataatggcataagttcaactttcagagggatactttagtcatctttgaataatgcaagataactgactttttgttaacttctcagtagaaaatttttaaaaaatcaatttgtttttctacttttcccaagtgatctctactcctgastgaccaaagtgttaacagaattaaactttttcttttttgaagtggttcaaatacagtcatgcttcacttaatgacaggattacaatctgaaaataccttattaagcatttttgtcactgtgtgaatctcattgagtgtgcttacagaaagctagatgatatagcctactacacttctaggctatatgatgtag

SEQ ID NO: 380012 - DNA, 580 bp, Homo sapiens
ttgcttcgaaatgtgtcagtagctagcaaatgccaccaatctagggccttctcatttaaaacctagcctggaatatcaagctgggctgaaattttactatataaataaataatccagtatttaatgatagtgttgcaaaattctatcatctgaacaatacagatacttaaagtagatgaaatttaattttacatcttttcacagttttttcgtatccttttttttttagagtattttccagtattttatracaaaagaaaagcctcaaagatgtgtcatatccaaaatctagatttattcttttagtcaggttgacccttagagcatttatcttccataatgatagaggaaaaaaccctcattgatatatctcaagtcaattattggctaccttattattcaatttttattaactacaaggaataataactaggaagagtatgttgtcatgtaaaaacatttttataatgcaaaaatagggatatgtttgttaatttatgttatgtatctattccataacattactttttaaaatttgttctgaacataaatttattaactttcagtttggaagtggatc

SEQ ID NO: 380013 - DNA, 558 bp, Homo sapiens
gtaaaaacatttttataatgcaaaaatagggatatgtttgttaatttatgttatgtatctattccataacattactttttaaaatttgttctgaacataaatttattaactttcagtttggaagtggatcacattaaaaccccctaccatattgtataaagaacttccgcatagttcttgtgacttmgatattttaaatcattttaattgacacattatagtcatcattaaggtgtaaaaaagcacttgttaactcagttttaagtatccacaaaatatcattgtgtcaagacttacaattgtcttttgtattcaatgtcatctttctcaattaaaattatataacttttgttgttcaggtttatcattgtttctaattatgctggacattgtatttttatacttagattacaatttatattataaatctgaaaaatacctttgttagaaaacagatatgttgtttccattttatgaagtacaattattgaccctacagagctttgaaaatttaattacactaacttacacataagtttatctttctcagaaaatagg

SEQ ID NO: 380014 - DNA, 568 bp, Homo sapiens
aattcttctctaaatgcttggtacaatcaatctccgaagccaactggttctagatttttctttggagatattttgattactacttggatattcttattactggastgcttatattttcaacttcttcaagattcagttttggtaggttgtttgtttctaggaatttattcatttctgttaagttattcaatttgatggtgtgtaattgttcacactagtcttgagattctttgcatttctgtggtatcacttgtaatagctcatctttcagatttaattttattcatctgagtgctctcttgttttcttggttactctaactaaattttttttagttttgtttatttttaaaaataacttacttttttatcttttctattgtcttggtagtgcctattctatattactgctctgattattagtattattctttttttcttcttactaactttggacttagtttgttctaactggctaattttaaatatatctgtctttaagttgactgattatttcttctgtttaattaattttgcagttaagctatttaagttttcatttattgtat

SEQ ID NO: 380015 - DNA, 568 bp, Homo sapiens
aattcttctctaaatgcttggtacaatcaatctccgaagccaactggttctagatttttctttggagatattttgattactacttggatattcttattactggactgcttatattttcaacttcttcaagattcagttttggtaggttgtttgtttctaggaatttattcatttctgttaagttattcaatttgatggtgtgtaattgttcacactagtcttgagattctttgcatttctgtggtatcacttgtaatagctcatctttcagatttaattttattcatctgagtgctctcttgttttcttggttactctaactaaattttttttagttttgtttatttttaaaaataacttacttttttatcttttctattgtcttggtagtgcctattctatattactgctctgattattagtattattctttttttcttcttactaactttggacttagtttgttctaactggctaattttaaatatatctgtctttaagttgactgattatttcttctgtttwattaattttgcagttaagctatttaagttttcatttattgtat

SEQ ID NO: 380016 - DNA, 596 bp, Homo sapiens
ttgcttcatttgaagtggctaataatttggctaaatgactggagatttagagaaaacaagactagaggattgcattgtgcatcttggtaaatgaactgcrtaagtaattagtgtcccatctgaatgtacactcaacaatgatgaggccatcgacaatcaggtgagaaagatgacttattttgtggaagtcagtcagcctctttctctgtatcctagcctatgctcagtaaactcaaaaacaaagtcattatgttgttaggagtggaagtatttgtatagattcaactgaatacatttttcttctcaaaggctgaagtgattccaatatccaaaagcagagatcaatgccgaaggtccaaaatggtgtcatttcttagaggagcagtcatataggtggcagggacttattgtagatggctttcatcatagatgattttgtttcactgaaaaagacatatacattggacacagatgtgtgtcctttgcgaaagtgctctgacaacccttccttctgctgacttatgaaacctttatttatatggagaccatagggagaggcatggaacaaattctccttcacagctctcagaaggaaa

SEQ ID NO: 380017 - DNA, 584 bp, Homo sapiens
caactttgcaaggaactgccgaactgtttttagaaagtggctgtaatgttttgcattctcatttgcaatgaataattgttccttttgstccatatccttgcccgcattgggtgttgccagtgtttgagattttactattctaaaaggtatgtaatagtatctcattgttattttaatttgcaattctctagcttcaaatgatattgaatatcttttttatatgctatttttccatctgcttgtcttctttgatgaagtgtctgtttatgtcatctaaagtgaacccattttagcccatttttcaatgagttatttgtttacttattgttccaagagtttttagtatatttggatgtcaatcctttatcagatatgagctttgcaaatattgtctcccagttggtaatttatctctttattctcctgactctttttcaacgcagaaatttttaaaattttatgaagtccaacgttcgtgtttttctttaatggatcatgcttttggtgttgtatgtagaaagtcatcaccaaactcagtcacctacattttctcctgggttattttctagaagttgtatagtttt

SEQ ID NO: 380018 - DNA, 571 bp, Homo sapiens
tggcataaggtagcttgaattccctttcttttcacttgctactccaggaataatgactaacagaaaagtggtacatttacaagttttgtttcaagtgaaagaatagaaatatggttctggcatctgaggaaagagagcagwgagaatctcatatttctggctaagaagctgatttttgtatgtaaaagagaagcctctaattaagtaattacctaccctgtctctggacttagccaatgtgtccacccagctagcaatttaaaacccatgttgaaatttgataaaatatggagtatttaggcaaccttacaatcctcagcattctcttacagaaaaggtaagactcagtttgagttggtggagtgagatactctgtgcttgagacaagtgatccaaacccattcagcaaccacagtcaagggctttatttcattttgaaggcttgttttggagtattctgttctatggagactaaaagtattaggtacagaaatagaactaacaaatgaagataaaaatgagactttgaaggaaccaaaaaaatagacaatgtctgagacaccaagttcct

SEQ ID NO: 380019 - DNA, 571 bp, Homo sapiens
tggcataaggtagcttgaattccctttcttttcacttgctactccaggaataatgactaacagaaaagtggtacatttacaagttttgtttcaagtgaaagaatagaaatatggttctggcatctgaggaaagagagcagagagaatctcatatttctggctaagaagctgatttttgtatgtaaaagagaagcctctaattaagtmattacctaccctgtctctggacttagccaatgtgtccacccagctagcaatttaaaacccatgttgaaatttgataaaatatggagtatttaggcaaccttacaatcctcagcattctcttacagaaaaggtaagactcagtttgagttggtggagtgagatactctgtgcttgagacaagtgatccaaacccattcagcaaccacagtcaagggctttatttcattttgaaggcttgttttggagtattctgttctatggagactaaaagtattaggtacagaaatagaactaacaaatgaagataaaaatgagactttgaaggaaccaaaaaaatagacaatgtctgagacaccaagttcct

SEQ ID NO: 380020 - DNA, 642 bp, Homo sapiens
gagaaagcaagaaagcaagaaagcaagaaagcaagaaggaaggaaggaaggaaggaaggaaggaaagaaagaaagaaagatctggcctctgtatccatctcttttcctcaaaggagaagatatgatgggaacgagtgtcctattaggaccaactattgctgtcagttttttggttcctagtgattcacagcttggctttactaggcctaggctcattcaaatgaggagaagcagagggtatttgttttcaaagtgtcaagtagatgagaaagccctgaaaagccartatcagcaggccaagtgcatgcaaagctcaaatatttaaaatattttacacagaatccctttacaaaaaaccaggccaatatttaccagtgtgatgctttcaaagttactactgtattagaattggagaagattgctaattggctcatatatttttaatgccagtcattagaagcataaatttactcctgatatcttttaataaagaagtaaatctgaaacattctccaagataaatttgtcactgaactgtatatttatttctaatctagtaactcaaaaataccttaccctaaacattatcagactagagcacattattctaagattaaatactcctgaaaacatttttgaaca

SEQ ID NO: 380021 - DNA, 601 bp, Homo sapiens
ggacttctgcagctttaaatgataaacctattgaccgttttatctttagagtgtatttctttgcatcattttactttcctcccttcttcccccaacaaatacactgaaaattataattaagtaaataatgttcctttcagaatcatcaagtagtgtgattgaatgtgtaaagaaagagatgtaatcctatcacaaaatctttgccaggatctcctcctctccagctttctgtcttaccattttgttgtcaattgcagtgctctttctgttgtttattttattgttattcataccaatcatcactttatcatgtaccttaatttacttatttgttgtgaatattgcttatttcctgcctgtatcaatgtgagtgtaagtgtcaaggggttgcaatgccttagttgctttattcatttgtctagcatacagattgtgttttatgctcaatatttattgaattaataaaagcattagtgctccttaaaccttcatcaactatgccyctgatgatcaaccccataatgtgcctgtcatacctattcacgtatgaatttaaaaatgagcaatattcagtctcaagctagggatctattaaacaata

SEQ ID NO: 380022 - DNA, 598 bp, Homo sapiens
tattttatggcctaaaattgtgtccaccttattgactctatctcatatcttcaaaatactgtagtttttttccctatatttgctagatattatgtctataaatatgaattatacaaactggttcataatatttttcatttgttaatacgattagaatcatctatgtcattttttaaagttgcctgtcaattgctaagatagmgatgttatttctacaatatgattgaaaatgtttttatatcctttggttataatagttttactttagatattttgaaggtctgttacatttatacacatttatgactctcatttcatactgaagaattttcacttctatctttctgccatatttctcattatctctgaaatagtcttctaactgctgtacactatacctactagagcctacacttattcttttttatgtaatattaatatagcaactttagccttcctatattcatgaattgctaggtatgtcattttacaggaatttgttttcaaactactttctgtaatatttaaaatatgtcgcttgaagattgactatatttattttacctttcagactattgtaataatttctattttttag

SEQ ID NO: 380023 - DNA, 380 bp, Homo sapiens
aacatctctcaccagagtggtacatttgttataatcaacgaagctacggttgacatatcagtattatccaaagttcatagtttacatgaggattcactgttgrtgtacattctctgattttttttaacaaacgtgataatatgtatctaccattaaacagaatattttctgtatgactgccctaaaaatcccctgtgttcagcctattcatctcttcctcctgcaaactcctgggaactacataattttttactgtgtgcatatttttgcacttgactgagagtcttgcgtttttaacagagttgaaatttttaatttcaatgaaatttggcttaacaattattattatttttttttcgatacagggcctcactctgtcg

SEQ ID NO: 380024 - DNA, 380 bp, Homo sapiens
aacatctctcaccagagtggtacatttgttataatcaacgaagctacggttgacatatcagtattatccaaagttcatagtttacatgaggattcactgttggtgtacattctctgattttttttaacaaacgtgataatatgtatctaccattaaacagaatattttctgtatgactgccctaaaaatcccctgtgttcagcctattcatctcttcctcctgcaaactcctgggaactacataattttttactgtgtgcatatttttgcacttgactgagagtcttgcgtttttaacagagttgaaatttttaatttcaatgaaatttggcttaacaattattattatttttttttygatacagggcctcactctgtcg

SEQ ID NO: 380025 - DNA, 458 bp, Homo sapiens
agaatctaagaagattaaagccttctagagagggtttgttgaattaatctacttatatttacactgctatcacatgcataaatattatatatatatattagttagaacgactgatatagatagatagacagaagatagcttaaaagatattgcaggtgcacttccagacaacttgcaaaaaagcaaatattgcaagaaagtgagtcacactaatttctttcaatttactttcccagattcatcagaggaatcrttatctatagcagttatagccttacaaactatatttcttaactaataagacttcaatgtcaaaattactccttgatccatgggctgcaggaaaggtgttgtgttagcaggcaagaaaacaacattcatctcattgtacctcttcatcagagctcttgagtgcattgtcaatgagcaataataatttaaaagaaattttttttctt

SEQ ID NO: 380026 - DNA, 423 bp, Homo sapiens
ttagtgttcttcacttgtgatttcattggtttacttaattatcaacaattggacactgataatttctgtctcttacagcctcaatgattagtattgtttctggagattatagtttcatctgcatttccaatttgatgataataacgttcataattaaattgatttacaaaagatactaaattttaaaataatttaaatattagaaatacatccataaawctttaaagagcagttttttttttggcagagtgtctattttttcagcaagtaatattttatcactgactgtttagaattacctgtacatgatgataacaggaaacagactcacttttagtcattatcattattgttttaaaatctctctatataacatgaacaattattccttacatttgagagcagattgtgtctagtaatcca

SEQ ID NO: 380027 - DNA, 550 bp, Homo sapiens
acaaaaaaatgaagcagtagattttattgagtttgctttatgagaaggaacatcctagttaaaattagaggctagcaactgcatatcagcctcatcagattttcaaacagaataactrttaatcttattttttcaatctatgcattcaaaataacaatttcagaagatttgttcatttgaaaattggaactttaaatataatcttctagtttttattttaaggtcttacaaaacatttaacattaaacaaagtatttatttcgtgatgaaaaaatgaacgtaaacttcagtggaacatagtagacacagttttctaagtgttggcaataatgtgtactaccacttcagtgtcaccttaatgctcagataataacattattcttatctttatatagagataaatacaatttttattttagaatatatatttttgaaattagtttttgtataaaataacattaaaacaattattcgaccatagaaaaatattaaaaaatttgaagtatctaatattttatcagtttcttttaaacttttaatatttcatttt

SEQ ID NO: 380028 - DNA, 625 bp, Homo sapiens
aacaaaaacattacaagaaaaaaaactacaaactaatatctctcatgaacatagatacaactatcctcaagaagatattagraaatagaatccaacaatgagtaaaaataattatacactatagccaagtaggatttatcccaggtatgcagaattcattgaactttccaaaatcaattaatgtaatacagcacatcaacagactaaaaaacgaaaatcacatgatcacatcaatagatgcagtttatttgacaaaactcaacacacattcataataaaaactctctgtattgagaaatagagagaaacttcctcaacttgataaagaacatccacaaaatacctacagctagcattatttataatggtgagatattttctaatatcaaaaacaaggaaaaaataccacttctccctactcctttctaacatcatactgttagtattaactaatgaaataagaccaaaaaataaaatgaaaaggtgtacaaattggagggaaactaataaaactgcctttgtttcaatatgtctaataatctatggagaaacaacttcctttgtttgaagatgtctaataatctatgtagaaaacttgaaagaaaaagcttgaaagaacaaccac

SEQ ID NO: 380029 - DNA, 625 bp, Homo sapiens
aacaaaaacattacaagaaaaaaaactacaaactaatatctctcatgaacatagatacaactatcctcaagaagatattagaaaatagaatccaacaatgagtaaaaataattatacactatagccaagtrggatttatcccaggtatgcagaattcattgaactttccaaaatcaattaatgtaatacagcacatcaacagactaaaaaacgaaaatcacatgatcacatcaatagatgcagtttatttgacaaaactcaacacacattcataataaaaactctctgtattgagaaatagagagaaacttcctcaacttgataaagaacatccacaaaatacctacagctagcattatttataatggtgagatattttctaatatcaaaaacaaggaaaaaataccacttctccctactcctttctaacatcatactgttagtattaactaatgaaataagaccaaaaaataaaatgaaaaggtgtacaaattggagggaaactaataaaactgcctttgtttcaatatgtctaataatctatggagaaacaacttcctttgtttgaagatgtctaataatctatgtagaaaacttgaaagaaaaagcttgaaagaacaaccac

SEQ ID NO: 380030 - DNA, 625 bp, Homo sapiens
aacaaaaacattacaagaaaaaaaactacaaactaatatctctcatgaacatagatacaactatcctcaagaagatattagaaaatagaatccaacaatgagtaaaaataattatacactatagccaagtaggatttatcccaggtatgcagaattcattgaactttccaaaatcaattaatgtaatacagcacatcaacagactaaaaaacgaaaatcacatgatcacatcaatagatgcagtttatttgacaaaactcaacacacattcataataaaaactctctgtattgagaaatagagagaaacttcctcaacttgataaagaacatccacaaaatacctacagctagcattatttataatggtgagatattttctaatatcaaaaacaaggaaaaaataccacttctccctactcctttctaacatcatactgktagtattaactaatgaaataagaccaaaaaataaaatgaaaaggtgtacaaattggagggaaactaataaaactgcctttgtttcaatatgtctaataatctatggagaaacaacttcctttgtttgaagatgtctaataatctatgtagaaaacttgaaagaaaaagcttgaaagaacaaccac

SEQ ID NO: 380031 - DNA, 625 bp, Homo sapiens
aacaaaaacattacaagaaaaaaaactacaaactaatatctctcatgaacatagatacaactatcctcaagaagatattagaaaatagaatccaacaatgagtaaaaataattatacactatagccaagtaggatttatcccaggtatgcagaattcattgaactttccaaaatcaattaatgtaatacagcacatcaacagactaaaaaacgaaaatcacatgatcacatcaatagatgcagtttatttgacaaaactcaacacacattcataataaaaactctctgtattgagaaatagagagaaacttcctcaacttgataaagaacatccacaaaatacctacagctagcattatttataatggtgagatattttctaatatcaaaaacaaggaaaaaataccacttctccctactcctttctaacatcatactgttagtattaactaatgaaataagaccaaaaaataaaatgaaaaggtgtacaaattggagggaaactaataaaactgsctttgtttcaatatgtctaataatctatggagaaacaacttcctttgtttgaagatgtctaataatctatgtagaaaacttgaaagaaaaagcttgaaagaacaaccac

SEQ ID NO: 380032 - DNA, 573 bp, Homo sapiens
tttttcatgaaataatttatataatttaatttctctttgcatattccaaaaggcaaatcctgataattttaggatgttttcatcagtcagagctgacaaagccttaatcctcaggaaaagctgttgtaagaactgaacagtagataaataaatattaaataaatatattgaaattattatgggtagtattrtatttgcagtttttaaaaaaaacgaaaaaattgagagtcacattgaataatttctagcttcttgaaaataagaagaaacaggggaggcaaaggcactagagttcacggaatagagtacaggcagaacgtagctgcagagacctctacattcctgtgtctggtttctggacttttaaactgggtttcagttagtgtgtgaatatgaggattctaccaaggacagggaaagaacgatctaaaaggactagggggaacacttcccagatcccaccagggatggaattattgatattttcattagccagtctagaaaaatctcataatttatgggccatcaggtagagaaatcaggattttgccacaacagtgattcaacatttgc

SEQ ID NO: 380033 - DNA, 596 bp, Homo sapiens
aaaaaattttgaaaatgaaccaatgaaaattatgtckttgaaaagcaaaatatatttaaaaagccaaagcatttttgaaatgacagaaaaatcagtgagcctaatgattgatgtatataaattgttctagttgaagaacagaaaaataaaaccaagatgcctagagaattgagactagagaattaagaaaaactatcaagtatgccaacataaaagtaatgagataatcaagagatgagaaatgaaagaaaaatatttcaataaacaatggccccaaattctgaaatttaatgaagaacattagtccataagtccaagaaacttaagaaactctaagtaggataaacagaaagcaattcacatcaagactacacacaccagagtcaaatttctgaaaactgtaaacaaaataatattttgtactatgaaagaaaaaaatggacacatctagcaaaagaacacaataataagattgataagtgatttcttatttttaaaataatgaaggccaaaatgtataataagatatattcaaaatgtaactgtataaatatttcattcacaagacagaaagaaccatactaaattaaacaaaa

SEQ ID NO: 380034 - DNA, 639 bp, Homo sapiens
catgtagaaaaagaaagaaaacaaaaattaccaaaattagaaatgtgagagaagatatacaaaaatttaaaaggctaataaaagaacattgttaattactggtttcatccattaatacagtacaaatatttaaatgtcaaaaattaaaatttgtataatacatataatgtatatatgaataattatgttttgttttttagacttttatttgtttcgttgactgcgtgcactttgggttttgcaatttttctatgttggcctcatgtatatgtatctgtattaatatattatttctattgggcatagtatgtatatggwcatacatataaacgttcatacatgatttcactatattttaaggaagtaaactcttggcaatttgttgcaatattttttctcagactgattattattggctttataaacacatttaggttttattagacacacatattttcaggatttatttgcattccattttaccaatctttttgtttaaaatatttgtattttatgtcaagtaccaaagactttcctaggtcacacttgaaagtatacattatctttttttattaatattaatatgtttgtgtctaacacattacatctttactacttttagaatttatggacatatta

SEQ ID NO: 380035 - DNA, 498 bp, Homo sapiens
ttggttttcctttccatttggtgactaatgttaataattcatttatttttaatttgtacagctttttccctttggctctgacatttttagttactaattaggaattaatgtaaggtgtgtggggacttaataaggactttcataatgttgatgaatacatatttgctaggraattagttaatattattctagccacagtgtgaatacaatctgcgtaatccacacattgccctcatgtagacacagtcctgatacttgtttccattgtttctttaaaactcagtgaatctgtgttatcaaagataatttattttcaagttacacacaataccacacttcagaaattaaatagatgagtgagcatcactgttcaggtagttcttcagatggcaattttaaaaattttttgtgggtacagagtaggtgtatgtattttgtgggtacatgagatgttttgatacagtcatgaaatatgaaataagaacatcatggagaatg

SEQ ID NO: 380036 - DNA, 631 bp, Homo sapiens
tacttaatttgtaaacagaaaatgaaacctgagagtatgtctcagtatatgatttggatttgtcatgatggtgactggtatgctttaacaaacagaatctaactcctacttattgggaagtagggcaaccacacttcaagatttaatcattttaattataatattattttagcaacattcgttcacttgaaaaaatggataattgtatamgtttggagatattaatgcatatacaagggtttgtgttttatatcagtttacatatataaatcaatattttataatatctctatttgagtgcctatgtgtgtttttgtgcatgtgtgtgtgttgcgtgcaaacttatatttgtattaggcagctatagtcatctgggaagcctcccagaagacatattaaatattccttaataaataagtatgagaaaatcctttgaggggatctttatatgccttcaaaattcttgaaaaaaaggaagaatccactgaaaattatgccaattagcaataataattaaagtgactggaacttctctttttcttactttcatttagaatgatgcaaactattatcaaaagtagccattttattcagtgccatatgattttgtacataagatatgttgttatgc

SEQ ID NO: 380037 - DNA, 631 bp, Homo sapiens
tacttaatttgtaaacagaaaatgaaacctgagagtatgtctcagtatatgatttggatttgtcatgatggtgactggtatgctttaacaaacagaatctaactcctacttattgggaagtagggcaaccacacttcaagatttaatcattttaattataatattattttagcaacattcgttcacttgaaaaaatggataattgtatacgtttggagatattaatgcatatacaagggtttgtgttttatatcagtttacatatataaatcaatattttakaatatctctatttgagtgcctatgtgtgtttttgtgcatgtgtgtgtgttgcgtgcaaacttatatttgtattaggcagctatagtcatctgggaagcctcccagaagacatattaaatattccttaataaataagtatgagaaaatcctttgaggggatctttatatgccttcaaaattcttgaaaaaaaggaagaatccactgaaaattatgccaattagcaataataattaaagtgactggaacttctctttttcttactttcatttagaatgatgcaaactattatcaaaagtagccattttattcagtgccatatgattttgtacataagatatgttgttatgc

SEQ ID NO: 380038 - DNA, 591 bp, Homo sapiens
gggaggttctcatatatctgaaaattaaaacgtgattcaaaatgtgggagayttctcaaagaactgaaaatagaactaccattcgacacagcaatcctattactgggtataaacccaaaggaaaataaatccttctaccaaaaagacatgcactcgtatgtacatcgcggcactagtcacaatagcagggacctgaaatcaacctaggtgctcgtcagcagtggtttggataaagaaaatgtggaacatatataccatggaatactatggagccattaaaatgcatcaaatcagccgggcgcggtggctcatgcctgtaatcctagcactttgggaggccaaggcgggtggattgcctgagctcaggagaccaacctgggcaacacggtgaaaccccgtctctactaaaatacaaaagaaattagctgggcgtggtggcatgtgcctgtaatgccagctacttgggaggatgaggcaggagaattgcttgaacctgggaggcagaggttgcagtgagaagagatagtgtcactgcacttgagcctgggtgacagagcaagactctgtctcaaaaaaaaaaaaaaaaaaaaa

SEQ ID NO: 380039 - DNA, 591 bp, Homo sapiens
gggaggttctcatatatctgaaaattaaaacgtgattcaaaatgtgggagacttctcaaagaactgaaaatagaactaccattcgacacagcaatcctattactgggtataaacccaaaggaaaataaatccttctaccaaaaagacatgcactcgtatgtacatcgcggcactagtcacaatagcagggacctgaaatcaacctaggtgctcgtcagcagtggtttggataaagaaaatgtggaacatatataccatggaatactatggagccattaaaatgcatcaaatcagccgggcgcggtggctcatgcctgtaatcctagcactttgggaggccaaggcgggtggattgcctgagctcaggagaccaacctgggcaacacggtgaaaccccgtctctactaaaatacaaaagaaattagctgggcgtggtggcrtgtgcctgtaatgccagctacttgggaggatgaggcaggagaattgcttgaacctgggaggcagaggttgcagtgagaagagatagtgtcactgcacttgagcctgggtgacagagcaagactctgtctcaaaaaaaaaaaaaaaaaaaaa

SEQ ID NO: 380040 - DNA, 601 bp, Homo sapiens
gcctcaaatgaatattaaacttcagtacaacattcattatagattatttctagttgtttatataaaaattgatctcgtttataacaaaatttgaaaacatttgtttagttaatttagawccatcagtccagacaaaatgtctggaagttttaggaccatttttattctaggtatttttggtataaatgaatgagaaaaattcatgcttttattaccataaacatgagaaatcatggctgactaaatttggagaagttatttatgaaataaagttaaaagtgctttctacattgacttttgccacgcaaaatatttgtattggacttttaaacaaagaacttacattatgggaaaatttttattcccatttatctctggaaaaataataatctattgcaaagagaattcaagtactttaagacattaatggctaagattctcttgaacaatgattggatttctagcttttgaattttataacttgtataattaatcaaaatttaatgttggctggatttgaagttctcagtaagaaatgtaaaggacttttcacttgtatgagccttattcttggctacattttgtcttcctttatttttat

SEQ ID NO: 380041 - DNA, 323 bp, Homo sapiens
ttggtgaaaacgtgaattagttcagtgactgttcaaacagtttagagaattctcaaagaaattagaactaccatttgacccaacaataccattactaaatatatagttaaaggaaagtaaatcattccaccaaaaagatatctgcacttgtatgttcattgtagcattaytcacaacagcaaagacatggaatcaacctagatgactagaaacagggaactggataaagaaaatgtagtacatacacaccatggaatactacacagccataaagaagaatgaaaccatgtcctctgcagtaatatggatgcagctgatgacca

SEQ ID NO: 380042 - DNA, 636 bp, Homo sapiens
ttttgatattatcccaaatagatacagttgtgatattttcatagtttaattataaacatatcttaaagtgccatttatttgagcactagtgtctacaacatttttctgtaactttaagcacatttcttaccacaagctgaactcttccaccattaagtacatctggatctaactcaggcaaaaagtgattgctgcatagtgacaaaaacagaaagtattttataatgtaaatgtagaggaagcatataaaagaaacgtccaactaaaaagcttgagagaaattcgttatttacaaaatggaaacaacagttttcttaaattaggttataagtaaaaataagtacaaatgtacatctttcyctaatttaaaaaaatcaatttgagataaaactcaatttctaataacacttcaataccactcttctttgtcaaacataaacacatgcaaaaagccacaattgattagtactagtaaagatggttaacaaattatagaattcttcaacattttatttgtatttgcttacatgttttagtcgtcttttcaaaaagtaaagtttcctacttttaaaatagctctagtgtgtttaatgtgttatactaatattcaaaataaaattctgtttaaaactagaa

SEQ ID NO: 380043 - DNA, 636 bp, Homo sapiens
ttttgatattatcccaaatagatacagttgtgatattttcatagtttaattataaacatatcttaaagtgccatttatttgagcactagtgtctacaacatttttctgtaactttaagcacatttcttaccacaagctgaactcttccaccattaagtacatctggatctaactcaggcaaaaagtgattgctgcatagtgacaaaaacagaaagtattttataatgtaaatgtagaggaagcatataaaagaaacgtccaactaaaaagcttgagagaaattcgttatttacaaaatggaaacaacagttttcttaaattaggttataagtaaaaataagtacaaatgtacatctttccctaatttaaaaaaatcaatttgagataaaactcaatttctaataacacttcaataccactcttctttgtcaaacataaacacatgcaaaragccacaattgattagtactagtaaagatggttaacaaattatagaattcttcaacattttatttgtatttgcttacatgttttagtcgtcttttcaaaaagtaaagtttcctacttttaaaatagctctagtgtgtttaatgtgttatactaatattcaaaataaaattctgtttaaaactagaa

SEQ ID NO: 380044 - DNA, 572 bp, Homo sapiens
ttgagcttatgtaagactcatgagaatttgaacttaggtctgactccaaagcccatggtatttccacttcatcaagaagccatatttttccatgagactcctcttaatgtcatatttcttaatatggaaatgaatgacattttaaaatgttcttaatatactagctataataaataatgcagaatttctttttttcttgtggaagacttttagaaaataaggaataattttgaaatagtttttcatatttgttcccagaggaccttatacatttctactaaatttattcaaatattaaattatgaaaatgacaaagcacaataaacattccagtcctaggatattatgtatgaattggtcaaaaaccacagtattctataactccatagttttcctatgtaagtacattctgaagaatagctttttcacacatttggagaataaataygtttgtgatcatttacagcatatttcttgccaatgcttacggaaaaactaatataatttttagttacatgtgtttccacgctgcaaaaggatgataaaacacgatgtttttgatgtaaagatag

SEQ ID NO: 380045 - DNA, 594 bp, Homo sapiens
aattcagaaaaaaagaaattacccttcctctcaagttctcagctcttaatattaaagacatagctttcaagagaaacacctttgctgagttgctaatcaaggtatccagtatttccatttacttaatttgtctatactgtactcctcctgagaacagtgcataggcaaacctgtttttgttacctgatagaagtgggagtgaggagacagcaattgattcaaggaaactctgagaaaaaataaaaagaaacttcacttactatctccaaatgttattttgctacctaaggaatgtagacrccatgcatccaaactcccgcctgtcatcggtggatgaacaatacatttttcagcattgacagtaaacaactattcaacttttgcttcattcctctcactaaagagaaggttcattaccttatgaagtagtctagttgtgactgatacctctgttgtgagttctttggttgagcttctttgtatcagtaacaaaaggaagcatcattcagtctttctttgtaacttaatgtaagtctcttttgtacatcctattacttcaaatcattgaagtgaactccattttcacatctgttg

SEQ ID NO: 380046 - DNA, 553 bp, Homo sapiens
aaaatgtcataaaaccaaggacaatgaaacgaacctcaaagtcctccaaaaggaagaccagatctcttgcaatgggtcagttatctaaaatatattgaatttcccaacagtagccttggatcctagaaaacaatagaacagtattttcaacattcttagaaaacattatttccaacctaaaattatatgaacagggaaactattaataaaatttaagaatataaaagcatgctaagtcttaatttatttcccttgcaatcttgctcagaaagctactgagggaactgctccactgaagtggtaaaccaataaaaactaatacatgagatccagcaagagaaagaagcaaaggaatttcrtgatgatagtgaaaagagatctcaagatgacagctcacacgggcttagagaataaacattccatgatgacagagaacaccatgagcagtccttctgagcagggagaaaaagagtatatttgctatcaatacattcaagtatatcagatcaactctaaagtaaatactaaagagtattcttcgggcagaagaaaa

SEQ ID NO: 380047 - DNA, 632 bp, Homo sapiens
ctgttatgtaacctatggttacaggcaataacaaccgaatatctccctctgtccttcctctttttatttataccataaagtatattatattcattctaatcagaatctgtttgattatttttatttcctgtgtctgttaatagcatcattagccacttaatttagaaagtcagaatcattcttaattctgttctctatctttctctctcattccctaaatacaagcactaccttcacatatcccactgacttcagtgtctcttgccttgaaatattgtaatagtgtccttgtgcagtgcttttcaacagcagtgtgccataagcagtgttatggtttgtgaagacattgcagtaaagaagtagatgatagcatttgcaagattgagagatgtgtagatattacaaaggatactattacaatattgtgattataatattctgtgattacagacttgtgaaggtgatggtagaaagtggaytaggaacaataagtgaagggcattgtatatgaaagactggaattcatccttgtactttcctccccatctcctgaaatattcactaattatactaaaatagttcagtatatccccaactatgataaactgtgttctttctaaaatgtcctattc

SEQ ID NO: 380048 - DNA, 526 bp, Homo sapiens
tccctaaacttagagctatgttttttctgtctatttacctatcctggcactaagcatggtgtctgccatattgtaagcattgttggcaggaaaggaaaaaataagtttgagaagattttatataattacataaggatatgtcttaaaaatccagaagttttaatcctaaaggcaactatttttttcaactaaatcagtgaaaaaagggaaatcctcgtcaggtaagttttgtatacagaaaaatttaagcaagaaaaaagaaaacaaaaaaacaaaaaacaaaaacaaacaaacaaaacaattcaattacatcatctgaagttttaagatgattttaaaataaagtgatggcaatggaaaaggggtaaagataggtcasatgaagtaatctccgcattgcaaacaaaattatccacttaaaatatgaacaatatttaactcccttacttgaaacccaataataacattctatcacacttgaaataaaatccaaagtgcttgacatcatatcctaggcctaatgtgg

SEQ ID NO: 380049 - DNA, 361 bp, Homo sapiens
agtaggcttcatccatgggatgcaaggttagttcaacaaaccgaaatcaataaatgtgattcatcacataaacagaactaaaacaaaaaccacaagaawtctcaatagatgcagaaaaggcttttgctaaaatccaacatcccttcaacgaactaggcattgaaggaacatgtttcagaataataagagccacctatgacaaacccacagccaatatcatactgaatgggcaaaagctggaaacaaacctcttataaactgtaacaaggcaagcatgtcctctctcaccactcctatttaacatagtactggaagtcatggtcagggcaatcaggcaagagagagatataaaaggcatcaa

SEQ ID NO: 380050 - DNA, 643 bp, Homo sapiens
atgcgtggtcactaacctagccttcctaggagagtaggtatggtcaactgcatgaatttattttattgaatagagtctgtaaatgtgagaccagggttgaatttctttttctactagtcctccttgtcagctcttttccacataccacttttgagttcttttataacaaaataagcaatagatattaaagaatagttacatgaagggacaacayagtttggctagaatctgctcgggacacctacaagcatctggtagcagctccttttgcatctgaagcacctatacagaccagagagcaggagagcagattcacttttgtccctgtttacttggcaaccttcagaaacaggaaacaggatctgtgatggatgaaaagcattatttccctcataacaacttctagtacagtgaaaatggtagggagaggagagaatatggagaaaacaatgagcttcacacatgctacctataataatctcattatctttctaagagaaggatgtggtgatgatttcacacatgaaaaatgaacatggtgctgtgcacggtggctcatccctataatcccagcactttgggaggccaaggcagaaggatcacttgagcccacggttcaagatgagcccagtcaacatagtga

SEQ ID NO: 380051 - DNA, 524 bp, Homo sapiens
caaaattctgtggtaagtactagaataaaggagacaaagtacatgttctgtattgaaggacatcacaatctagtgaccagcaagctatakggtccttaaaattaaaatttcagtggaatattgtaagatccctagaaatgactcagagctcactatcccacttcagatttatgatatgatatgatatgatatgatatgatatgatatgatatataaaccaagacctacatttttcactaaagactgaccacaataattgtgccatttcagcattaagccatgcttgctctattatgatcatgagttggaatacatatcataaagggtaaatattaacagatactccctgactcaatgacttacaattttaatatgtcaagaaagtgtaaatgctacaaatctggcaataaacaatcagtgcatctgttatccacattgcataggtagataaaatatctttggatgattttcctggcatatttttaatgaaaaattaaagagaagatcttttttgaacctcaaag

SEQ ID NO: 380052 - DNA, 420 bp, Homo sapiens
aatcgtctatttctgttcttttccaaaatcaaattttaaacacatttggcctatcgaatatacttaacattgtggtcagttactggaatatcaacaaaggacatattttctttttatccactcctgttgactttaaagatattgtttctctaggcactaacaaattcgtaactgtgyattttctttccagtctgagttataagagattatactgaacataaatcaaatttgtgctgcaccttatgtgagaaatttcagctctctcctcagtcatgaggttaaaaattacatctcaaaataaagcatttggcaaaatttatctatcttttaggcctttcaattcaaggaaaagtggcaataaccaataaaatattaacaaatgcagaatttgtaattgtttttaccagctagaagattaac

SEQ ID NO: 380053 - DNA, 666 bp, Homo sapiens
ctctgtgaagtataaggttaaaaatattagggtcctttttgcaattaataattaaccagcttttggtaaaaaataatttctaaatcatgagaaatttactaaaatatatctgctttttatttgaacatttgttatagatttggattttgcaaaaagtgtaattatctttcttgaggtaataacttttaaactataacttctaaagagtgttttatstaattagaaaaatttacaaataagttattagaaataaaaaaaattaatactcattcaaaagaagcaaagactattcaataaaatgagaatagcaatcaccctgaaaggacacaatcaatcacacacgaactggtaatgttacatagttaaaatatgcactcttagaaaacccaaacagaattccattttaacacagtagatttttatattacatcattttgtttcacagtttatatatttgctctttgatctgtgtgctatttagatgaatagataattgttttcaggggataatgacattttttgatgctttgcttttgttttgacatttgatattttgtggtctgaaaatatggcttataaaaatgtctctttaggtagaatgctttaatgttttgttgcgagttctatacaaatggatactccattagaggttaaaaactttcattc

SEQ ID NO: 380054 - DNA, 666 bp, Homo sapiens
ctctgtgaagtataaggttaaaaatattagggtcctttttgcaattaataattaaccagcttttggtaaaaaataatttctaaatcatgagaaatttactaaaatatatctgctttttatttgaacatttgttatagatttggattttgcaaaaagtgtaattatctttcttgaggtaataacttttaaactataacttctaaagagtgttttatctaattagaaaaatttacaaataagttattagaaataaaaaaaattaatactcattcaaaagaagcaaagactattcaataaaatgagaatagcaatcaccctgaaaggacacaatcaatcacacacgaactggtaatgttacatagttaaaatatgcactcttagaaaacccaaacagaattccattttaacacagtagatttttatattacatcattttgtttcamagtttatatatttgctctttgatctgtgtgctatttagatgaatagataattgttttcaggggataatgacattttttgatgctttgcttttgttttgacatttgatattttgtggtctgaaaatatggcttataaaaatgtctctttaggtagaatgctttaatgttttgttgcgagttctatacaaatggatactccattagaggttaaaaactttcattc

SEQ ID NO: 380055 - DNA, 614 bp, Homo sapiens
tctggacttggtgattgtgtagatacaaaggttaaggaaggatagagagttaagatgacacctgagattcttgattggacattttagttaattcctattagaatgacagcatacaaaacaggtttgtaagaaaataattattcagctttgatcatagtgagtttgaggtgcctgttattcaaattaaaaatagtcctcaattgagtatacagtcctaattagcaggagatattctatggatgtatgtctttggcattcatctcacttgtgaaataattgaagtcatgagactaggtgagaatgttatagaggagtctgtggagtaggggcatgaaaagagaacaaaagccagagttctaaaaaacatcaacgtttaagagttagatagaagagagtatcacaaaatgactgactataagcacttagataaatgtgagaaagctcaggaggagaatgtgatataatamaaacaaaggaaatatatgactgatggacagagttgattgctcaactaagtcattccctccttctacataatttatagaatctaaagcatattccatcagctttatgcccagggaggggagaaaataccttcagcccacagagtatga

SEQ ID NO: 380056 - DNA, 576 bp, Homo sapiens
cttgagctgtctccataatttgagtttctacataacaaactaaaacctaacttaaaagtgtattatttttgtgtaccaaatagccaggttttagccaataacaaacaggaaagcttcagccaatcacaggcagccattaccatccaggarcacgggaaattctggaaatcaaaggaagaaaagtggacctccttctggacactggggctggtctctcagttctcctttccaatccaggctccctctcctctcttagcatgaccaagaggggcatctcaggaaggcctttaacctgatatttttcccaaccctttagttgtagttggggagatctcttgttcgcccatgcctttctaattatgcctgaaagcccaactcctctgttgggcagggttattctggcccatataaggaccaccaccctgatggctccaggacaaactctttgtctccctttagtggagactggtattaacagaagtttgttcaattcaaggaaaaattggctgagcaagaacttccataccagttcagatccaccttaaggattccacttccttttctaaccagaaacaa

SEQ ID NO: 380057 - DNA, 629 bp, Homo sapiens
aatattcaaacttgtgttacatagtttctcagagttaatagtctaccacataacataaaatttaagaaccattatgccccatctagtatatatgctattacagtatatattatatccatatatatatacacayatatatatattataaacccctcaatattgtgttttcccctgcaaataattataatcgtcctttggtatcaatggaggattgttttcaggacctcttgtggatacaaaactgcctagaatctcaagtctctaatattaatattaaagtggcatagtatttacatataacatagtatttacatataacatttttgtatgctataaatctctagattagttacagtaataactattacaatgtaagtactatgcagataattgttatacagtgtttaggaaataatgacaagaaaaaaggctgtacatgttcaatataaatgcaatttctttctgaaatattttgcagctgaagttggcagaatctacagatgtggaaaccatgaatacggagggctgactgtgtacatttttaaattaacttaagaaaataaaaaatctaaatacttttgtatatttatgtgtatatcatttgtagtgctctttatttgtcctgtata

SEQ ID NO: 380058 - DNA, 610 bp, Homo sapiens
gttttaactcaaaataatatacaaggttaagtactgttattttcttcattttattagtgaggcaaatgaagcatgtaatgtttacctaactttcccaagtccacacagctattaagtggcaggggcaggatttgatcccagcagtgtgggtgctatgatatgccacatttatagccaactgtttgttctaacacaaacatcaatttccaaaattgtttgggtttataaacttacatctaatgtagcatatgggaaaatgacaaatctacataaaacgaatacatagtcctgaaagggtctatgaattgcatttatagttgtccttttccaagtatcgacagcagttccaggataagtggaacacatctgaacagaagaaagtagatttctgatttctaaaataataatttgtttctagcaagccatgctacacaggagaatggttcagtatatggctgagagaagayattacagggaggagaaataagttttacattgtgaaagatgacagagaagagaattaggtgaagcggtgcatactagtcaaagtgatggtaactaagttaaatgagaagacaatgtaagttaggaaatgtgtgttaggaaaaag

SEQ ID NO: 380059 - DNA, 604 bp, Homo sapiens
ttcctcatggattgtttgtcatgtaagaaagcataactgaatagcaccgtacacataagcaaaagtgaratgttaataatatttctacctaaagtgtatcatattaattcatattaaaataaatgagatttacaatcatattggcaggaatctactaaaagtaatatactttctagaaatttgaaactccctaaatagatgtaactgtccttgaatattaaaagacgtactgggaaaatggcaaaagactccaagaaaccaagtcaaaatcatattgtttatttttcatgtatgaacaagaattgaagaatgaaaagctcagaaggaaggtaataaatgtaaataatacataggaaacattttacaaaacttttacttttgtaaattgtgcatttcactgagttttaacattagttggttaaagtccttatcatatttttatgaaaggtgaagtcaacaaataaaccattgggaatgtggaagaaaagttcagaaaattaaaaactcagaggccattactcatgtcaacttataaaaataatgatcacattaaacataacttactctcttaacatactgggttaatatcgtagtagcttatgga

SEQ ID NO: 380060 - DNA, 604 bp, Homo sapiens
ttcctcatggattgtttgtcatgtaagaaagcataactgaatagcaccgtacacataagcaaaagtgagatgttaataatatttctacctaaagtgtatcatattaattcatattaaaataaatgagatttacaatcatattggcaggaatctactaaaagtaatatactttctagaaatttgaaactccctaaatagatgtaactgtccttgaatattaaaagacgtactgggaaaatggcaaaagactccaagaaaccaagtcaaaatcatattgtttatttttcatgtatgaacaagaattgaagaatgaaaagctcagaaggaaggtaataaatgtaaataatacataggaaacattttacaaaacttttacttttgtaaattgtgcrtttcactgagttttaacattagttggttaaagtccttatcatatttttatgaaaggtgaagtcaacaaataaaccattgggaatgtggaagaaaagttcagaaaattaaaaactcagaggccattactcatgtcaacttataaaaataatgatcacattaaacataacttactctcttaacatactgggttaatatcgtagtagcttatgga

SEQ ID NO: 380061 - DNA, 604 bp, Homo sapiens
ttcctcatggattgtttgtcatgtaagaaagcataactgaatagcaccgtacacataagcaaaagtgagatgttaataatatttctacctaaagtgtatcatattaattcatattaaaataaatgagatttacaatcatattggcaggaatctactaaaagtaatatactttctagaaatttgaaactccctaaatagatgtaactgtccttgaatattaaaagacgtactgggaaaatggcaaaagactccaagaaaccaagtcaaaatcatattgtttatttttcatgtatgaacaagaattgaagaatgaaaagctcagaaggaaggtaataaatgtaaataatacataggaaacattttacaaaacttttacttttgtaaattgtgcatttcactgagttttaacattagttggttaaagtccttatcatatttttatgaaaggtgaagtcaacaaataaaccattgrgaatgtggaagaaaagttcagaaaattaaaaactcagaggccattactcatgtcaacttataaaaataatgatcacattaaacataacttactctcttaacatactgggttaatatcgtagtagcttatgga

SEQ ID NO: 380062 - DNA, 551 bp, Homo sapiens
gtgtgaaaaggacctgagctaaaattccattacctaacttctatgggtcttactctgattggcagaacacagtgacattttgagtcttgtaattagggtcagttcagtgttcagtaatcatcaaacatcttattatttctatttcctctgtgtacaatstctctggtaaaatgccataggtccctttggagaaggctaggagacatagtataggtttaaatttttggcagcttagcagggtctttcctcaaggatacccagcttcatctttaatccaggagctaagctgatgagaaactgaggttgactgtaccagaaaaatgtggaattaaagaactttaaaaattctgctcctgttgctgacactcattgccttgggaaaattttaacatgtttctttggctgagaaatggctcacatcagtggggccactagtgctgctgtctgaggtataacatgggcaatgaaaaagacctgctgagatgagaaatttacgagcacaggtaaaggggttccagggatgttttttatctcaccactttcctaaaaac

SEQ ID NO: 380063 - DNA, 550 bp, Homo sapiens
agacattactgtacattactgaagacctttaaaacactttaaacttaagctacactaaatttattaaaacatatttttcattttcagtaataaatcacattaggtttctgtaacatttttactttataaaatttttaattttttaaaaattgattctttgataataacagttaaaacacaagcacgttgtacagcagtacaaaaatattttcttcctttatattattattttataagcttttttattttgaaattttttatgtacttttaatttgtaaacttttctattgaaaatgaagacacaaacatgcacattagcctaggtctacacaaagtcaaggtcatcaagacatcaccgggtgataggaacttctcagccccattataatcttatgggaacaccttcaaatatgcaattgacccaaacgttgttatgcggttcatggctgtattatgtgaagataaatatttcagtaaataatgaaacagtaagttatatgtgggtaaatgaatgataattaatatagrtaaatcactaatgtctaatact

SEQ ID NO: 380064 - DNA, 560 bp, Homo sapiens
ctcttctttcatcaaaaatgagaacatctgtaatcatcacagcaggatgctggcctgtgcctctaagtggtgtccagaaagacctctgttgggctgagtttggatagtcccacatgaggagaatagttatttactgaggaatagctgggaggaagcaacttatgatttttgtaaaacaaaagtagcctatactataaaataaactagaatgcgcaatgtaaaatgtgacttggaaatgggacgtacacaaacttaggaacrtattttatgagaaacaaatttaagaacttcaaaaagaaaattttcagaataattgtcattattatcacattaaaaacacaccacataaaaatacattgaaatcttgaaatctaagttgtggcttattgtctagatactgagaaatggtttgtgagagaagggagagggatgtgagtgtgggcttagtttatatttcactttgaagataaagtgagaaacattaagtgactgcatttgtgctaaagaacagacaatgctattgtgtgatagagaatacaatgaaaggcaaaaccaggaga

SEQ ID NO: 380065 - DNA, 603 bp, Homo sapiens
agctatactatatttaagccactgatcaggtaccaaaatgttattatttagtattaagctgcccagtggcaggaaaaactgtaatgccttagaatctcagaaaaatcactgttttcacccaatagaagcagttcttaataaacaaaattctcaccaaaccacttcacaagatattatagtaaacacatcagaccaacacctcaagagagaaaagtaaaactgaattaaaatcacctgtctgtttacaaactcttcttaaaatttgcgaatttcataagaagtttayaccaatttctcataaaaaataaaccctcattaatctggataattctaaagaatttattaataaaaaccaaatgaaagcatgagtaacataagctcttaaaagaccaagatttttcatcagtgacattttcaacaagtacatgatttcatatttatgggtgcttctagcagagtgatgggcacatgagtcttgaactctaaagtacctcctgccacttgctgttacatattctaaatacattctccataaattgattagactatttgcctagtctataaaggtgaattagtctttgaagtacttttttaaaaacttgc

SEQ ID NO: 380066 - DNA, 511 bp, Homo sapiens
atacacatcatgctccctccacccaggtccatgtccccatcaacaatgactcaaccaagagccagttctctgtgaagctcagctccatggctgcccaggacacagctgagtattactgtgaaagacttaatgagaatgtgtccttgtgagccctgacacaaaccttgctggcagggcactcaggactgccaggaagactcaggaccacagaggggactcaagaccaccagggaagagcaggttgcaggaagcacagggccagccccagagcagttgggggtagagatgagaggttggtttactgccaggttctggggttgcctcaccatcttcatgtttcctccagggaccctctcttatttcatggtgctgtgwctagctctacatctctaaaataccacagttttgttgtaccaggaggaaaccttctcacaggccctaaatgtagagcaatctctctgccagtggtcactaggatcacagccctgaggaagctgagggtaacctggtg

SEQ ID NO: 380067 - DNA, 564 bp, Homo sapiens
tgccaaagctccagggctcaagcccattccttgcagctcaggtggggctcaggctgtggctcctgcagccacacgggagaggctgatgggactttcttctctctcattgcacgagaccctccagtgtgttgtgtggagactcacctgggaaaggaagtggccaatagtagtgaaggggatgagcttgtgtggacaaaatgggatgtggatatgaaatttgtcctgtgctgtgcaagctaccacaaagtcaccttcctcaccagtggcgttatraatagtgtgtgaaagttgtcagaatcaaaatggagccacttgtgttaaaaccctgacaaatggaactaggaatgaccatgaaggagggttcgcatgcacatactcctgataagaagaactaccataaattgactctgcttaatcacaaccttggatagaagccaccaacaccatataaaacttccttctacaaagatatgtgtccagcaactgcctgttcagccttatactgatgccacccttggtattgattctacaagcacaggataattctttcaaaacagcttatgt

SEQ ID NO: 380068 - DNA, 590 bp, Homo sapiens
gttcgcatgcacatactcctgataagaagaactaccataaattgactctgcttaatcacaaccttggatagaagccaccaacaccatataaaacttccttctacaaagatatgtgtccagcaactgcctgttcagccttatactgatgccacccttggtattgattctacaagcacaggataattctttcaaaacagcttatgtaacccacctcattttcacttcataaacctatggattgacatcctgtagtcactgctgcatttcttattaatgttaataagccccctttacaatattcgaarcaatttttctctgatatctcttctaaaataaagaatttccaagttgacaccaataaagaagatacttaggaagatctatttggcatatttggaaggcatatttttatttatttatttacttttgagatggagattcactcttgttgcccaggctggagtgcaatggcgggatctcagctcactgcaacctctgcctccctagttcaagtgattctcctgcctcagactcccgagtagctgggattacaggcatgcaccaacacgcccggctaattttttattttt

SEQ ID NO: 380069 - DNA, 583 bp, Homo sapiens
ttggcatatttggaaggcatatttttatttatttatttacttttgagatggagattcactcttgttgcccaggctggagtgcaatggcgggakctcagctcactgcaacctctgcctccctagttcaagtgattctcctgcctcagactcccgagtagctgggattacaggcatgcaccaacacgcccggctaattttttatttttagtagagaggagatttctccatgtgggtcaggctggtctcaaactcctgacatcaggtgatcccccccgcctcagcctcccagagtgctgggtttacaggcatgagttgatgcgcctggccaggaagccatctttaacatcctgttgaatgattctgcatagcacatcaatcccttgaaatactttgctgtatcggcttgtgattaatcagtatataaaactgaaggtaaaatgggaaatacatgggcttttgatgaaccaagccatagggtgataatgtctgtgtccttgaggaagcagactaagggttgtaagttctggtgggagtacctttggcaaagggagttcctgagtttctggatattatgctactttta

SEQ ID NO: 380070 - DNA, 607 bp, Homo sapiens
tgttgcccaggctggagtgcaatggcgggatctcagctcactgcaacctctgcctccctagttcaagtgattctcctgcctcagactcccgagtagctgggattacaggcatgcaccaacacgcccggctaattttttatttttagtagagaggagatttctccatgtgggtcaggctggtctcaaactcctgacatcaggtgatcccccccgcctcagcctcccagagtgctgggtttacaggcatgagttgatgcgcctggccaggaagccatctttaacatcctgttgaatgattctgcatagcacatcaatcccttgaaatactttgytgtatcggcttgtgattaatcagtatataaaactgaaggtaaaatgggaaatacatgggcttttgatgaaccaagccatagggtgataatgtctgtgtccttgaggaagcagactaagggttgtaagttctggtgggagtacctttggcaaagggagttcctgagtttctggatattatgctacttttaacttaaagatgcaatttatgatttatttttacttaaatctttccagaagatatttggcagtaaggataggatagcgtttgtgtgat

SEQ ID NO: 380071 - DNA, 517 bp, Homo sapiens
tgctgtatcggcttgtgattaatcagtatataaaactgaaggtaaaatgggaaatacatgggcttttgatgaaccaagccatagggtgataatgtctgtgtccttgaggaagcagactaagggttgtaagttctggtgggagtacctttggcaaagggagttcctgagtttctggatattatgctacttttaacttaaagatgcaatttatgatttatttttacttaaatctttccagaagatatttggcagtaaggayaggatagcgtttgtgtgatactgatgacttagagagttattttgtaattgttcctgtaaggtatgcacattgctcacttgatgaagtacaaatgtcacaggtgggaaaatcagattaagcagactttatcaaatgtcatggctgtaatttttggcaagaaaatgcttcacatcaaccagaaaataaacagaaaacaagaaaacatattcaaatccagtgggagtctgaactctgtccttctctgttataagtacaagg

SEQ ID NO: 380072 - DNA, 517 bp, Homo sapiens
tgctgtatcggcttgtgattaatcagtatataaaactgaaggtaaaatgggaaatacatgggcttttgatgaaccaagccatagggtgataatgtctgtgtccttgaggaagcagactaagggttgtaagttctggtgggagtacctttggcaaagggagttcctgagtttctggatattatgctacttttaacttaaagatgcaatttatgatttatttttacttaaatctttccagaagatatttggcagtaaggataggatagcgtttgtgtgatactgatgacttagagagttattttgtaattgttcctgtaaggtatgcacattgctcacttgatgaagtacaaatgtcacaggtgggaaaatcagattaagcagaytttatcaaatgtcatggctgtaatttttggcaagaaaatgcttcacatcaaccagaaaataaacagaaaacaagaaaacatattcaaatccagtgggagtctgaactctgtccttctctgttataagtacaagg

SEQ ID NO: 380073 - DNA, 517 bp, Homo sapiens
tgctgtatcggcttgtgattaatcagtatataaaactgaaggtaaaatgggaaatacatgggcttttgatgaaccaagccatagggtgataatgtctgtgtccttgaggaagcagactaagggttgtaagttctggtgggagtacctttggcaaagggagttcctgagtttctggatattatgctacttttaacttaaagatgcaatttatgatttatttttacttaaatctttccagaagatatttggcagtaaggataggatagcgtttgtgtgatactgatgacttagagagttattttgtaattgttcctgtaaggtatgcacattgctcacttgatgaagtacaaatgtcacaggtgggaaaatcagattaagcagactttatcaaatgtcatggctgtaatttttggcaagaaaatgcttcacatcaaccagaaaataaacagaaaacaagaaaacatattcaaatccagtgggagtctgamctctgtccttctctgttataagtacaagg

SEQ ID NO: 380074 - DNA, 568 bp, Homo sapiens
tattttttcaaatactttctctgtatctataatttctacttttcagaattaaagtatacatttactacacttttgatattgtttagtttcttcactcttttcctttgcaatttacttgttaaatttctagtgacattttaagtgcatggtttcatttaaaagctgagccagctctaatgagcagtgtgcccaaagattgctcaatgtttatactgcattgcttttgatttctcatgcatttccatttgattacttcttagtattttcatctctcagtcccctatctagtcctgcattatgtccacagtttcttcaagagatttttacatatgaattatagttacattatatatcttatttaattagttataatacctgtatcttttataaatccctttctgattatttctttattgtgactttggtatttctcattaatatatgtaataatcrttgttgataaccagacatgttgggtttgacagttgatactggcttatttcattttatccattttctgcctgtatttgaccacactttatctttgccaggcaattattgtggaaat

SEQ ID NO: 380075 - DNA, 592 bp, Homo sapiens
aatccagtcagacaaaaataaagaaaaaaatattttttaaaagtgaagaaagtcagaaatatgagattatgtaaagtgaccaaacctatgaattactggcatgccctagagagaaagagaaaaagaaaacagcctggaaaacatatttgatggaataattcgagaaaatttcttgaatcttgctagatagacatctaagtacaataaagccagacggcacctgtgagatactataaaaaatgaacattaccaaggcatatactcaccagactrtccaaggtcactgtcaaagaaaaagccctaaaggcactggagaaaaaggccagatcacacacaaaggtagccccatcaggataacagccaaatccaacagcacatcaaaaagttcatgatcaagtaagcttcattccaaggatacaaggttcagcatatgcaaaccaaatgtggtgcagaattaaacagaaaccacatgatcatctcaatagatgcagaaaaaaaagcttttgataaaattcaacatctttcttgataaaaaaaaaaaaacactcaagaaactaggaatcaaaagaacatacttcaaaatagagccatg

SEQ ID NO: 380076 - DNA, 518 bp, Homo sapiens
cacccaggcctgacccttggctttgtgttcttagcaaatactttactcttaaaggatgacccgttccccttacttcaactattatttgttcatttactcataacaactcataacagccaattatgagcacccgctgagttgtagatgcaggagctacaacatgaacagtttccactccaactcaaatgcattagccagtctgaattatcaaggagctttctctctgcttctgcaaatggcaccagcattcttccactcatgccttgggctttgattctctttgcctcggscccctaaatccagttagtcatcaatctctgttgattatgcctttgacagttttctatgttctccttcctttctgttctcactgccactaattgtccagaatctcctttgctcatgcctagatttccgcagtggtctccttaccctttctttctccttctataatgcatgtatagaatcctgaaatatgcattctgaaatattgctctcgttgtgaaaaattgcaggta

SEQ ID NO: 380077 - DNA, 557 bp, Homo sapiens
ttctatgttctccttcctttctgttctcactgccactaattgtccagaatctcctttgctcatgcctagatttccgcagtggtctccttaccctttctttctccttctataatgcatgtatagaatcctgaaatatgcattctgaaatattgctctcgttgtgaaaaattgcaggtagagcacaagacacactgtgtgcctgtagtcagaagccagttaacacctctggctcaacatccttatctgtaaaataaatatcacatctcaagtgtaatgggaattaaattagwtaatatatataaagtttctttgtaaactataaatcactaaataagtgttatatgtgataattatcaggcctctttgtcacataggaaatgctcaaccatatttttcaacaacgtcactcttatttccttggctcttgagctctgaagatataatagccctaacgtgtaatacctgagcttttttccatgagtagcttgaccagcagacttcattccaaataaactgggtcatcccttttggctcttggaacacaactctaatttagt

SEQ ID NO: 380078 - DNA, 569 bp, Homo sapiens
ccagttaacacctctggctcaacatccttatctgtaaaataaatatcacatctcaagtgtaatgggaattaaattagttaatatatataaagtttctttgtaaactataaatcactaaataagtgttatatgtgataattatcaggcctctttgtcacataggaaatgctcaaccatatttttcaacaacgtcactcttatttccttggctcttgagctctgaagatataatagccctaacgtgtaatacctgagcttttttccatgagtagcttgaccagcagacttcattccaaataaactgggtcatcccttttggctcttggaacacaactctaatttagttagttagttagttagttagttagttgkttctttctttccttcctttcttcctttcctttttttttttcttgagccagggtctcattctgtcacccaggctgtagcacagtggcatgatcatggctcactgcagcctcaacctcctgagctcaagcaatcccccaattttttttatttttcatagaggctgggacttgctatgttgcccaggctggtctcagact

SEQ ID NO: 380079 - DNA, 570 bp, Homo sapiens
gagactctgtctcaaacaaaaaaaaaagaaaagaaaagtggttcatgataaccctcaaatatgttggcctttaaaagacataaacaacaggccaggtgcagtggctcatgcctgtaatccagtactttgggagacccaggtgggcagatcacttgaagcaggagtttgagaccagcctgsctaatatagtgaaaccccatcgctactaaaaattcaaaaattagctgggtatgatggcatgtgcctatagtcccagctacttgggaggctgaggcacaagaatcacttgaacctgggaggcagaggttgcagtgagccgagatcatgccactgcacttcagcctgggtgacagtgagactctgtctcagaaaacaaaaagcaaatgtaaacacacacgcataaacaacagtattgcaactagaagagattattaataattatttatgtatgtagtgattgggctgtgagaccaaaagtacttgataaatacaggaagtcatgataagtgaaaaggaacttcattgttatcattatctaggtttatagttctcaattccatgtgttcattc

SEQ ID NO: 380080 - DNA, 551 bp, Homo sapiens
tagcttcaacctcctgggctcaagcaatcctcccacctcagcctcccgagtagctgggagcactgactggaaagagagttaggtttgggtgactcagttgggtgaaacagagaaggcagcacaatacaacacatgaaataaccgaagcagttttttattaattccagagagaggagggcagcacacttcgcagggccaactagaagggggagccatccaggagacctgtgctcgactgatgggtgggagcaatagcgagagagagggagggacctgagagtggaagcctttattgggatgtaaggtgctacctgagcaggtttcctgcrgggaggtctaatttggtttaatgcaagcagctatgagtctctgctgtgactgagaggtggtcactgatatatccacatggtccctgcagagtatgggggtctgtggggtgagtcaagtaggttatatttagctgtcccatagtgaagtggtcatcatgagaaggttgtgtaaggcagatatcaggatcagtcacatggagaaactgggaggaggtgaacggg

SEQ ID NO: 380081 - DNA, 392 bp, Homo sapiens
aatcttttcttcaaatgtgaactggatcgaatgattccttaagtccagcaaggcaacaggaaattaaacctctggtctgcacacttgcaatgcaaaacatttaatggattttgatagagtcaactttggatttgatggaaattttttacaagtttttttttttggatgcatacaaacaataagctttttattctaacatgagcaaagaccctcaaaaagtgagacctgggtggagcttcatttgatgctgctcctcaaaagtggttcttgctaaaggataccattttttttttcctttaaaacactatgttcattttggagaagtgataagctaggtcacttttattmttattttatataaatttctaaagatttctgtaacatttaaattt

SEQ ID NO: 380082 - DNA, 592 bp, Homo sapiens
attgtaaaaattcaaaaaattgcaacctcacacataaattaaaagagatatagtattttattactgggctttcattcatgtctatcctgactgatttctgtcacagagagaaatttagatattttattaaacttggatgtcattaattccatataaagcaatgctaagagagtcagcatgtgttactgatgtgttgctgaagattaaagtatttttatktctcagtaaaaaggtggaaggagccaactgagacacaaaaaaagggctgaggttctattcatggtgaggttctttttttgtttcttccagctctaacgtgggtacccaactgtgtggcttttcagtgagccccaatataaaatgtaataatttttttctattcttaggctttatctaccaaaaaatgaattggataatctacataaacaaaaagcacgaagaatttatccatcagattttgccgtggagatactttttggcgagaaaatgacttccagtgatgttgtagctgaatccgattaagtatagctcccccttccccttctgggaaagaattatgttctttccaaccctgccacatgttcatatatcc

SEQ ID NO: 380083 - DNA, 520 bp, Homo sapiens
gttgtttagctaaaaatgctaacttctatcattgagaacacgaggcataaatgggttaaccaatttatgcctagtgttccattattggaacactcagcatgtgggagttatatcctactgctcaaggtcatttccaaggtctgattgtaaaaattcaaaaaattgcaacctcacacataaattaaaagagatatagtattttattactgggctttcattcatgtctatcctgactgatttctgtcacagagagaaatttagatattttattaaacttggatgtcattaattccatataaagcaatgctaagagagtcagcatgtgttactgatgtgttgctgaagattaaagtatttttatttctcagtaaaaaggtggaaggagccaactgagacacaaaaaaagggctgaggttctattcatggtgaggtyctttttttgtttcttccagctctaacgtgggtacccaactgtgtggcttttcagtgagccccaatataaaatgtaataatttttttc

SEQ ID NO: 380084 - DNA, 536 bp, Homo sapiens
gtattttattactgggctttcattcatgtctatcctgactgatttctgtcacagagagaaatttagatattttattaaacttggatgtcattaattccatataaagcaatgctaagagagtcagcatgtgttactgatgtgttgctgaagattaaagtatttttatttctcagtaaaaaggtggaaggagccaactgagacacaaaaaaagggctgaggttctattcatggtgaggttctttttttgtttcttccagctctaacgtgggtacccaactgtgtggcttttcagtgagccccaatataaaatgtaataatttttttctattcttaggctttatctaccaaaaaatgaattggataatctacataaacaaaaagcacgragaatttatccatcagattttgccgtggagatactttttggcgagaaaatgacttccagtgatgttgtagctgaatccgattaagtatagctcccccttccccttctgggaaagaattatgttctttccaaccctgccacatgttcatat

SEQ ID NO: 380085 - DNA, 592 bp, Homo sapiens
attgtaaaaattcaaaaaattgcaacctcacacataaattaaaagagatatagtattttattactgggctttcattcatgtctatcctgactgatttctgtcacagagagaaatttagatattttattaaacttggatgtcattaattccatataaagcaatgctaagagagtcagcatgtgttactgatgtgttgctgaagattaaagtatttttatttctcagtaaaaaggtggaaggagccaactgagacacaaaaaaagggctgaggttctattcatggtgaggttctttttttgtttcttccagctctaacgtgggtacccaactgtgtggcttttcagtgagccccaatataaaatgtaataatttttttctattcttaggctttatctaccaaaaaatgaattggataatctacataaacaaaaagcacgaagaatttatccatcagattttgccgtggagatactttttggcgagaaaatgacttccagtgatgttgtagctgratccgattaagtatagctcccccttccccttctgggaaagaattatgttctttccaaccctgccacatgttcatatatcc

SEQ ID NO: 380086 - DNA, 544 bp, Homo sapiens
tagcttacttgacaagcttcctttaattacacacagacatgggggttggggtaagaagatggtggtaaatatgaagataagtaatctttaataacttctgcttttgtataaaattgtaagtgaagtcaaaagaaatattcttagagtaatctaggtgtattattttgaaattcactattcctgctcacaaccaacttcacctaagcttggggggactctgaagggaggttatctttgcgttataaacactggttagccttatgtctacaggaaatcattattatttcctctttggtgctgggtgctacttttttttaacaaattttttatttgtattttttattttttgagacagcatctcactctggttgtcgagactggagtgcagtggtgtgatcttggttcactgyagcctcaacctcccaggctcaggtgattctcccacctcagcctcctgagtagctgggactataggcgcatgccagcacacccggctaattttttgtatttttattagagacgaggttttgccgttgttgaccag

SEQ ID NO: 380087 - DNA, 605 bp, Homo sapiens
gctccttctttgaggaaaagatcgtagaacatgctttcaaattactttcatgttaatattataccctgccatwcatacgacagaaacgtgtaggcacaacataggttatgctatttcctttaaaattcacacagcgataatctacagagggcagattatgtcctgggtttaggtgaatagggaggaaaatacttagctggctcagtgaagattaagatctgtctttttcagtactagaaacacaggaaggaaggaaactcccttttttattttaaggatttccctttttgaaataaggagattaccattaaggtttctcttccccagacctccaagacccatcaaaatttctggaaattgtgagttgtcacactattctgcttttgcttattcaaagaaaactcatttaaggcctctttgggtgttgttttcttagaatgcaaaatgaatgattctttgaacaactcaagaaacttagatcagaatgatactcatgtcttaaaattttagctttaattttaaatatgggggtatgtgtgcaagtttgttacatcagtatattgcaccccggtagagagcatagtacccaataggtagtttttcaa

SEQ ID NO: 380088 - DNA, 605 bp, Homo sapiens
gctccttctttgaggaaaagatcgtagaacatgctttcaaattactttcatgttaatattataccctgccattcatacgacagaaacgtgtaggcacaacataggttatrctatttcctttaaaattcacacagcgataatctacagagggcagattatgtcctgggtttaggtgaatagggaggaaaatacttagctggctcagtgaagattaagatctgtctttttcagtactagaaacacaggaaggaaggaaactcccttttttattttaaggatttccctttttgaaataaggagattaccattaaggtttctcttccccagacctccaagacccatcaaaatttctggaaattgtgagttgtcacactattctgcttttgcttattcaaagaaaactcatttaaggcctctttgggtgttgttttcttagaatgcaaaatgaatgattctttgaacaactcaagaaacttagatcagaatgatactcatgtcttaaaattttagctttaattttaaatatgggggtatgtgtgcaagtttgttacatcagtatattgcaccccggtagagagcatagtacccaataggtagtttttcaa

SEQ ID NO: 380089 - DNA, 577 bp, Homo sapiens
catggtgaaaccccgtctcactaaaaatacaaaaaaattagccgggcgtggtggcgggcgcctgtagtcccagctactcgggaggctgaggcaggagaatggcgtgaacccrggaggcggagcttgcagtgagcgaagatcgtgccactgcactccagactgggcgacagagcgagactctgtctcaaaaaaaaaaaaaaaaaaaaaaaaaaaaaaaaaaattttaaagaaacccaaaggtctatcaacaggggaaaaaaacaggtaaattaaattgcttatatttccatacaaaggaatatttgcagccctaaaaaaatgaaggacagtaaaaagtagtaagacaaaaggaacaaattttttttccccccccccccccaaaatttttttttttttacacacacatttccttgtacatgcataaaatacatctggaaggttacacaaaaaacctctgaggtttctggaaatgtaaactgggggcatgaaggcaggggaaagggagagacttcactgtttacctttttattattttccaattttaaatcatttgaatgtataacttgtctaaaaatca

SEQ ID NO: 380090 - DNA, 599 bp, Homo sapiens
aaatttctggaaattgtgagttgtcacactattctgcttttgcttattcaaagaaaactcatttaaggcctctttgggtgttgttttcttagaatgcaaaatgaatgattctttgaacaactcaagaaacttagatcagaatgatactcatgtcttaaaattttagctttaattttaaatatgggggtatgtgtgcaagtttgtyacatcagtatattgcaccccggtagagagcatagtacccaataggtagtttttcaacctgcacccctctccctccatccccctctagtagtccacagtgtctgttgttcccaaccttatgtccaagggtacctgttgtttagctctcataggtgagaatatgtagtatttggttttctggtcttgcattaatttgcttaggataatggcctccggctccatctacgttgctgcaaaagacctgatttcactcatatttatggctgtgtagaattccatcgtgtgtatgtaccacattttctttatccaatccaccactgatgggcacctaggttgactccatatctttactattgtgaatagcacagcaattaacatatcagtgtgtgtgtctt

SEQ ID NO: 380091 - DNA, 294 bp, Homo sapiens
ctttgttggatgcatagtttgcaaatgtttcctcctgttctstgggttgtctgtttgctctgtcgatcgtttctcttgctgtgccaaagcgctttagctttattaggtcccacttgtcaatctttgttgttattgcaattgcttttggggacttagttaaaaattctttccgaaggccaatgtcaagaagggtatttctgaggttttcttctaggatttttatcacttgaggtcttacatttaaatctttaatctatctccagttaatttttgtatatgatgaaaggtatgggt

SEQ ID NO: 380092 - DNA, 294 bp, Homo sapiens
ctttgttggatgcatagtttgcaaatgtttcctcctgttctctgggttrtctgtttgctctgtcgatcgtttctcttgctgtgccaaagcgctttagctttattaggtcccacttgtcaatctttgttgttattgcaattgcttttggggacttagttaaaaattctttccgaaggccaatgtcaagaagggtatttctgaggttttcttctaggatttttatcacttgaggtcttacatttaaatctttaatctatctccagttaatttttgtatatgatgaaaggtatgggt

SEQ ID NO: 380093 - DNA, 535 bp, Homo sapiens
tcttctgccagctttggagttagtttrttctttttttctagttcccttaactgcaaagtaggaaagttaatttgagatatttctaacttcttgatgaaggcatttcgtgtgtaaactttcctcttaacactgccttagctgcatcccagagattctggtatgttgtgtccctattttcattaattgcaaagaattttttttatttctgccttaatttagattttcacccaggagttattcaggagcaaattatgtaattaccatgtatttatgtagttttgagagatcttcttgatactgatttctatttttgtctcactgtggtcagagtgtgtgcttggtatgatttcaaactttttgaatttattgaggcttgctttatggccaagcatgtgcttgatcttataatatgttctgtgtgcacataagaatgtatcttctgtgtttgttgggcaaagtgttctgtagatgtctatcaggtccaattggtcaactgtcaagtgcgagtacagagtttgttagttttctgcctcaa

SEQ ID NO: 380094 - DNA, 535 bp, Homo sapiens
tcttctgccagctttggagttagtttattctttttttctagttcccttaactgcaaagtaggaaagttaatttgagatatttctaacttcttgatgaaggcatttcgtgtgtaaactttcctcttaacactgccttagctgcatcccagagattctggtatgttgtgtccctattttcattaattgcaaagaattttttttatttctgccttaatttagattttcacccaggagttattcaggagcaaattatgtaattaccatgtatttatgtagttttgagagatcttcttgatactgatttcwatttttgtctcactgtggtcagagtgtgtgcttggtatgatttcaaactttttgaatttattgaggcttgctttatggccaagcatgtgcttgatcttataatatgttctgtgtgcacataagaatgtatcttctgtgtttgttgggcaaagtgttctgtagatgtctatcaggtccaattggtcaactgtcaagtgcgagtacagagtttgttagttttctgcctcaa

SEQ ID NO: 380095 - DNA, 535 bp, Homo sapiens
tcttctgccagctttggagttagtttattctttttttctagttcccttaactgcaaagtaggaaagttaatttgagatatttctaacttcttgatgaaggcatttcgtgtgtaaactttcctcttaacactgccttagctgcatcccagagattctggtatgttgtgtccctattttcattaattgcaaagaattttttttatttctgccttaatttagattttcacccaggagttattcaggagcaaattatgtaattaccatgtatttatgtagttttgagagatcttcttgatactgatttctatttttgtctcactgtggtcagagtgtgtgcttggtatgatttcaaactttttgaatttattgaggcttgctttatggccaagcatgtgcttgatcttakaatatgttctgtgtgcacataagaatgtatcttctgtgtttgttgggcaaagtgttctgtagatgtctatcaggtccaattggtcaactgtcaagtgcgagtacagagtttgttagttttctgcctcaa

SEQ ID NO: 380096 - DNA, 344 bp, Homo sapiens
ttcttccatacaatttaagatgtagggtataagggaagacraaaaagcaaaattcccaagaaatcagaataacttcacactggtcttgtactacaagaaaccctgagatgaactgtagtcctcaaacacctgtgcttggctcaggccgtccaagacacttcagtatgcttccaactggctcatcatcaacttcctggtatattcgtcggccaaaaagagtgctaaatcttcaggtaatgctcgaatcatagtaggtttcagtccagaatgtaaggccattattcctagaagacaaaagggcaagcaaagactgcaacaatccctcctttggggacacccacgca

SEQ ID NO: 380097 - DNA, 344 bp, Homo sapiens
ttcttccatacaatttaagatgtagggtataagggaagacgaaaaagcaaaattcccaagaaatcagaataacttcacactggtcttgtactacaagaaaccctgagatgaactgtagtcctcaaacacctgtgcttggctcaggccgtccaagacacttcagtatgcttccaactggctcatcatcaacttcctggtatattcgtcggccaaaaagagtgctaaatcttcaggtaatgctcgaatcatagtaggtttcagtccagaatgtaaggccattattcctagaagacaaaagggcaagcraagactgcaacaatccctcctttggggacacccacgca

SEQ ID NO: 380098 - DNA, 607 bp, Homo sapiens
agcattgtttcttattgtagttttaatctgcatttctctaatagatagtgatgatgaccagtttttcrtttgcttatttgccagttgcaaatctctattagtgaagtatctgttcacgtattttgcccgttttttaaaagttgggttgttttcttacaattgaagtttattttttcttatactcaaaattttaattcgcacataataaattgtacatatttatgaggtacaatgtgatgtttcagtacattttacattgcataatgatcaaatcatggtaattagcatattcattgccttaaacatttaccatgtctttgatgtaagaatattcaaaatcctcttttctagcgagaatatgagtgtattttaaatgttcatctatttgttttctcacaatcctataaaatgatagcttgagtcaatgagttatgcccccaagtcctatcaaccttgtctattttagtgaaatttaatattgtttagaaaacactaagcaaacatagttattcagagagcataactgagccctctggttattctctgtaacccacaaaggaagctgaacacttgatgtaaacttcttcatcagagtaaataataatcc

SEQ ID NO: 380099 - DNA, 607 bp, Homo sapiens
agcattgtttcttattgtagttttaatctgcatttctctaatagatagtgatgatgaccagtttttcatttgcttatttgccagttgcaaatctctattagtgaagtatctgttcacgtattttgcccrttttttaaaagttgggttgttttcttacaattgaagtttattttttcttatactcaaaattttaattcgcacataataaattgtacatatttatgaggtacaatgtgatgtttcagtacattttacattgcataatgatcaaatcatggtaattagcatattcattgccttaaacatttaccatgtctttgatgtaagaatattcaaaatcctcttttctagcgagaatatgagtgtattttaaatgttcatctatttgttttctcacaatcctataaaatgatagcttgagtcaatgagttatgcccccaagtcctatcaaccttgtctattttagtgaaatttaatattgtttagaaaacactaagcaaacatagttattcagagagcataactgagccctctggttattctctgtaacccacaaaggaagctgaacacttgatgtaaacttcttcatcagagtaaataataatcc

SEQ ID NO: 380100 - DNA, 607 bp, Homo sapiens
agcattgtttcttattgtagttttaatctgcatttctctaatagatagtgatgatgaccagtttttcatttgcttatttgccagttgcaaatctctattagtgaagtatctgttcacgtattttgcccgttttttaaaagttgggttgttttcttacaattgaagtttattttttcttrtactcaaaattttaattcgcacataataaattgtacatatttatgaggtacaatgtgatgtttcagtacattttacattgcataatgatcaaatcatggtaattagcatattcattgccttaaacatttaccatgtctttgatgtaagaatattcaaaatcctcttttctagcgagaatatgagtgtattttaaatgttcatctatttgttttctcacaatcctataaaatgatagcttgagtcaatgagttatgcccccaagtcctatcaaccttgtctattttagtgaaatttaatattgtttagaaaacactaagcaaacatagttattcagagagcataactgagccctctggttattctctgtaacccacaaaggaagctgaacacttgatgtaaacttcttcatcagagtaaataataatcc

SEQ ID NO: 380101 - DNA, 607 bp, Homo sapiens
agcattgtttcttattgtagttttaatctgcatttctctaatagatagtgatgatgaccagtttttcatttgcttatttgccagttgcaaatctctattagtgaagtatctgttcacgtattttgcccgttttttaaaagttgggttgttttcttacaattgaagtttattttttcttatactcaaaattttaattcgcacataataaattgtacatatttatgaggtacaatgtgatgtttcagtacattttacattgcataatgatcaaatcatggtaattagcatatycattgccttaaacatttaccatgtctttgatgtaagaatattcaaaatcctcttttctagcgagaatatgagtgtattttaaatgttcatctatttgttttctcacaatcctataaaatgatagcttgagtcaatgagttatgcccccaagtcctatcaaccttgtctattttagtgaaatttaatattgtttagaaaacactaagcaaacatagttattcagagagcataactgagccctctggttattctctgtaacccacaaaggaagctgaacacttgatgtaaacttcttcatcagagtaaataataatcc

SEQ ID NO: 380102 - DNA, 445 bp, Homo sapiens
ggtaacatctatggatgtctcgtgccctttttggagattagtttcccaaggaacttgcttagmaatcctggcttgtcacctgaatctggagtaatttgagtgtcttccagttctcttcctcagtagaggatgtctgaaaaatctagtaatcatttaataaggctgcttatgtcagaaactcaaattcttacctttttggtgttttgaacattttcccgttatgatttattagcgtattctgcatagacaatccaattattcatcctgctgaaaagtagcggatgcctatagatgcctttctttttgtaaaaggttattgtttttcctgagacctggatgaatttccaggagccattcaaggacatgagaacacccacttagaacttgaaaggttcccctcatggccctcagaccaggctaacgagatgcgataatttgaactctg

SEQ ID NO: 380103 - DNA, 445 bp, Homo sapiens
ggtaacatctatggatgtctcgtgccctttttggagattagtttcccaaggaacttgcttagaaatcctggcttgtcacctgaatctggagtaatttgagtgtcttccagttctcttcctcagtagaggatgtctgaaaaatctagtaatcatttaataaggctgcttatgtcagaaactcaaattcttacctttttggtgttttgaacattttcccgttatgatttattagygtattctgcatagacaatccaattattcatcctgctgaaaagtagcggatgcctatagatgcctttctttttgtaaaaggttattgtttttcctgagacctggatgaatttccaggagccattcaaggacatgagaacacccacttagaacttgaaaggttcccctcatggccctcagaccaggctaacgagatgcgataatttgaactctg

SEQ ID NO: 380104 - DNA, 546 bp, Homo sapiens
ttttcccgttatgatttattagcgtattctgcatagacaatccaattattcatcctgctgaaaagtagcggatgcctatagatgcctttctttttgtaaaaggttattgtttttcctgagacctggatgaatttccaggagccattcaaggacatgagaacacccacttagaacttgaaaggttcccctcatggccctcagaccaggctaacgagatgcgataatttgaactctggcactcctttcctcacaggctgaaagactagcacaatattaatgtcyatctgtgcttaaaggttggagctattgatcagagtccaaaattagtttgtgtaggggaacttttcttaaagacataaaaagataccatttaatatattgtttccaaaatgtgtttctcacacatttccactgtgagaaagaggttctgtggtcaaataggttaagaaacctcagcacactcttagagaatcccagttgttatcagcagcaaaaaaatgtatgtgatcagtttcttaaacttatttaaacgtttgaaaagttaga

SEQ ID NO: 380105 - DNA, 517 bp, Homo sapiens
tacattttctttcttttttctgtgtcccctctctctctctctctcacacacacacacacacacacacacacacagacacacacacacacacagtctcagaagtactagtgctgtatcctgaaattgtttctttagttcttgtcaaaattcctccgattttattttttgtgtcctgaaatactgttgagattaacatcctcattgccttccaaaatatctgactttattttttgtatgtgctttttactctttggtagagttatggattcrctaccagattctactgtatgctctgacaactatgaccacaatgggtgagttgactgatctaagtggtgaaaaatactgggagcatcaatggcaataacagctttctatcagagactttaagcatctttggtaacattgtttttgaaccagagtggaaaaaataagatcaggtcagaagaaggatgcttggtactcaaagattgtttgtgactctaagtaattagcagccaaaaccttaggaaactat

SEQ ID NO: 380106 - DNA, 517 bp, Homo sapiens
tacattttctttcttttttctgtgtcccctctctctctctctctcacacacacacacacacacacacacacacagacacacacacacacacagtctcagaagtactagtgctgtatcctgaaattgtttctttagttcttgtcaaaattcctccgattttattttttgtgtcctgaaatactgttgagattaacatcctcattgccttccaaaatatctgactttattttttgtatgtgctttttactctttggtagagttatggattcactaccagattctactgtatgctctgacaactatgaccacaatgggtgagttgactgatctaagtggtgaaaaatactgggagcatcaatggcaataacagctttctatcagagactttaagcatctttggtaacattgtttttgaaccagagtggraaaaataagatcaggtcagaagaaggatgcttggtactcaaagattgtttgtgactctaagtaattagcagccaaaaccttaggaaactat

SEQ ID NO: 380107 - DNA, 545 bp, Homo sapiens
atcaatggcaataacagctttctatcagagactttaagcatctttggtaacattgtttttgaaccagagtggaaaaaataagatcaggtcagaagaaggatgcttggtactcaaagattgtttgtgactctaagtaattagcagccaaaaccttaggaaactatcagaatgcctgtgtatgagactctcttcaagagtgrtccaagagagtagagaatcctacttggagaaagaaggtggtagcattggacaggcagcagaggagccctcagcagaaagaaaggagctaagagaccctgtatctgtccctcacccttcagagctggtgccccaaactcaaagccatcatcacattggatggagcccctgcctcaggtttagtcacttgatcctatttgaggagaagcaaagatatctgtgactcatgaagagcatgaaggtggtggagggacttgataattaggaaatcaaaatgggcaagaataatgtgtgcctacaaatgggacatgaatttgaaggaaatttaagttaaatttgctgccaca

SEQ ID NO: 380108 - DNA, 545 bp, Homo sapiens
atcaatggcaataacagctttctatcagagactttaagcatctttggtaacattgtttttgaaccagagtggaaaaaataagatcaggtcagaagaaggatgcttggtactcaaagattgtttgtgactctaagtaattagcagccaaaaccttaggaaactatcagaatgcctgtgtatgagactctcttcaagagtgatccaagagagkagagaatcctacttggagaaagaaggtggtagcattggacaggcagcagaggagccctcagcagaaagaaaggagctaagagaccctgtatctgtccctcacccttcagagctggtgccccaaactcaaagccatcatcacattggatggagcccctgcctcaggtttagtcacttgatcctatttgaggagaagcaaagatatctgtgactcatgaagagcatgaaggtggtggagggacttgataattaggaaatcaaaatgggcaagaataatgtgtgcctacaaatgggacatgaatttgaaggaaatttaagttaaatttgctgccaca

SEQ ID NO: 380109 - DNA, 545 bp, Homo sapiens
atcaatggcaataacagctttctatcagagactttaagcatctttggtaacattgtttttgaaccagagtggaaaaaataagatcaggtcagaagaaggatgcttggtactcaaagattgtttgtgactctaagtaattagcagccaaaaccttaggaaactatcagaatgcctgtgtatgagactctcttcaagagtgatccaagagagtagagaatcctacttggagaaagaaggtggtagcattggacaggcagcagaggagccctcagcagmaagaaaggagctaagagaccctgtatctgtccctcacccttcagagctggtgccccaaactcaaagccatcatcacattggatggagcccctgcctcaggtttagtcacttgatcctatttgaggagaagcaaagatatctgtgactcatgaagagcatgaaggtggtggagggacttgataattaggaaatcaaaatgggcaagaataatgtgtgcctacaaatgggacatgaatttgaaggaaatttaagttaaatttgctgccaca

SEQ ID NO: 380110 - DNA, 617 bp, Homo sapiens
tatattttgaattaattttccacatttaaataaaacaagtgctgctgctgttgttactattcccttttaacgtctccccaaattagtgttttattctgtatactttatgagatggcagcttaacaatacccttaatatggcccaaggattctacaaaaggaaatactggtgtgtttgtcaaaagtgttttctggctgggcatggtggctcaagcctgtaatcccagcactttgggargctgaggcaggtggaccacgaggtcaggagttcaagaccagcctggccatatggtaaaaccgcgtctctactaaaaatacaaaaattagctgggcgtggtggtgcatgcctgcagtcccagctactcgggaggctgaggcagaaggatcacttgaatccgggaagcagaagttgcagtgagctgagacagcactgctgcactgcagcctcgatgacagagcaaaactctgtctcaaaaaaaaaaaaaaaaaagtgtttcctgtgcagattatctgttcaccacttgcagatttgaagtttactaagcatgtgtgatatctaaaagttcatttgaagaataagtttcaatgccaaaaatgtttaaaagtgggatataggaa

SEQ ID NO: 380111 - DNA, 530 bp, Homo sapiens
gtaactgtgatcattacaaaatggtgatttttttttttwaaaaaagtagtttttctgtgtttaataagtatcattctattataaggagagctattcctacccctatttgttcactattactatgaacttataaattcttacattatttcaatgaattacaatcctttctgtcattatttattttgatctttaaatggtcccatatttggccagtgggactccctaaaagctagcccctgtgtccttttgacttgacatgttcccatcactttttgagcatttccccagccctggaatcagccatttacccaaagaacctcatgccctttagaaaccaatcaatattttgcatttggtatgctgattgccattggctcattgctacttgtaggcctttttaatatctagatgagagtacagatatacatattgacatatacagatatatgcacatatgcaacaattttaatatgtttaatacacagtatatacatttatatgtgttctgtaaactatgtattattgttttg

SEQ ID NO: 380112 - DNA, 530 bp, Homo sapiens
gtaactgtgatcattacaaaatggtgatttttttttttawaaaaagtagtttttctgtgtttaataagtatcattctattataaggagagctattcctacccctatttgttcactattactatgaacttataaattcttacattatttcaatgaattacaatcctttctgtcattatttattttgatctttaaatggtcccatatttggccagtgggactccctaaaagctagcccctgtgtccttttgacttgacatgttcccatcactttttgagcatttccccagccctggaatcagccatttacccaaagaacctcatgccctttagaaaccaatcaatattttgcatttggtatgctgattgccattggctcattgctacttgtaggcctttttaatatctagatgagagtacagatatacatattgacatatacagatatatgcacatatgcaacaattttaatatgtttaatacacagtatatacatttatatgtgttctgtaaactatgtattattgttttg

SEQ ID NO: 380113 - DNA, 530 bp, Homo sapiens
gtaactgtgatcattacaaaatggtgatttttttttttaaaaaaagtagtttttctgtgtttaataagtatcattctattataaggagagctattcctacccctatttgttcactattactatgaacttataaattcttacattatttcaatgaattacaatcctttctgtcattatttattttgatctttaaatggtcccatatttggccagtgggacyccctaaaagctagcccctgtgtccttttgacttgacatgttcccatcactttttgagcatttccccagccctggaatcagccatttacccaaagaacctcatgccctttagaaaccaatcaatattttgcatttggtatgctgattgccattggctcattgctacttgtaggcctttttaatatctagatgagagtacagatatacatattgacatatacagatatatgcacatatgcaacaattttaatatgtttaatacacagtatatacatttatatgtgttctgtaaactatgtattattgttttg

SEQ ID NO: 380114 - DNA, 584 bp, Homo sapiens
ttagtaacattaaaaacatggtgttattgtttggagatttgtacccccaaaccgtatgttgaaatttgatccccaatgtcggaggtggggcctaatggaaggtgtttggaagatgaatagattaattccctcccttggagtgagggtgagtgagtactcactctattagttcttgcaagagctggtggtttaaaaagagacaagcggcttccygcaccttgattcccctcttgccatttgatctctgcacgtgtcagttccccttcatcttccaccataaatgggagcagcctcagaagcagatgttggcatcaggcttcttgtgcagcacacaactgtgagccaaataaacctcttttctttataaattacccagcctcaggtatcccttatggcaacactaaacagactcagatgcatggaatcccattcaaaagtttggactatcgctttatgtattcaaatcatccttcatatcagtttgagacattgaagttatgtgctctaatccgtcatctgcctgttagctttggcattgttgttcttcattctcttcatgaaataactttttgccttattatttt

SEQ ID NO: 380115 - DNA, 483 bp, Homo sapiens
gattagttaagttattaatggagcctttrtatgttgacatagattttgtagtaagtatgtcaatattctaaaaaattttgaaaaatacctatgtgggccctgtggtgtttgggagagggaagggctttaaatactaggttgatttctttgttacttgagtattctatttctatataaatatattttcttgtactaatgttagtgttttatatccgtctaggaatttttccattccatctaagttttcacatttattagcatataattgaataatcttattttaaaaaaatttagttgtgttctagttatgctcccttcttgtacattttatttggatattcactctgtttgttcttgattattattgccacaggtctattgtagtaatctttgcaaagatacacacttttgttttgttaatcttctccacggttttttcttctccagttcagtgacttatgcttacctccttatgttttgctt

SEQ ID NO: 380116 - DNA, 483 bp, Homo sapiens
gattagttaagttattaatggagcctttgtatgttgacatagattttgtagtaagtatgtcaatattctaaaaaattttgaaaaatacctatgtgggccctgtggtgtttgggagagggaagggctttaaatactaggttgatttctttgttacttgagtattctatttctatataaatatattttcttgyactaatgttagtgttttatatccgtctaggaatttttccattccatctaagttttcacatttattagcatataattgaataatcttattttaaaaaaatttagttgtgttctagttatgctcccttcttgtacattttatttggatattcactctgtttgttcttgattattattgccacaggtctattgtagtaatctttgcaaagatacacacttttgttttgttaatcttctccacggttttttcttctccagttcagtgacttatgcttacctccttatgttttgctt

SEQ ID NO: 380117 - DNA, 591 bp, Homo sapiens
tagcatataattgaataatcttattttaaaaaaatttagttgtgttctagttatgctcccttcttgtacattttatttggatattcactctgtttgttcttgattattattgccacaggtctattgtagtaatctttgcaaagatacacacttttgttttgttaatcttctccacggttttttcttctccagttcagtgacttatgcttacctccttatgttttgcttccttattactccatagactttgccmtgtgttccttttccaacctctctacttaaatgtgtactctttgcttttaaccatcttgacttcttattaatgcttatatattggtaaattttcttctaaatattgcttcattgtatcctacaaactttgtcatgttattatcaatcagttcttagtatttaaaatatttcgtgatttcccttttaacataagaggcattcagtaatgtgtaatttagtttcaaatgtgggttttttaaaaaaagctaatcatattacaatatattcagagaatagcaatatgatattgatcctgtggactttatcctgtggaagctttctttatggtacagagagcta

SEQ ID NO: 380118 - DNA, 571 bp, Homo sapiens
ttctttcttgaattttgggaaatttatcatcataaattttcacattttattttgcatttttagttttcatttcttcttagatttccatattctagatgttagatagctgtttttatcctccataacattcttctttagtatgttctctttattcttttctactattttctgggtaagtttctcaatctaatcttctaactctaaattaattagcttttcacatktatccaaactactatttatccctcaacaatttatattttttgacagtcatacttttacagttaaggctttctcttttattttttcttacgactcccattctcatttcatgtttcaacatcttcctttgtgtcctcttatccttaagaatatttgtcatgcttactttaaaatcttggtcagtgtgttccagtagttttgctacagtcggtatgttgttgttcagcttgttgtatttctttttcagtagttgtattcctcagatatctaatcatgttggtttgtgaactcagattttttgtggctattggctactctggtcatttgtattggggaaggactgaaggac

SEQ ID NO: 380119 - DNA, 571 bp, Homo sapiens
ttctttcttgaattttgggaaatttatcatcataaattttcacattttattttgcatttttagttttcatttcttcttagatttccatattctagatgttagatagctgtttttatcctccataacattcttctttagtatgttctctttattcttttctactattttctgggtaagtttctcaatctaatcttctaactctaaattaattagcttttcacatttatccaaactactatttatccctcaacaatttatattttttgacagtcatacttttacagttaaggctttctcttttattttttcttacgactcccattctcatttcatgtttcaacatcttcctttgtgtcctcttatcctkaagaatatttgtcatgcttactttaaaatcttggtcagtgtgttccagtagttttgctacagtcggtatgttgttgttcagcttgttgtatttctttttcagtagttgtattcctcagatatctaatcatgttggtttgtgaactcagattttttgtggctattggctactctggtcatttgtattggggaaggactgaaggac

SEQ ID NO: 380120 - DNA, 621 bp, Homo sapiens
ttcttgcaacataattattaatagcacccactttttcctttcaaaagtgtcctggtttgggcaggaattatatagtcagtctcactgaaatctaggacgtaagctgtgtcattgtcagtaagtttaaaatgaagagaagtgatgtgccccagggtagagagtctcaggaaccatgaaacactgaccaggcaactcctctgggttgtgaaaaggaaaagctttagacaaggtaaatttaagagtttaatagtgcaagaatgattcgtgagttgggaagcttttagaacgagaacaagttctgagaactgcaagctggcaatgtggccagacagcattatggacagaaaatggaagtgaggtccagaaacagctttgttgtttacaactggttacagctggatgttttgtcttatttgaatcagtcagccacccgcaattgactgaagctcagctgctgtaattgactgagacacagctatctgttacaagtgtatattctattcataattrtgctgttagtttacacactaggttagcttgcagtttgttgcataaggactcaagtacagaggcaacctcagggaaaatttcatttaattaaacaactatatcaccttgaag

SEQ ID NO: 380121 - DNA, 488 bp, Homo sapiens
ttaggaatcaagaatttagatggggtaagaggcatgtttccttacagactgcagttacattagaaataaatgccactggccaggcatggtggctcatatctgtaatcccagcactttgggaggccaagacrgctagatcacttgaggccaggaatttgagaccagcctgaccaacatggcaaaaccctgtctctactaaaaatacaaaaattagccaggtgtggtggtgcatgcctgtaatcccatctactcaggaggctgaggaaggagaattgcttgaacctgggaggtggaggttgcagtgagccaagatggctccactgcactccagcctcggtgagagtgagactccgcctaaaaaaaaggatacacctagttcaaattagtgatatacacatgaatatttaaatgtcaaccagatagtacattgtagagtaactgtagctgtttgattcaaaaagtaagtttagaattacatgtgtgtccaa

SEQ ID NO: 380122 - DNA, 577 bp, Homo sapiens
catggtgaaaccccgtctcactaaaaatacaaaaaaattagccgggcgtggtggcgggcgcctgtagtcccagctactcgggaggctgaggcaggagaatggcgtgaacccgggaggcggagcttgcagtgagcgaagatcgtgccactgcactccagactgggcgacagagcgagactctgtctcaaaaaaaaaaaaaaaaaaaaaaaaaaaaaaaaaaattttaaagaaacccaaaggtctatcaacaggggaaaaaaacaggtaaattaaattgcttatatttccatacaaaggaatatttgcagccctaaaaaaatgaaggacagtaaaaagtagtaagacaaaaggaacaaattttttttccccccccccccccaaaatttttttttttttacacacacatttccttgtacatgcataaaatacatctggaaggttacacraaaaacctctgaggtttctggaaatgtaaactgggggcatgaaggcaggggaaagggagagacttcactgtttacctttttattattttccaattttaaatcatttgaatgtataacttgtctaaaaatca

SEQ ID NO: 380123 - DNA, 577 bp, Homo sapiens
catggtgaaaccccgtctcactaaaaatacaaaaaaattagccgggcgtggtggcgggcgcctgtagtcccagctactcgggaggctgaggcaggagaatggcgtgaacccgggaggcggagcttgcagtgagcgaagatcgtgccactgcactccagactgggcgacagagcgagactctgtctcaaaaaaaaaaaaaaaaaaaaaaaaaaaaaaaaaaattttaaagaaacccaaaggtctatcaacaggggaaaaaaacaggtaaattaaattgcttatatttccatacaaaggaatatttgcagccctaaaaaaatgaaggacagtaaaaagtagtaagacaaaaggaacaaattttttttccccccccccccccaaaatttttttttttttacacacacatttccttgtacatgcataaaatacatctggaaggttacacaaaaaacctctgaggtttctggaratgtaaactgggggcatgaaggcaggggaaagggagagacttcactgtttacctttttattattttccaattttaaatcatttgaatgtataacttgtctaaaaatca

SEQ ID NO: 380124 - DNA, 481 bp, Homo sapiens
caacaaaacaatgcaaatcctcttcaggcccaggctcaaaattatatattaattctacsccattttattggacaatgcaaattacactaccagtctggattcaaggagtagaaaataaactccaactcttgatggaaggaattataaagaattgtggccgtttttgatagtctaccatagggaagaaagatggggatgccataacccaaaatgtgttttcttaggttgagatcctaaattatagtcggggcatattgctttatgctctgtggatgactaaattaatttcaaacatataatgctgtttactgtgaaatgccagctgaaaggatcattgtttaattttatgtaatttacaatacttattatacctcaataaaaatataactatcgagggctggtatcagttgccgagaggtggaaggagtacctctctgcagtgtgttagctcaattctgaacaggacagggctgcaagttca

SEQ ID NO: 380125 - DNA, 591 bp, Homo sapiens
tattggacaatgcaaattacactaccagtctggattcaaggagtagaaaataaactccaactcttgatggaaggaattataaagaattgtggccgtttttgatagtctaccatagggaagaaagatggggatgccataacccaaaatgtgttttcttaggttgagatcctaaattatagtcggggcatattgctttatgctctgtkgatgactaaattaatttcaaacatataatgctgtttactgtgaaatgccagctgaaaggatcattgtttaattttatgtaatttacaatacttattatacctcaataaaaatataactatcgagggctggtatcagttgccgagaggtggaaggagtacctctctgcagtgtgttagctcaattctgaacaggacagggctgcaagttcagctacttcccataaaatgtcctggatacctggcctgagtcatcatcccatgactagagaacgtggacggattattttatcaagaaactagtgataaaccaagggctataggaattaagaactagggctaaaaaagaaatgtttagagtgatgcaagatggccaattagaagcagc

SEQ ID NO: 380126 - DNA, 366 bp, Homo sapiens
tattatacctcaataaaaatataactatcgagggctggtatcagttgccgagaggtggaaggagtacctctctgcagtgtgttagctcarttctgaacaggacagggctgcaagttcagctacttcccataaaatgtcctggatacctggcctgagtcatcatcccatgactagagaacgtggacggattattttatcaagaaactagtgataaaccaagggctataggaattaagaactagggctaaaaaagaaatgtttagagtgatgcaagatggccaattagaagcagctgcagtctgcagtgctcacaaagaagaatgaaaaggggcgagggaattcagcaccttcaactgagataaccag

SEQ ID NO: 380127 - DNA, 591 bp, Homo sapiens
tattggacaatgcaaattacactaccagtctggattcaaggagtagaaaataaactccaactcttgatggaaggaattataaagaattgtggccgtttttgatagtctaccatagggaagaaagatggggatgccataacccaaaatgtgttttcttaggttgagatcctaaattatagtcggggcatattgctttatgctctgtggatgactaaattaatttcaaacatataatgctgtttactgtgaaatgccagctgaaaggatcattgtttaattttatgtaatttacaatacttattatacctcaataaaaatataactatcgagggctggtatcagttgccgagaggtggaaggagtacctctctgcagtgtgttagctcaattctgaacaggacagggctgcaagttcagctacttcccakaaaatgtcctggatacctggcctgagtcatcatcccatgactagagaacgtggacggattattttatcaagaaactagtgataaaccaagggctataggaattaagaactagggctaaaaaagaaatgtttagagtgatgcaagatggccaattagaagcagc

SEQ ID NO: 380128 - DNA, 563 bp, Homo sapiens
aaaagaaatgtttagagtgatgcaagatggccaattagaagcagctgcagtctgcagtgctcacaaagaagaatgaaaaggggcgagggaattcagcaccttcaactgagataaccaggttctcacattgggactgactggatgaacaggtcgaccaatggagaatgaagataagcaggcagagggtgcgatggcccagcygggggcggcatggagccaaaggaacccccactcccagccaagggaagcagtgagtgagtgtgcagtcctgcccgggaaaccgtgtttctctcacggatctttgcaagccgtggatcaagagatccccttgtgagcccatgccaccagggctgtggatctgatacacagacctgtatggagtctgggcacatcagctgctcaggcacacacagaaacccaggagttttacacactctagccccggggatcttcagcacagtgggaaatctgtccatacgtatctctgggaagggggctgaatccagggagccaggcagcatcattctgcaggccccatttccttggcacctcacaagttaaga

SEQ ID NO: 380129 - DNA, 563 bp, Homo sapiens
aaaagaaatgtttagagtgatgcaagatggccaattagaagcagctgcagtctgcagtgctcacaaagaagaatgaaaaggggcgagggaattcagcaccttcaactgagataaccaggttctcacattgggactgactggatgaacaggtcgaccaatggagaatgaagataagcaggcagagggtgcgatggcccagctgggggcggcatggagccaaaggaacccccactcccagccaagggaagcagtgagtgagtgtgcagtcctgcccgggaaaccgtgtttctctcayggatctttgcaagccgtggatcaagagatccccttgtgagcccatgccaccagggctgtggatctgatacacagacctgtatggagtctgggcacatcagctgctcaggcacacacagaaacccaggagttttacacactctagccccggggatcttcagcacagtgggaaatctgtccatacgtatctctgggaagggggctgaatccagggagccaggcagcatcattctgcaggccccatttccttggcacctcacaagttaaga

SEQ ID NO: 380130 - DNA, 535 bp, Homo sapiens
tgattgatgatcataatgtccccactctacagtaagttttatgctaaattgactatcagaagagggctaaatatattgggcttgattttttgaaaatattttaactaaaaatcttaaacttgaaatcagtsagatggtggttttcaccaaggaagtaaatgagtggatggctcaagatcttgaaaacatcgtagcgattcactgtaaaggaggcacaggtaataacattttcctttttatttctccatttctaaagacatgtaaatatacataaagtacaagaacaagatacgtattgctattaatatgtattaataattgttagcatttttaaatattagctccaagactgaaagaagggaaggagaaaggaaagaggagaggaggaagggtaggagatagggagaggataaggaagggaagaaagtaagaaaaaagaactaaggaaggttgagcatattttcccttgttttcctagtatttggatttctttatttttggtttgctagtttatatctctcaaaatacaaacagt

SEQ ID NO: 380131 - DNA, 535 bp, Homo sapiens
tgattgatgatcataatgtccccactctacagtaagttttatgctaaattgactatcagaagagggctaaatatattgggcttgattttttgaaaatattttaactaaaaatcttaaacttgaaatcagtcagatggtggttttcaccaaggaagtaaatgagtggatggctcaagatcttgaaaacatcgtagcgattcactgtaaaggaggcacaggtaataacattttccttttyatttctccatttctaaagacatgtaaatatacataaagtacaagaacaagatacgtattgctattaatatgtattaataattgttagcatttttaaatattagctccaagactgaaagaagggaaggagaaaggaaagaggagaggaggaagggtaggagatagggagaggataaggaagggaagaaagtaagaaaaaagaactaaggaaggttgagcatattttcccttgttttcctagtatttggatttctttatttttggtttgctagtttatatctctcaaaatacaaacagt

SEQ ID NO: 380132 - DNA, 535 bp, Homo sapiens
tgattgatgatcataatgtccccactctacagtaagttttatgctaaattgactatcagaagagggctaaatatattgggcttgattttttgaaaatattttaactaaaaatcttaaacttgaaatcagtcagatggtggttttcaccaaggaagtaaatgagtggatggctcaagatcttgaaaacatcgtagcgattcactgtaaaggaggcacaggtaataacattttcctttttatttctccmtttctaaagacatgtaaatatacataaagtacaagaacaagatacgtattgctattaatatgtattaataattgttagcatttttaaatattagctccaagactgaaagaagggaaggagaaaggaaagaggagaggaggaagggtaggagatagggagaggataaggaagggaagaaagtaagaaaaaagaactaaggaaggttgagcatattttcccttgttttcctagtatttggatttctttatttttggtttgctagtttatatctctcaaaatacaaacagt

SEQ ID NO: 380133 - DNA, 535 bp, Homo sapiens
tgattgatgatcataatgtccccactctacagtaagttttatgctaaattgactatcagaagagggctaaatatattgggcttgattttttgaaaatattttaactaaaaatcttaaacttgaaatcagtcagatggtggttttcaccaaggaagtaaatgagtggatggctcaagatcttgaaaacatcgtagcgattcactgtaaaggaggcacaggtaataacattttcctttttatttctccatttctaaagacatgtaaatatacataaagtasaagaacaagatacgtattgctattaatatgtattaataattgttagcatttttaaatattagctccaagactgaaagaagggaaggagaaaggaaagaggagaggaggaagggtaggagatagggagaggataaggaagggaagaaagtaagaaaaaagaactaaggaaggttgagcatattttcccttgttttcctagtatttggatttctttatttttggtttgctagtttatatctctcaaaatacaaacagt

SEQ ID NO: 380134 - DNA, 375 bp, Homo sapiens
aaacatcccatgtgaagataggagtcagtttctcattataaattactacctatcaagtttgggctttatctaaattattcaaattgtccccatatggctggtggatatccttaaagggtgtcgtttttttgttagacaaatgtgatatctatcactatcagctcaggcactcgctgagaggttctaggttagtctggtggaaggtatctgtgctgagtcttcattgtacatgttagggaaagttttgatataaagagagaggasactataacttgcgtagcagtattaattaaactgaagaagataatcatactatgagttccccatactcacttacccaggataatggatttcccttttcctcagctgttggct

SEQ ID NO: 380135 - DNA, 569 bp, Homo sapiens
ttggtgagtgtgtgcccctgtgtgtgtgggggggtcattacctgtgactctacatatgaaggtgttgagagtgtgtgtgagtctgtgagcatgtttatatacatgtggattgttagtatgcatgcttttagagactttttttttgagttggagtttcactcttgttacccaggctggagtgcagtggcatgatctcgggtcaccgcaacctctgcctctctggttcaagcgattctcccacctcaggctcctgagtagctgggattacaggcatgtgccaccatgcctagctaatttttgtactttttttagagatggggtttyaccatgctggccagaatggtctctcttgacctcaggtgatcctcccaccttggcctaccaaagtgctaggattacaggcatgagccaccgtgcccaggctcttttgtttatttatttatttttaaatggagtcttgctctgctcgccaggctggagtgcagtggcgtgatctcagctcactgcaacctctgcctccagggttcaagcgattctcctgcctcagcctcctgagtatttgggactac

SEQ ID NO: 380136 - DNA, 569 bp, Homo sapiens
ttggtgagtgtgtgcccctgtgtgtgtgggggggtcattacctgtgactctacatatgaaggtgttgagagtgtgtgtgagtctgtgagcatgtttatatacatgtggattgttagtatgcatgcttttagagactttttttttgagttggagtttcactcttgttacccaggctggagtgcagtggcatgatctcgggtcaccgcaacctctgcctctctggttcaagcgattctcccacctcaggctcctgagtagctgggattacaggcatgtgccaccatgcctagctaatttttgtactttttttagagatggggttttaccatgctggccagaatggtctctcttgacctcaggtgatcctcccaccttggcctaccaaagtgctaggattacaggcatgagccaccgtgcccaggctcttttgtttatttatttatttttaaatggagtcttgctctgctcgccaggctggagtgcagtggcgtgatctcagctcactgcaacctctgcctccagggttcaagcgattmtcctgcctcagcctcctgagtatttgggactac

SEQ ID NO: 380137 - DNA, 556 bp, Homo sapiens
tcttgacctcagtgtcacatgtctgaaaatatcaagtatgtttgagtgtcagaacctgagaaagaagcgttgcctataataaaaccttcataaaataaacaactgatttctcaccaaattcatgaaggcaaaaactcattgaggtgacatatcaaaagactgaaatacactgtcaatcaagaattatacactttcaaagaaaccttcaaaagtgaaggagaaattaaggtgaakataaagaaacaaacgctgatggagttcatggaacctagacagtccttatgagaaatgctatatggagtcccacagactgaactgaaaggagagtggagaggagcagaaaatcttacacctaaaaagaacaacagcaacaaggaaggtgtcccagaaatgtcattacatttgtgtatgtgagcgccaatagtgttttattctgccctgagtctcatgtttcattcctccattattttgaaaatcaagtaccataatattaattatacatgtaaataatatacatataatttgtaaaatactaatatatagtaataacacagta

SEQ ID NO: 380138 - DNA, 568 bp, Homo sapiens
cagtcatgagttttcctgtawgaaattgaaaggggatgtggggaactggtgtgcgtgtgtgtgtgtgtgtgtgttcacagtggtacaaaaggagtcctcaggcatgctaaggtgttgtgaactagggtgatgttgtcactcaaggctacaatgggggctccatgaagagaaatctagaaaaggataagcatatgagcaaagaagcaaaacctggggagtagcagggaggggaccaggagcggtgactcaaccgggcagggaaaacaccacgtacaacagagggtgagaattctgtgctcagcaaagaggagaactcactcagcatttccctcaattttccctcaagaactttcctgtgccaggaaagttcacaatggagaatctccagctccaggtgggaccccaaaagaggcagggggactttaggccataggtcttgtgcacaaggtttttccccagttcctacccctttcctttcctctctgtccagcaaacctgcttgtttctgtcacctgccttcctgtccttggggtaagaatggatgccttgacactcagcagagggatgc

SEQ ID NO: 380139 - DNA, 484 bp, Homo sapiens
tcatacatataagggcccaatacaggttcaaaacatgcccaccggcaactgccttacatacctggctcccaaccatactgttacaatttctatctttcaaactcactgtaaattacaaatgtggtacccaaatacctgtatgcacataaataggaaaaggtaaatttttttttttttttttaggtrgattttcgctctgtcacccaggctggagcgtaatagcacaatcttcgctcacttcaacctctgccttctgggttcgagcaattctcctgcctcagactcccgagtaactgggattacaggcgtgtaccaccacgtctggctaatttttgtatttttagtagggacggggttttaccatattggccaggctggtcttgaactcctgacctcaagtgaaccacccgcctcagcctcccaaagtgctgagattacaggcttgagcaaccttgcccagccaaaagtaaactttttaattcca

SEQ ID NO: 380140 - DNA, 592 bp, Homo sapiens
gatatggctttctccatatcttgatgataacctatttatatctctatatatttggagcaagatataaaatttagagttgatttttaaaagatttttcaagatttaattcttatttatttttgttctatttgacattctctgagtctcctatatctgaagttccattttctgtcacttcttttagaatatttttggcagttattttgaaaaatatttcttttgctccattatttttccctcttttctttttgggatttcagtcataactagagtaggtaatttcatctcagtctcatgcaggtactttttctcagggtctcaggaatgtagccttctcacacttctgttcttttcctggctgtgttagtgagctcagtgatattcctccttcaccttcaagagcagttttgttttgtttttcctgttttcatactcccagcatcaggagtattctaagtgtggcagtttttgttgccttcccctrcatattaagtggaatatcttggtctatttggactcttataacaaaataacatatactgggtgactaaaaaacaacagatatttctcttttcacacttcttgaggctgt

SEQ ID NO: 380141 - DNA, 477 bp, Homo sapiens
tttttgtttatctatgacagattttatgtcttcttcatttgtaaaggatagctgtgctggctataatattgttggctgaaagatttttttctttcagaacttcgaatgtatcatcccattctcttctagcctaaggtttccrctgggaaatcagctgttagtctaatggggattccattataagtgtgttacttttctcttgctattttaaaaaatctttgtcttttgatttttcacaatttgactataataatgtctgggttgaatgtatttggggttctttgatcttcctggaactagatgtctagctctccctcaagagttaggaagttttacgctattttattaaatatgttttcctcatattttctctactcttttccttctggaatgcccataatatgaatatttgaccaaattaatggtgtcccataaatcctgtaggcttttttcattcttttttatccttttttgcct

SEQ ID NO: 380142 - DNA, 477 bp, Homo sapiens
tttttgtttatctatgacagattttatgtcttcttcatttgtaaaggatagctgtgctggctataatattgttggctgaaagatttttttctttcagaacttcgaatgtatcatcccattctcttctagcctaaggtttccactgggaaatcagctgttagtctaatggggattccattataartgtgttacttttctcttgctattttaaaaaatctttgtcttttgatttttcacaatttgactataataatgtctgggttgaatgtatttggggttctttgatcttcctggaactagatgtctagctctccctcaagagttaggaagttttacgctattttattaaatatgttttcctcatattttctctactcttttccttctggaatgcccataatatgaatatttgaccaaattaatggtgtcccataaatcctgtaggcttttttcattcttttttatccttttttgcct

SEQ ID NO: 380143 - DNA, 493 bp, Homo sapiens
tatttccctttgtaggtgacatgttttcttgcattttcatggttgctgtgtttctaaattgatttctacgcatctggtgaaaaagtcaccttttccaattttatggagtaaaattgtatgaatttatttgtatgaatgggtcttggatgtcagttcattggggtataccggccttggttctacatggatgcagtaagtgtrgtctccatgtagtttattcagctgtgatccacactagtaacatttgcaagttactcagtggcctaggttaaggaagtttgtagtgatggtggtgcagccttgccaggggtgggctcactgggctgtttctcagggtaagggtgtgtgcaggcatagagtgggtcagaaaacttggagtatggctttatgccgctggccatggtgccatcactctagccagaagcatggggatgcagttgctcaaccagggcatgacttccagatgtgctttgcaggacagtttctcaggccc

SEQ ID NO: 380144 - DNA, 417 bp, Homo sapiens
tgcatctgctgggaatggatacaggactatttctcaggctcayccaaggttgcacagctgcttagttggcctgggagtgtttctgtggggggtggcctaaagggctgttcctcaagctgggacacaggtatatggctgcttagttggcctgagtaagctcccagggttgtttctcggccctgagacttgggcatacacagttgcttgtctctcaggtctgagacacaggtgcaaggcccactcggtggtgtgcctgctgggggcagcctgtgggactgtttctcaggcccttattaaaagcagagggctactgggcacgccaggagcatgtctgtggttgatggggcccgcaaggctgtttctcaggtcctgagcatgggctcatagtcactctgttgacctgtgggtgtatcagct

SEQ ID NO: 380145 - DNA, 417 bp, Homo sapiens
tgcatctgctgggaatggatacaggactatttctcaggctcatccaaggttgcacagctgcttagttggcctgggagtgtttctgtgkggggtggcctaaagggctgttcctcaagctgggacacaggtatatggctgcttagttggcctgagtaagctcccagggttgtttctcggccctgagacttgggcatacacagttgcttgtctctcaggtctgagacacaggtgcaaggcccactcggtggtgtgcctgctgggggcagcctgtgggactgtttctcaggcccttattaaaagcagagggctactgggcacgccaggagcatgtctgtggttgatggggcccgcaaggctgtttctcaggtcctgagcatgggctcatagtcactctgttgacctgtgggtgtatcagct

SEQ ID NO: 380146 - DNA, 417 bp, Homo sapiens
tgcatctgctgggaatggatacaggactatttctcaggctcatccaaggttgcacagctgcttagttggcctgggagtgtttctgtggggggtggcctaaagggctgttcctcaagctgggacacaggtatatggctgcttagttggcctgagtaagctcccagggttgtttctcggccctgagacttgggcatacacagttgcttgtctctcaggtctgagayacaggtgcaaggcccactcggtggtgtgcctgctgggggcagcctgtgggactgtttctcaggcccttattaaaagcagagggctactgggcacgccaggagcatgtctgtggttgatggggcccgcaaggctgtttctcaggtcctgagcatgggctcatagtcactctgttgacctgtgggtgtatcagct

SEQ ID NO: 380147 - DNA, 592 bp, Homo sapiens
tgaataggattttaaacatttatattgtagtaataaggaggtcaacgcttttggtcatagcttttcccrctctttggtcatacctattacagtcatgtatgcacagatatgagctaaattgtttcctctatatagatgctgaaatcttaaccactgaatatgacctcattagaaaataggttctttgcaggtgattaagttaagataaaatcagatgagcctgaattcaatatgactgatgtccttataaaaagaaaaaatttgagtagagggagacatacacatagggagagtaccatgtgattatgagggcagagaatagccaaggaaggccaaagactgccactaaaccaccagaagcgagaaacaaggcacataagagactttctctcatagcccttgaagggaccatccctgctgacacctcaatctcagacttttagcttccaggactataagactataaatgtatgttgttcaaggcacccagtttgtgttagttggttatggcagccctgggaaactaatacatgaactaataacaaagcacaataacatgaagcaaaaattgacaaaagaggagcatcagcaa

SEQ ID NO: 380148 - DNA, 592 bp, Homo sapiens
tgaataggattttaaacatttatattgtagtaataaggaggtcaacgcttttggtcatagcttttcccactytttggtcatacctattacagtcatgtatgcacagatatgagctaaattgtttcctctatatagatgctgaaatcttaaccactgaatatgacctcattagaaaataggttctttgcaggtgattaagttaagataaaatcagatgagcctgaattcaatatgactgatgtccttataaaaagaaaaaatttgagtagagggagacatacacatagggagagtaccatgtgattatgagggcagagaatagccaaggaaggccaaagactgccactaaaccaccagaagcgagaaacaaggcacataagagactttctctcatagcccttgaagggaccatccctgctgacacctcaatctcagacttttagcttccaggactataagactataaatgtatgttgttcaaggcacccagtttgtgttagttggttatggcagccctgggaaactaatacatgaactaataacaaagcacaataacatgaagcaaaaattgacaaaagaggagcatcagcaa

SEQ ID NO: 380149 - DNA, 592 bp, Homo sapiens
tgaataggattttaaacatttatattgtagtaataaggaggtcaacgcttttggtcatagcttttcccactctttggtcatasctattacagtcatgtatgcacagatatgagctaaattgtttcctctatatagatgctgaaatcttaaccactgaatatgacctcattagaaaataggttctttgcaggtgattaagttaagataaaatcagatgagcctgaattcaatatgactgatgtccttataaaaagaaaaaatttgagtagagggagacatacacatagggagagtaccatgtgattatgagggcagagaatagccaaggaaggccaaagactgccactaaaccaccagaagcgagaaacaaggcacataagagactttctctcatagcccttgaagggaccatccctgctgacacctcaatctcagacttttagcttccaggactataagactataaatgtatgttgttcaaggcacccagtttgtgttagttggttatggcagccctgggaaactaatacatgaactaataacaaagcacaataacatgaagcaaaaattgacaaaagaggagcatcagcaa

SEQ ID NO: 380150 - DNA, 592 bp, Homo sapiens
tgaataggattttaaacatttatattgtagtaataaggaggtcaacgcttttggtcatagcttttcccactctttggtcatacctattacagtcatgtatgcacagatatgagctaaattgtttcctctatatagatgctgaaatcttaaccactgaatatgacctcattagaaaataggttctttgcaggtgattaagttaagataaaatcagatgagcctgaattcaatatgactgatgtccttataaaaagaaaaaatttgagtagagggagacatacacatagggagagtaccatgtgattatgagggcagagaatagccaaggaaggccaaagactgccactaaaccaccagaagcgagaaacaaggcacakaagagactttctctcatagcccttgaagggaccatccctgctgacacctcaatctcagacttttagcttccaggactataagactataaatgtatgttgttcaaggcacccagtttgtgttagttggttatggcagccctgggaaactaatacatgaactaataacaaagcacaataacatgaagcaaaaattgacaaaagaggagcatcagcaa

SEQ ID NO: 380151 - DNA, 555 bp, Homo sapiens
gattacttgtttttctttttgtttttgttgtatttgccggtttgcttagttcctgacatacaagaaaatcactgtcaaaacattagcttaacatttgttaaggaaacaaaaagacttcggtgaccacaccttataaagcaaacagttttgtaaatcactttggaaaatttcactaaaaaaaaatccttaacaatataataagtaaagaagatttaaaaccacaaaacattactgtgtttgtagygggggtgggggtctgatttacagagtaaccacatggtaattataattattataatgtccagttttcaaaaaaagttacaaggcatacaaagaatgggaaagtgtgactcattcaaaggaacaaaacaaactgacagaaaatatctctaaggaaacccagacttcaaacttattagacaaagactttaaaacagctctcttaattatactcaaatgttaaaaggaaaacacaaacaaagaaatcaaggaatcagaaaaaatattaaaaagtaggaatatcaacagagatagaagaaattctggagtggaaaa

SEQ ID NO: 380152 - DNA, 555 bp, Homo sapiens
gattacttgtttttctttttgtttttgttgtatttgccggtttgcttagttcctgacatacaagaaaatcactgtcaaaacattagcttaacatttgttaaggaaacaaaaagacttcggtgaccacaccttataaagcaaacagttttgtaaatcactttggaaaatttcactaaaaaaaaatccttaacaatataataagtaaagaagatttaaaaccacaaaacattactgtgtttgtagcgggggtgggggtctgatttacagagtaaccacatggtaattataattattataatgtccagttttcaaaaaaagttacaaggcatacaaagaatgggaaagtgtgactcattcaaaggaacaaaacaaactgacagaaaatatctctaaggaaacccagacttcaaacttaytagacaaagactttaaaacagctctcttaattatactcaaatgttaaaaggaaaacacaaacaaagaaatcaaggaatcagaaaaaatattaaaaagtaggaatatcaacagagatagaagaaattctggagtggaaaa

SEQ ID NO: 380153 - DNA, 264 bp, Homo sapiens
ctggtgcactgtgtagaataaataggttatgtgagcaaataaattgggaggctaytgtaatccagagaaaacaggtagtgacttaggtgagaatgctgtgaggatgagtggtattagtggtgagaagtcgttaggccatggatgtatttcataggactggccaagagaactgcagctaaattggagtgtagggagtgaaatggagaactcaaatatgactctcagcactggaaggtgacagctgtcactgaagcatgctgatgc

SEQ ID NO: 380154 - DNA, 264 bp, Homo sapiens
ctggtgcactgtgtagaataaataggttatgtgagcaaataaattgggaggctactgtaatccagagaaaacaggtagtgacttaggtgagaatgctgtgagkatgagtggtattagtggtgagaagtcgttaggccatggatgtatttcataggactggccaagagaactgcagctaaattggagtgtagggagtgaaatggagaactcaaatatgactctcagcactggaaggtgacagctgtcactgaagcatgctgatgc

SEQ ID NO: 380155 - DNA, 264 bp, Homo sapiens
ctggtgcactgtgtagaataaataggttatgtgagcaaataaattgggaggctactgtaatccagagaaaacaggtagtgacttaggtgagaatgctgtgaggatgagtggtattagtggtgagaagtcgttaggccatggatgtatttcataggactggccaagagaactgcagctaaattggagtgtagggagtgaaatggagaactcaaakatgactctcagcactggaaggtgacagctgtcactgaagcatgctgatgc

SEQ ID NO: 380156 - DNA, 527 bp, Homo sapiens
tatacatattcttttatatatctttatatgcatatatatagaaagagacagagagagaaaagaagataaaaatatgcaaaattcagtgttgggagtatccatgaggaaagagtttctggttaatgattgtaattttctytcttaaatattaggtcttccagtgagctaagtcatgtttactatatcctttagattcatgggattcttgttattcaaatatatttttcatcactattttgtgtagcaaatatctaatgatatatttttgctttttttttggtggataaagtgtgttagcacgactttccaagtttgaagttgaagatgctgaaaatgttgcttcatatgagtaagtcagtttgaagtttgaaaggagggagccattgatggatctcttatctttagttaaacagggcttccgctgaggcaagaaggaaaaagggaaactatggaaagatatcaaaatgtatgggtgggagtgtacaccgtatttactccagttgaattcttagacaagtattattttg

SEQ ID NO: 380157 - DNA, 594 bp, Homo sapiens
ggaaagagtttctggttaatgattgtaattttctttcttaaatattaggtcttccagtgagctaagtcatgtttactatatcctttagattcatgggattcttgytattcaaatatatttttcatcactattttgtgtagcaaatatctaatgatatatttttgctttttttttggtggataaagtgtgttagcacgactttccaagtttgaagttgaagatgctgaaaatgttgcttcatatgagtaagtcagtttgaagtttgaaaggagggagccattgatggatctcttatctttagttaaacagggcttccgctgaggcaagaaggaaaaagggaaactatggaaagatatcaaaatgtatgggtgggagtgtacaccgtatttactccagttgaattcttagacaagtattattttgaaaaaaaaattccatccattcagaaataaatgttcttctagcttgaaaatgtaaaaagtattcttagaggaaattaattccattaaaagttttttttaaaaaaacaggaatgcagaatgctacttaactcatcaatagtgaacgtttctcatttttactagatatggtgtg

SEQ ID NO: 380158 - DNA, 594 bp, Homo sapiens
ggaaagagtttctggttaatgattgtaattttctttcttaaatattaggtcttccagtgagctaagtcatgtttactatatcctttagattcatgggattcttgttattcaaatatatttttcatcactattttgtgtagcaaatatctaatgatatatttttgctttttttttggtggmtaaagtgtgttagcacgactttccaagtttgaagttgaagatgctgaaaatgttgcttcatatgagtaagtcagtttgaagtttgaaaggagggagccattgatggatctcttatctttagttaaacagggcttccgctgaggcaagaaggaaaaagggaaactatggaaagatatcaaaatgtatgggtgggagtgtacaccgtatttactccagttgaattcttagacaagtattattttgaaaaaaaaattccatccattcagaaataaatgttcttctagcttgaaaatgtaaaaagtattcttagaggaaattaattccattaaaagttttttttaaaaaaacaggaatgcagaatgctacttaactcatcaatagtgaacgtttctcatttttactagatatggtgtg

SEQ ID NO: 380159 - DNA, 517 bp, Homo sapiens
tatgagaccatacttattcttttgtaaataaccttattaatgacatcatggctatatttttttgttaatatatattcatgtgcacttacaacattatttgtaacagttgtgtgatatttcatggtgtagatgtgctataattcatttaatagtcagatattgctgaacaattcagtttttttacaagtttttaacttacaaaaatgaatatatttgaggctaaatctctgtatattgttggttatttgcttgttataaattctcagaagtggaaattctgtgtcaaagggaatgattgtgacgctattgatattgatatgtgctttaacatcaagatgcaaagtgtacatttctcccctcccacacttaacactagccatcattgrtttctctgatattagtaaatatatttgttctaatgcatgttctttgacacaccttcatttatccttttctgtctttggactgaaaagttaaatctattgatcctttttctattttatgtaatataagcaat

SEQ ID NO: 380160 - DNA, 223 bp, Homo sapiens
tttgtatttatgatttctggtacgtttggttttatttatcatctttttctttattaaaaatactttgatattttctttgtaaatttgtctatgttttgctattawctgatttgttttcatcccttgcattttttgttgatatgcaagtcagaaggccatttctagtctatcaatgtttatatttaaatgtttagaaaacataattataccattttttccatca

SEQ ID NO: 380161 - DNA, 223 bp, Homo sapiens
tttgtatttatgatttctggtacgtttggttttatttatcatctttttctttattaaaaatactttgatattttctttgtaaatttgtctatgttttgctattaactgatttgttttcatcccttgcattttttgttgatatgcaagtcagaagsccatttctagtctatcaatgtttatatttaaatgtttagaaaacataattataccattttttccatca

SEQ ID NO: 380162 - DNA, 549 bp, Homo sapiens
aagtggtaagccaattatgtaaaaattaagcaaagtaaattaattaaattaagtaaagcatttcaaattttacctagcttttttacttttgtgacaatttgtgctacaagtgaagatccacagcagtctgaggaaggcactgaaatgaaaaaaaaaaaaatccaggtaattcttttcagaaaaggtaaagtgtatttacatacttatatatgattaaaatttctgtttctatastcattttattaaaataaatgtttgaacactaaagttaaaagcactttttaaagcaacaacaaaacaagaagtgatgaaggaaatactcaagtcatggaggaaaacctggctaagaaagaatcaacacattggattttgacatattgtcaataactacaagatcatgttccttggaagcaaaattatagtttacatctaaagtatatgctttttattgtttcatgtaaattgttttataacaagttgtgataagtcatgtataaccaacaataatatttttcataaaatacttgtcaaagtaagtttcacaaagac

SEQ ID NO: 380163 - DNA, 314 bp, Homo sapiens
aatggaatgtaatggaagggactcgaatggaatggaatggaatagaagggactcgaatggaatgaaatgaaatctaatttactcgaatggcatggactgcactcgattggaattgagtgcaatggattagaattgacccgaatggaatggaatggaattgacttgaatggaaaagaatggaatttaatgtaatggactcgaaggtattggaatggaactgacacgaatggaatggaattgactcgaatggaatggaaaggagtttaatggaatggacactaatgraatggaatctaatttaatgcaatggaatg

SEQ ID NO: 380164 - DNA, 332 bp, Homo sapiens
gaatcgaatggaatgggttggactcgaatggactcgagtggaatggaatcgaatttaatgaactcgaatggaatggaatgyaattgaatggaatggactcaaatggtatgcaatgaattcgaatggaatggaatgatatgcaaaagactcgaatggaatggtttggaatggactcgagtggaatggaatggaatagaatgaaatggaatggaatggaatggaatggactggaatggaatggaatgcaatgcaatggagtggaccggaatgaaatcagatgaaatggaatggaatggaatggaatggaatagaatgtactcgaatggaatgga

SEQ ID NO: 380165 - DNA, 332 bp, Homo sapiens
gaatcgaatggaatgggttggactcgaatggactcgagtggaatggaatcgaatttaatgaactcgaatggaatggaatgcaattgaatggaatggactcaaatggtatgcaatgaattcgaatggaatggaatgatatgcaaaagactcgaatggaatggtttggaatggactcgagtggaatggaatggaatagaatgaaatggaatggaatggaatggaatggactggaatggaatggaatgcaatgcaatggagtggaccggaatgaaatcagatgaaatggaatsgaatggaatggaatggaatagaatgtactcgaatggaatgga

SEQ ID NO: 380166 - DNA, 521 bp, Homo sapiens
ggctttccttggagtagctcctgtaattagaatcattggtactctgccctcctgtcagtggtggaacgttctatcggcatatgtggaagcctgttagaaggacgagtttctttgaacacaataaaattttaagttaggaataacttakttgaaagcaattcattgaaagttattgctaagaatttagaagcaaagtcttctggcagtcatttcttcgagacgtacggcagtgtgggagggatatataaagtggaataggaacttgggctagttaaatggaatagcctccaatgttaatctgtttacctcttaactgaatgaaaaatcctatagttgtaagaaaagaaaatatatacaatcctcacacattaccttctcatcagcataattaatctacattgaagatgagtgtggcaaagcagagactctatatacagagaaaaacatagggaaatgcaaagacactgggagaaaaaaagtgaaggacagtagagcaactggaagcttctgacaccaacagc

SEQ ID NO: 380167 - DNA, 545 bp, Homo sapiens
ttacaattattatatcttattgctaagttgatctctttattattataaaatgaccttctttgtctcttcatacagtttgacttaaagtctgtttttatctgataagtatggctacctctgctcgcttttgttttctgtttgcctggaatattttcttctatcccttcacttccagtctgtatgatcctttacaggtgaagttagtttcttgtaggcagcatacagttgggtcttttttttttttttttttaaatcttggcagccaactctatatcttttaattgggaatttgatctgtttacattacattcaaggttactattaatagatgaggctttatcctgtcattttgttcatttttttctggttgttttgtatatcctttgttcttttcttcacctttttttttttaatctttgtggtttggtcactttctgtagtgacaaagtttgattcctttctctttctcatgtgtatrtctgcactacaggtgagttttacacgtttgtgttttttgacaatggtaatcatcctcttgcttccag

SEQ ID NO: 380168 - DNA, 624 bp, Homo sapiens
atactctttaaatttagggtctgttaatggggaattatggtgtttctttggaggtrtaatgtttccttgcttttcacgtttcttatggccctaaactgatttttgcacatctgggagaacagttgcctcttccaatgttagggagctttcacagagaaatactttttccaatagttgtctcctatagtgttcattgagtagggtgctttgactttggttctgggtgggtgcagtaatatagtcttcaggtgacttttttggctgtaatcagcattcagtggtgtctgtgagtgcctcagtggcctgatggtgagtgtttgtggagacagtggtatggcttttcttgttgtgagagccatcattcagattagttctcaggccttaggcatatgcatgctagctgcagtggctttgctagttgtggggtattgccaacagcagggcgggcaccaggcaggccagtcctcagtgccttagaagtgcatgaggcaaatggtggctctgctggtgaagggggtggggctgttggcagcagtgggtgccagatgggatgggccttgggccttggggggtgcatttagcatgcagtggctctttcagtcgagggtagccaagtcattttag

SEQ ID NO: 380169 - DNA, 601 bp, Homo sapiens
aaagacccttaccttgattggatttctatagaaagactgccttccagaagatggaaatgacatagcaataatacgttctaaaagtcaaaatcatcactattacaaacattattatagatttcatacaacatacaaaaaaawtaatttatacatgatcagattccattttcacagaaaaaaaaccttttaagattgaggttgacagaaaagagctaatactcaggataatcaaataacatattaaattatccaacacaatgaccattaaactgccatggagttcttaagtctccactagttctaactgtatgccatgtatttatgatggcctcagtctgaagttccccctgttcttagaatttatttcttatcttaaataccagagaaaatccaagatttctgggcaccagtgatggtgggaactcccaaggtgctttgcagccctctgactcagaaaacctgagatctacaaagcactgacctcattctctgggattctaggataagaagaggtctccatgggatccctgggactcagaaataactactagaggttaataaattgaaactcaaatggagtcagctgaaaatccattcaagt

SEQ ID NO: 380170 - DNA, 601 bp, Homo sapiens
aaagacccttaccttgattggatttctatagaaagactgccttccagaagatggaaatgacatagcaataatacgttctaaaagtcaaaatcatcactattacaaacattattatagatttcatacaacatacaaaaaaattaatttatacatgatcagattccattttcacagaaaaaaaaccttttaagattgaggttgacagaaaagagctaatactcaggataatcaaataacatattaaattatccaacacaatgaccattaaactgccatggagttcttaagtctccactagttctaactgtatgccatgtatttatgatggcctcagtctgaagttccccctgttcttagaatttatttcttatcttaaataccagagaaaatccaagatttctgggcaccagtgatggtgggaactcccaaggtgctttgcagccctctgactcagaaaacctgagatctacaaagcactgacctcattctctgggattctaggataagaagaggtctccatgggatccctgggactcakaaataactactagaggttaataaattgaaactcaaatggagtcagctgaaaatccattcaagt

SEQ ID NO: 380171 - DNA, 566 bp, Homo sapiens
cctatgctgcaactgagtagtcttgaattgagaagacatgtagatcttccattgccagggctaaaccacaaatatgtcacactatcacagtagcatatatcctyatgaataaagaatattttgaatgaatgtgtcttagatgaggcaaaaaaaaatacaattacaagaaaaagtgaagtaatacaagtaaatcaacggttaagtgtcacaaacctgtaacgtaagtgaggtctaggtcaaatccatcccttgtgtatcgccttttgttttctgaaacctgacagtttaaaatcgtcattagtttgtgaaacactcatcaacataaaaataaaaaacattatacagtatagatatcaacccttgtcaatgggtcccaaaacacaaaatatttttgtgaatcataagcatgttttgcccacttacccgccttcttatcagcttttcaagttgtcttttttgatgaaacagatgaaaaattcttaacagaataataagtcgtagaagtcgaagtaaatgtgtccatctaagaataaatttaaacgatccatttttgcttcagaaacaaa

SEQ ID NO: 380172 - DNA, 513 bp, Homo sapiens
ccagggctaaaccacaaatatgtcacactatcacagtagcatatatcctcatgaataaagaatattttgaatgaatgtgtcttagatgaggcaaaaaaaaatacaattacaagaaaaagtgaagtaatacaagtaaatcaacggttaagtgtcacaaacctgtaacgtaagtgaggtctaggtcaaatccatcccttgtgtatcrccttttgttttctgaaacctgacagtttaaaatcgtcattagtttgtgaaacactcatcaacataaaaataaaaaacattatacagtatagatatcaacccttgtcaatgggtcccaaaacacaaaatatttttgtgaatcataagcatgttttgcccacttacccgccttcttatcagcttttcaagttgtcttttttgatgaaacagatgaaaaattcttaacagaataataagtcgtagaagtcgaagtaaatgtgtccatctaagaataaatttaaacgatccatttttgcttcagaaacaaaa

SEQ ID NO: 380173 - DNA, 566 bp, Homo sapiens
cctatgctgcaactgagtagtcttgaattgagaagacatgtagatcttccattgccagggctaaaccacaaatatgtcacactatcacagtagcatatatcctcatgaataaagaatattttgaatgaatgtgtcttagatgaggcaaaaaaaaatacaattacaagaaaaagtgaagtaatacaagtaaatcaacggttaagtgtcacaaacctgtaacgtaagtgaggtctaggtcaaatccatcccttgtgtatcgccttttgttttctgaaacctgacagtttaaaatcgtcattagtttgtgaaacactcatcaacataaaaataaaaaacattatacagtatagatatcaacccttgtcaatgggtcccaaaacacaaaatatttttgtgaatcataagcatgttttgcccacttacccgccttcttatcagcttttcaagttgtcttttttgatgaaacagatgaaaaattcttaacagaataataagtcgtagaagtygaagtaaatgtgtccatctaagaataaatttaaacgatccatttttgcttcagaaacaaa

SEQ ID NO: 380174 - DNA, 566 bp, Homo sapiens
cctatgctgcaactgagtagtcttgaattgagaagacatgtagatcttccattgccagggctaaaccacaaatatgtcacactatcacagtagcatatatcctcatgaataaagaatattttgaatgaatgtgtcttagatgaggcaaaaaaaaatacaattacaagaaaaagtgaagtaatacaagtaaatcaacggttaagtgtcacaaacctgtaacgtaagtgaggtctaggtcaaatccatcccttgtgtatcgccttttgttttctgaaacctgacagtttaaaatcgtcattagtttgtgaaacactcatcaacataaaaataaaaaacattatacagtatagatatcaacccttgtcaatgggtcccaaaacacaaaatatttttgtgaatcataagcatgttttgcccacttacccgccttcttatcagcttttcaagttgtcttttttgatgaaacagatgaaaaattcttaacagaataataagtcgtagaagtcgaagtaaatgtgtccatctaagaataaatttaaamgatccatttttgcttcagaaacaaa

SEQ ID NO: 380175 - DNA, 599 bp, Homo sapiens
gttttatcattttcattataaagatcttacacttctttggttaggttaatttctaggtatttaatyttatttgtggctattgtatataggaccactttttaaatgtcctttccaaatggttcactgttgacatatagaaatgctactgatttttgtatattgattttgtatcctgcaactttactgaatttatcaattctaatagttttttttggtggagtctttagtattttccaaataaaatgtatcatctgcaaacacagggataattttacttcttccatcccaatttggatttctttttttattccctttctttctcttccataatggctctagctaggacttccggtactatgttgaacaacggtggtaaaagtgggcatcctcattgtgttctagatcgcagagaaaagcttttcattttttccccattcagtacggtaatgactgtgggtctgtcatatatggtttttattaagttgaggtatgttacttctatacccagtttttttagggtgtttaccatgaagggatgttgaattttatcaaatgctttttcagcatcaactgaaatgatcttatggtttttatccttt

SEQ ID NO: 380176 - DNA, 542 bp, Homo sapiens
tcttttgattgaaaagtttagtctactgacattcaatgttattactgataagtaaggacttactcctgccattttgttatctgttttctggttgttttggggtcttctcttccttctttccttcctgtctttcattagtgaaggtaattttctctggtgatatgrtttagtttcttgttttttatttttcgtgtatccattgttatattttttggtttgaggttaccatgaggcttgtaaatactatcttataatccattattttaatcttataataagttttcataaacaagtaaaaagaaaactaataaaaactctacaacttagtctccctattttttaactttttgttatttctatttatatcttattataccatctatgtcttgaaaagttgtagttaatatttttgattggctcatagtttagtctctctacttagagtaagagtagtttatacatcatagttacagtgttataacattctgcatttttctgtatacctactattaccagtgagttttataccttcaggttgttac

SEQ ID NO: 380177 - DNA, 542 bp, Homo sapiens
tcttttgattgaaaagtttagtctactgacattcaatgttattactgataagtaaggacttactcctgccattttgttatctgttttctggttgttttggggtcttctcttccttctttccttcctgtctttcattagtgaaggtaattttctctggtgatatggtttagtttcttgttttttatttttcgtgtatccattgttatattttttggtttgaggttaccatgaggcttgtaaatactatcttataatccattattttaatcttataataagttttcataaacaagtaaaaagaaaactaataaaaactctacaacttagtctccctattttttaactttttgttatttctatttatatcttattataccatctatgtcttgaaaagttgtagttaatatttttgattggctcatagtttagtctctctacttagagtaagagtagtttatacatcatagttacagtgttatracattctgcatttttctgtatacctactattaccagtgagttttataccttcaggttgttac

SEQ ID NO: 380178 - DNA, 238 bp, Homo sapiens
actttcaatatgtcatgccactctctcctggcctgaaacgtttctactaaagagtctgctgccagatatattgtagcaccatcgtatattattggtttcttttctcttgctgcttttaagatcctttytttatccttgatctttgggactgtgattattaaatgccttgaggtagtcttctttgagttacatctgcttggtgttttataactttcttgtacttggatattgatatctt

SEQ ID NO: 380179 - DNA, 238 bp, Homo sapiens
actttcaatatgtcatgccactctctcctggcctgaaacgtttctactaaagagtctgctgccagatatattgtagcaccatcgtatattattggtttcttttctcttgctgcttttaagatcctttttttatccttgatctttgggactgtgattattaaatgccttgaggtagtcttctttgagttacatctgctyggtgttttataactttcttgtacttggatattgatatctt

SEQ ID NO: 380180 - DNA, 562 bp, Homo sapiens
cctgccctgtgccagactccatgcactatctcatttaatcctcatcagcaccccgtgaagtaggtactcctggccccttggaataggggaggggattcaagttcaagttcacaagtacaaagatcacacagctaggaagtggcagagctggggtttgaactcaaccccaccttttaaaatactttgtattttgcttctcactctgtgtggctgagcctcatatatcactgcctgccttggcctttaaacaaaggaagaaatattcttccactgactgtggagtgtaataatcgttcctgctgagccaaggagaaacagagcccagttgtttcyccgtccctacatccatctctgcaagttcgcgctctgcagccatgaaagggactgattttgagatggctggagggacccgaagagagaaactaatgaatatgctcggctttgaagggtgccagcaccacagagtgaggttgctctgagctggctggaatgtgtttgtctgtctctggatgtctggtgtctttggtttttcatcagagctttatgcagttttcatttgccc

SEQ ID NO: 380181 - DNA, 530 bp, Homo sapiens
gagtcggtcctttagcagctcacaactaggaaggtcgtggcaagggcaacagtaagcaaaaagctgggagaagtcttcagtttcaggcttttagcttgctaacatattggtgagccaggaatatttttccttttttttttaaacctgcaagctaatgagaaaatctcttccctcaaattcaaagctaatcacaagctagggactaactgggcaccattgtgcatttcgagctctttggttggcttggattcgttttgatttggaaactattttgctagcaagcttacaaattgtttggctgggtgcaatggcttgtgcctgtagtaccagctactcaggaggctgaggtgggaggatcacttgrgcccaggagttctaggctgtagggcgctatggcaattgggtgtccacactaagtttgacattgatatggtgacctctcaggagcaggggaccaccaggttgcctaaggaggggtgaaccagcccaggtgggaaacagagcaggccaaaacttccatgctgatctgt

SEQ ID NO: 380182 - DNA, 616 bp, Homo sapiens
ggtggcatacatgtttagtcctacctacttgagagattgaggcagaggaatgcttgagcctaggagttcaaggctgcagtgagctatgattaccactgcactcagcctgtgttacagagggaggccctgtctcaaaacaaacaaacaaacaaaagattgcctggtaccttgtctacatagtttctttacaagattcctgacctgtggtaagtaaagaatatcacytcctaacaggcccaggaagctcaagatattttgggaccccaaaaagagaggaatttacccaggtgaaaggtgtcattggtaagtggcaactatctgagctggtggcgtgggggtaagaaggctttaccaagacagttgtaggtaaagaaaggcagatttagtagagaaagtatgaaagtacattgcaaaggagcaacaggcagaatcagcaagagagaagctgactgcaaggaaacaaaggcttgctggagattttataggatggttctttgctgtgtactgaaaagagctttgtgcagtattgataacgccaaggttacagcgagctgtacaggtgtctagtgataagttgggcacaggagggctacgtgtcctggaccacaaagaaagg

SEQ ID NO: 380183 - DNA, 619 bp, Homo sapiens
cattgtttagctgttcatattttccttgctgagccgataaattcctcttttcgctcacactaattaaagttgggtctctgtcatttgccatcaaaagaatcctgataaatatagacctaaaggaaacaaatttgaattgtgaaattttagcattgtgaccagccattaggggaaatatttttggttacggaattcaaatcatgtccactaacaggacctaggtactaggaatacacagacaaatgagactgatgtaggtgttccctacaacaattatcaactgaggccacgcacagtggctcatgcctataaccctaacactttgggaggctgaggtggaaggatcacttgaagttaggagtgcragaccagcctgaacaacaaagcaagaccccgcctctccaaaatatttaaaaattagctaggcatggtggtgcatacctgtagtcccagctacttgggaggctgaggctggaggattgcttaagcccaggagtttgaagctgcagtgagttatgattgtgccactgcactccagcctgggtgacacagtaagactccaactcaaaacaaaaacaaaaacaaaacccaattgtcaatttaaattgaatgtgataga

SEQ ID NO: 380184 - DNA, 575 bp, Homo sapiens
ttaatgtcaactggtttgaagcatgtccagcacagataagctctaggatgatttaatgttagaacagactcagagcatttcaaaaatatcatctgcycagcaaccaagtcgattcttagttctggctcttcctgtcttgcccatctgatagcagtttatgttaaaagctaaggctcagtggggggaaaggtgacttgcttgaggtcacagaacaaggaggtgacagattcagggcttattctccaagctgtttgtagctgttctccaaatctatattgtatttgtagatgatctgaaggagaaaaatcaggcctacttgatgtcatcttttactcaattcaaaacaaaagtttgtcattaaccctaagagtctcccttagtctaaatcagttcctcagcaaagtagttaaagagatgatttatcattgaggtccttagattccaccctgcccccgcccccgcttttttgttttacctttttcctcttcctcttgccctaagactcatctcaacctgcttctgttctctggcctcattccctctctccaattaaaacctattttcagaaaaggttg

SEQ ID NO: 380185 - DNA, 552 bp, Homo sapiens
tgctttataaatttagatgaatgtagatctaaatttcactctactcctacaaaagatggaagccaggcatctataaccagctcggaggactgcccttcctagtaaacactgttggataacatggcagtatgtcctcaatgcagtctcactgatgctttgtctttattagttcccttgaaattccctgaccatcacatacactcatgttcaaatgtgattagagaattgcttccaaaaccaaacactgttttccttttcctttagcctgggagttgattatttagcaaatcgttttaatttcccttagactgtgctgctagtagaataacatcattctcatcagatcagcaactgaagcyagctggcttaggagtaccaaaagactatttagcctcctaaaatttgcctgctcttcctttcatggtagcagcagatgacctcacatctcaaactggcaacaaaagaccagctaagcaactgcatattcgagcagcagccttttataaagtttctaacgcgagtggagagaaggggaactgtctgagtactctg

SEQ ID NO: 380186 - DNA, 560 bp, Homo sapiens
gattcacccccaaggcctctccaatctcttctttgttaaaatcacaatcaacccaatcccatcatctattatctagttttcattaatgctggcttcaggagatttaggaatatgccagtgtaacttgaccatcccgtcttgacctatttcccacaktttatcagtgagctctacctaagccctcctgattttgctccttggcgtagttttcctctttctttttcccatatgggttaaattttaccctttaggttgaggttgtacaagatcagttgaaattcctcaaaaagatggcactcaaggagctaaaagctttaaaggttttctccatatagtacaggctagacttgcatgtttccaagcaaacatggatcatgacagtgtctctaagacattaagaggattcaaaaatgtcttagatgccattctccctttatactgtcactccaccatagccataacagaattatattctcaactgcaacagctacctcatgtcagccgcaactattgctctactttaaattaaaaaaaaaaatttttacaaatcttcattttaa

SEQ ID NO: 380187 - DNA, 594 bp, Homo sapiens
ttgtcaaagcaaagcaatgcgcagctgcttagggagggggcacaggagagtggcctggcccttcttagatcattgtcaactcaacttgtctaaatggcttttatgacctcagttatcacctgyattaattctggcctatggtattttgcagctcttcgggaaatagtgatcctttgtttctgacaaagttcttcttaaagggtttattgtcttatttactaggaatcatggggaatagagtgttacacaatgtaattttttccctaacaaataaagcttatttttataaattccagggcttttaatttgaatcatgcttaactatttttctatattttattacattgtttgcttcctccctaaagacagtatattttagtattttcacagaaaaatgagaagccctcattatgaacatacctgattaaattgagcatttccaagtgatgaccacatcattgctcaagtgttatgaggccacaggatgaactactgccccccgaatgatgctagaatgctgtgcctttatttatttcattggacaactcattcaatatatatttatcaagtgactcctataagagtaactaaaat

SEQ ID NO: 380188 - DNA, 594 bp, Homo sapiens
ttgtcaaagcaaagcaatgcgcagctgcttagggagggggcacaggagagtggcctggcccttcttagatcattgtcaactcaacttgtctaaatggcttttatgacctcagttatcacctgcattaattctggcctatggtattttgcagctcttcgggaaatagtgatcctttgtttctgacaaagttcttcttaaagggtttattgtcttatttactaggaatcatggggaatagagtgttacacaatgtaattttttccctaacaaataaagcttatttttataaattccagggcttttaatttgaatcatgcttaactatttttctatattttattacattgtttgcttcctccctaaagacagtatattttagtattttcacagaaaaatgagaagccctcattatgaacatacctgattaaattgagcatttccaagtgatgwccacatcattgctcaagtgttatgaggccacaggatgaactactgccccccgaatgatgctagaatgctgtgcctttatttatttcattggacaactcattcaatatatatttatcaagtgactcctataagagtaactaaaat

SEQ ID NO: 380189 - DNA, 594 bp, Homo sapiens
ttgtcaaagcaaagcaatgcgcagctgcttagggagggggcacaggagagtggcctggcccttcttagatcattgtcaactcaacttgtctaaatggcttttatgacctcagttatcacctgcattaattctggcctatggtattttgcagctcttcgggaaatagtgatcctttgtttctgacaaagttcttcttaaagggtttattgtcttatttactaggaatcatggggaatagagtgttacacaatgtaattttttccctaacaaataaagcttatttttataaattccagggcttttaatttgaatcatgcttaactatttttctatattttattacattgtttgcttcctccctaaagacagtatattttagtattttcacagaaaaatgagaagccctcattatgaacatacctgattaaattgagcatttccaagtgatgaccacatcattgctcaagtgttatgaggccacaggatgaactactgccccycgaatgatgctagaatgctgtgcctttatttatttcattggacaactcattcaatatatatttatcaagtgactcctataagagtaactaaaat

SEQ ID NO: 380190 - DNA, 594 bp, Homo sapiens
ttgtcaaagcaaagcaatgcgcagctgcttagggagggggcacaggagagtggcctggcccttcttagatcattgtcaactcaacttgtctaaatggcttttatgacctcagttatcacctgcattaattctggcctatggtattttgcagctcttcgggaaatagtgatcctttgtttctgacaaagttcttcttaaagggtttattgtcttatttactaggaatcatggggaatagagtgttacacaatgtaattttttccctaacaaataaagcttatttttataaattccagggcttttaatttgaatcatgcttaactatttttctatattttattacattgtttgcttcctccctaaagacagtatattttagtattttcacagaaaaatgagaagccctcattatgaacatacctgattaaattgagcatttccaagtgatgaccacatcattgctcaagtgttatgaggccacaggatgaactactgccccccgaatgatgctagaatgctgtgcctttatttatttcattggacaactcattcaayatatatttatcaagtgactcctataagagtaactaaaat

SEQ ID NO: 380191 - DNA, 642 bp, Homo sapiens
tcagcctctcaagtagctgggattacagacgcaagccaccatgcctggctaatttttgtattttcagtagagatggggtttcgccgtgttggccaggctggtctctgactcctgacctcaagtgatctgccctccttggtctcccaaagttctgggattacactaaactcrtgggaggcagagaagcaacagctaacagaagtggggaggaggcactgtaacaattacattgagggccatctttgtttaacatcagaagattacaggataaaattatttgtcatgtagtgagccaggggtagaaatcctgttttaaaactgattttctgtggcttcagcaaatcatagaattgtgagagcaattacccaaagctccagtggaaaggaagagtcagtcttgtttgcatacttgcctggcctagatcttttcatgatctttctgccaccatgttgctgaagaaatcttcactccctttacctgtgtgtgtttgggatggaattactgaaatccttcctgaattctgcttacgtgaaatgttactccatgtggttttaattccatgaagatatttcctccagtgtatgtgagttatataggttgggaataactagaaaaagagatgactgggttagaaacaggaa

SEQ ID NO: 380192 - DNA, 642 bp, Homo sapiens
tcagcctctcaagtagctgggattacagacgcaagccaccatgcctggctaatttttgtattttcagtagagatggggtttcgccgtgttggccaggctggtctctgactcctgacctcaagtgatctgccctccttggtctcccaaagttctgggattacactaaactcgtgggaggcagagaagcaacagctaacagaagtggggaggaggcactgtaacaattacattgagggccatctttgtttaacatcagaagattacaggataaaattatttgtcatgtagtgagccaggggtagaaatcctgttttaaaactgattttctgtggcttcagcaaatcatagaattgtsagagcaattacccaaagctccagtggaaaggaagagtcagtcttgtttgcatacttgcctggcctagatcttttcatgatctttctgccaccatgttgctgaagaaatcttcactccctttacctgtgtgtgtttgggatggaattactgaaatccttcctgaattctgcttacgtgaaatgttactccatgtggttttaattccatgaagatatttcctccagtgtatgtgagttatataggttgggaataactagaaaaagagatgactgggttagaaacaggaa

SEQ ID NO: 380193 - DNA, 642 bp, Homo sapiens
tcagcctctcaagtagctgggattacagacgcaagccaccatgcctggctaatttttgtattttcagtagagatggggtttcgccgtgttggccaggctggtctctgactcctgacctcaagtgatctgccctccttggtctcccaaagttctgggattacactaaactcgtgggaggcagagaagcaacagctaacagaagtggggaggaggcactgtaacaattacattgagggccatctttgtttaacatcagaagattacaggataaaattatttgtcatgtagtgagccaggggtagaaatcctgttttaaaactgattttctgtggcttcagcaaatcatagaattgtgagagcaattacccaaagctccagtggaaaggaagagtcagtcttgtttgcatacttgcctggcctagatcttttcatgatctttctgccaccatgttgctgaagaaatcttcactccctttrcctgtgtgtgtttgggatggaattactgaaatccttcctgaattctgcttacgtgaaatgttactccatgtggttttaattccatgaagatatttcctccagtgtatgtgagttatataggttgggaataactagaaaaagagatgactgggttagaaacaggaa

SEQ ID NO: 380194 - DNA, 642 bp, Homo sapiens
tcagcctctcaagtagctgggattacagacgcaagccaccatgcctggctaatttttgtattttcagtagagatggggtttcgccgtgttggccaggctggtctctgactcctgacctcaagtgatctgccctccttggtctcccaaagttctgggattacactaaactcgtgggaggcagagaagcaacagctaacagaagtggggaggaggcactgtaacaattacattgagggccatctttgtttaacatcagaagattacaggataaaattatttgtcatgtagtgagccaggggtagaaatcctgttttaaaactgattttctgtggcttcagcaaatcatagaattgtgagagcaattacccaaagctccagtggaaaggaagagtcagtcttgtttgcatacttgcctggcctagatcttttcatgatctttctgccaccatgttgctgaagaaatcttcactccctttacctgtgtgtgtttgggatggaattactgaaatccttcctgaattctgcttacgtgaaatgttactccatgtggttttaattccatgaagatatttcctccagtgyatgtgagttatataggttgggaataactagaaaaagagatgactgggttagaaacaggaa

SEQ ID NO: 380195 - DNA, 564 bp, Homo sapiens
ttaataaataaaacatgcaaaaatatggtgtgttacttattttaacatgaatttctatgtatttacagttatctgaaacaaatataaaatagtttggatccttgtgatcggtcacaaacttagaaagcctgcyctttacatgcagcaaacttttaaaatttttgcatataacaagcttttaactgattaaagtaatgccactctagttatttatgaaatacatcaaaaaggccgggcatagtggctcacacctgtaatcccagcactttggaaggccgaggcgggcagatcatgaggtcagcagatggagaccttcctggctaacatggtgaaacccagtctctactaaaaaatacaaaaaattagctaggcatggtggtgggcatctgtagccccagctactctggaggctgaggcaggagaatggcatgaacccaggaggcggagcttgcagtgaattgagatcatgcctctgcactccagcctgggcaacagagcaagactccatctcagataaaaaaaagaaaaagaaaaagaaaaagaaatacatcacaaagtagatgg

SEQ ID NO: 380196 - DNA, 564 bp, Homo sapiens
ttaataaataaaacatgcaaaaatatggtgtgttacttattttaacatgaatttctatgtatttacagttatctgaaacaaatataaaatagtttggatccttgtgatcggtcacaaacttagaaagcctgccctttacatgcagcaaacttttaaaatttttgcatataacaagcttttaactgattaaagtaatgccactctagttatttatgaaatacatcaaaaaggccgggcatagtggctcacacctgtaatcccagcactttggaaggccgaggcgggcagatcatgaggtcagsagatggagaccttcctggctaacatggtgaaacccagtctctactaaaaaatacaaaaaattagctaggcatggtggtgggcatctgtagccccagctactctggaggctgaggcaggagaatggcatgaacccaggaggcggagcttgcagtgaattgagatcatgcctctgcactccagcctgggcaacagagcaagactccatctcagataaaaaaaagaaaaagaaaaagaaaaagaaatacatcacaaagtagatgg

SEQ ID NO: 380197 - DNA, 564 bp, Homo sapiens
ttaataaataaaacatgcaaaaatatggtgtgttacttattttaacatgaatttctatgtatttacagttatctgaaacaaatataaaatagtttggatccttgtgatcggtcacaaacttagaaagcctgccctttacatgcagcaaacttttaaaatttttgcatataacaagcttttaactgattaaagtaatgccactctagttatttatgaaatacatcaaaaaggccgggcatagtggctcacacctgtaatcccagcactttggaaggccgaggcgggcagatcatgaggtcagcagatggagaccttcctggctaacatggtgaaacccagtctctactaaaaaatacaaaaaattagctaggcatggtggtgggcayctgtagccccagctactctggaggctgaggcaggagaatggcatgaacccaggaggcggagcttgcagtgaattgagatcatgcctctgcactccagcctgggcaacagagcaagactccatctcagataaaaaaaagaaaaagaaaaagaaaaagaaatacatcacaaagtagatgg

SEQ ID NO: 380198 - DNA, 574 bp, Homo sapiens
ttacaggcatgcaccatcatacctggctaatttttttgtatttagtagagatggggtttcaccatgttagtcaggctggtcgtgaactcctaacctcaggtgatccatctggctgcttgatattctaagatttgatgctggaactttggtgtcaatgctcaaaatgcccaaagacaccactcaacctcagtgtctatgcacacccaagcttttgcagcaggacaggtagagcasagatgagtgtgctacaacatgctggtagagggtacccccaattgtgcttggggatttcctattcctcatggaaaaatgtgtcttccttaatttttcccataagaaccaccctacttcatgccctgtctctctgtccaaacaccaggacagtcctctcaccagtctcaaccacccaatggattgacaaaggtgcaaatatgattcagtggagaaggcattctcttgtcaacaaattgtgtagaaacaacttttttttacacaatttgttttttttatccccaaaggaaaaaaattcacctgaacctcaatactaactcaaaaactaactcaaaatggatta

SEQ ID NO: 380199 - DNA, 537 bp, Homo sapiens
agctaacagaagtttttaacctttcttggacaaggatctcccactggttgtggaaaatgtccacactctccctctttgaaataataacaggaagacccttgcagtggttagatgaaggcgcttatgaatctgcacttcttaaaggtgacattctccattactgctaagatctcacagaacttactaagaactctacattaacaaagaattccattcataatgaactcctgggagatgaaaatatcaaaaatcttggcctataacctggagatgttgttgtttactggaaacaacatcaaataaaatattctccccaagactgttggaagggaccacatcagctattattattactttatatatttttttggagatgggatctcattctattccccaagccagaatgcagtggcacaatcatgactcaytgtagccttgaactcctgggctcaagccacccttctgcctcaaccttccaaatatttgggaccacaggcataggccactgcacctaactgacgacaggtattactgacc

SEQ ID NO: 380200 - DNA, 585 bp, Homo sapiens
tacaaaagttgtatgagattcctagaaatctagtatgttatcagtcataattttggttattatgttaaaatgctgtatgccatgctaaccaaattttcttataaattgcatcattgtaatgaactctcattagattttttaaccatggacattttaagtccttgtcatctgtagacagttattgttttaatttaattgttctctaaaagcatttgaaattagctacagtccaaaatggcttcttcttcaaggagatttatggaaaatactcttatgagtattctggaatacaggtttctgaacaactttaacgtcatacaattggactgrtaagaatttccagaactctaataaaactgatgggttcatgtaactactaacccaagatcaagcaaaacaagattgaattacatggtactgaatgaactgatgagaataatttttaaaatgactttttgttggaaacattgctagttctttaaatgttttgttttccagatttcagaaaactttcttttaagctatctctagcttacaccaattcagtaaagaatacttttgtgcaaaatggaaacatttactttt

SEQ ID NO: 380201 - DNA, 585 bp, Homo sapiens
tacaaaagttgtatgagattcctagaaatctagtatgttatcagtcataattttggttattatgttaaaatgctgtatgccatgctaaccaaattttcttataaattgcatcattgtaatgaactctcattagattttttaaccatggacattttaagtccttgtcatctgtagacagttattgttttaatttaattgttctctaaaagcatttgaaattagctacagtccaaaatggcttcttcttcaaggagatttatggaaaatactcttatgagtattctggaatacaggtttctgaacaactttaacgtcatacaattggactgataagaatttccagaactctaataaaactgatgggttcatgtaactactaacccaagatcaagcaaaacaagattkaattacatggtactgaatgaactgatgagaataatttttaaaatgactttttgttggaaacattgctagttctttaaatgttttgttttccagatttcagaaaactttcttttaagctatctctagcttacaccaattcagtaaagaatacttttgtgcaaaatggaaacatttactttt

SEQ ID NO: 380202 - DNA, 558 bp, Homo sapiens
atcctcaatttttctagtttactacaatatttagctacaacactccaaattaatatttcatttttttccctgctattctggcttggaatcactaaaattataaacttttcatttcttgaagtccttcaaactgaaactggatgacttgacataagcttcagaaaaattaccacaacagcttgtgtgtggcccatctttatgacattcaaactgcaaactaatccaatgcctcttctcactccagctgaagatactacaagcccagcatctagaaatcttattgaycagctgccctctgggctcagaaactgtctttatagttcgttccaactattaatcttttttaattttatttttatagaaactaaacttcccacattaaaggcccgatagctcacactatccaggaaatatcctctgctaccaagtcccaacagatgattcaactggtccttaatgaataaaaggtgatcaaacaagaaaagagacttatattgtttgaaggaaagatgagtgtctcttctttccttaaacaagaagtagtactaacaaagattc

SEQ ID NO: 380203 - DNA, 558 bp, Homo sapiens
atcctcaatttttctagtttactacaatatttagctacaacactccaaattaatatttcatttttttccctgctattctggcttggaatcactaaaattataaacttttcatttcttgaagtccttcaaactgaaactggatgacttgacataagcttcagaaaaattaccacaacagcttgtgtgtggcccatctttatgacattcaaactgcaaactaatccaatgcctcttctcactccagctgaagatactacaagcccagcatctagaaatcttattgaccagctgccctctgggctcagaaactgtctttatagttcgttccaactattaatcttttttaattttatttktatagaaactaaacttcccacattaaaggcccgatagctcacactatccaggaaatatcctctgctaccaagtcccaacagatgattcaactggtccttaatgaataaaaggtgatcaaacaagaaaagagacttatattgtttgaaggaaagatgagtgtctcttctttccttaaacaagaagtagtactaacaaagattc

SEQ ID NO: 380204 - DNA, 625 bp, Homo sapiens
ttggcactcttgggcacttattctgataagaaagctgatgagacagggtaatgaaaagaggctgcaagaaatgaccattcatgcattcagccaacatttaggccaccctcctgtattccaggcactgtacgtggcactgagaatgcaaagcaaaacgagtcatggtctactggcgggagccttctcagcggagaaaagatcaacaagaaaagtgcctgctggagayccctcctagggcataaaccaatatagaggtggggcagctacgtcagcctgaggtgtccttaggcagaacagaaagtgagaatcagagcagtatctcatttctgaacacctggattgtagctttccctggactgactgtcaaaggaggtggttttaaaaagcaagccaaacaggtttccatcctttaggaagaccctggaacgtgccagttgattctgacaatttctcatgaacagaaacacctaggaagggagaactggtgagtcttttcaagaggaggaagtccctcaaaaggggctgtgtttcgcaaacggcgccccaaaagggctgaaatacttcgatctggaggaaaaagactcaggcactgagggaaggggagggtgcacatctggagtaattt

SEQ ID NO: 380205 - DNA, 507 bp, Homo sapiens
ttttccatatttgaggtcctctctgggccagtacagttcgagacactagaaattcaaaaccacagataatgccctcctgggcctgtaggatgtacttgttaggtggcaggggcgaggcccaaccagtgcgcacaacaatgtcatagccccaggtgagtgtgggaggggaagttgtagaaatattttccagccaaagaaatcagtgaagtaaagataggcaggaggcaggcaaaaaggaggcagaactggcaggttgtgggggcaggagtggccacggatgaggagccaggcttggcaacacaggtgcaggtgkcacgtgtcataggcacaggcgtggagatctgagggcatagaggggagaagaccgtgcaccgccaatgtcaactgtgtggaagcaaacctgggctacatctaagagtcctgagagcaggggaggagaagggaggaagagacaacagaagtcctgggtgggaagcagaaatatttcctgagtcaatgaaagagccc

SEQ ID NO: 380206 - DNA, 351 bp, Homo sapiens
cgtacatgtgcctataggtcctccctgtggcaatgacatctctcagctcagtaagggccacttgcagtaggaatatgaccctaaccagaagactcagtggatccttatcaccttcatagaaaggtactcaccatccatgtcaacagccaagccaacaygctgttgctccaatacgtaaaaggcacttctgtagggctggcatgagtcagtcagttcaagacaacctgaaggagttgaataacatctatccagtgagtcctgcaagacttcaggccctttctcatccagcagctccctgctgagcctggaaaagtgggaaaaagtaaagaataagccagggggaatcagaaa

SEQ ID NO: 380207 - DNA, 351 bp, Homo sapiens
cgtacatgtgcctataggtcctccctgtggcaatgacatctctcagctcagtaagggccacttgcagtaggaatatgaccctaaccagaagactcagtggatccttatcaccttcatagaaaggtactcaccatccatgtcaacagccaagccaacacgctgttgctccaatacrtaaaaggcacttctgtagggctggcatgagtcagtcagttcaagacaacctgaaggagttgaataacatctatccagtgagtcctgcaagacttcaggccctttctcatccagcagctccctgctgagcctggaaaagtgggaaaaagtaaagaataagccagggggaatcagaaa

SEQ ID NO: 380208 - DNA, 413 bp, Homo sapiens
agtaatcacagattatctatcttctgtctggtaatatatatatatatatgtttttgtttttgttgttgttgttttgtttttttgtgacggagtttcgctctttttacccaggctggagttcaatggcatgatctcggctcactgcaacctctgcctccggkttcaagtgattctcctgcctcagcctcctgagtagctgggattacaggtgtgtgccaccacgcccggctaatttcctatatttttagtagagacgggttttcaccacgtcggccaggctggtttcgaactcctgacttcaggtgatccacccacctcggcctcccaaattgctgggattacaggcgtgagccaccactcccagcctctgtctggtaatttaaatgctttggagactccaagattcacccatg

SEQ ID NO: 380209 - DNA, 609 bp, Homo sapiens
tattcagtgttacctgggggcagacgatttctgcactttctcagccamctcaacttgaacatcttcatcgtcatcgttgtcattttctgtaaatacagaagtgttcgttcagatatttcccacttcacagtctgcaagcacagtcagcccaatgtgcaacagagacatgaacatctaggcatgggtcaccgttcaactgaaaactctcatgttttatctttaacagaatgccctggcatggtttcctgatccatcaggcaatgcatttctgatctggagggccaccatcaacatgtggccaaatattgaaaagacctttcgcttcccatatcactggaggcttgtgcagcctctctctggacgttggcagctgtctcccccatcctgccagatctgattcccaggcacaggcttggtgtcctgtcacggtttgcatttcaaacctcattctttctcttagaagcagacaaacttgtcccacagtcctctatgcatcagaagatttcaagcctccaagtggcttctgctgtgttcttcagggacattctatccatggggagtgctccagtctgaagcacttcctaccacaaaacgcccccacataaagtg

SEQ ID NO: 380210 - DNA, 609 bp, Homo sapiens
tattcagtgttacctgggggcagacgatttctgcactttctcagccacctcaacttgaacatcttcatcgtcatcgttgtcattttctgtaaatacagaagtgttcgttcagatatttcccacttcacagtctgcaagcacagtcagcccaatgtgcaacagagacatgaacatctaggcatgggtcaccgttcaactgaaaactctcatgttttatctttaacagaatgccctggcatggtttcctgatccatcaggcaatgcatttctgatctggagggccaccatcaasatgtggccaaatattgaaaagacctttcgcttcccatatcactggaggcttgtgcagcctctctctggacgttggcagctgtctcccccatcctgccagatctgattcccaggcacaggcttggtgtcctgtcacggtttgcatttcaaacctcattctttctcttagaagcagacaaacttgtcccacagtcctctatgcatcagaagatttcaagcctccaagtggcttctgctgtgttcttcagggacattctatccatggggagtgctccagtctgaagcacttcctaccacaaaacgcccccacataaagtg

SEQ ID NO: 380211 - DNA, 609 bp, Homo sapiens
tattcagtgttacctgggggcagacgatttctgcactttctcagccacctcaacttgaacatcttcatcgtcatcgttgtcattttctgtaaatacagaagtgttcgttcagatatttcccacttcacagtctgcaagcacagtcagcccaatgtgcaacagagacatgaacatctaggcatgggtcaccgttcaactgaaaactctcatgttttatctttaacagaatgccctggcatggtttcctgatccatcaggcaatgcatttctgatctggagggccaccatcaacatgtggccaaatattgaaaagacctttygcttcccatatcactggaggcttgtgcagcctctctctggacgttggcagctgtctcccccatcctgccagatctgattcccaggcacaggcttggtgtcctgtcacggtttgcatttcaaacctcattctttctcttagaagcagacaaacttgtcccacagtcctctatgcatcagaagatttcaagcctccaagtggcttctgctgtgttcttcagggacattctatccatggggagtgctccagtctgaagcacttcctaccacaaaacgcccccacataaagtg

SEQ ID NO: 380212 - DNA, 530 bp, Homo sapiens
aaaaaaaaaaatggttcgatgtagtcctaaaactattatgtagaatactattgtttacatcatatcacgtcggccctttaaatggcttaacgcttatttaggtaygatccataaagttttcctggtaattaagtatacctaagaacaatgaagtataaaagagttactgccttgacaggaagattgtaaaaattgtaaaaagataaataaataaagagtcaaaactgtagctctgtgaggctcaaataacatctaattcaagtcacaatgaacatctagcaatcactgtgaacaccacatacttcccttaatacattttccctgaatgcccaacacatctgaattaccaacacccatatgtagccaagaaactgacaatcatttataaattatcacctatgactccatctgctctatgcacttattttttaaattttactcatttatttattatttttattttttgtagagatgggatctcactatattgcccaggttggtccagaaacagaaacagacccacactaatt

SEQ ID NO: 380213 - DNA, 530 bp, Homo sapiens
aaaaaaaaaaatggttcgatgtagtcctaaaactattatgtagaatactattgtttacatcatatcacgtcggccctttaaatggcttaacgcttatttaggtatgatccataaagttttcctggtaattaagtatacctaagaacaatgaagtataaaagagttactgccttgacaggaagattgtaaaaattgtaaaaagataaataaataaagagtcaaaactgtagctctgtgaggctcaaataacatctaattcaagtcacaatgaacatctagcaatcactgtgaacaccacatacttcccttaatacattttccctgaatgcccaacacatctgaattaccaacacccrtatgtagccaagaaactgacaatcatttataaattatcacctatgactccatctgctctatgcacttattttttaaattttactcatttatttattatttttattttttgtagagatgggatctcactatattgcccaggttggtccagaaacagaaacagacccacactaatt

SEQ ID NO: 380214 - DNA, 619 bp, Homo sapiens
tttcttataaaaaaatctctcccttccttctctctatatatccaattataggtaacaaatgaaggggagtaaatgatgagaaaaatctcctaatggatacaatgtacattgtttaggtgatggatattctaaaagccctgacttcaccactaggcaatctatgcatgtaacaaaattgcacttgtacctcataaatttataccaaaacatgacatagaatatatttacttatttgactagcctggaaaatagatgtgtctttctaaatttaataatatacaatattgattgaacagggtatgcacttcagtgtatgatttacatggaaaaaaaaactacccaggttcaccaaagcactatcattcaattttatgcatttacaatgacacaatatcaactgaccaaatagagttcatttacacagcagattagtagcagctaccctacaaaaagtaagacggaaamctctcagaggtcaaaaaagagaaataatgtaatctcaaatctaaccttgaagttgttttatttccaatacctgctgttcttacgctcaacactagttccccaactctaagttttgattatattgccaatctttccactcagccattccaggctg

SEQ ID NO: 380215 - DNA, 572 bp, Homo sapiens
acctcatattctcacttacatactgaatttgtgttttgatttacttgtttatcctgttataatagataataatactcagaaataataaaatctggcattagtctctttttttatctaacaggcatgtttctctgctatcaactttcttaaaattattatcttttcatcctcaaaaatcactgagtgccccaggagtctgttaatggtataaagaataaaatatcttcttgtaatttatgtcattggatataaatataaattgaaaataacctttcaatgcatgagagaagcgtcttggaacatttgttttcaagtacctgatcagtaaaaatagtatttggaattaaaatctgagtcaataaaacagcattttctgctaagtacacacacacacacacacacatgcrtgcatacacacacatatacacataatttctcagcaggctgtagccaagggggcaacagaattcaactgcagtgaggctaataggggcatcagatactaaaatagaattaaattgagagtcaggaattaaacttaacagagagattaataattcagctggaaacat

SEQ ID NO: 380216 - DNA, 528 bp, Homo sapiens
ttcattaaaaccaggaaactagtataacrtatacatgagaacatcttttctttggcttcaagattcagtacatcttggcatagggctgtctttatttaaaatgtttgtatcttaacattttaaagtattggagtaaaattgtatttatctggatttattgaagtttttttcatatccctgtaaatttgtacccaatgcctcacttacctcaatgtagtgttgaatttgaagatagaaaatcacaataatactgaaaaaatatgccagtgagcacgaattattgaatgtttaatgtttaaaccaagatcaaacatctttataaatgatagtaatagtatgggcctttaaaaggaaatatttctctcgacataaagtcagaaaacacataattaattaacccatgatgattattgaatctcctgtaactcacagatattctgatgttgtctactgacatgcccagagaagattatttcagtaaaatcactaaggagtcattccaaatcatccacaaacacatatgcacaa

SEQ ID NO: 380217 - DNA, 557 bp, Homo sapiens
tggtagtttgataggaatagcactgaatctgtggattgcttagagccatatgaacattttaatgagattagttcttccaattcatgagtgtgaaatgttttcccaattgtttgtgtcattcatggtatttttcagcagtgtagttcttgtggagatttttcatgtccttggttagatgttgtattagtctgttctcaagctgctataaataactgcccaaaactgggtaatttataaagaaaagagctttaattgactcacacttctgcatggctgggaaggcctcaggaaacttacaataacagtgaaggcaactcttcacagggcagcaggagagtgaattagtgccagcaggtgaaatgccagatgattataaaacatcagatctcrtgagaactccttcactatcatgataacatcatgggggaaactatcctcatgattcaattacctcccatcgggttgctcccatcacacatgaggattatgggattacaactcaaaatgagatttgggtggggacacaaagcctaaccatatcagatgtattcctaggt

SEQ ID NO: 380218 - DNA, 385 bp, Homo sapiens
cacatggcatcaagctacattcatccaacaaaaagcaaggcctattaaatatcattcataaataattaaaaatattttactaatattattactgttagtaccttgattatgtgtttcttatttatatgttcaaagttcttttatatatttgatattaaattcagtattcctctgaggaagacaagaatactttaattgtggccattttataaacagaaaatagggcaaataaaatttaagtgatttacrtaaggtcgaaaaactagtggccaatatgcttgtttattatattctttgggggaaaaataaccagccataaataaaaaagacttttctgtgtactttcgtccaagaattgaatcgttactttaaagcaataaaaaat

SEQ ID NO: 380219 - DNA, 452 bp, Homo sapiens
tttgctcacttttaatcagatttttgatgtgtttgaattccttgtatattctagatattaatcccttgacagatgaatactttgcaaataatttctcccattctgtacattgtctcttcactctgttgactgtttcttttgctgtaagaaatatgttaaaaccaaaaacaaacactacccatcttatttgtatgattctatttctcctagtcaaaatggtagtcaggaaggagaggyagagctagatggcagaatagaaagttcaaccaactgtgcaccccccatgcaaggacaccaagttaccaaccatctacacagaaaaaatacctgcataagaaccaaacatcaggtgagcattcgtagtacctggttttaaattcatatggtaagaaaggcactgaagagatagaaaaaacagtcctgagtcgtcgatgccactcctgccccagcct

SEQ ID NO: 380220 - DNA, 452 bp, Homo sapiens
tttgctcacttttaatcagatttttgatgtgtttgaattccttgtatattctagatattaatcccttgacagatgaatactttgcaaataatttctcccattctgtacattgtctcttcactctgttgactgtttcttttgctgtaagaaatatgttaaaaccaaaaacaaacactacccatcttatttgtatgattctatttctcctagtcaaaatggtagtcaggaaggagaggtagagctagatggcagaatagaaagttcaaccaactgtgcaccccccatgcaaggacaccaagttaccaaccatctacacagaaaaaatacctgcataagaaccaaamatcaggtgagcattcgtagtacctggttttaaattcatatggtaagaaaggcactgaagagatagaaaaaacagtcctgagtcgtcgatgccactcctgccccagcct

SEQ ID NO: 380221 - DNA, 575 bp, Homo sapiens
gagtggtaagccctgtttaacaaaagcagtttgaattatataaaaatgatgacacatttcatttttaaatggctggatttaaacttaaagtgggtatacaagggaatatacaagaaatcaattgtcacctacctttggtccgttgcaacaaaacccacataaagcccagctaaatcagaatasaggttgagaaaattgggaaaattttattagtgaattttgtaatgttttcattattatttttttccttatgggcctttgacaatgaaattagcactttctaaatatttattaaatatgtagtagctttactaaagaaaggaaggatgaaagagaaaaagaaaggagataaataaggacgagagaagggaggaagggaaggagggagaaagaagaaaaaagaataataaggaaggaaggaaggaaggagggaaggagggagggaggaaggaacagagggagggaggaaagaaggaaaggaaaaaaggaaggaataccagggtgtttgcttagaactgtgaatgaaagcacagaataagaaagcagttggtcctcagctatcataacacatagta

SEQ ID NO: 380222 - DNA, 473 bp, Homo sapiens
aaaatttgcttaacatttttgttgttttacatgtcaaatttacatacaatgaaacgcatagatcttaagagtacattcactgagttttgacaaatatatacaaaatcctgtggaatcccaacccgatcaacacacagagcattgacgtcttctcagagtgtttcctcataccttcttaacagtcaatccaaatcctaatcccactgaaaaaattactgtcttggttgcctggcatactttatattgcctatttattgcatatttccatatgattattctctttagggtaaaacttcttacacttacygtaatatgtttgagatttatgtatggtattctgtgtatcagtggtttgttcctttttattgctgtgtaggattctattgcattagtgtgtcaacacaattcacctatggatggacatctgtaccattctattttggatattaaaataaagctgctgtgaatattgt

SEQ ID NO: 380223 - DNA, 566 bp, Homo sapiens
aaggcaagttttccagcattgtttttctctttcattgtgttattctacacctttggattcactgtgtaaatttcagaatcagcttgtcaatctctttttttaaaaggctcacccaattttgattggagattgaactgtatttaaagatcacttaaggataattggcattttatcaaaccatccttgcatcccagggataaaatctacttgataatggtggattagcttttagcttttttttttttttttttttttttgagatgaagtctcactctgtcaccagactggagtgcagtggcatgatcttggctcactgcaacctctgcctctcaggttcaagcgattctcctgcctcagccttccgagtagctaggactamaggcacttgccaccactcccagctaatttttgaatttgtagtagagacagggtttcaccatgttgtccaggatggtcttgatctcttgacctcagaatctgccctcctctgcctcccaaagtgctgagattacaggtgtgagccactgtgaccggccagtggattagctttttgatgtgctgctgaa

SEQ ID NO: 380224 - DNA, 589 bp, Homo sapiens
tgaggtgccagcatagactctgcttgatgacacaggaccagggaacaatgaatgaggggaaagaaaaagaattacaagggggaaacaaaataaagcatgtgaaggaaagaatgtggagaatatcttgtgtagtaactatatcatagtagtcactcagtagatgaaaaaagtgacaggatgaaaaactaaaaggagaaaagaaaatatrtgatgctttaattcgtgatatggaaagaatgctctgttctcacttatatgaaagagctaaataaggagaattcacggacacagagaggggaaaaacagactctgggacctacttgaaagtgaagggtggggggtggaagaggattagaaactatacctattggatactaggcttggtacccaggtgatgaaataatctgcacaacaaacccccataacatgaattggcctatataacaaacctgcacatagatccgtaaacctaaaaccaaagtttaaaaaagagaaggaatgctctactgtgtcaatttctcctcattctgtgacctattccaaggcaaagacattcctttaaccaccccaatgcgcaaatatttaccct

SEQ ID NO: 380225 - DNA, 500 bp, Homo sapiens
aaattaataacgagaggaattttggaaactgtacatatacatggaaattaaacaatatacctctgaatgatcagtaggtcagtggaataattgagaaggaaactgaaaaacatcttgaaacaaatgataattgaaacacttcataccaaaacctatgagacacagcaaaagcagtactaagagggaagtttacatctgtaagtgcctacatcaaaaagatgaaaaacttcaaataagcaatgtaatgatgcatcttacaatactagaacagatactagaacaatactagaacaatactagaatacagmccggaaataaatgaaattaaaatgaaaaaattacaaaagatcaatgaaataaaaaaaaaattttttttgaaaagttaaacaaaagtgacaaatctttagctggactaagaaaaaaggataaaaagatccaaataaacagaatcagaaatgacaaaggagacattaaaaccaattgtagaaattcaaagcttc

SEQ ID NO: 380226 - DNA, 600 bp, Homo sapiens
atgaaataaaaaaaaaattttttttgaaaagttaaacaaaagtgacaaatctttagctggactaagaaaaaaggataaaaagatccaaataaacagaatcagaaatgacaaaggagacattaaaaccaattgtagaaattcaaagcwtcattagtgggtgctatgagcaactctataccaataaactggaaaatctagaagaaacggacaaatttttttttttttttttttttgaggcagagtctcactctgtcacccaggctggagtgcagtggcactgtctcagctcactgcaagctctgcctcccaggttcacgtcattctcctgccttagcctcccaagtggctgggcctacaggcgcccaccaccacgcccagctaatcttttttgtatttttagtagagacaggatttcaccgtgttagccaggatggtctctatctcctgacctcgtgatccgcctgcctcggcctcccaaagtgctgggattacaggcatgagccaccgcgcccggccaaaatgcacaaatttttagacacatacaacctatcaagattgaaccagaaagaaatccaaaacctgaagggttcataacagata

SEQ ID NO: 380227 - DNA, 653 bp, Homo sapiens
aaagcatatgataaaattcaacatctcttcatgataaaaactctcaaaaaactgaatacagaaggaacacacctcaacatagtaaaagccatatatgacagacccgcagctagtatcatactgaatggggaaaatctgaaagcctctcctctaagatctggaacacgacatggataccaactgtcaccactattattcaacgtagtgctggaaattttagtctgagcgatcagacaagagaaagataaaaaaaagcatccaaaatggaatggaagaagtcaaattatttttgtttgctgttgttatgaatttatacttggaaaaacctaaagactacaggaaagctattagaattgataaattaagtacagttgcatgataaaaaatcatcagtagatatagaaatcagtagtatttacatatgccaacagtgactattgtgaaaaagaaatcaaaatgagtaatcscatttacagtagccacacatgaaattaaatacctaggaactgaccaaagaagcaaaagatctctgtaataaaaagtataaaacattgatgaaataatttgaagaggacacaaatattggaagaatactccatgtttatgcattggaaaaatcaatattgttaaaatgttcttattacccaaagcaa

SEQ ID NO: 380228 - DNA, 572 bp, Homo sapiens
ccttagattttttaaattaaatattgatataataaattttgtcaaaattaagaacctctgctacataaaataaactgttaggagaatgtgaagacaaatcatagactggggaaaagtatttgcaaatcacatatctgataaaggactcctacttaaactatttaaaacattaaactcaattagaaaacacaatccaataaaaatacacaaaaatttaatagacacttcaggaacaaaaaattatggatagcaaataagcaaatgagaaaacatttggcatcattaatcattagagaaatgcaaattaaacctataatgaaatactagtacacaccacaccaacagwatttttaaaattaaaaatactaatcacactgagtgtctgtaaggatccactggaactttaatacactgctgactggaatataaaatgaaaaaaaaacagcttaatagtttcttataaagttaatcatatatcaaccctgtgacataaccattccattcctaggtatttgcccaaaagaaataaaagcatatgcccatacaaaaacttgtaaatgaatatttactca

SEQ ID NO: 380229 - DNA, 572 bp, Homo sapiens
ccttagattttttaaattaaatattgatataataaattttgtcaaaattaagaacctctgctacataaaataaactgttaggagaatgtgaagacaaatcatagactggggaaaagtatttgcaaatcacatatctgataaaggactcctacttaaactatttaaaacattaaactcaattagaaaacacaatccaataaaaatacacaaaaatttaatagacacttcaggaacaaaaaattatggatagcaaataagcaaatgagaaaacatttggcatcattaatcattagagaaatgcaaattaaacctataatgaaatactagtacacaccacaccaacagaatttttaaaattaaaaatactaatcacactgagtgtctgtaaggatccactggaactttaatacactgctgactggaatataaaatgaaaaaaaaacagcttaatagtttcttataaagttaatcatatatcaaccctgtgacataaccattccattcctaggtatttgcccaaaagaaatraaagcatatgcccatacaaaaacttgtaaatgaatatttactca

SEQ ID NO: 380230 - DNA, 573 bp, Homo sapiens
gagaacttttgcaaaatcggaagacttacaaaatttattcacactctcaatctacttaaacctccacagatttctctaaytaggaaactttctggtagtagggaggagatatatttttaactgttgacctcttgcggactcagggttttgaatttaggatcctcagaatggtatctgaaaagttatctcgtgttcactttcctcactctttttttcagctggagcaaaggacacagcaaaacataactcctttatttctttgccaaggaagatcttacatagactgatacattttttgaattaactaagcaattacttactgagccacaagtacatgctagatacaggcaaaatatgagagagattaaagaatagtgtcttaaattttcgagtgggtttttaactttatgtagtatggagaattaaaaggaagacatagaaacatcttaatagcaagaacagttttgtgtgtttggcctaaggatggtccataaagagaatggatgcttttcttctctgagttctgcttctccttccttccagtccataatactctcctctgattgctactct

SEQ ID NO: 380231 - DNA, 556 bp, Homo sapiens
ctattgccttggctaggctcattttactgtacattttccagtactccccctttctgttgttttggtataaatacattcaaagtcttagataataacccactgaggctacacaggtaaaatagcacagtcatttttctaaacaatgtcattgatttattttgacccagaatgactttttaattcaaattattctgtatatttttgagtacacgaactcactcattagtaaccaatttttggtttctgaaagcttcacctcaaagtaaaaatccagaggagacagaaataagcttgtttcggagaaagaataaagaacggttcacttttattttcccaaaagccatatgctctgttgatytgttctgccatctggagatgagggctataatggcccctgctgggtaaaacatccgtaagaacagaaatgtgttggtgcacactgaggaatgcaaacacttggcattcacagatcatagtctgaaataacagtgaaggtgtttaagcaggaaaaaagaaaaaagattttggcaactctagtattatgcaaaaagtagtt

SEQ ID NO: 380232 - DNA, 564 bp, Homo sapiens
atcatccatggaagaatgagtattgcattgagatttgatagtttatacaatgtaggaagcagagaatagagcatttaagcgtaacaaaaaaataaaataaataaaaaagtagtatgagtttgtggaacagcatgaaatagtatatgaaagataacaaatgtaaatctgactcggcagaagcaaaagaaatatcctgagaactcatgaaaattaatgctatataagcagaaacagcttaaagaagacgttgcaagtaaggcagggacattgagtaatgaagaactgagagatactgtagcattttgagatgagaagtaatgttatcagagcagcatttaaagaagctggatatgcaatcccactttgagatgaatgtgctggcagtagaatttagaggaagacacaggagaaaaatctgcactatgakgtggagatagacacaaactacatcgtgaagaaggctgaatcaaaggttgtaacaaaacgcattctgtctgatcgccacttgcagagtccagtgacaacattgaggtacggtagaaagaaatttattaaccaaaacta

SEQ ID NO: 380233 - DNA, 602 bp, Homo sapiens
aacacctccctccacaatccattattctgttttagatctcaaacatgctttctttattattcatttgcacccttcatcccagcctctctttgctttcacttggactgaccctgacacccatcaggctcagcaaattacctaggctgtattgccgcaagtcttcacagacagcccccattacttcagtcaagcccaaatgtcttcctcatctgttacctatctcggcataattctcataaaaacacatgtgctctccctgctgatcctgtctsgctaatctcccaaaccccaatcccttctacaaaacaactcctttcctttctaggcatggttagtaaggtcagaattcttaacaagagccaggaccgcaccctgtaggctttctgcccaaacaacttgacctttctgttttagcctaggcctcatgtctgcgtgcagtggctgccactgctttgacacttttagaggaccttaaaatcacaaactatgctcaactcactctacctttctcataacttccaaaatctattttcttcctcacacctgacgcatatactttctgctctctggctccttcagctgtgctcactctttgttgagtc

SEQ ID NO: 380234 - DNA, 602 bp, Homo sapiens
aacacctccctccacaatccattattctgttttagatctcaaacatgctttctttattattcatttgcacccttcatcccagcctctctttgctttcacttggactgaccctgacacccatcaggctcagcaaattacctaggctgtattgccgcaagtcttcacagacagcccccattacttcagtcaagcccaaatgtcttcctcatctgttacctatctcggcataattctcataaaaacacatgtgctctccctgctgatcctgtctggctaatctcccaaaccccaatcccttctacaaaacaactcctttcctttctaggcatggttagtaaggtcagaattcttaacaagagccaggaccgcaccctgtaggctttctgcccaaacaacttgacctttctgttttagcctaggcctcatgtctgcgtgyagtggctgccactgctttgacacttttagaggaccttaaaatcacaaactatgctcaactcactctacctttctcataacttccaaaatctattttcttcctcacacctgacgcatatactttctgctctctggctccttcagctgtgctcactctttgttgagtc

SEQ ID NO: 380235 - DNA, 602 bp, Homo sapiens
aacacctccctccacaatccattattctgttttagatctcaaacatgctttctttattattcatttgcacccttcatcccagcctctctttgctttcacttggactgaccctgacacccatcaggctcagcaaattacctaggctgtattgccgcaagtcttcacagacagcccccattacttcagtcaagcccaaatgtcttcctcatctgttacctatctcggcataattctcataaaaacacatgtgctctccctgctgatcctgtctggctaatctcccaaaccccaatcccttctacaaaacaactcctttcctttctaggcatggttagtaaggtcagaattcttaacaagagccaggaccgcaccctgtaggctttctgcccaaacaacttgacctttctgttttagcctaggcctcatgtctgcgtgcagtggctgccactgctttgacacttttagaggmccttaaaatcacaaactatgctcaactcactctacctttctcataacttccaaaatctattttcttcctcacacctgacgcatatactttctgctctctggctccttcagctgtgctcactctttgttgagtc

SEQ ID NO: 380236 - DNA, 553 bp, Homo sapiens
tatttagctttttgttttcacatgctaatctttatgtgggattttgagttgccatatggcaagatccatactttataatccaatccatacaatctgaaagtttaggtgtcaaatcaattattggaaaatgaatgagtttaaaaccagaaaatattgatctgtggggatttgatttttagcaactgtgttgccttttcgaattgtaattttaaaacactttcattcaagtgtatttacatactttaaaactcacacctttaaagtgcacaattcagtgctttttattgtatagatagaggtatgctaccattctcactagctaaytttaaaacattttaacccttttaagaaaccccattcctcttagcagtcactcctctctcctgtcccctctccctatccactaataaaccttaatctgcattctatttgtctattctgcatattaatataaataaaatcataatatgtggcctattgtgactcagttctttcagttagcatattttcaaggtttatttatgttattgcatgtacaagtacttcatttctt

SEQ ID NO: 380237 - DNA, 543 bp, Homo sapiens
ttacagtaataagtaccatgtgtgagagataactatagggaaaactaatgaagaaggagccattaaggaactttcccagaacctgatcttgacaaggtagaatgaggctgctgactaggaaattcagggtagatggatcacttgaggtcagaagttcgagactggcctggccaccatggtgaaaccctgtttctactaacaatacaaaaaattagcggggcacggtggcatgcgactgtaatcccagctactcgggaggctgaggcaggagaattgcttgaacccaggaggcggagcttgcagtgagctgagatcatgccactacactccagcctgggcaacagtgtgagactccatctcaaaataaataaatwaattaattaaataaataaataaataaacaatcaaacagaaataaataaataaaataaaaaccgaaaaagttacatgcaatttgtttggctctatttttttgaatttcaaaatgttatttcaggaagataagctatgtatataccagagaaagcataaatacagacacat

SEQ ID NO: 380238 - DNA, 620 bp, Homo sapiens
taaaagccattacctttgttgttcaacatttgaaacacagacaagctggttttcaaaacagttaggacatttaggatacatgtagtaagattaaccctacttgctggcaatgtaattactgtgtttattcattttaatgatctcataaaggacaatgagatataatacaagtacaggacaagaaaaggtcctggaaaggcaattgtgccatwctttacaagcagaatgtgaagctggtgagcacaagataagccaaaatgtgttgacatcaggtccctgtcttctatggagtaaggaaaccaaccaatctggaagtgaccatctttggtagccctgggccagtccatactgtgattcatctttggtggtgaaagatctgtgatctttgcttttggatgatgcttctattggctcttgttttgtgagctgaatcacataacaatagagatttaggctataaagacttttagatgctacttaattcaaacttcaatcccaggacagaaatttccttaccagaataatcttgatctatgtttattgagtctcaggttaaatattgttgttgatggattgggttttacttttggaaatatcctgctcaatatttagacttgtct

SEQ ID NO: 380239 - DNA, 607 bp, Homo sapiens
gtggtgaaagatctgtgatctttgcttttggatgatgcttctattggctcttgttttgtgagctgaatcacataacaatagagatttaggctataaagacttttagatgctacttaattcaaacttcaatcccaggacagaaatttccttaccagaataatcttgatctatgtttattgagtctcaggttaaatattgttgttgatggattgggttttacttttggaaatatcctgctcaatatttagacttgtcttctggttatatcttcctttaaactgagctgaaattaatctcattgaaccatccatttgatcaattctattttttgagyattccatattaatgttcattctttttgttttgcccattcttactttgaatgcaccaatcttacaacacttttagattttagatttttttctccagaagaaaaattaatactatagaattaatatacagtaggtactagggattctacagtgaataagcaacatgatatattatcgggttgacagcttaatgtggttacagagaatgataaagtgccccagtgctatgatagcattttggcggggcattctatcaggcctagtatttaacgtgt

SEQ ID NO: 380240 - DNA, 607 bp, Homo sapiens
gtggtgaaagatctgtgatctttgcttttggatgatgcttctattggctcttgttttgtgagctgaatcacataacaatagagatttaggctataaagacttttagatgctacttaattcaaacttcaatcccaggacagaaatttccttaccagaataatcttgatctatgtttattgagtctcaggttaaatattgttgttgatggattgggttttacttttggaaatatcctgctcaatatttagacttgtcttctggttatatcttcctttaaactgagctgaaattaatctcattgaaccatccatttgatcaattctattttttgagtattccatattaatgytcattctttttgttttgcccattcttactttgaatgcaccaatcttacaacacttttagattttagatttttttctccagaagaaaaattaatactatagaattaatatacagtaggtactagggattctacagtgaataagcaacatgatatattatcgggttgacagcttaatgtggttacagagaatgataaagtgccccagtgctatgatagcattttggcggggcattctatcaggcctagtatttaacgtgt

SEQ ID NO: 380241 - DNA, 358 bp, Homo sapiens
cagcaacaaagatcaatataatagtaaaactattatctcttctgttttgaaaatcttatatctgaaggattaatatttaatgytttgcattgatataatttaaattatctaaaatatttcaacatatattctatccttctacctatccaaagggttaatcaaggttaaagatcactattctttttttataaataataatggtgctataaagtgctaaactagccaaagtcatacaaagtaatagaaccagaactaaaaatcatactccaaatacccaatgatctttaaatataccatagcataatcaaaaattaagtgtctgtatgtggttcacatatgcctataaacaaaattatta

SEQ ID NO: 380242 - DNA, 526 bp, Homo sapiens
agcctcttcttgaggggggcttcttgcggctgtgtggggaatggggatgtgattcccagtccaatggagttgtattcccagggggattatggctgcctctgttgastcatacaggtaactagggaagtgggggaaaactggcagtcacaggcctaaccccactcccatgcagcctgcagtactaaagaggccagactcattcccactgtgtccccccaacagcaccaactctatttccaggcagctgatggccagggctgagaacctgctccagaccaccagcttccccattgagaaagcaagcagactcacagttttttggcatcacaggaagcctgcagcagtgatccatttccttcaaagggtgggtgcattttctcagctttcctggtatgttcctgtggtaattcttgaagcagaagttcacaatgtgagtttccacatgctgctctgtccgttcgaataggagctgcaaactagttctgcatcttatccaagagtttcttaaattgtgttaaacatacaa

SEQ ID NO: 380243 - DNA, 594 bp, Homo sapiens
tagttgagggcagggacaggcttgcctgagcttagcctcttcttgaggggggcttcttgcggctgtgtggggaatggggatgtgattcccagtccaatggagttgtattcccagggggattatggctgcctctgttgagtcatacaggtaactagggaagtgggggaaaactggcagtcacaggcctaaccccactcccatgcagcctgcagtactaaagaggccagactcattcccacygtgtccccccaacagcaccaactctatttccaggcagctgatggccagggctgagaacctgctccagaccaccagcttccccattgagaaagcaagcagactcacagttttttggcatcacaggaagcctgcagcagtgatccatttccttcaaagggtgggtgcattttctcagctttcctggtatgttcctgtggtaattcttgaagcagaagttcacaatgtgagtttccacatgctgctctgtccgttcgaataggagctgcaaactagttctgcatcttatccaagagtttcttaaattgtgttaaacatacaactttgtttgttagttctctgttggagtctagagct

SEQ ID NO: 380244 - DNA, 568 bp, Homo sapiens
tcccaaactaaatttataatgtttctcctcatgttactgacagttctaatttataaaaccttacataataccctcaatagcttttgactgcataataataaatgcccagtttactgtagtggtttggatagtgtctccactcccaaaattcatatccatttagaaactcaaaataggaccttattagaaaatggcgtctctgcaaatgtgctttgttaaggattttgagatgaagtcatcttggatttagggtgagccccaaattccttgactggtgactgtattagagaggaagaggacacagagacacatggtggggaaaggcttgtgaaatggaagcagaaaccggagttakgctgccacaagccaaggaacacctggagctaccagaagctggaaaagaccaggggaggttcctccctagagtctttggaggaactgtggtcctgatgcaccttgattttgtatttgtggcccccagaactgtgagagaatacacttctattgttttaggctacccagtttgtcagtttgtgataagttgccatggcggccccaggaaaccaaa

SEQ ID NO: 380245 - DNA, 609 bp, Homo sapiens
gtttgtacttggaaatttatagctataaatgtttagattaagaaagaagaaaccctgaaataaatagcctaacatcttaagccagtggaaaaataagctcaaaccaaacttaagcaagtggaaagaagaaagtgataaagtgtacagcaaacattaatgaaacagatttttttttaaaaaatagagaaaatcaataaacaaaagctcattctttagaaagattgaaacaactaaattgttttagctagatcaaccataaaaaagacaagactcaaattattagcatcagagataaaaaagggaacattactaccaattttacagaaataaaaagarctataaaggaatgtgattaataattatataccaaactaattaggtaatctagataaaattaacaaattcagagaaatacacgaacttcaaaactatctcaagaagaaatggacaatctgaatagacttctaacaaatgatgagattgaattagtaaacaaaatgctacacacaaggtaaaacccaggccaacatgattacaatggtgtgttctaacaagaaagaattcatacatattcttataaacactttaaaaaactagaaaaggagagag

SEQ ID NO: 380246 - DNA, 609 bp, Homo sapiens
gtttgtacttggaaatttatagctataaatgtttagattaagaaagaagaaaccctgaaataaatagcctaacatcttaagccagtggaaaaataagctcaaaccaaacttaagcaagtggaaagaagaaagtgataaagtgtacagcaaacattaatgaaacagatttttttttaaaaaatagagaaaatcaataaacaaaagctcattctttagaaagattgaaacaactaaattgttttagctagatcaaccataaaaaagacaagactcaaattattagcatcagagataaaaaagggaacattactaccaattttacagaaataaaaagagctataaaggaatgtgattaataattatatrccaaactaattaggtaatctagataaaattaacaaattcagagaaatacacgaacttcaaaactatctcaagaagaaatggacaatctgaatagacttctaacaaatgatgagattgaattagtaaacaaaatgctacacacaaggtaaaacccaggccaacatgattacaatggtgtgttctaacaagaaagaattcatacatattcttataaacactttaaaaaactagaaaaggagagag

SEQ ID NO: 380247 - DNA, 610 bp, Homo sapiens
gaatagacttctaacaaatgatgagattgaattagtaaacaaaatgctacacacaaggtaaaacccaggccaacatgattacaatggtgtgttctaacaagaaagaattcatacatattcttataaacactttaaaaaactagaaaaggagagagcacttcctaacttttttgacaaatctagcattaccctaatgacagaactagacacagacatagtagaaaagtaaactacrgatcaatatttcttacaaataaaaacgcaaaaatcctcaacaaaaatgtagcaagctgagtcaagtgacatacaaaaagaattatacaccattgacaagtagtatttatcccaggaatgaacaatgtgtggaaattaatgaatacggtgcatcagacaaatagaatagaaaccaaaaattgcatgatcatcttagtaagtgcagaaaaaccatttaaaaaaatccaccaccctttcatgaaaaatatattcaaaaaactaacagtagatggaaatgtcacaaacctaataacgagaatctaaaaaacccacagctaacatcatacttaatggtaaatgactggatgtttttcccttaatattaggaacaataaaa

SEQ ID NO: 380248 - DNA, 610 bp, Homo sapiens
gaatagacttctaacaaatgatgagattgaattagtaaacaaaatgctacacacaaggtaaaacccaggccaacatgattacaatggtgtgttctaacaagaaagaattcatacatattcttataaacactttaaaaaactagaaaaggagagagcacttcctaacttttttgacaaatctagcattaccctaatgacagaactagacacagacatagtagaaaagtaaactacggatcaatatttcttacaaataaaaacgcaaaaatcctcaacaaaaatgtagcaagctgagycaagtgacatacaaaaagaattatacaccattgacaagtagtatttatcccaggaatgaacaatgtgtggaaattaatgaatacggtgcatcagacaaatagaatagaaaccaaaaattgcatgatcatcttagtaagtgcagaaaaaccatttaaaaaaatccaccaccctttcatgaaaaatatattcaaaaaactaacagtagatggaaatgtcacaaacctaataacgagaatctaaaaaacccacagctaacatcatacttaatggtaaatgactggatgtttttcccttaatattaggaacaataaaa

SEQ ID NO: 380249 - DNA, 610 bp, Homo sapiens
gaatagacttctaacaaatgatgagattgaattagtaaacaaaatgctacacacaaggtaaaacccaggccaacatgattacaatggtgtgttctaacaagaaagaattcatacatattcttataaacactttaaaaaactagaaaaggagagagcacttcctaacttttttgacaaatctagcattaccctaatgacagaactagacacagacatagtagaaaagtaaactacggatcaatatttcttacaaataaaaacgcaaaaatcctcaacaaaaatgtagcaagctgagtcaagtgacatacaaaaagaattatacaccattgacaagtagtatttatcccaggaatgaacaatgtgtggaaattaatgaatacggtgcatcagacaaatagaatagaaaccaaaaattgcatgatcatcttagtaagtgcagaaaaaccatttaaaaaaatccaccaccctttcatgaaaaatatattcaaaaaactaayagtagatggaaatgtcacaaacctaataacgagaatctaaaaaacccacagctaacatcatacttaatggtaaatgactggatgtttttcccttaatattaggaacaataaaa

SEQ ID NO: 380250 - DNA, 608 bp, Homo sapiens
  misc_feature (1)...(608): n = A,T,C or G
ttggtttcataattctaatttttctagaaaaaaataaattggataatatttaaattataactcaaaaaattcttaaaatataaattctaaaaacataaaaatagtttttttctcttcctttattgcacagcctangacatcctgtataacaatcttgattagaagtggtgagattggacatccttgactttttcctgatcttagtggtgatgaattcatttattttatgattaagtattcttttactgttagctttccattcatgcccttgatcaagttgagtaagttaatttctatgcttaatttgatgatagcattttttcctaatcaagaacagcaattttgattttgatactgaattttggaaaatattctttagttcatattaagatgatcaaattaattatctttatttttaaatttcagtctatcaatattgataagaatattgcttgtattacttgtttttcaaatgtcaaaccaaggataaaagacacttaatgatgatgcattataccttttacaattgttggatttgatttgacataattttaaaagtatttgtatattttcacwgggaacactggagtgtatatttctttcattac

SEQ ID NO: 380251 - DNA, 604 bp, Homo sapiens
tctttaggttgtctgtttactttgttgacagtttcttttgctgtgccgaacgaarctcttcagtttaattaggtcccacttgtcaatttttgtttctgttccaattgcttttgtgggcttggccaaaaattgtttgccaaaggcaatgtcaagaagggtatttcctaggttttcttcaaggatttttatagtttaaggtcttacatttaaatatttcaaccatctcgagttcatttttgtttatggtgaatggtagggtctagtttcgttttgcgtgtggctggccagttatcccagtaccgttcattaaacagggagtcctttggtaggtttttgattaccgattcaatctcatacttgttataaatctatgcagattttctgtttcctttggaatttagtttggatagtttctgtgtttttaggaatctgtctattttacctaggttatctatcgtagtattttgctataaaactttttatttctgcaagatcagcactaatgccttcacttttatttctgatggtggtaatttgattattcacttgtttcttattcattctgatttaatatttgttaattttactgatctttccaaaagcc

SEQ ID NO: 380252 - DNA, 604 bp, Homo sapiens
tctttaggttgtctgtttactttgttgacagtttcttttgctgtgccgaacgaagctcttcagtttaattaggtcccacttgtcaatttttgtttctgttccaattgcttttgtgggcttggccaaaaattgtttgccaaaggcaatgtcaagaagggtatttcctaggttttcttcaaggatttttatagtttaaggtcttacatttaaatatttcaaccatctcgagttcatttttgtttatggtgaatggtagggtctagtttcgttttrcgtgtggctggccagttatcccagtaccgttcattaaacagggagtcctttggtaggtttttgattaccgattcaatctcatacttgttataaatctatgcagattttctgtttcctttggaatttagtttggatagtttctgtgtttttaggaatctgtctattttacctaggttatctatcgtagtattttgctataaaactttttatttctgcaagatcagcactaatgccttcacttttatttctgatggtggtaatttgattattcacttgtttcttattcattctgatttaatatttgttaattttactgatctttccaaaagcc

SEQ ID NO: 380253 - DNA, 604 bp, Homo sapiens
tctttaggttgtctgtttactttgttgacagtttcttttgctgtgccgaacgaagctcttcagtttaattaggtcccacttgtcaatttttgtttctgttccaattgcttttgtgggcttggccaaaaattgtttgccaaaggcaatgtcaagaagggtatttcctaggttttcttcaaggatttttatagtttaaggtcttacatttaaatatttcaaccatctcgagttcatttttgtttatggtgaatggtagggtctagtttcgttttgcgtgtggctggccagttatcccagtaccgttcattaaacagggagtcctttggtaggtttttgattaccgattcaatctcatacttgttataaatctatgcagattttckgtttcctttggaatttagtttggatagtttctgtgtttttaggaatctgtctattttacctaggttatctatcgtagtattttgctataaaactttttatttctgcaagatcagcactaatgccttcacttttatttctgatggtggtaatttgattattcacttgtttcttattcattctgatttaatatttgttaattttactgatctttccaaaagcc

SEQ ID NO: 380254 - DNA, 556 bp, Homo sapiens
ctttgctaaggctgaaggattttaaatatgatctcatctattctctaagcatgaaattgaaatctgtcctacattaatacacaaatcagtagatttgtaagagaggtaacattgttttaatgactccaaatagtttgtgcaattcaaaatcctttggctttctttcatcttgactgtgttttcaccaataaatttctatctctcttaagttgtggtttgcacacatttcagcccacagaaatacctcatatccttactggttttcaagaaaaataactattaataaggcagtgatggtttcaccaatggatcctaggtttagcatagctaaaaatagaaagagaaasgtgaaaatttatataaactattttatacccaaccatgttaaaataaaattcggtaatctgaatgctaaagtccttaatataaatgccttaatataaataagatatcatgagaaaaaaaaaaaagactcagcatcttttccctgggttttgctcttgattctaagacaaagatgtagtcaaagttccaaccttgggatggacaaaattca

SEQ ID NO: 380255 - DNA, 489 bp, Homo sapiens
ggacttggtgtcctgcaccccagccactccagccatggcaaaaaggggccaaggtacagctccggccattgcttcagagggtacaagtttcaagccttagtggcttccacatactgttgggcctgcaggtgcacagaagaaaagaattgaggtttggggacctccacctagacttcagaggatgtatggaaatgcctgaatgccaggcagaggtttgctgcaggggcagagcactcatgaagaacctctgctagggcagtgcagaagggaaatatggggtcggagaccccacacagagttctcactggagcattgcctagtggactgtgaaaagagggccactgttttccagacccaacaatgatagatccaccaacagattgcaccatgtgcytggaagatccgcagacactcaatgccagctgtgaaagcagctgggaggggggttgtaccatgcaaagccacaggcacagaaatgcttaaggccat

SEQ ID NO: 380256 - DNA, 585 bp, Homo sapiens
ttatttaaaataattcatatcatgtcaactctctgggccagtttaaagagcccttatgcttctcatgaacatttccatacttcttgtgaccccttctcttttcagattatggtttatcatttcctttactgagatttcacttatccttccccagcccaagttaagtattctctttctaaattctcccaacccttcataactaatgactgcactgaatcacaatgctgaagtataatagaggtgattgcctttgcttgttgatttctgacatggagccaacattcctttgaaaatgaaraacacaaattttataattatatttatttttaactgatttattgcctattcttttctttagagagattaatttaaacaaagatttgactgagtgtaaattcagagtagtactaaagaaaagagtagaattacagcttcttatttcatgtgaagtgcaatttatgttcagataaagtataaaacttttaagctgaagatggttactataatttccttcttgttttcaggatcacatataaacttacacttttgtactaaactcacaacgtgaatatttgaaacataaaa

SEQ ID NO: 380257 - DNA, 585 bp, Homo sapiens
ttatttaaaataattcatatcatgtcaactctctgggccagtttaaagagcccttatgcttctcatgaacatttccatacttcttgtgaccccttctcttttcagattatggtttatcatttcctttactgagatttcacttatccttccccagcccaagttaagtattctctttctaaattctcccaacccttcataactaatgactgcactgaatcacaatgctgaagtataatagaggtgattgcctttgcttgttgatttctgacatggagccaacattcctttgaaaatgaagaacacaaattttataattatatttatttttaactgatttattgcctattcttttctttagagagattaatttaaacaaagatttgactgagtgtaaattcagagtagtactaaagaaargagtagaattacagcttcttatttcatgtgaagtgcaatttatgttcagataaagtataaaacttttaagctgaagatggttactataatttccttcttgttttcaggatcacatataaacttacacttttgtactaaactcacaacgtgaatatttgaaacataaaa

SEQ ID NO: 380258 - DNA, 562 bp, Homo sapiens
tgcctttgcttgttgatttctgacatggagccaacattcctttgaaaatgaagaacacaaattttataattatatttatttttaactgatttattgcctattcttttctttagagagattaatttaaacaaagatttgactgagtgtaaattcagagtagtactaaagaaaagagtagaattacagcttcttatttcatgtgaagtgcaatttatgttcagataaagtataaaacttttaagctgaagatggttactataatttccttcttrttttcaggatcacatataaacttacacttttgtactaaactcacaacgtgaatatttgaaacataaaagtatcagacaaatattagaatgtgtagttttggtgtaataagatgtattatgcagaaagaacagcttttgcataaatacaaataagaatttctgagacatgggaaaatggattaatctcttgagcaaggaagagacaaagtgtcatgttttataatgcattttttactctttttaagtaatcattctgttgaattcgtccttagaagtaaaacaattctccc

SEQ ID NO: 380259 - DNA, 585 bp, Homo sapiens
ttatttaaaataattcatatcatgtcaactctctgggccagtttaaagagcccttatgcttctcatgaacatttccatacttcttgtgaccccttctcttttcagattatggtttatcatttcctttactgagatttcacttatccttccccagcccaagttaagtattctctttctaaattctcccaacccttcataactaatgactgcactgaatcacaatgctgaagtataatagaggtgattgcctttgcttgttgatttctgacatggagccaacattcctttgaaaatgaagaacacaaattttataattatatttatttttaactgatttattgcctattcttttctttagagagattaatttaaacaaagatttgactgagtgtaaattcagagtagtactaaagaaaagagtagaattacagcttcttatttcatgtgaagtgcaatttatgttcagataaagtataaaacttttaagctgaagatggttactataatttccttcttgttttcargatcacatataaacttacacttttgtactaaactcacaacgtgaatatttgaaacataaaa

SEQ ID NO: 380260 - DNA, 608 bp, Homo sapiens
cctctcacatttcaaaacacaatcgtgtcttcccaacaatctcccaaagtcttaactcattccaacattaactcaaagttcaagtcccaagtctcatctgagacaaggcaagtcccttctgcctaggagcctgtaaaataaaaaacgagttactcacttcgaagagtcaatgatggtacaggcattgggcaaatgatcccattccaaaagggaaaaattggccacaaaaacagggggctaaaggccccatgcaattcctaaactcagcagggcagtcattaaatctcagagctaaaaaataatcwcctttgactctatgtctcacattcatgccacactgatgcaaggggtgaactcccaagaccctgggcagctctgcccctatacctctgcaaggtacagccctgcagctgctttcacgaacttgcattgagtgcttgtggcttttccagccacacagtgcaagctgtcagtggatctaccattgtggagtctggaggatggtgaccctctcctcacagctccactaggcagtgccccagtagggactctgtgtgggggttccaacgtcacatttcccctctgcactgccctagtagaggtcctcc

SEQ ID NO: 380261 - DNA, 583 bp, Homo sapiens
agcacccttgaaaaatgaagaatttaacatgccattatttccatccccaaaccaacacaccataatttgtaataacctcaaaacttaaaactatatgatgagaatgtrttttcttgctcttcttttatctcttatcatattgagtttttctaccaacacagttaattgacattacacttaacatatttgtttaattactaacagacacttcttttagagcttccattttattaaggcctaaattatgaattgtttttacgtaggtaaagtacttatttcaattcttttttttttttcagtgaggttgtatgagtggcagctttttaattcattcatatttagtagttctcggctgagtagaaaattcttgtatcgtaattttttttgttttattgattgattgattgattgattgattggagacggagtctctctctgtcgcccaggctggagtgcagtggcgcgatctcggctcactgcaagctctgcctcacgggttcatgccattctcctgcctcaacctcccgagtagtagtagtagtagtagtagctgggactacaggctcccgccaccatgcccggc

SEQ ID NO: 380262 - DNA, 583 bp, Homo sapiens
agcacccttgaaaaatgaagaatttaacatgccattatttccatccccaaaccaacacaccataatttgtaataacctcaaaacttaaaactatatgatgagaatgtgttttcttgctcttcttttatctcttatcatattgagtttttctaccaacacagttaattgacattacacttaacatatttgtttaattactaacagacacttcttttagagcttccattttattaaggcctaaattatgaattgtttttacgtaggtaaagtacttwtttcaattcttttttttttttcagtgaggttgtatgagtggcagctttttaattcattcatatttagtagttctcggctgagtagaaaattcttgtatcgtaattttttttgttttattgattgattgattgattgattgattggagacggagtctctctctgtcgcccaggctggagtgcagtggcgcgatctcggctcactgcaagctctgcctcacgggttcatgccattctcctgcctcaacctcccgagtagtagtagtagtagtagtagctgggactacaggctcccgccaccatgcccggc

SEQ ID NO: 380263 - DNA, 583 bp, Homo sapiens
agcacccttgaaaaatgaagaatttaacatgccattatttccatccccaaaccaacacaccataatttgtaataacctcaaaacttaaaactatatgatgagaatgtgttttcttgctcttcttttatctcttatcatattgagtttttctaccaacacagttaattgacattacacttaacatatttgtttaattactaacagacacttcttttagagcttccattttattaaggcctaaattatgaattgtttttacgtaggtaaagtacttatttcaattcttttttttttttcagtgaggttgtatgagtggcagctttttaattcattcatatttagtagttctcggctgagtagaaaattcttgtatcgtaattttttttgttttattgattgattgaktgattgattgattggagacggagtctctctctgtcgcccaggctggagtgcagtggcgcgatctcggctcactgcaagctctgcctcacgggttcatgccattctcctgcctcaacctcccgagtagtagtagtagtagtagtagctgggactacaggctcccgccaccatgcccggc

SEQ ID NO: 380264 - DNA, 523 bp, Homo sapiens
aaatgaacatttttgttgctccacattgtaaccagtatttggtgttaccagtgatccagattgtggtcatgctactaggtgtatagaagtatctaatttctattctaatttgcatttcccttataacatatgtagaaattttttaaatatacttacatgccatctctatgtattcttggaggaattgtctgttaagatatgtagcctattttttattgggttacttctgagatccctattctgggccattcatctatctattcaaatatctcactgttctgattactgcactttcttaaaaagtcttagaatcaggtagtgtcagtcctccaactttgttctttaatattgtcttgtcaattctgtgtcttttgcctttccatatcaattttatagtttrttgatattgaaaaaaataacttgttaggattttgaatggaattgcattgaatctacagaagctacagatcacgttgggaagaactgatatcttgacaatatttattcttctttttgataaaca

SEQ ID NO: 380265 - DNA, 595 bp, Homo sapiens
atgccactatgcagaagctttttagtttgaagcccttgagttttcatgtgtgataatttgctaccaatataatgtgtatattctgtcgattacattgtataatacactttaaggtgtgaataaattgtgaataacatgtgtttattgtatgccttttatttatatagttttattgtacacaaattgtatgatattgaatgaattacgtgcaattgcattccattcagtgcactaggttttattacgtcaatgcttggaaatttgttccatcgtgacattgtctctagacaattttattttttgaattccatttgatcatgaaatgaatgagttcaaattatgttatatatttgcatatatatgaatacatatatattgtaaataaatttatgcatatgcagtatggataaatacatatacatgtataagtatatacacatatataattaagcctggttgaaattataattgttaattattttaaaaatggttctcttttaaaccacttgtggtatgattgacatataaacagttgtacatatataagtatatatctagatgagtttgggagtaygtatacaatcgtgaaaccatc

SEQ ID NO: 380266 - DNA, 577 bp, Homo sapiens
tgaggtaggagaatcacttgaacccaggaggtggaggttgcagtgagccgacattgtgccactgcactctagcctgggccacagagtgagactccgtctcaaaaaaacaaaaacaaacaaacaaaaaaatcccttggcctcaggcttcattcacacactcacctctcatatgatattgtaattgcctcttaagttttcttcatttttccatagtggcatcagtaaatctcccaaatgcaaatgccattgtatggcatttcttgaactttgtttrttgtcctatttccacattttcactctgtctatatctgcaactttagctctacaaatttacatttttctctattgttctctacccaaagatagaatattttcatgaaataactccatgatcttattgtcagagacaaactttgagctgttagatcagcgaaaaaaactcaggtggtcaattccaatggttgaatgtagaataattgtctatatcactctatgtccaagtcaggcatttgaaagaaaataacaaaaaagaagctcagatctctaaaacagatatgccaagattgaaagcatccca

SEQ ID NO: 380267 - DNA, 622 bp, Homo sapiens
gtgaggcaacaagagttcagagtcagcgtggccattcaacaatgcagtagggaacaacatttcctgtgttttgggcagtaccgttcaatctgtgaggtggagtcaggaaacatagctactattagagaaataatatgctcactacataattacacaaatattttcaaagtttattcatgttagcatatagcattcatcactactttattcttctttattatraataattctatattacattcttatgttacccattcatcagtgtatagacatttgggttgtttctactttttaactgttacgaataatgcttctgtgaatattaggtacaagtttttgtgtacacatactttcatttctcttgcatgtatgcttaggagtggaattgctgggtcatatggtaactctatgtttaattattttaaggactgccaagctattttccaaagtggctgccccagtgtatttcaaccaacaattaatgagagttccaacgtattcacattctcatcaatatttgctattatctctttttttttttaactgcagccttcctaatgaatgtgaagtggtagctcctgtttttgatttttcatttcctaacaactaacaatgttgagca

SEQ ID NO: 380268 - DNA, 602 bp, Homo sapiens
tgaaaatttactcctatcttttattctaagagctttataggtttagctcttacatttatatctctgatttattttgagttaattcttggatatggcatttaaaaaggggtacattttcattcttgtgattatccacttgtcccagagttatttgctgaaaagactcttctttctgcatttagtcaccttggcacctttgccaaaagaccaattaactacaaatatacaggtttatttctgggtaaatatmattccattgcattgattttatgtcagttatatttcattgatctctatgtctatccttataccacatcccattactttatatctttgggatagtctgtgatctatttttagaaaacccactcaactggcctattaaagcacactggtttagttgttctacatatatattttaatatctgaaagtgtagtaatctctacctttatttttcctcaaaaattttagcctgtttctctttcatatgaactataaatcattttgtcaaattataacttttcaatcattgatttctggaaacgtattcctacacataaataaatcggaaaagaactgtattgttcatagttattatgcc

SEQ ID NO: 380269 - DNA, 602 bp, Homo sapiens
tgaaaatttactcctatcttttattctaagagctttataggtttagctcttacatttatatctctgatttattttgagttaattcttggatatggcatttaaaaaggggtacattttcattcttgtgattatccacttgtcccagagttatttgctgaaaagactcttctttctgcatttagtcaccttggcacctttgccaaaagaccaattaactacaaatatacaggtttatttctgggtaaatatcattccattgcattgattttatgtcagttatatttcattgatctctatgtctatccttataccacatcccattactttatatctttgggatagtctgtgatctatttttagaaaacccactcaactggcctattaaagcacactggtttagttgttctacatatatattttaatatctgaaagtgtagtaatctctacctttatttttcctcaaaaattttagcctgtttctctttcatatgaactataaatcattttgtcaaattataacttttcaatcattgatttctggaaacrtattcctacacataaataaatcggaaaagaactgtattgttcatagttattatgcc

SEQ ID NO: 380270 - DNA, 604 bp, Homo sapiens
tccccaattgattcaatccccacactcaactactttgcatgttttcctttctcctcaaccttatatcacttcctttgacatagtctctcatctctaaagaacatggctttggtttccctgaaggaaaatttgaacaattagaagataatttccattagtacctaagaccacatctaccagtcagaatatataccaatatatttataattgcttcttgtcactcatgtctatcttttctccaagaattcttgttcagccatttttttgataggcttgtctacaaaatcagtcttcccattctattgcatcattgatcttctttggtcattgacataagctgtcacatgctgtattaactacaatgtctttaaaatgcactctcctgcctactgaataakaaatttctttcttaaacataaaataaattaaaatgtgatagcatattttgagcaataattgtagaaagaaaactttgaaggtgtcatttaaagggatggtaaaattcctacaaaagtgaagaaaagcaaaactagagtgacactatctaaggctattgctgtgatcctatttgtagctctagttcaatgttgcctaggaaatacat

SEQ ID NO: 380271 - DNA, 599 bp, Homo sapiens
tctatcacatttataactcctttatgcatatcttaaagagaattttttatcttttcagctgaatggtcactgaccattagaattccaaaaatatagtacttatttaaatgtaacttattgctagacaggatatctagcaaactcctcagtgggaaattgaaaagataaaatacaaaatgtaggagaagaagagaatatctggcatcaaaaatcrctcagtaggatacaaataagtaaaacatggggatgaaatgaattggaactgaatctatttgcattagggattgaacatgaagtgctcagtaggaaagtttgaaacacttcactgaacaatagcaaaataagttgaatattttagcaatgttttagtattctcaaaatgagcttttgttgtagctcccattgcagccactttatttccaaaagtaagagttcctcagcatgtttttaggaaaagaacccaaaaaacccgccaacctatgttttgcccttaaatgtagtcaaaaattccagtgtaatggaaagttcgccctgagcaaccactttcttttcatggtttccaagattttctggttaatgttgtggtgttgctggttttg

SEQ ID NO: 380272 - DNA, 575 bp, Homo sapiens
tattttctcctgttctttctcagcttgacatgcactgatcttaactaagatttgtctgtaacactaagtctgatagtctgcaaactacattgcccattctcaccttacagctagttaccagactttgccagtaggaaaaaacacagtagaccagaaaataggamgagaagaaaagctagtttctccttccttttcttgcttctagaggcacctataaaagtagttatctccttctgtgttcccaatttcaaccagaacttcctgtctggtggatcatatatggagctctactatgattgaaggtgggcccttcctttccaattctaggactaactgggcagaaccccagcagcgcagaaccaaatgtctggggtcctactaacaccatctcctttctttactcacctttcccagttctaagaatggcagtggcttcctgaagttactaatctctagatagctctcttgtttatttcttctcctccaaaactctttttcccccttatttccttccaatgtctttacataactaattctctttagtaaataaaaaaataggagctttattttattat

SEQ ID NO: 380273 - DNA, 560 bp, Homo sapiens
accccgtgtttagctgaactaaggaaaagtccttcaacagctggtttcttatgatgtgatcctataaagcactccaccccttcctgaccaccaccgccacatacatgttcataaagtgacatctgaacccagaaagacttaatgcaggtgacagggaaatcacaatgatatctagaagagtggcccaagcaggtcaaacatcaagtgcacatttccagggattaaaggatatttggagtgttcccaaactggagtcccatgtagctgaagagtgtgtgaaagaggaagtgggagaagttgaggtcacagaagtaggagaataacatgaaataataaggggatgttagatcaatataatgactttagcttttacactaaggttggaaattgctggagtattttgaccaggtaagkagcagcaccgttttgttgttgttgttttgtatttttatgacagagtctcactgtgtcacccaggctggagtgcagtggcgtgatcttggctcagtgcaacctctgccttccgggttccagatattcttgcgccgcagccccccctc

SEQ ID NO: 380274 - DNA, 463 bp, Homo sapiens
ggggaactggtgatcattcactatgctgttactttcctctgtgggtgaaatttcaggctggaatgttctctcttggcactgacctgtgccaccttggaaaggggtgacacaggtaaggtactttttttaccctcttcaatgtagctattccaagaatttttgtttcaacagtgtgttggaagctttccactgtaccctcagattcccacaaaagtactcttgtcaatagatagttgccagaatctatgtttctgctggggaatgatggtagagagtgcttactctgacatcttgctaataacatttccttattttagcattttgaagtcggtaatcctgcactaggattcaagcatgcatataaatctayagcacttttatttgtaggcagacaggaaatatttattttatcacaatgttaattaatatttagtggtttcaaataatacagtaagctgataat

SEQ ID NO: 380275 - DNA, 467 bp, Homo sapiens
ctatttctgctttaattctagtcactccatgcagactagggagtatcctcaggagacaagctgtataaatatgtattacacaaagtatgggtctccctttcaagggttgaatcccctccagtgtatcctgtttttggttgctctcctgtatactcacataatkttgttttatgtatcttatcctgactttgtaatcattatctacaggaggattcatcccatacatgctactctgtgactatctggacgagaatttccaagagctctttcttggacatattcaactgagatcactatttaacatccaagtggagatttaaaaataggatttggatctggagttcaggggacatgccatagctagaaatacagtttacagtcatcagtgtatatgtggaatttaaagatatagagttcatgagatcatctagggatgaatgcagataacgtccaaagactaagcctta

SEQ ID NO: 380276 - DNA, 467 bp, Homo sapiens
ctatttctgctttaattctagtcactccatgcagactagggagtatcctcaggagacaagctgtataaatatgtattacacaaagtatgggtctccctttcaagggttgaatcccctccagtgtatcctgtttttggttgctctcctgtatactcacataatgttgttttatgtatcttatcctgactttgtaatcattatctacaggaggattcatcccatacatgctactctgtgactatctggacsagaatttccaagagctctttcttggacatattcaactgagatcactatttaacatccaagtggagatttaaaaataggatttggatctggagttcaggggacatgccatagctagaaatacagtttacagtcatcagtgtatatgtggaatttaaagatatagagttcatgagatcatctagggatgaatgcagataacgtccaaagactaagcctta

SEQ ID NO: 380277 - DNA, 587 bp, Homo sapiens
aagcatattaatatacatataaagaaacattgaaaacacacatatgctttttccagttttcaaataatactcctcccartgatatttctgtataatagggtcagaaattcgaagcactagatggcaggggttcttaataaatgcaaggggagatgttcttggggcagcgtgcagcccttgatataccacatgtatgattattttttacatatgtagcttatttggtatctcagaattatagctttcagatactttatgatcatatatactttaaatttaagcattgtgatttccacagaagcagggttccttccatagtttacttctcagattgagctaggcatacctttagagttaggtaaacctgggtgaggatatccaatgtcacagactaacatagctagtttcggcggtgtaaattttcactgaagattggggatgagtacaattagctgatttagctcataagtaatttatattgtatattgaaacaaccagccatattatggattaaagtttaaattttgtgtgaattatgatgataaaacataagaagtcaaaggtatttttttgttgattatgtgggg

SEQ ID NO: 380278 - DNA, 587 bp, Homo sapiens
aagcatattaatatacatataaagaaacattgaaaacacacatatgctttttccagttttcaaataatactcctcccaatgatatttctgtataatagggtcagaaattcgaagcactagatggcaggggttcttaataaatgcaaggggagatgttcttggggcagcgtgcagcccttgatataccacatgtatgattattttttacatatgtagcttatttggtatctcagaattatagctttcagatactttatgatcatatatactttaaatttaagcattgtgatttccacagaagcagggttccttccatagtttacttctcagattgagctaggcatacctttagagttaggtaaacctgggtgaggatatccaatgtcacagactaacatagctagtttcggcrgtgtaaattttcactgaagattggggatgagtacaattagctgatttagctcataagtaatttatattgtatattgaaacaaccagccatattatggattaaagtttaaattttgtgtgaattatgatgataaaacataagaagtcaaaggtatttttttgttgattatgtgggg

SEQ ID NO: 380279 - DNA, 556 bp, Homo sapiens
acagaaaaaccagagtgatcaccaataaaatgaatttaaattcttttgtccgggaattatcaaaggactttggtaaccagaatactttaagcgtagcacacacttaaggtagtaggcattgggaaagcttccatgcaacttgtaaattcccagaaggttagaaggaaaaacagcctgaaaaattatactttaagggatcgtgtgaacctaatttataaaatgttttccaaatcacaattatctttggaagtatgactccactttcactttaacacagatttcattaaattttaagttctaaatcaaagaaacaaatgggatctgggaayctttgaacatgtatattcattgaagtgacaaataagaatcagtaaaatggaaaacaagagagataaactaattaaattttggagatcaggcgtggtggttcacacctgtaatcccagtgctgtgggaggattgcttttgcctaggagttcaagactatcctgggcaatagagcaagactctgtctctatgaaaaatacaaaaattagccaggtatgatggcatgccg

SEQ ID NO: 380280 - DNA, 625 bp, Homo sapiens
atctcctaatatgctaacttacattttaaactctctttaaaatacattttaaagagagttctctggaccaaacaatacataacagataaagtctgtcatggaaatgcattctggcacagtaaatgaatttatggttgctgtaacatatctgccagaatgtaaccctggctcaaatatcgtgcttttgttcttcatctggtaggctgaaaggtgacttaattctggtgaagtagtgggcaaactatttgtttttcttgttcagttgaaattcaatcaggatttcaactgctaaatatagataatatatttatattttgaaaaccataggagaatgcatagtcatgttaagagaagtatataaaagatatggtagrttaaagaaaaatacattaaatacatccattaaatattcttacagcaaaatagcatcaaatggattaaaatagagtgtaaaacttactttagatagagattattgtgtaatgaatcgttgactgtctttagtgatatggtcaatttatgtttatgggttaattaaagctccccttgcctaacacaaaaagaaccagttatcagtcaattcagtgaggggaaaaaaacaaccaaggcacttgtttaatatcat

SEQ ID NO: 380281 - DNA, 625 bp, Homo sapiens
atctcctaatatgctaacttacattttaaactctctttaaaatacattttaaagagagttctctggaccaaacaatacataacagataaagtctgtcatggaaatgcattctggcacagtaaatgaatttatggttgctgtaacatatctgccagaatgtaaccctggctcaaatatcgtgcttttgttcttcatctggtaggctgaaaggtgacttaattctggtgaagtagtgggcaaactatttgtttttcttgttcagttgaaattcaatcaggatttcaactgctaaatatagataatatatttatattttgaaaaccataggagaatgcatagtcatgttaagagaagtatataaaagatatggtaggttaaagaaaaatacattaaatacatccattaaatattcttacagcaaaatagcatcaaatggattaaaatagagtgtaaaacttactttagatagagattattgtgtaatgaatcrttgactgtctttagtgatatggtcaatttatgtttatgggttaattaaagctccccttgcctaacacaaaaagaaccagttatcagtcaattcagtgaggggaaaaaaacaaccaaggcacttgtttaatatcat

SEQ ID NO: 380282 - DNA, 425 bp, Homo sapiens
agcctcggttttcttatatataaaatgtgaaacccagcatttagattggaaagagatttttgaaattatgtggcccaaactttttatttcacttatgcttgttagctctgacaagaaggtggtgtatttttttcctcagagacagaagccrtgaatgcatctatcacttagtaagataatcagcatgacccactccgtcctgaagcaggattcttagcaattgaagtctaatatattgcagtacttggcacattttcataactcatggtgatgggccaggcagcaataggaaatcccagactgggagcccaggtagccaactggatcagagaaggggaagtcagtcagtctgggaagaagcagataggtccttgtggtttgatgggctagggtatcatctgatgagttgaggtgggaaaagataa

SEQ ID NO: 380283 - DNA, 425 bp, Homo sapiens
agcctcggttttcttatatataaaatgtgaaacccagcatttagattggaaagagatttttgaaattatgtggcccaaactttttatttcacttatgcttgttagctctgacaagaaggtggtgtatttttttcctcagagacagaagccatgaatgcatctatcacttagtaagataatcagcatgacccactccgtcctgaagcaggattcttagcaattgaagtctaatatattgcagtacttggcacattttcataactcatggtgatgggccaggcagcaataggaaatcccagactgggagcccaggtagccaactggatcagagaaggggaagtcagtcagtctgggaagaagmagataggtccttgtggtttgatgggctagggtatcatctgatgagttgaggtgggaaaagataa

SEQ ID NO: 380284 - DNA, 537 bp, Homo sapiens
tggagttttaaattcaaaggataacttctcagattacccttatgaaagacagcattgctccaacaccacagggtgaaagtaaatcttgaggtggtgtggatttaggaaaacaccaggcattacattattacagatgaattggcttagaatatctcatttttcttagtaactaagtgatggaagaaagatgtcatgtcctcaatatcactaataatagctaatgaatgttattctcccacaaaacaggggttggtagccatagttgagtcatgctaagttctccagtagcaatgtcagcattctccaccttacaagtctggcrcaaggaggtacatttaagtttatttgacagcctgcatgctatttcttcaatattggaaaattgcttcatctcaattgtttccccatgtaccttaatttatgctaatttttcctcagtctcacctttttttccccctccctattgccaagttcatagactgtaaattttttcattaattttgttacagaaataaattagtcaaatcatgtcaaatt

SEQ ID NO: 380285 - DNA, 611 bp, Homo sapiens
atgctaatttttcctcagtctcacctttttttycccctccctattgccaagttcatagactgtaaattttttcattaattttgttacagaaataaattagtcaaatcatgtcaaattaaccagcatttggaagaattaatatcaaaaatattttattaatttttattttttcttgagtttagcttatagtaaagggaattttactcactgcaatttaaatgggatttgataaacaaatatttattaggtattttactacctaaaacatacattgttaactataatagtcttttttaggaagccactaagagttcctcacaatgttttacctataatgccttatgaaaatattgatatcatggattgatgtagtcaatttttcccccgaggatacctactcacatatatgcatgattaaaaaaatattttgcagcgtcttcaacataggaacataacatttttattaatgggggtcccagagtggatgggagaaaatggagtgcacatgggccactagacaaaaaagtctatcctaccatccactaaacaatactgaatctgtatgaccagtgtgctaattataaaagattgccatctgtgacactcactca

SEQ ID NO: 380286 - DNA, 611 bp, Homo sapiens
atgctaatttttcctcagtctcacctttttttccccctccctattgccaagttcatagactgtaaattttttcattaattttgttacagaaataaattagtcaaatcatgtcaaattaaccagcatttggaagaattaatatcaaaaatattttattaatttttattttttcttgagtttagcttatagtaaagggaattttactcactgcaatttaaatgggatttgataaacaaatatttattaggtattttactacctaaaacatacattgttaactataatagtcttttttaggaagccactaagagttcctcacaatgttttacctataatgccttatgaaaatattgatatcatggattgatgtagtcaatttttcccccgaggatacctactcacatatatgcatgattaaaaaaatattttgcagcktcttcaacataggaacataacatttttattaatgggggtcccagagtggatgggagaaaatggagtgcacatgggccactagacaaaaaagtctatcctaccatccactaaacaatactgaatctgtatgaccagtgtgctaattataaaagattgccatctgtgacactcactca

SEQ ID NO: 380287 - DNA, 489 bp, Homo sapiens
ggtcaaatcaacctactcaaattttccttgccttctgaaatttaaattcttgattaattagactagggtggaaatttaaactctaaaccagatgaatttctataactaccacattctagtagacaaagcatatcttaaccttttatccttaattcagctctccagtgcttttaagaagtcctagttgtttacttaaaggttacaggaaactttgaaagacattatctgtaaaaccacmtgaaaaatctgctataaaattaacatcgaattcaaagtatttctgctctcagattgtaaagcttttctgtttgggagaaaaatagattacttcatgtcttaatcatcattgtaatcttgttaatgaagtttccagcaggcaccagtgagatgttgctgagatcagattgtcatgtaagcatctttgtactagttttaagacttttgcaggacctctcaataatctaccaggatgaacaggaatactgaaac

SEQ ID NO: 380288 - DNA, 489 bp, Homo sapiens
ggtcaaatcaacctactcaaattttccttgccttctgaaatttaaattcttgattaattagactagggtggaaatttaaactctaaaccagatgaatttctataactaccacattctagtagacaaagcatatcttaaccttttatccttaattcagctctccagtgcttttaagaagtcctagttgtttacttaaaggttacaggaaactttgaaagacattatctgtaaaaccacctgaaaaatctgctataaaattaacatcgaattcaaagtatttctgctctcagattgtaaagcttttctgtttgggagaaaaatagattacttcatgtcytaatcatcattgtaatcttgttaatgaagtttccagcaggcaccagtgagatgttgctgagatcagattgtcatgtaagcatctttgtactagttttaagacttttgcaggacctctcaataatctaccaggatgaacaggaatactgaaac

SEQ ID NO: 380289 - DNA, 433 bp, Homo sapiens
tgcttccaatattttttttctcattgaacttacaataaccctttcaaattagatactttctctacaactggagcagctaaggttcagagaggttaaatgacctatcaaagaccaatgattattwaggaatggagctaagattcaatccaaaggctggctgactccaaaatatatcttagctaaaacatctccaaaattatcccagagatcaatctaatcccccctgcttattttacaggtgacagaattagggaccagatagattagggaaatttacctggcctatttcttattgctcccaatttagtaatctttccttcgcaccatgccagaattgcaaagtgagcagaaatcttctgcaagtgctgggacagaatgtgaatacacctagaatagacaatcccaggcactgcttggaatggtgaaaagcctc

SEQ ID NO: 380290 - DNA, 588 bp, Homo sapiens
gtgaactgtacctgcgagggatctaggttgcaggcaccttatgagaatctaatgcctgatgatcagtcactgtctcccattaccctcagacagaattgtctagttgcaggaaaacaagctcagggctcccactgattctacattatgatgagctgtgtaattatttcattataatttacaatgtaataataataggaataaaatgcacaataaatttaatgtgcttgaatcatcccaaaatcatccctttcctggtccttggaaaaattgtgtcccaggaaactggttcctggtgctgaaaaagttggggacctctgcastaaaccatattcccaagcccattataagcctatagatacaaccagtaaaataccttccttagggcatttcaggatgaggtggtttttggggggcaaaagggtgattatgacctataaagagatggttatgagttgagaggatgaatactatccttgaaaatatgatgatttatagaaaaataatttttaatataaatctcttagttagtttggtaaaaatgttgagagacagtgcagtgcacaaaaagcccagagtgagaattagggc

SEQ ID NO: 380291 - DNA, 641 bp, Homo sapiens
ataaaacgtggaatgggaagagaacccttgtgcagagacatggggataagtagcaggttctggatgaaggtgtttgtctcccatgaccaccagaggccttgcagcccttggttatctcataatatccaatttrttctgttacaggggccactggggatgggctgcagagaattaagggtaattcataattacatcagattacagaactcacagctccaaccacacatgcaaacttgggaaagatagctaatgattggactgaaaaaattgtttctagaaaatccaattttcataaataatttggaatttttccctttgaaaaataatgccaccaacccttcggagtttgaggcggggtggggcgggggggctggatttggaagaagtagctgatttataatgtcaggccactgaattaaaccttagagtctctgatgaaatccctgagttttattttccttttgtggtgatgttttgtaagagagggagcgctttttaaaatcacagttcttattagtcacccaaaaacagttccagtttaaaagtggatctttacgacactttcttttgtggggtcttttatatgggttgcctaacgtgaatttgtagaattaataaaattaatgaaatctcaaagtcag

SEQ ID NO: 380292 - DNA, 524 bp, Homo sapiens
ctctaccagtccattagtcatcagctttcatacacaggtacatttatgcaaggtatggctcaactggtttgtcataatcccctaggatcacctgtctaaagaatgatgcttgatgtgctcaggttttcctgcctcacaccaggaatggacttgttaacatgtttatttccatttttctccactgargtcattggggaagtttatgagtttgttgaattgctaaatgagtagtgctggctgttgtacttgtcattagttatttttaagggaaaagtgcctgttgggttgtttctatgcatctgagtgaggctgattaccttgggcaggtgagacatgcttccattcacattcaactttatacttaagacagcataattgagatgcactatccttcattgactgtaatcctaagtaagcagttttctagtctcgctgatatgtatcctgccagttatatgttgaaacataaatttgaaaggtaaatagcctccttactcaagctctaaatcatattaggatacatc

SEQ ID NO: 380293 - DNA, 584 bp, Homo sapiens
agcttatacagttagtataaacctcaatttgggttagagaaatgatgggagaaatactgtatcatagtaaatgtaaactaagaattgtatgacagaaaaaataattttacaaggcacaattcagagggcaaatttaagaaatttcatcttggaattcttgccaatctgaagcctttgagatctttgaayaaataaaagtgtgcctatgttggaaatcttattttagagcacaagagggtcaaatataatcgtttggattcattttccctattggatgaaagccaatagttcctggcaagtgtagttatattgagccgtgttattaatcacacgcacttcttattttcagtactgccaggaaacaactgtggcagacagattgggctggcacagagagatcagaaatgggagagctcttcacaagcaaagacgtaggttagccttggaggaggcatggacagactgaccagacaaatgcagaagtgtacgaagctcaaacccaaaggatttattttcagtggggaaagaaatatcataactcctgctcttttacaagaacctttaagtaaatattaattcttcat

SEQ ID NO: 380294 - DNA, 584 bp, Homo sapiens
agcttatacagttagtataaacctcaatttgggttagagaaatgatgggagaaatactgtatcatagtaaatgtaaactaagaattgtatgacagaaaaaataattttacaaggcacaattcagagggcaaatttaagaaatttcatcttggaattcttgccaatctgaagcctttgagatctttgaataaataaaagtgtgcctatgttggaaatcttattttagagcacaagagggtcaaatataatcgtttggattcattttccctattggatgaaagccaatagttcctggcaagtgtagttatattgagccgtrttattaatcacacgcacttcttattttcagtactgccaggaaacaactgtggcagacagattgggctggcacagagagatcagaaatgggagagctcttcacaagcaaagacgtaggttagccttggaggaggcatggacagactgaccagacaaatgcagaagtgtacgaagctcaaacccaaaggatttattttcagtggggaaagaaatatcataactcctgctcttttacaagaacctttaagtaaatattaattcttcat

SEQ ID NO: 380295 - DNA, 584 bp, Homo sapiens
agcttatacagttagtataaacctcaatttgggttagagaaatgatgggagaaatactgtatcatagtaaatgtaaactaagaattgtatgacagaaaaaataattttacaaggcacaattcagagggcaaatttaagaaatttcatcttggaattcttgccaatctgaagcctttgagatctttgaataaataaaagtgtgcctatgttggaaatcttattttagagcacaagagggtcaaatataatcgtttggattcattttccctattggatgaaagccaatagttcctggcaagtgtagttatattgagccgtgttattaatcacacgcacttcttattttcagtactgccaggaaacaactgtggcagacagattgggctggcacagagagatcagaaatgggagagctcttcacaagcaaagacgtaggttagccttggaggagrcatggacagactgaccagacaaatgcagaagtgtacgaagctcaaacccaaaggatttattttcagtggggaaagaaatatcataactcctgctcttttacaagaacctttaagtaaatattaattcttcat

SEQ ID NO: 380296 - DNA, 576 bp, Homo sapiens
gtcaccagcatggattacacctgaagaaactacatggagactacattactgtgttcacctagaaccaaagccaatatatcycaccaaaacaacaccccaagacttattcatatgaataagtctttccctaggaaacctactccataaaattagaagaggtaatttttccaccagatgtgtagaaatcattgtaggaacacatcaaacatgaaaaagcaaggaaacatcaaacctccaaaggaacagaataattcaccagtaacaggcatcaatcataaggaaatattgtatattcatattaaagtaagacataccataaggagtatgacacaaacttgtcccaagcctgcgaagtggagaattagtttaggcttaaatggagccattatatccttttcctagttatacttgtttttcaaaaatctgtatatagtttccattaatagagacactctgaaaagggggaaaatattccaagaaatattacaaaataatctcaaatatttcaacgctattctgaactactgtcaaatcacagtgaaccagggattcttcctttatcagaaagtaagtcac

SEQ ID NO: 380297 - DNA, 585 bp, Homo sapiens
gggtatgttaaaggtggcaatcgtttcttagaagtattcttactttaaatagcacatctattctgtataaagagataaatgctaatttatttataaaatgagaaatgaagytctaagctgtgtatagaagttttggctaagtgcccatacaagtgtttgtgaagaaaggacttgaagttactgcagctacaatgaactgcttctgttaacaataaacacatttcagattaatttctatgggaaattcttcgagatgaatattctacacagagatttttacacacgtggttttcacacctagggatcatgaacctgagaaagatgtgcatgttaagaattagttacacattatgcatggtgcaagtcattgtagagaagtgttgtagctatgccaacatctcactggcagccatcccaccaacacagacaaagtaataacaaaaatacacatatcaggtaagaaaaggtatctacatctgtcaaatcctcagaaaactcagacttacataattaatttttctggagatagaatcatttattcattagattacacctaaaacttggacataaaaaatatacaattta

SEQ ID NO: 380298 - DNA, 585 bp, Homo sapiens
gggtatgttaaaggtggcaatcgtttcttagaagtattcttactttaaatagcacatctattctgtataaagagataaatgctaatttatttataaaatgagaaatgaagctctaagctgtgtatagaagttttggctaagtgcccatacaagtgtttgtgaagaaaggacttgaagttactgcagctacaatgaactgcttctgttaacaataaacacatttcagattaatttctatgggaaattcttcgagatgaatattctacacagagatttttacacacgtggttttcacacctagggatcatgaacctgagaaagatgtgcatgttaagaattagttacacattatgcatggtgcaagtcattgtagagaagtgttgtagctatgccaacatctcactggcagccatcccaccaacacagacaaagtaataacaaaaatacacatatcaggtaagaaaaggtatctacatctgtcaaatcctcagaaaactcagacttacataattaatttttctggagatagaatcatttattcattagattacaccyaaaacttggacataaaaaatatacaattta

SEQ ID NO: 380299 - DNA, 590 bp, Homo sapiens
aggtgtcttataccatggaaagccattggacgattttggtcagaagactggcataatctactttacactatgaaaagattgttctgcctgcttgtgtggttgtgagactcttcactgagagaagcactcaagtaagaaaaatgaggtttggggaaaatacattgaagtggaaatgcttttgaaacatctcatttctattggataaattcaatagacaattggatatgcaagcccagaagagaggtttgtgagtcagcatatgtggttgttgcagccatggtttggatgaagtcattaggcctggtatttatagaaaaaagaacaagtcrttgtcttggtgacaccaccatttattttacacttcagaagcaaataaaggaaggagatacagtcagttctgctgttacttaacacaaacctttcctaaatttcaccatgttaagaagttggccttagatgacctgcatgcaaattctgcctctgcactccctagctgggtaagcttgggcaaataatttaacttttctatgacttacttttcctaactctcacatgtagataacaacagtgcctacttcatacagttgtta

SEQ ID NO: 380300 - DNA, 552 bp, Homo sapiens
tcgtgtggtggagcagtcagagaccttaaagccatattgattgggctcaaatgcatcgcwaccatttatcagctgtgtgacctttaccaagttatttaatctctctgtgcttcagagatttttcatttgtgaaatgggtgtagactttaagtataaagttgaaaccaagagatactatcttcccatttttggccttggatatcatacaatagaaaaaaatgaatgaaataataaacttaaaaatcactttcagcaaaactaggggactaatataatctgcaaatccccaaaatgtgctcagaaaagcagatgccatatggaataaggtcaatagtgagacttcagaaagcaccagcaaaaccagacttcctgaaggtgagaaacacaccccaaaatatacatttagcccttgtacacaagtgctacagggtctggggaaggcagaagctgccaaggggaaagtataataaataagcacagataatagctaaaatggatgagtggggacagatctcagaaaatgcaaaaatctactcactgagatgaaggatt

SEQ ID NO: 380301 - DNA, 607 bp, Homo sapiens
ttaatctctctgtgcttcagagatttttcatttgtgaaatgggtgtagactttaagtataaagttgaaaccaagagataytatcttcccatttttggccttggatatcatacaatagaaaaaaatgaatgaaataataaacttaaaaatcactttcagcaaaactaggggactaatataatctgcaaatccccaaaatgtgctcagaaaagcagatgccatatggaataaggtcaatagtgagacttcagaaagcaccagcaaaaccagacttcctgaaggtgagaaacacaccccaaaatatacatttagcccttgtacacaagtgctacagggtctggggaaggcagaagctgccaaggggaaagtataataaataagcacagataatagctaaaatggatgagtggggacagatctcagaaaatgcaaaaatctactcactgagatgaaggattcattctgaagcatataccaatgtgagtggatatggaggaaagagaatgaagggttgtatatagagctggctgcagaagtcctcctggactagatttggtttagagaagaaggtggggctagaagccatttagaatgaaactggtagtacc

SEQ ID NO: 380302 - DNA, 567 bp, Homo sapiens
ctttaaactctgagatcctgacagcaagttttgttttatttttaccatttcatccagctttgatttaagttcacacttcagcaaattcaaatgctgggccagctggttcctctaatctgcaatgtttctaagtctaaaactgccaacaatattctttggagttttctgrctccttagctaaaatcattttcttgcaaggtctctctgaggttgttgaccccaggagggaagtatttaacactgacacacacattttatggcatcaccaaaaactattcttcatactccattgacctcattttccacttaaagccagtgcaattagataaaaaccttgaagcttagactcatatagagagatgtggcactaatttattttttaatttggaaagcttctttttgttaataatagaccatactcatcttttcatttctccaagctgttattgcattctttatgctcctcatttgtccttaaagtgggatatttctttgtgatggtttttatattaatttttatactctatctaattcaactaactatgtgccagatactgttccagatga

SEQ ID NO: 380303 - DNA, 599 bp, Homo sapiens
gtttctctgctttcagttttaattttcctgtttctcagagatgttgagcatggagcatgtgcttgacagagagagcaccatgacatttcgagtctgctaaactcttcatcctggatacaattttctagagtttacccaaatatcaaacatgtggtaaatgctttatcagacattgacagtctttccacctctcctccctgccctacctttacctcactccaccccactgagtaacccaagctccattggaaggaaaacatgagctggatagaggctgatttggttctggactgttccaggatcaccttttctgaaacacttcctggtccattcagagggaacttatggggttgggtgaagttttcaaaccccatttgcctttgtcaagtggagacaaactcttttargaaaccaagccagtctcaccctgaattagtctatattaaactgtatcacagagccctcttgcctctggagctgcctccgcattggccttccatgactttctaatctacctctcttgcactgcctggactatgttttcagcccttatgctcaggaggtacaaatgccttttgtataaaaagctgtaaaaaggc

SEQ ID NO: 380304 - DNA, 556 bp, Homo sapiens
tggaactgagttcactgagtctaaataacttggaatagattattactataaacatagtattttcattactgtcttaattattgcaaggacaaaattctgcaatatgagaaacacaagtgccatattttaaaatatctaaacataatatatttgatttcttaacttaaaatttagaaattagaggcccactcaattttggtgactattttaagtaaaacccctagattaaacattcatatttatatcaaatgcttggttttatctttccctgtggcttctctgagcaaaatatagggtgattcaatatgggaattcagacttggaagcatgttagtcttttttcactttttgagttacttatatactaactgtggttaaaactrtaacagaaacatattaagatataaaatttaatagtatattgccatagagctttagtaaaatccaacttttaaaattaatagaggtattcctaaaatggtaaaatttaaaaatgatctgttagaaattgtacttacattaaattggattcaaatatactgaggaaaaaggaaac

SEQ ID NO: 380305 - DNA, 584 bp, Homo sapiens
tgttttccatctactttattaaaatgtactttttgaaggttaccaatgacataagtcataacatctaaccatttttttctttcttttttttttttttttttttttttttgggagacaggatctcactctgtcacccaggctggagtgcagtgatgggtatcatagctcactgtagccttgatctccagggctgaagccatcttctcacctcagctttctgattagctgggactacaggtgtgggccactatgcctggcaaagttttttgatttttggtagtgatgaggtcttgctgcgttgccctggctggtctcaaactcytgagctcaagtgatgctcctgccttggcctcccaaagtgctagaattacaggtgtaagccaccacacccagccaaaatttaatcttttttctttagttttcatcttgctagatgcattttcaatatttgcattgctgacacctctgtcttcctgaagtattctgctctattaattcagaattaaaaagacaaataattattaactatatgttatgtcttaagagggaggtatggctgaagagcacagaagtagggtacaaaa

SEQ ID NO: 380306 - DNA, 535 bp, Homo sapiens
agcttttctttcttcctctcgtggtaggaatctgtcagttgacataaaattgtgcaccatggccggatgtgatagaggcagacaagcaagatgygtctcactgatgcatctggacaggaaaccttaaatatggttttcttttcttaaaaaaagaaatcccagccacatatgtttttgtttttcttctcagcatttggtacgtgaaaacatagggcatgttattgcaggtagcaattctccagagagtggtagtactttttgaaagattttaggagccctcaaattcttccagggatgaagatcaggtattttggtctgatactttgaaatatatacatatttatttatactcttttgtgtacaaactagaaacaagttgcctacattttcttgaaaattttgggaagttacttctatttcagaaatacttttctgtcatcaaaatgttattagtgaggacatgaaactcgatttctgaacttctaggttctctgtgggccatagttttattgtatcaccgtgaattttgaaatgt

SEQ ID NO: 380307 - DNA, 590 bp, Homo sapiens
tctttttccccccagtatctaatgttaattgcatcttagttagttcaggctgctgtaacaaaatgccataaactaggaggcttatacactatagaaatttatttctcacagttctggaagctgggaagttgmagatcaaagtgctggcatgtttggtagttggccagggcctgtttctggtttatagatggcaccttcgtgctgtgtcctcacatggtggaagaggaaaatgaactaactcccttatgcctcttttacaggacactaatccctgacccatcacctcccaaagtccccatctcctactaccatcactttgtttaggatttcaacatacgaattttgggaggacacaaacgcaagccatagcaaactgcctttccaatgtgaatggaatagtgttttcttttgtcacaagtagtgagacaggacactaaaccaaactagacatttttaaagaaaacttttcattttctttttcattttagttgcgatttctcctactggctcttatttttggggacataaattcaaatcaacagctgctaaatttttaattataacaacaggaccagaattaacttgaaaag

SEQ ID NO: 380308 - DNA, 590 bp, Homo sapiens
tctttttccccccagtatctaatgttaattgcatcttagttagttcaggctgctgtaacaaaatgccataaactaggaggcttatacactatagaaatttatttctcacagttctggaagctgggaagttgaagatcaaagtgctggcatgtttggtagttggccagggcctgtttctggtttatagatggcaccttcgtgctgtgtcctcacatggtggaagaggaaaatgaactaactcccttatgcctcttttacaggacactaatccctgacccatcacctcccaaagtccccatctcctactaccatcactttgtttaggatttcaacatacgaattttgggaggacacaaacgcaagccatagcaaactgcctttccaatgtgaatggaatagtgttttcttttgtcacaagtagtgagacaggacactaaaccaaactagacatttttaaagaaaacttttcattttctttttcattttagttgcgatttctcctactggctcttatttttggggacataaattcaaatcaacagctgctaaatttttaattrtaacaacaggaccagaattaacttgaaaag

SEQ ID NO: 380309 - DNA, 548 bp, Homo sapiens
aaattctatctattctgcacctgcctaacagccgaatgtgactaagagaaaaaattcatgttgacaaacttcactttaaattcataacttctttcattgtttggtcttttatttaatgtgtccaatamttgtcttagtcaattcacattcccatttttatagatgattatttcataactccttctctttctttcctcttagctagtgatcttgtttttaatttttataagttctcacaaccaagtctactacctcaacctaactctgttctaaaatgctctgccttctctcattaaacagacaaatccaccattctttcaccaggctatcactgacgctctgtttttcctgcattattttaacttttacttctcttcagaataatttctatatacccaggataatttccattacagtaaacatactttaagttttgtcatcttaaaaaaagctttccttgagcctacatgtctcctttctgctccttatgctattcccttttagagtgaaactcctaagttgtttctgttagctaggagacctcctct

SEQ ID NO: 380310 - DNA, 606 bp, Homo sapiens
gtcacacaatttacctatataagaaacctccacctgtgtccctgaacctaaaataaaagttaaaaaaaagaaaaagaaattgttgaactcgataaacttgagatcctgctcaaaggtaagtgattgatgggattgaaatggttcactgttagtactctgccaaatatgtcaaaagkgtctgtttctatctaagggaaatactctttttcttgtctagtcccagtcaacatgtcacacttcccacaaaaactcagaatcaaacacctttttggcagcacgtgacccaaagcagcaagaagaccctggggatccacatggaagaagaacgcattatgtggagctcactagatccaggaccaggcaaaccaagaaaggaaaatcattctgaaaactgttttagatacacatttgagtaaatttataagagacagaataaaggcctacaacagaggaagaaatattctagcataaccagatttagggagaaaacagtaacaacaaagaggatcaacaacgtttgagtaataaaagagaggaaatctaaacagagtcagaaactgaaaaaattttttcaccaaccaagctaaaggttttcatcagtttccc

SEQ ID NO: 380311 - DNA, 560 bp, Homo sapiens
ccccactgggtaattgtaaggattatgtaaaataaggtaaaccacctagaactgtgcccatgacacagaaatgtgtgataatatcagttatctctttgtctccctactccagcttccctttgttcctcaaattctcttcagcagtcagactacctgaaaacaatcgcatgtgtcccttagagctctgctgtttagagtttaagcaatcttgacmtcactataataattttgaatatgattgtttgaactttgcatatgctaaaatattcatatttttattaaattctccttgtaggagaattaaatctccttgcaggaactaaacagattttgatatgggttatatagaagttttactttggcaggaatggataccccctttctcattttatgccaagacttgaaatcatgtggtggcatctgcaggcattcattgcctccctattaatttcagagactggcctggtgcaaattaacttttcctcctcttccatggaaaaactgatatttttatgatctttcataatattgccattgttgcaagaatcttattccaaaat

SEQ ID NO: 380312 - DNA, 560 bp, Homo sapiens
ccccactgggtaattgtaaggattatgtaaaataaggtaaaccacctagaactgtgcccatgacacagaaatgtgtgataatatcagttatctctttgtctccctactccagcttccctttgttcctcaaattctcttcagcagtcagactacctgaaaacaatcgcatgtgtcccttagagctctgctgtttagagtttaagcaatcttgacctcactataataattttgaatatgattgtttgaactttgcatatgctaaaatattcatatttttattaaattctccttgtaggagaattaaatctccttgcaggaactaaacagattttgatatgggttatatagaagttttactttggcaggaatggataccccctttctcattttatgccaagacttgaaatcatgtggtggcatctgcagrcattcattgcctccctattaatttcagagactggcctggtgcaaattaacttttcctcctcttccatggaaaaactgatatttttatgatctttcataatattgccattgttgcaagaatcttattccaaaat

SEQ ID NO: 380313 - DNA, 572 bp, Homo sapiens
atattttatttggccctttaataattccaaatggcaactattattgaaatattttttttcttttttatttttgaaacagagtttcattcttgttgcccaggctgcagtgcaatggcgcaatctcagctcactgcaacctctgcctcctgggctcaaacaattytcctgcctcatcctcccaaatagcatgcaccaccacgcgcagctaatttttttttttttttttttttttttttttagtagagacgggttttctccatgttggtcaggctggtctcgaactcccaacctcaggtgatccgcccgccttggcctcccaaagtgctgggattacaagcatgaaccaccacgcctggcctattgtaatactttctaaaaaaaagactatgttttatccttacctacatttgaaactgaaaatcttgttttttgtcctattatattcttatctcagcctacttctcttcagttaccttgtaaatgagattccatagatattcaagaaaacattggtcagttgtgtgtagttatctcagctgattgagaattctctgcagtccaattccattcac

SEQ ID NO: 380314 - DNA, 572 bp, Homo sapiens
atattttatttggccctttaataattccaaatggcaactattattgaaatattttttttcttttttatttttgaaacagagtttcattcttgttgcccaggctgcagtgcaatggcgcaatctcagctcactgcaacctctgcctcctgggctcaaacaattctcctgcctcatcctcccaaatagcatgcaccaccacgcgcagctaatttttttttttttttttttttttttttttagtagagacgggttttctccatgttggtcaggctggtctcgaactcccaacctcaggtgatccgcccgccttggcctcccaaagtgctgggattacaagcatgaaccaccrcgcctggcctattgtaatactttctaaaaaaaagactatgttttatccttacctacatttgaaactgaaaatcttgttttttgtcctattatattcttatctcagcctacttctcttcagttaccttgtaaatgagattccatagatattcaagaaaacattggtcagttgtgtgtagttatctcagctgattgagaattctctgcagtccaattccattcac

SEQ ID NO: 380315 - DNA, 572 bp, Homo sapiens
atattttatttggccctttaataattccaaatggcaactattattgaaatattttttttcttttttatttttgaaacagagtttcattcttgttgcccaggctgcagtgcaatggcgcaatctcagctcactgcaacctctgcctcctgggctcaaacaattctcctgcctcatcctcccaaatagcatgcaccaccacgcgcagctaatttttttttttttttttttttttttttttagtagagacgggttttctccatgttggtcaggctggtctcgaactcccaacctcaggtgatccgcccgccttggcctcccaaagtgctgggattacaagcatgaaccaccacgcctggcctattgtaatactttctaaaaaaaagactatgttttatccttacctacatttgaaactgaaaatcttgttttttgtcctattatattcttatctcagcctacttctcttcagttaccttstaaatgagattccatagatattcaagaaaacattggtcagttgtgtgtagttatctcagctgattgagaattctctgcagtccaattccattcac

SEQ ID NO: 380316 - DNA, 627 bp, Homo sapiens
ctagcatcttcctgatggtctttctgccttggggtgaagaggcatttgggggaattgccatcttgggaggaaaagcagtatcctttcactttcagactgaaaggctcctggggaacttgcttcactccggcgctttctgtcccatgctgaaggctggagtcgccagccccttcccctttgcctttctcaggccccagtccctgaggtgtgtgtgaggactgaactttaatccggaacaatctggtttctcctcggtcagcccagccggtgcttcccccgcccccacccacgctgcaagaggcgagggaggggtggtgactcagtgtgcatgtgtacatctgtccctgtggtcccggcagctcgccgggtggggcaggaaccagaagtctcgcggcacctttcccccacccccaggtgtgttgcaagtggcctggccctcccccaccgtggggagcagtgctgccagcttcctgggcgcttcctcactttcaggagatggagcctcagggaaagtcccagcggggcctggccatcctggagctgtgggaactggcactgggaatggaggccttggccttgggccccacctgcagagggccagggcytgagcctggggaaaggggaagg

SEQ ID NO: 380317 - DNA, 573 bp, Homo sapiens
aggctacaatgcagtggctccatctctgttcactgcaacctccacttctgggttcaagtgattctcctgcctcagcctcccgagtagctggattacaggcatgcgctaccacacctggctaatttttgcatttttagtagagacggtttcaccatgttgaccaggctggtcttgaactcctgaccgacctcaagtgacctgcccccccccttgccctcccaaagtgctgggattacaggcgtgagccaccatgcccagcctataagacttgtttctgctgcctctcatgctcagtggcttgtttccatttccttgtgtgtgtctagtattctttagtatttgagcttatgcttagggctcaaatcttttttttttttttacccccctttggagattttttttctcattggagattttgccttgcttattgaaagcccaacartgcattaaaaatttaataagtatctagttaaattatagtgggaacatctctccaagtagctcatctgccaagtctatatatagaaatatgtggtcttattgtgaaacttgccccttctcttttttcccctc

SEQ ID NO: 380318 - DNA, 577 bp, Homo sapiens
actctttttcaccagaaggctgtcaatagggtgttggctgacttgagcttccttctgttctattaaatgtaatgaaacacataaaatggaggaagtttaaacagagttttaatgcaccagaggcaaccatyaaaatcaacccctcctctttttcctctgagggctaatttcagcattatcaattatggagtaaaaatggggttcatgagtacattacaatcatatagagaaatgaagttgcatttctacattatctgtgacatgactttaaatttaaacctatgcttggccaagaaaagaagttttagaagaaaaaagagaaaatatggtcaatttttaaaataaaagatggcaagctaataatagcaatatcactttacatctagggataagtaacttactggaggtcacgtagctcacagatggtggagctgggctgcaaatccaggaaaatggtcaccgtggtgcctactcaggaactccacatctcactgcttctgtaagagtgaaagatgatagataagaaataatagggtcaagggtaatttttaaaatatgaagagaactgacatttgga

SEQ ID NO: 380319 - DNA, 570 bp, Homo sapiens
taagaaaaactggttaaataagcaaaatatagaaattcatttattcagataattaataggcacttaccttgtgtaaaacaattgattataatctgttactatagcaacctcgtcatgaattaaaaggaggaagagagtcagagaaagggctgaagcagagggagaaagacaggagtcaagttttctccaattttccaaaaagtaaaacttaaaagtgtctctttagtgagttgtattttattgtaagcaagtggaatatttgacattagaatawaatctagcatacaatttcagaatggaagctattatcctttgccgtatttaccagacttgttgccttattgaaatgaaaacagaatcactggaagaatacccatgaacacagtaacaaacagaaactttctagttctcccatacactgccagaaagtagtcttgattaaatctgaatagttcaagaactaaatttcaactcaagttaagagcagtaagtaatcagaatgatatcagcaagatgaccaactagaagtacatggcacttattcccccctcacaaaaaggaataaaaact

SEQ ID NO: 380320 - DNA, 550 bp, Homo sapiens
gtaggttccccatccttcccaccatgtctgacaaaaatgaatcatsgtattcatccctaagctatactgttgtccagggcatctctttgagtactacctcctaggacatgtagagtcaagttttattccctagaacttccacagccagttaactttgtttctctgcactaccctaaggaataagcttgttcacttatcttattctttttttttttttgagatggagtcttactctgttgtccaggctggagtgcagtggtgcaatctcagctcactgcaacctccacctcccaggttcaagcaattctcctgcctcagcctcccgagtagctgggactacaggctcatgccaccacacccagctaatttttcatactttgaatagaaacgaggtttcactgtgttagccaggctggtctcaatctcctgaccacatgatccatccaccttggcctcccaaagtgctgggattacaggcactttgtttcttatctcttctgaagtctaattcttcttaaaaatgtttgttataagaactaaaagtatacct

SEQ ID NO: 380321 - DNA, 514 bp, Homo sapiens
tgtccactgtcatgattcataaatagatccaatgtagtttagaataaatgagaattctgacaagttaagttttattaggaggtagggagggggaagaaatgtgcccaaagtgaggggagatggaattctgtacytatcaaatgtttgtttcttgtgtcttaacatttggctcaaggcgatacttttcagtttggcaatatggtattattttgtgttattttatattagagatagggttgcattctgttgctcaggctgcagtgtaggggtatgcccatagctcactgcagccttgaactcctgggatcaaacaatcctcccacctcagcctcccaaagtgctgggattacaggcatgagccattgtgactggcctctgtttggcaatatcttatgtcaccaactgatgaactatagcataggggaagcagtggagtagggcttgtgatcttaactgttctaaagatttgggggtatatccattttttaaatgtgagaattacttccaaaagtgt

SEQ ID NO: 380322 - DNA, 616 bp, Homo sapiens
agacataaagaacattccatctaacagcaacagaacacacattcttttcaagcacacaggaaacattctccaggatatattatatgttaggccagaaaataagtcccaaaatacttaagaacactgaaatcatatcaagtatcttttctgaccacaatgttatgaaactagaaatcaataaaagaaggaaaattcacaagtatgtggaaattaaatgacatgctcataaacaatcatgaatcaaagtagcaattcaaaaaggaaaataaaaaatatattaagaaacacaacatatcaaaacttataagatgcagcgaaagcagttytgagggaagattgtaacaataaataactacattaaaaaagacgccaattttttaatcagcgtggcagattagaggcttttagcatgccttggccacttgaaaatagcaagataatgtataaagatcaactctgtgagctttaatccaagaagtaaaatgggaatccactgaatcatgaaggacaacccagatcccagtgaggataaagctgacaaacaaccactgtaacagtgtcctctgataaagctgacaaacaaccactgtaacagtgtccacctgataaaaatgag

SEQ ID NO: 380323 - DNA, 503 bp, Homo sapiens
aattattgcttcagttttgaaaggtatacgtgcatgggaatctaggaggtatgcaatttctgaatatacatttataaaagcctgtagaagatatagatagagcaccatgatactgttaacagttacttgtattttatttatttatttgtacacatttatggggtacctgagaaattttgttacatgtatataatgcacggtgatcaaggcatagacaacagaagacattattttcttttgagtcactaatctaagaatttgatacacgaataacaaatgttaccgaaatcccagtagcttaraacaaaaagagtttattcccattcacattattgagatgccattacagtatgtctgtggctctactttatgataccattttgggaatctagcagacaaagcagccccatttcaaatcttactcatatgtttaggccaaagaaaatcacttgaccacatctattttaaaaagaaaggaatgtattatttttctcccctggaga

SEQ ID NO: 380324 - DNA, 520 bp, Homo sapiens
cacaggttttataaatatctactttctaatatgtactttatatgtatttcattattaaagttattcatttgaattcattttattttattgtttattttcatggcttgtaaatttgtgtccattctgcaatatcgttctttaatttgaatttagattttagtgacttgtttgaaaaaaaagtttgcaattatttctcttcctgtatccagacacttgcaatgtgattttgtaactgctcttaacaagagactgaatgtatatgtctgcttctgaaatccgaaaccatgcctttctttgtcactttgacaagtgacgttgtgtcagttccatgcttaggcattsgggctttgtgttatttcagtcattctcttggaaacctgcctttcaccgtgtaagggacatctcagattaactgatggacattgtgaaacttatgatccaattatctccacttaccccaatccacaaccctaaccaagtcccaaaagcagaaccatctaggtgagcactgactgactat

SEQ ID NO: 380325 - DNA, 563 bp, Homo sapiens
tgtatcagcttacattttgtatgtaaaaagttaaaaagacatygcttttggggactggaaaatgacactcttatattgcttgtaaaaatctgaattggttttaaggcaagaaattgagcagcacaaattaaatgtactaagataaatttcccctttaaacttataatcttctgttgggatatgtactccataaaaatagaatacctttgtataataatatatgtatcaaaagttttatggcaagcatcatttttagtagataaaaagtgaaaataacataaatcactatcatttgtgaggtaactgaataaattatggtgtaccccactactaagtattatgaaggcattaagcacaattaattgcatatatgccacttgaaatggaggaatttccataaagtattgttcactaaaaccagcagaaaagtaattccactttaaattatgaaatgacaaagaaaactctatgtattcttctatacagttaaaatagttaaacttgcagaggctttaaactgaattgtgtatgtgaattatttggtggattaatcactcagatga

SEQ ID NO: 380326 - DNA, 494 bp, Homo sapiens
ctgtacttggctaatcaaaggcatttgtacctccagaaaatacattgactagaaccccaaagactgtgtgtttgactcactgtgttgaggatccacattaatgatatgtccagatgcgggagttcttggcctatgatgatttgcaaatgtcacctcacaaaacatgtgcatcttttcagtaaattgtcattgttcactgaaaatgcatagattacttctctggtcacttagctgaaacaagcaatgattataatacagtattaaatgatataataaaaatacgttcaaaatattatgagagttcaagactgagcataatcatttcttttmtaaatgaaccacaaaagacattagagagaagcagatattagagccatatgagtgagttgcaactctccagacagagaaaaagaaataaacatttttagagagatattcctagcacttggcatagctcaggccacttgaaaatgaggtgccataaaattacacag

SEQ ID NO: 380327 - DNA, 533 bp, Homo sapiens
atgaataatctaacagtagcactatatataaatgctagaaagcatgttattcatatttctatttttattctatctaaaataagttccatatattgtcacactttatgaatacgacccttctgttactgtcctgaatgtaaatggcacaagttttagggtaacttttaatcattatgatggagttgtaatgtgtgtctctgatacctgtttgatgtttgagtagacatttacaatttgtacttattttcttattcatccaagaaatataaactgattagtggctgtgtgtcaagcttcattccaggcactagagatataacaataaacagaagagataaacttcccattttcgtgaattggtgttccactggacgagaaaggcaactaagaaaaactgcaataatgtaggtagattgacaaacttagctatgtaaatgaggcaggaacatgtactgtcaatgaaataaaacaaagacaaagaaaaastatagtgaggggctggaaaatgacaaggagtctgcttaacgctgttt

SEQ ID NO: 380328 - DNA, 474 bp, Homo sapiens
actgcttagtatcctcatgtgcttttgattactgttaagagtaattcaatgaataaaaagtgttgtatttaacaaagaagtttgaggaaaagcttaatgaagtaagagttagtkaatcataggtatacttactgtaagtgtgcatatttttaaaagctagtataatgtataaatatttatccagattaaagacaatgccttaaaattcagtaatgattaaatgttatcaaagtattcagcagagttcttaaaagtatcttctatttccagaatttaaacactacaaaagtatgcaaaacataaattgcttgataaagcattgcagaaataacaataagtacattttgataaattgcaaaaagttcttcagaaaaactgtggcctttaaaatattttaaaactgtgttttaaaatatcatagtattgattttcaaaataacattcttcttcagaaatacctgtatatttgtcaaa

SEQ ID NO: 380329 - DNA, 638 bp, Homo sapiens
aaaactttaggacagaaaagacaagttagtttgactccattaattcatactctcaaagtcttcagtgtgtttgactcaggtatattatttctaaaaactgtttccatgaagatacattagtattccccatttttcaaattatgtatcttacattatttggtggaaatttcatagttaattttttaaatagcatactagtttatatttttcatctagaacattaaataatttttagtaaaaaaagcaatgttttagttctaaataaaataaacagaataaatgactgtttttacttaattcagttattttttcaggatgagttccactwccacaccaggtaattaagcacatttgatttccgtggcaaagacattatttaatagtaattaagtagatgcaaccctccattaaaacctttagttttggcaaagtgtttactgttttacatttattataaaagtttaatagaaactattgaggcaacttacttttctcaatatcatttttaatggtaacacttcagtccacttccctgtgttaatcaacatgcaaagtacaatacttaaataactagagatttttgttttgttttgttttgttttgcagcaatgcagaataataattagggctcactgaat

SEQ ID NO: 380330 - DNA, 638 bp, Homo sapiens
aaaactttaggacagaaaagacaagttagtttgactccattaattcatactctcaaagtcttcagtgtgtttgactcaggtatattatttctaaaaactgtttccatgaagatacattagtattccccatttttcaaattatgtatcttacattatttggtggaaatttcatagttaattttttaaatagcatactagtttatatttttcatctagaacattaaataatttttagtaaaaaaagcaatgttttagttctaaataaaataaacagaataaatgactgtttttacttaattcagttattttttcaggatgagttccactaccacaccaggtaattaagcacatttgatttccgtggcaaagacattatttaatagtaattaagtagatgcaaccctccattaaaacctttagttttggcaaagtgtttactgttttacatttattataaaagtttaatagaaactattgaggcaayttacttttctcaatatcatttttaatggtaacacttcagtccacttccctgtgttaatcaacatgcaaagtacaatacttaaataactagagatttttgttttgttttgttttgttttgcagcaatgcagaataataattagggctcactgaat

SEQ ID NO: 380331 - DNA, 584 bp, Homo sapiens
ctggtcagttatttttttgtcatagtacttacagttcttcagcaattttcaatttcttctatatttcaaaggtgagaaactcacctcttgttcaaactctatgtataactgattctacaaataccaccccttaaatgtctcctaaaactttcaaccatctgtaytgctacagctttcattctagcataatacatgagtatgtcttatttggtctataataatacatttctacatccctctcattcttttcaacttttgctctaagttgaaagggttacttttcagactgcaactatgttcatgtcataactctataaaactttcatattgtctttactataaattcaaattcttaaaaaactattcttttaaaagaaaaaccctacctacttctccagctccagctttagcaactccagctcctcttcatttttattttagcaatgccaagatatttttagatctctgaaataccagtgaatactagcgatcttcctagttcctgggttcttttcccaatgcaaggaatactcttctgttgtcattctccatttaagtagtcaatttttgttcaaacttcaagt

SEQ ID NO: 380332 - DNA, 584 bp, Homo sapiens
ctggtcagttatttttttgtcatagtacttacagttcttcagcaattttcaatttcttctatatttcaaaggtgagaaactcacctcttgttcaaactctatgtataactgattctacaaataccaccccttaaatgtctcctaaaactttcaaccatctgtactgctacagctttcattctagcataatacatgagtatgtcttatttggtctataataatacatttctacatccctctcattcttttcaacttttgctctaagttgaaagggttacttttcagactgcaactatgttcatgtcataactctataaaactttcatattgtctttactataaattcaaattcttaaaaaastattcttttaaaagaaaaaccctacctacttctccagctccagctttagcaactccagctcctcttcatttttattttagcaatgccaagatatttttagatctctgaaataccagtgaatactagcgatcttcctagttcctgggttcttttcccaatgcaaggaatactcttctgttgtcattctccatttaagtagtcaatttttgttcaaacttcaagt

SEQ ID NO: 380333 - DNA, 631 bp, Homo sapiens
tggactgtagacttttgagttattgctgaatgagttaagacttcatgggactgttgggaaggcgtggttggttttgaaatgtgaggacatgagatttgggagaggtcaggggtggaatgatatggtttggctgtgtccccatacaaatctcatcttgaattgtaacctccacaattcccacatgtcatgggaggaacttgttgggatatgattgaattgtgagggcaagttgctcctgtgctgttctcatgayagtgagtatcacaagatctgatggttttaaaaatgggactttccttgtagaagctctctctttgcctccttccatccatgtaagatgtgacttactcctccttgctttctgccatgattgtgaggtcttcccagccatgtggacctgtaagtccgttaaaccctctttcttttgtaaattgcccagtctcgggtatgtctttatcagcagtgtgagaacagactaatacaacgattgccttcaatttgtaggtggtcaaaatgatgcctaaacaatcattaataataagggaagatatttgttcctgggtctgtctgatttcaaagcccatgattgtaatacagaaatcaagttagtttctcagggtaagttttagtg

SEQ ID NO: 380334 - DNA, 592 bp, Homo sapiens
catgtctatatctaaggtaagaaatacaagatgatcatagtgttgaggaagataaaaattagactgatacttgtgaagaagagaaattccacaaatttattttttcttcttcagagtggcaggtcactcttccttctctactagggaggggctgcctacactcccaattgcctgcaatgtctccaggcagtctgtggcaaatatgtaactccttcctaatttgttgcacttaatgtttgttctttaggtggaattgtgagatatggagttcttctcttgcaatgtaacccgtgatgagtccaagtgtgtcctggctcctgaatgcttctctatgggattatgaaacctcacctgacattatgcctcatcttacctaagcactgctttttatagaaagcttgctctgtgcttacactaaaggttgaggtggggtttgcttcctcaatttatatttaatagatacatgatcattatacagagatatcgacataatagattgaagtttactgtgatattatgyttaatttaatagtgcttttatatttgttatgtgatgaaatgaatgaacgtttaaacataaggtaccagaagt

SEQ ID NO: 380335 - DNA, 627 bp, Homo sapiens
taatatttgtatcttctgtttttgactgtactctagttttaaattaccctgtaccctatttttcactccacatagcacaattaggagagcaaattgtaaccatcacaatatctgaacatacttgagttgtgtcatccctttgttataatgacaattcaaaaattttcttcctgctaagcagtctaaaatgtgtcactttcttataagaacactattttatttatatttatgtgaaatttaatatgtaatatcatttcattgttgcatttgacattaatattatcygtaactactattacttaatattacttagaaagcattttaaatgctttatgaatattcttatgtcaatcaaaataaaaaataggtaaaatttaaattcaaatacattattcgaaagtgatgataaaaattttcctattaaaaattaaatttaaattattttgcataatattagcattataaaagtatctttaaaaatcaattgttttaaaatgccattcttaaaaccatcttagtttttattactgctcaccctatgtgaaaatcaaagaaccacagaacattgaacagacaacagtgttaaaaacgctgcctaacaattttcttctagctaagattggctga

SEQ ID NO: 380336 - DNA, 606 bp, Homo sapiens
tgatctaacatcatcttcacttggcataggaagtgcactcacactttctccttaacctacttgtctggtccttttcattcttctttgttggagcctatccatttttctgccgttaaatgtgaaatagcctaaggctcagatttcagacacgttccatttatttatcaacaaccattctctaagtcattgcttctcaacctgactgcatgttggaataaccttgataaattgaaaaatatgtgatttttattttattggcttagagaataacccggacataaatattacacaattcctgcagcagattctaattcccagccaagacttagaaccacacctctaagtaaaatcatacaaacccttcattttaaatggcatttgtactagctccacattagaatcatatgggttatttaaatatrcccacctacaaacacgtacacactaatgcacacagcacctttttttaattctgaataaattgttctaccctgagatccagacacatatgtattataaacatatcacccagtaattctagtaatcagccaaggttggaagccactaataaatataatggtcactccaagtttaaatccataattt

SEQ ID NO: 380337 - DNA, 606 bp, Homo sapiens
tgatctaacatcatcttcacttggcataggaagtgcactcacactttctccttaacctacttgtctggtccttttcattcttctttgttggagcctatccatttttctgccgttaaatgtgaaatagcctaaggctcagatttcagacacgttccatttatttatcaacaaccattctctaagtcattgcttctcaacctgactgcatgttggaataaccttgataaattgaaaaatatgtgatttttattttattggcttagagaataacccggacataaatattacacaattcctgcagcagattctaattcccagccaagacttagaaccacacctctaagtaaaatcatacaaacccttcattttaaatggcatttgtactagctccacattagaatcatatgggttatttaaatatgcccacctacaaacacgtacacactaatgcacacagcacctktttttaattctgaataaattgttctaccctgagatccagacacatatgtattataaacatatcacccagtaattctagtaatcagccaaggttggaagccactaataaatataatggtcactccaagtttaaatccataattt

SEQ ID NO: 380338 - DNA, 496 bp, Homo sapiens
aatctctatactccaaagaaatttttgaaaagcaaaaaataatagaattcttctcacaatatctttatttcctatcagggagtataagaaaaaaaaaatgctgggctcctgcccctctgtaaactgtgaagaactgggaagggtcttttccttcctttctttcttccttccttccttccttcttctctcccttccttccttccttcctttcctttctttcttcctctattccttccttcctttctttctctctctcccttccttccttcttccttcctccctcccttaatttcttcttccttttattccttcctctcttgcctattttcttcctttccactttccatcctttcatcctttcctctttttgttgtttctgcattcyctttgttttcttgctctaaaattacgaatggagacatttaatataaagaagtttctttcagatatttttgctttcctcaagaaactagagatcatggaacacaagaaaata

SEQ ID NO: 380339 - DNA, 496 bp, Homo sapiens
aatctctatactccaaagaaatttttgaaaagcaaaaaataatagaattcttctcacaatatctttatttcctatcagggagtataagaaaaaaaaaatgctgggctcctgcccctctgtaaactgtgaagaactgggaagggtcttttccttcctttctttcttccttccttccttccttcttctctcccttccttccttccttcctttcctttctttcttcctctattccttccttcctttctttctctctctcccttccttccttcttccttcctccctcccttaatttcttcttccttttattccttcctctcttgcctattttcttcctttccactttccatcctttcatcctttcctctttttgttgtttctgcattctctttgttttcttgctctaaaattaygaatggagacatttaatataaagaagtttctttcagatatttttgctttcctcaagaaactagagatcatggaacacaagaaaata

SEQ ID NO: 380340 - DNA, 554 bp, Homo sapiens
gcaggcaactccaggtgccagcacaggtcctggctccatgcaaggctgtggctggaccaggtgtgtactgcaagtggcttctgctgtgggcactggagaatgtggtggcacccaaaaacttggatatgccgggaaacacagagccccaaagaaggtgttacagtgtgtcactgcccaggctcagggatcctcgaggtctggacccccagaagggcctcagcttttctctccttcttgctgcctgcagcatggmaagtgaggggcatctttcagggggttctgtttcagcctgtttgtgttacagctctttcagtcctgccaccttgctgtggcccatggctcctgggctggctcagccctgccactgcttcctgttgtgtggggctactgcccaatgtcagcagggggtgggaaagctaccgtgttacagcagctttgactcaaagaaacctgaggtctaggcccccagaagagtcactacttttcactcccacagtctgggagcgtgtcaccacctacagctcagcaagctggctagaaatatgttacagctc

SEQ ID NO: 380341 - DNA, 554 bp, Homo sapiens
gcaggcaactccaggtgccagcacaggtcctggctccatgcaaggctgtggctggaccaggtgtgtactgcaagtggcttctgctgtgggcactggagaatgtggtggcacccaaaaacttggatatgccgggaaacacagagccccaaagaaggtgttacagtgtgtcactgcccaggctcagggatcctcgaggtctggacccccagaagggcctcagcttttctctccttcttgctgcctgcagcatggaaagtgaggggcatctttcagggggttctgtttcagcctgtttgtgttacagctctttcagtcctgccaycttgctgtggcccatggctcctgggctggctcagccctgccactgcttcctgttgtgtggggctactgcccaatgtcagcagggggtgggaaagctaccgtgttacagcagctttgactcaaagaaacctgaggtctaggcccccagaagagtcactacttttcactcccacagtctgggagcgtgtcaccacctacagctcagcaagctggctagaaatatgttacagctc

SEQ ID NO: 380342 - DNA, 599 bp, Homo sapiens
cactacttttcactcccacagtctgggagcgtgtcaccacctacagctcagcaagctggctagaaatatgttacagctccttttgctcccacagttcaatgggtcctgattttcttgtcccacatccaggcagaatgaggttacttggagaagtggagggtgagcaaggtggagagagctttgtggagtaacagaacagctctcaggagacccaaactgggtascttctttctgcaggcaggtgtctgagtctggctgagtctggggtttttatgtgctaaaaatggaggaactgtgtgctgattggtctatgggtgggcatgggtggaactgaaaaaaatcaccatccatttggccaaaaggcaacaatgaagtgctcactcagggttgcagactccacccagaactccactcggcctactcccaggctttaggtcatccctagcttggaggtggggttttgccagggacccaccccttctctcctaagaatctgtatgccccccaccccatcaatatgccatccgtgatgcccagactgtctgtgttgagtggttcccataggtcagcacctagctgccttcagccagcctccttcc

SEQ ID NO: 380343 - DNA, 645 bp, Homo sapiens
agttcttggtatttgtttattgcctacctaaacttctatgtaaaagagacttcaaattttgtcacatctgagtcgttgttttatagaagctgagccttctaatgataatctaatgtagaggttatgataattgtttctatggaaagcaagacctataatgatatctgcttttccttttaccacatccttgttatgcagctataacgtcaagttttacctggtttgcttygcaattctgtttcctaataaaaaaggccaagtgttgacacatctaggagcagtcctatcaaatgaggactgtgtgtagatcatcttttcttggtttttcttatgctattagcataagttctttcaaatacattgctgcccattattgaaaatcattcccggggatgtgtcaaaagccttcacagagttcatactctgatctaaagttctgcaacatcattagtaaggttgtatagtaatccaaacatttcttctgacattaaatcactttcttaaaatgaaaaagaatgattaaattttcagtgcttcctttattatggttccatttccatttttaccagaaagtcctctaaagatgctggtctctggatgacctatttcttaaattactaaaactgacagagccttcgctccttc

SEQ ID NO: 380344 - DNA, 594 bp, Homo sapiens
gtgcatgtgtgcatgtgtgtgtgcagtcagaggtgtgcatctgagaaagcataatgatgtaagcatgtcatgtatgaatctaggtaaaggaaatacttgttttcattgtattgttctttatactattcataggtttgacaatttttaaaataaaaagatgaggcaaggatttcctcccaaaaatatgtgttattagggtaaatcaaactagaaataaagaatctgagataagacgaaaggtaagaaacataaaagataatttctgtttctgaatttttgtattcctgcttctattgttatctgtactcagaaaaattctatgtcatccttttgggatataagtaagatatatagaaagcagccctgatggttggctatttccaaataaaaaggaataaataatatttaatgtctttgtaatgtctcaatttgaataggctgaactaaatattccagaattccctttcttktatgcttctttttttgcataggccacaaaagagagtcttaggatatttggaaaatggaagggaagcagcagtcattctctagcacacaaatgtagttgctgatgtgttggatgtaaagcagcag

SEQ ID NO: 380345 - DNA, 594 bp, Homo sapiens
gtgcatgtgtgcatgtgtgtgtgcagtcagaggtgtgcatctgagaaagcataatgatgtaagcatgtcatgtatgaatctaggtaaaggaaatacttgttttcattgtattgttctttatactattcataggtttgacaatttttaaaataaaaagatgaggcaaggatttcctcccaaaaatatgtgttattagggtaaatcaaactagaaataaagaatctgagataagacgaaaggtaagaaacataaaagataatttctgtttctgaatttttgtattcctgcttctattgttatctgtactcagaaaaattctatgtcatccttttgggatataagtaagatatatagaaagcagccctgatggttggctatttccaaataaaaaggaataaataatatttaatgtctttgtaatgtctcaatttgaataggctgaactaaatattccagaattccctttcttttatgcttctttttttgcataggccacaaaagagaktcttaggatatttggaaaatggaagggaagcagcagtcattctctagcacacaaatgtagttgctgatgtgttggatgtaaagcagcag

SEQ ID NO: 380346 - DNA, 563 bp, Homo sapiens
atggcaggagcagcgcatatttcccttgtacttcttttataaaattattaatgtcattcccaagagttccaccctcatgacttaatcaccacctaaagaccttacctcttaatattttcacactggtgattaaatataaacatataaatgttgcaggagcacattcagaccacaggaatattcctatcctcgactctatgtagaatacttctacgttccaaatactctactcaggttggttttggtatcatagaacatagatatgatgttaktaatctctctctgactgagttgaataaaattgggctccctttttgtttgattatttgtttgtttttctattaggctgttgaatagagaggaagatttcaaagcagattcttaatagacaaaaaacataccacacagtctacaacttgccttttttcttgtgttctgtctccctatgtccatgctttgattactggaagcaaggctagccctaactaaagaggctgttacatgattgatttttctttaagactgagtcagaagaataatgaagacgtgtgtgtgtgtgtatg

SEQ ID NO: 380347 - DNA, 563 bp, Homo sapiens
atggcaggagcagcgcatatttcccttgtacttcttttataaaattattaatgtcattcccaagagttccaccctcatgacttaatcaccacctaaagaccttacctcttaatattttcacactggtgattaaatataaacatataaatgttgcaggagcacattcagaccacaggaatattcctatcctcgactctatgtagaatacttctacgttccaaatactctactcaggttggttttggtatcatagaacatagatatgatgttattaatctctctctgactgagttgaataaaattgggctccctttttgtttgwttatttgtttgtttttctattaggctgttgaatagagaggaagatttcaaagcagattcttaatagacaaaaaacataccacacagtctacaacttgccttttttcttgtgttctgtctccctatgtccatgctttgattactggaagcaaggctagccctaactaaagaggctgttacatgattgatttttctttaagactgagtcagaagaataatgaagacgtgtgtgtgtgtgtatg

SEQ ID NO: 380348 - DNA, 623 bp, Homo sapiens
tacaactggtcaacaagccaaacagcagatattaaacatcattagtcataagagaaatgcaaatgaaaaccacaacaaaattccacacttgctggaatgactaaaataaaaaaaccacagcaataacaaatattggtaagatggtggcaaatttggaactctcgtgtattatacatttaaaatggcttaattctatgatatgtgactcttatctcaataaagctgtactattatagtataggacattttaatatattcttcactcactttctttcatgtcaacagcaagaacaaaaaatatatctcacacagacatagaccatatgtcaaagctaagaaattaaccttagtgcaatattatcaactaaaatacagaactactcacatttttatgtgtttttccaytaatttcttttttctgtctgttttaccatctaatccaggatcccttattaaatttatttgtcctccaatctgtgatatctctcctattttattagacaattttgaaaaataacagatcatctattttgtagaatagccctgtttgagtttttgtgatgctttctcgtgactagattgttatgcattattgggaaggataccataggtgtgatgtgctc

SEQ ID NO: 380349 - DNA, 615 bp, Homo sapiens
aaaggttgcagtgagctataattatgccactgagctccagcctggatgacagagtgagaccctgtctcaaaaagaaataaataagacacgatgttgaaattagtgcagtgcaagtatgtataacgatcttaggagcacaaataagagcttgattctttctgccttgaccagtcagggaaggcttcatagagagggggtgatcaaaagaagagcaagagtttgtccagcaggtcatagggccagggcattacaggcagaggaaactgtgtcctcagagcacctaacayactcacttagctatggtaggagcccaatgactatatgctgaaataagcatggtgctcaaagtgggaatctttaagctgccagctacagaaactaactcaagtacagtgaggcattttaagggtccctagaaatctcatagtgtgtaaacaccaaaaatttaaaaatacatacagctgggtcccatgggaattttaattgagtactggaaaagcatctgaactgaagccctttccgcatctctgtgtcccacagcagccacgtgcccccactctcctcagcacgtctgctccaagtctctctacaaactggatctatcacttctcagct

SEQ ID NO: 380350 - DNA, 615 bp, Homo sapiens
aaaggttgcagtgagctataattatgccactgagctccagcctggatgacagagtgagaccctgtctcaaaaagaaataaataagacacgatgttgaaattagtgcagtgcaagtatgtataacgatcttaggagcacaaataagagcttgattctttctgccttgaccagtcagggaaggcttcatagagagggggtgatcaaaagaagagcaagagtttgtccagcaggtcatagggccagggcattacaggcagaggaaactgtgtcctcagagcacctaacatactcacttagctatggtaggagcccaatgactatatgctgaaataagcatggtgctcaaagtgggaatctttaagctgccagctacagaaactaactcaagtacagtgaggcattttaagggtccctagaaatctcatagtgtgtaaacaccaaaaatttaaaaatacrtacagctgggtcccatgggaattttaattgagtactggaaaagcatctgaactgaagccctttccgcatctctgtgtcccacagcagccacgtgcccccactctcctcagcacgtctgctccaagtctctctacaaactggatctatcacttctcagct

SEQ ID NO: 380351 - DNA, 623 bp, Homo sapiens
gtgccttcttgctgaaagaggagtgatttatctgattgatgagagtgatgtccttctcccctttccttccacttctctctttccatttatcctgacgtcccttgagtagaacataatccctctgcattgattcccaggaagtcaacacatacagccttgggtgtcccttgttatggaagctcacagtatccagttgctctgcaaagaccttcccaggtagtgggagacctcactgagtcagacatatcccttctccacrtcttcactctctccctctctaatggcttctcacccccagtttacttacatcctcaatctgattgaatgacaaaacaattctccttgccttttacattcgcttccttgttatctagttgttctcttctcttcgcattgacactcctagaaaattaaactttctcaaatgctctctcgaatgctctcatttcccagcctcagctcagaaaaggcctccatgtccactgcaggcgaactgctttttcaaggccataaatgacctcttatttctaatcccatggaaatcttacttctacccttggctgaatttgaacgtgttgatcacatcttcctcctccttctataaattctgttctccttcagtg

SEQ ID NO: 380352 - DNA, 582 bp, Homo sapiens
gctggtatggtggacaacaaattctgttgaagtggtcttgaatgcttcccctagtgatgtgatagtttctagtatcattgcctgctggggcaacacatcttgtgatggcaacttaaaaagtttactgctttctgatgcttctcctcttcagagaaatctaggttaagaagtcccacaggccaggtgtgttggctcatgcctctaatcccagcactttggggtgccaaggtgtgaggctcacttgaggccaggagttcaagattggcctggaaaccatagcaagactccatctctacaaaaaaatttaaaaagtagccagatgtagtgatatatgcctgtattcctagctacttgggaagccgaggtgagaggatctatttagcccaggagtttgaggcaacagtgagctatgattatgccactacactccaacctgggtgacagagcaatatcctgtctcaaaaaaaaaaaaaaaraaaagaaagaaagaaaagaagttccatagacttcttggcactttgtgcttcacagtatcggagcacatatttactgagtacctacactatgcttgagtctactttc

SEQ ID NO: 380353 - DNA, 587 bp, Homo sapiens
cagtctttaacattccttccagggaccttggtgcctttgggcatgtgaacaacaaagcagaaagattgcaaggatatgctggggcagtgaggacccctgagtgcccccttcgtctttccagggtctcagaaagactcagaaccatgtgatcttcaagcttgcaagaaggatgaggaaggggtgatggatgcacaggaacytgagagtccaaacaaggaaaatgaagagtaaccctatgagcctggatggtggaggctacagcaaaaccacaaatacttcagagaatgcagctcctaaaggattgggatgaccaaacaccttgtggtggggcagtttgaaaggggctccctcaaagaccaaacattcatgttacatcccaaaggatcaagacaggtggaccctgggaaatgggcagctcctgtccagatgacaccatggtgggggaccattgcaaaaccacctcctctccagctaaaactctgtgctgaggaggtggggagggaacaaactgaaagggagaattttttcaaatctatagtgtaactgaatcctaaccccattttcctgagaagatactacataggagt

SEQ ID NO: 380354 - DNA, 587 bp, Homo sapiens
cagtctttaacattccttccagggaccttggtgcctttgggcatgtgaacaacaaagcagaaagattgcaaggatatgctggggcagtgaggacccctgagtgcccccttcgtctttccagggtctcagaaagactcagaaccatgtgatcttcaagcttgcaagaaggatgaggaaggggtgatggatgcacaggaacctgagagtccaaacaaggaaaatgaagagtaaccctatgagcctggatggtggaggctacagcaaaaccacaaatacttcagagaatgcagctcytaaaggattgggatgaccaaacaccttgtggtggggcagtttgaaaggggctccctcaaagaccaaacattcatgttacatcccaaaggatcaagacaggtggaccctgggaaatgggcagctcctgtccagatgacaccatggtgggggaccattgcaaaaccacctcctctccagctaaaactctgtgctgaggaggtggggagggaacaaactgaaagggagaattttttcaaatctatagtgtaactgaatcctaaccccattttcctgagaagatactacataggagt

SEQ ID NO: 380355 - DNA, 630 bp, Homo sapiens
aacatagtctctgcatcagtaggccctcaacaatgactgcagtgtgaaaggggatggctgagttagtccaccactgccgacttcaaaggttctccaaaaagctcagcagctgtgtaagaagaaaaccgtccggtagtgcctctgtggcctgagctaaagtctcccattcaagaacaactttcctgtaccaggctgatgctgacttagcctttaacctgcgaggttcttcctcgataaatgcagttacttttggtgatttcgttagtcttatgaaggatttttggtgactggtgtgggaaagtttatcaaaattgtaccccacatctttcaaaagggccaaagtgctattatcctattaaaaatcagaaggcctttcaatrtgagctttgagagaataaggctgtagttatgaagtagctggagcttctcactattaaactgcagatatgatctcagactgctttatcatttaattcatatgctaagtgtatctatatgaatttctacttatatattcttgtatgtctatatgctttttaacatttttgagcctatccctttctaccagcttgcacagttcttcccatagacatcagacaggaacgaaactgacattatatattactgatc

SEQ ID NO: 380356 - DNA, 617 bp, Homo sapiens
acacactggctgttaagcagaccacactgggcaaaagtgcactttgttccaaagagttagcagcatggtttagaagagaaacaaagacacacatgtacaagttaaatctccatgagaacttccagaacagacagcgctgacagcaggctccatggctctctttgtttgtctcgtgctggtattgggtcctagattgtagaggccaaatctggcttcacaaggccatgctcttgtcagaccatgtgcagaagcaatatgtccccatttgggttgggcaattatggacgctatactcatatgtccctaggcaagtacccagctgtcctaagctatcatttccatataaggaacaacataaasttgaataaaaacgcaaatctagctgatttactggattcttgatgttactgctggcaacaagcgcctggtggccacatcgttcaggaggcagggctcagctctctctaatgtatgctattggaacttgctggaaatcagtttatttgtgctgtggtcttgagattccgttttcctccgaggctcagatcagaagcggggtattaaactttatcccaactctttgctcacacagaatagttacaagatatctatgcttt

SEQ ID NO: 380357 - DNA, 634 bp, Homo sapiens
agatgaaaaaattctggatatagacggtagtaatagttgcagaacaatgtgaaggtagttaatgccacagaattggacacttaaaatggctaaaataataagtgtttttattttaccacaataaaaaagaagaaaaaagtaagaaaatgtgtgatcatccccattgattgcgatacccacgttccccatttctagcgaatctgacaggcaacctctgtgggtctgtcactcttctgttcctgggacttcagcaagtgcytttcatgccaagtggtaataagtgctctggttgagattaaagttggggtgacatgattgctggatggaggtgttagtggaggggatggtaattaggaatattataagtagattgcaaagaaattatgctttttggatgtttgaagagtcatcttgctgcagaatggtcatatggacttcatcccctggtgcattcagtcccaaattctatgaactttgcctcttagcccaagtgaatattccaccaattttcctattgctataaaaatataaggtgacagcagtcactacagagctaagagaccatacgtcttatgccgtatggtcccttttgcggcctccctacttgagagtgctgaagaggcaacacattctg

SEQ ID NO: 380358 - DNA, 634 bp, Homo sapiens
agatgaaaaaattctggatatagacggtagtaatagttgcagaacaatgtgaaggtagttaatgccacagaattggacacttaaaatggctaaaataataagtgtttttattttaccacaataaaaaagaagaaaaaagtaagaaaatgtgtgatcatccccattgattgcgatacccacgttccccatttctagcgaatctgacaggcaacctctgtgggtctgtcactcttctgttcctgggacttcagcaagtgcttttcatgccaagtggtaataagtgctctggttgagattaaagttggggtgacrtgattgctggatggaggtgttagtggaggggatggtaattaggaatattataagtagattgcaaagaaattatgctttttggatgtttgaagagtcatcttgctgcagaatggtcatatggacttcatcccctggtgcattcagtcccaaattctatgaactttgcctcttagcccaagtgaatattccaccaattttcctattgctataaaaatataaggtgacagcagtcactacagagctaagagaccatacgtcttatgccgtatggtcccttttgcggcctccctacttgagagtgctgaagaggcaacacattctg

SEQ ID NO: 380359 - DNA, 515 bp, Homo sapiens
  misc_feature (1)...(515): n = A,T,C or G
cctttttagtctttgaagaaatatctgtagaatccacactctggtagacaacttccagaggtcacttaattctgcatggagtttctaactcaacatttataaatgggtcacgtttcttcctttggaaaggcagatttggcaagttaatattatctcacagaacacataytctttaaatgagaggtgctttagtgattcagagttctttctcaagggttcatgggctaggctggaatctctcacatgcaggaagaacattgatgaggcatccatcctgtctgaccttaatccttcctgaggccttgaagcccaatattcctgagttggactttaaaacctacccaaggttggagattcttgctccactttctgcaggctaaagaagcaagattcttctaattgtttttcatctgtgatggtttcataagtgagtaagagcttataagtctcttttacagttcattacaaccaagaaacnnnnnnnnnnnnnnnnnnnnnnnnnnnnnnnnnnnnnn

SEQ ID NO: 380360 - DNA, 658 bp, Homo sapiens
atgagaagaaacattggttgagagggggttaagttcaaggacttttgcaaagcttccagaggagtgtgactgagtctggtagttgagcacctgggacattatttatgatgcaytgaaggatgtcaacagcattcttccggagaattttgcccgcaaggggaggtcattaaaagaggaggcactgccacaccggaatgggtaaagccttccagcttctactttaatccttctgacccgggagatgaatttctttttctgttgatcttttctgtgcctcagtcatcgactagtatttatattttcaaccagcatagcatatagtgaagaggtgttgatgtcacacagaccaggattcaaatgttggctttgacacatacccactgagggccagggcaactggggagcccaaattttctcctctgaaaaatgggaataacagcatctaaatcacaggactattgtgaagatgaaaattaattgcgtttgggaaggtggcacaaaacaaatgctcaatgcatgggagctattgttattgttaggcccattgcctctaactagaggcaatcattttaaagagagggagaacccatctcattcttctctgtgctcccagagctcagcagagtttctgcacaccaagagcattcattaactgaca

SEQ ID NO: 380361 - DNA, 658 bp, Homo sapiens
atgagaagaaacattggttgagagggggttaagttcaaggacttttgcaaagcttccagaggagtgtgactgagtctggtagttgagcacctgggacattatttatgatgcattgaaggatgtcaacagcattcttccggagaattttgcccgcaaggggaggtcattaaaagaggaggcactgccacaccggaatgggtaaagccttccagcttctactttaatccttctgacccgggagatgaatttctttttctgttgatcttttctgtgcctcagtcatcgactagtatttatattttcaaccagcatagcatatagtgaagaggtgttgatgtcacacagaccaggattcaaatgttggctttgacacatacccactgagggccagggcaactggggagcccaaattttctcstctgaaaaatgggaataacagcatctaaatcacaggactattgtgaagatgaaaattaattgcgtttgggaaggtggcacaaaacaaatgctcaatgcatgggagctattgttattgttaggcccattgcctctaactagaggcaatcattttaaagagagggagaacccatctcattcttctctgtgctcccagagctcagcagagtttctgcacaccaagagcattcattaactgaca

SEQ ID NO: 380362 - DNA, 478 bp, Homo sapiens
atacaatgaacagtagatacaaataaggcatttttaggcttctccattttgcttggcaatttctcaacacaagctcctgcattaataaaatcaggggtctgggtaaatgatgcaaactttagggccctatcacatcaaaatcagattgtcctgggtatggggtgggaagattctgcattttaaaaaggaccccaggtaattctaaaacccactggtgtttgagactccagtttaragcatctctgggaagcatagggggaccagcacagaattcaaagcatacttcatatccagcaactctaatagtccagagtttgagccctgcctatctgttactactagagtgaccttaaacaagtcacttaatctctctaagcctcagttttctcatttgtaaactgggataatttgcttcacaggttggcttgagtattaaggaagtgatgatcctctattaaagccctataagaagctgggc

SEQ ID NO: 380363 - DNA, 478 bp, Homo sapiens
atacaatgaacagtagatacaaataaggcatttttaggcttctccattttgcttggcaatttctcaacacaagctcctgcattaataaaatcaggggtctgggtaaatgatgcaaactttagggccctatcacatcaaaatcagattgtcctgggtatggggtgggaagattctgcattttaaaaaggaccccaggtaattctaaaacccactggtgtttgagactccagtttagagcatctctgggaagcatarggggaccagcacagaattcaaagcatacttcatatccagcaactctaatagtccagagtttgagccctgcctatctgttactactagagtgaccttaaacaagtcacttaatctctctaagcctcagttttctcatttgtaaactgggataatttgcttcacaggttggcttgagtattaaggaagtgatgatcctctattaaagccctataagaagctgggc

SEQ ID NO: 380364 - DNA, 491 bp, Homo sapiens
ttttctgccaagaccaaagcaaatatccctgggaaaaaaaaaaaaaaaaaaccaagagcytcattgcaaagcgtcctggcttctgtgtggatcttccgctagggaattgcaaaaactttcttgagatgcagagaccctaaaggtccttcaaatgctgaatgtcagtctgtgccacagtcaaaattacaatcccagcaaagaaaaatgtgcctgcttttcgcttgtgtggaattacaggggtcccatatactggctttgatccagtttactatgtgatcttgaagagagacatcatggtgtgttgaaagagcacagggttgagactctgaaagcctggctgctggttactacactgacactgtgtagttcagtcccgggcaagtcacttaacctctctgagcctatcagctgtgagtattcattcattcaccctgcccccacccccatccattcatccatctatccatccaattcaatatttattaaaggtg

SEQ ID NO: 380365 - DNA, 491 bp, Homo sapiens
ttttctgccaagaccaaagcaaatatccctgggaaaaaaaaaaaaaaaaaaccaagagcctcattgcaaagcgtcctggcttctgtgtggatcttccgctagggaattgcaaaaactttcttgagatgcagagaccytaaaggtccttcaaatgctgaatgtcagtctgtgccacagtcaaaattacaatcccagcaaagaaaaatgtgcctgcttttcgcttgtgtggaattacaggggtcccatatactggctttgatccagtttactatgtgatcttgaagagagacatcatggtgtgttgaaagagcacagggttgagactctgaaagcctggctgctggttactacactgacactgtgtagttcagtcccgggcaagtcacttaacctctctgagcctatcagctgtgagtattcattcattcaccctgcccccacccccatccattcatccatctatccatccaattcaatatttattaaaggtg

SEQ ID NO: 380366 - DNA, 491 bp, Homo sapiens
ttttctgccaagaccaaagcaaatatccctgggaaaaaaaaaaaaaaaaaaccaagagcctcattgcaaagcgtcctggcttctgtgtggatcttccgctagggaattgcaaaaactttcttgagatgcagagaccctaaaggtccttcaaatgctgaatgtcagtctgtgccacagtcaaaattacaatcccagcaragaaaaatgtgcctgcttttcgcttgtgtggaattacaggggtcccatatactggctttgatccagtttactatgtgatcttgaagagagacatcatggtgtgttgaaagagcacagggttgagactctgaaagcctggctgctggttactacactgacactgtgtagttcagtcccgggcaagtcacttaacctctctgagcctatcagctgtgagtattcattcattcaccctgcccccacccccatccattcatccatctatccatccaattcaatatttattaaaggtg

SEQ ID NO: 380367 - DNA, 597 bp, Homo sapiens
gaagcaggtttggtggcaggcagactgggactgggtcaagaactctgttttagaccctttaagtgtgagatgcctatgagatatcctggtggagatttcacggaggaagttggatgtataagttaagtttatggtgtagactgaaactgagaatatgtgtttgggatagtacttatagctttagggctagatgagaatttcaggagtatgttgatagggaagataagcattataaaaactaaactcaggggctctctaaattcaagaatcaggcagaggaaacatatrttatagggggcatgtaccatgtgccaggcattaagctaaaggctgaagatacaaagaagagaaggcattaactaaactcattgaggacagggaatgtgttttattctcttcagattcccagaccctagcacattactagccacataagactttatttaacaacaaaaacattgaaaggtgggactacacagagtctagtgataaaccagaaattataattaatccaattctgtgcatatgaaatcctattagaaaaaaataaagctcatattccagtgatagaggcaaagaaggcattacaacacagca

SEQ ID NO: 380368 - DNA, 604 bp, Homo sapiens
aatgtcccatctctctttcgctcaagaagtaggtatacaagcatctgtaacccactgggatattgggaaatcaccctgtgattctcgcatgaatgtgaacaaatatctatgccttttctcttattaatctgcctttcatgagttgatttttcagtgaaacttccagtggcaaagggaaaactacatagctatttaatttattcacctgggataraaaaggcaatcctaccatatgatttaggtcagtggtatccaatctttttagtcaggagagcacatttgaatctgaaaacatgtatagtcatgtacataaaaatacatttaggaatgcattggtagagcaaatgcttaatagcagacagagactactacctttaaaggaatttgagttctattaatcataaccttatctatataatattccaaatctgagttattgctttcactctgtgtttctgcagctctctctgcctgtttttaccactggacaggaagctccatgaaggcagagtcagtttgacttattccctgtctattatatgctcagcacctaccacagtttctggcacaaagcagtactgtatttgtagaatgaatgaataaa

SEQ ID NO: 380369 - DNA, 604 bp, Homo sapiens
aatgtcccatctctctttcgctcaagaagtaggtatacaagcatctgtaacccactgggatattgggaaatcaccctgtgattctcgcatgaatgtgaacaaatatctatgccttttctcttattaatctgcctttcatgagttgatttttcagtgaaacttccagtggcaaagggaaaactacatagctatttaatttattcacctgggataaaaaaggcaatcctaccakatgatttaggtcagtggtatccaatctttttagtcaggagagcacatttgaatctgaaaacatgtatagtcatgtacataaaaatacatttaggaatgcattggtagagcaaatgcttaatagcagacagagactactacctttaaaggaatttgagttctattaatcataaccttatctatataatattccaaatctgagttattgctttcactctgtgtttctgcagctctctctgcctgtttttaccactggacaggaagctccatgaaggcagagtcagtttgacttattccctgtctattatatgctcagcacctaccacagtttctggcacaaagcagtactgtatttgtagaatgaatgaataaa

SEQ ID NO: 380370 - DNA, 560 bp, Homo sapiens
tcacttgtaacctctgcctcccaggttcaagagattctcccacctcagccccctgagtagctggtattttaggcatgcaccactactcttggctaatttttgtatttttaktggagacggggtttcagcatgttggccaggctagtcttgaactcctggcctcaagtgatctgcccgcctcagacttccaaagtgctgagactacaggcatgagtcactgcacctggtcagggaaatattttaaaattgtatcaattttggagttctgatcatttgtttcagagttggaaatcaactttagtctcaggattccttattgttcctctgctgcaatttcttttctgttcttttttcctttttggggacagggtcacactctgtcactgaagctggaatgcagtggtgctatcatagctcactgtcatctcgaactcctgggctcaagtgatctttgtagagactggctctcactctgttgcttaggctagtcttaaactcctggcctcaagtgattctcccacctgggcctcctaaagtgctgggattacaggcttgtgcca

SEQ ID NO: 380371 - DNA, 560 bp, Homo sapiens
tcacttgtaacctctgcctcccaggttcaagagattctcccacctcagccccctgagtagctggtattttaggcatgcaccactactcttggctaatttttgtatttttagtggagacggggtttcagcatgttggccaggctagtcttgaactcctggcctcaagtgatctgcccgcctcagacttccaaagtgctgagactacaggcatgagtcactgcacctggtcagggaaatattttaaaattgtatcaattttggagttctgatcatttgtttcagagttggaaatcaactttagtctcaggattccttattgttcctctgctgcaatttcttttctgttcttttttcctttttggggacagggtcacactctgtcactgaagctggaatgcagtggtgctatcatagctcactgtcatctcgaactcctgggctcaagtgatctttgtagagactggctctcactctgttgcttargctagtcttaaactcctggcctcaagtgattctcccacctgggcctcctaaagtgctgggattacaggcttgtgcca

SEQ ID NO: 380372 - DNA, 405 bp, Homo sapiens
ggaacccaaattccatccagattccattgcctgggggcagtttttagaaaacgacaaaaatatcttttagaatagtaaagtctgtgaggcaggttggacccggttgcctggttagaaattggagaagaggctttagatggttacacagatttatttccgtccatagtgagtccaagtcaatccctcaactgggcttcgtctgtctcttcagtcatgtatcagctccttccatcctaatagagaacaataaccaaactttgcaatcttacatcmcacaagggaaaagcatctcctgttatactattgcaatatcagcattatacccaggggggtctggaagcacagatgcagggaactcagcccaccctaaggatacacaatggtttctatgaggaggttacagaa

SEQ ID NO: 380373 - DNA, 561 bp, Homo sapiens
ggatattaattttttgacatgtaatcttgaccttggctcacgaccaccatgaagtggagctcagtgctgctcctgttgctaatatcctagcaggattcttggagttgcctgatagttcaggaaattagaagggccctgtggaaatgcagagacagtttggaattgggctgggcttgattggatcagtcatggttctgcaaggaggagtctgatccccagccagtcatgctctcacttgactcctgaagattgaattcacgttgcaccctctagatgctaatgacagcacactggttcctctgaccatgtggacagccatccctggcttatttctttccttctgtcttgctctayccatcctctatgctgctgtgtggccttcttcatgttttcttccccagatgtctcagtcaaaggtggtcttttttttttgctatgacctgtgtctgttacatttgaagccctcagtttagcttttaattatatgctgttttgcagtgtccactaattgtttcacatatattagtaaccttttcacagtctatccagattgtagagtcc

SEQ ID NO: 380374 - DNA, 504 bp, Homo sapiens
ggaactctgtctcaaaaaaaaaaaaaaagaaaaaaaaagtgttaggaaggtatgaatgctgttggagtagaacaggtcaacttcccttgaaaaataatttttagaagcattgaatctgctgctaaatttcaccctgtgaaatcatcctgggaaaggtttggcaatgcgattcaggtgagtctagggagcttttcttyttaagccttctttaccatgtgctgggcaaaggtccctctttgaaaggtcatgccatcgttggccaggcctggcagggtggaaagggtggctctgtgcaactggatctgcacagggctccgtctgcctgctactggaagatactggctctctgggccaagcaaagctgcctttagtaaattaatgagattttcccactaattcagcatctttcttaggaatccatactagtgatcaattccaagtactgtgggattttcatttgcatcttgttctccctttaggggcagaaaagatacacataacttt

SEQ ID NO: 380375 - DNA, 594 bp, Homo sapiens
tggcaacgagtggggctgatgtccatgtctatctgtttcagggaagaggtcctgatgcagaccccaaaatagggttcttggatcttgtgcaagaaagaattcagagccagtccatagagtaaagtgaaagcaagtttattaggacagtaaaggaataaaagaatggctactccatagacagagcagtcccaagggctgctggttgcccgtttttatggttatttcttgattatatgctaaacaaggggtggattattcatgcctccctcttttagaccatatagggtaacttcctgatgttgccatrgcatttgtaaattgtcatggcgctggtgggagtgtagcagtgaggacaacagaggtcacactcatggccatcttagttttggtggattttagctggcttctttactgcaacctgttttatcagcaaggtctttatgacctgtatcttgtgtggacctcctgtctcatcctatgactcagaatgccttaaccatctaggaatgcagcccagtaggtctcagccttattttatccagctcttattcaagatggagttgctctggttcacatacctctgacatacctttg

SEQ ID NO: 380376 - DNA, 572 bp, Homo sapiens
atacatacctagatggcatagcctactacacatataggctacatgatataacctattgctcctaggctacaaacctgtacaacatgttactgtactgaatactttaggcaattataacagatcattaaatatgagtattatgatatgttattataatcttacaggaccaccattgcatatgtggtctatcatagaccaaataatgtttatgtggtgcctgactgaatatgcaaatattctaatatctgaaaaaaatctaaaatctgaaacaccgctggtcccaaatattttatatagggaatactcaacctccacattcaaatactccatgtatattgctagtaaaacttcccccaaattaccataygcatgatagtccagattatcattcagaaaatactcactcaactcttttctattgtgagaagacatactttcccaccctattcttgttggctgggcttagccatgtgatttgatttgtccaatggaatgtcagcaaatgggacatggggaaaggcttaaaatgtgtctgtgcaatggggcttgtttgcttgggctcttgccattgt

SEQ ID NO: 380377 - DNA, 518 bp, Homo sapiens
taagttagttctctttcactgtctcagtcataattttgcaaaggcggtttcagagtggctgggacacaagaatggcttgaacccaggaggtggaggttgcaatgagctgaggttgcacctcacagagtgaggccctgtctcaaaaaaaaaaaaaaatttaagaattatttactattcccctgaaattatccatattttcctatctccccctacccctctgtgaaataaagttatataagtattttgactccattggtatattgggtaatcactctgtgattctcctttgagtacacattwataaatttgtatgccttctctcaaattagtctgccttttgtaagttgattttttcagcgaaccttccaagggcaaaggggaagccctacaccatatatctagactgtcccatatgtctagaatccccaaactgaatttatagaggctaaatcttacctatgctgggtttcaacttaaaatttctttttcttctgtctccacaaagcccaaggaaagac

SEQ ID NO: 380378 - DNA, 588 bp, Homo sapiens
aatcttacctatgctgggtttcaacttaaaatttctttttcttctgtctccacaaagcccaaggaaagactcttccttttgaaatgcaggtaatttgtgatgtttgagaggcaaagtgtattaataaacatgtgcgacctaaaacctgcagagatcacatggtggaatgaaaagctagcactttgctgctgatgcctgggtttcggcccacrttctgccactaactggctttactgagcttcagcagctcaacgctttaagccagtgcagttggttgaaaagctttttatggatctactgtttaatgcatttaattgggctttttgattttataaaggtggaatttgacagtaaaacccatagtgaaggttgattgtgtagcgccttctattcatcaggaaaactttttttgcattctgggtttgtcagccattagccaaatgaaaatcatggaagagacagaagattttaaatgagagaaaaggaagggtgagtcaaaaagtaacactagactgggctcttgcttttagcaggtaatccccaataatccacataaagtaagaataaaacaccacagttattaaatgc

SEQ ID NO: 380379 - DNA, 588 bp, Homo sapiens
aatcttacctatgctgggtttcaacttaaaatttctttttcttctgtctccacaaagcccaaggaaagactcttccttttgaaatgcaggtaatttgtgatgtttgagaggcaaagtgtattaataaacatgtgcgacctaaaacctgcagagatcacatggtggaatgaaaagctagcactttgctgctgatgcctgggtttcggcccacgttctgccactaactggctttactgagcttcagcagctcaaygctttaagccagtgcagttggttgaaaagctttttatggatctactgtttaatgcatttaattgggctttttgattttataaaggtggaatttgacagtaaaacccatagtgaaggttgattgtgtagcgccttctattcatcaggaaaactttttttgcattctgggtttgtcagccattagccaaatgaaaatcatggaagagacagaagattttaaatgagagaaaaggaagggtgagtcaaaaagtaacactagactgggctcttgcttttagcaggtaatccccaataatccacataaagtaagaataaaacaccacagttattaaatgc

SEQ ID NO: 380380 - DNA, 524 bp, Homo sapiens
ctgggtttgtcagccattagccamatgaaaatcatggaagagacagaagattttaaatgagagaaaaggaagggtgagtcaaaaagtaacactagactgggctcttgcttttagcaggtaatccccaataatccacataaagtaagaataaaacaccacagttattaaatgccctgaggttcttgcttttaatcccccttttcttaaagagttatctgttccatatgtacaaggcacttcccatcctcccctgactctctctatcaccaccttccccggtgctagagagattcgtttattcaaggatttatttagtatcgatcaacagcccatctgccttgcataaaaaaattaaaaagcaaaatatggtccttttctgttcttttaacacaggaatgtgtgcccttcccccacacttctcactgatacacctcctttttcaattattttgtaggtaaagcaaagaaattccttgcttcagctatcctcctaagcttaccaaatctaggctttgttcctaggcc

SEQ ID NO: 380381 - DNA, 520 bp, Homo sapiens
taagaattcaaattatccttatttgcagatgatatggccttatatttggaaaaacctaaggactacaccaaaaaaattatttgaactggtaaacaaattcagtaaagttgcaggatacaaaatttacatatgaaaactagtagcatttctatgccaacaacgatctgaaaaagaaatcaagagaataatctcatttacaagtaaaagatctctccaataaaaactaaaaaacattgatgcaataaattgaagagaatacacaaaaaaatgggaatatattccatgttcatggattagaagaatcaatattgttaaaatgtccacagtactcagagcagtctatagatttatgcaatctctatcaaaatatyaatggcattcttcacagaaatagacaaaatagttctaaagtttatatggaaccacaaaagaccccagaatagccaaagtcatcttgagtaaaaagaaaacgggaggaatcacattacctaacttcagattataccacagagttataata

SEQ ID NO: 380382 - DNA, 564 bp, Homo sapiens
aactggaggacattatgttaagtgaaataagccaggcactgaaagataaacttcacctgttctcactcagttgtgggagctgaaaattaaaacaatcgaactcatagagatagacagtagaatgatggttaatagaggctgagatgagtagtggggttggcagggaggagtggagatggttaataggtacaaagatacagttagatagaacaaataagatctagtatttgatagcacaaatgtgactacagtcaacaataatttatagtacatttaaaaataactaaaatagwctaattggaacatttgcaatacaaagaaataataaatgtttgaggtgatgcataccccatttacctcaatgtgattattacccattatatgcctgtattaaagtatctcatgtatctcataaatatatacacctactatatattagtctgttctcacattgctataaagattacggcagctcacgcccgtaatcccagcactttaggaggccaaggcaggcagatcacctgaggtcaggagtttgagaccagcctgcccaacatagtgaaa

SEQ ID NO: 380383 - DNA, 564 bp, Homo sapiens
aactggaggacattatgttaagtgaaataagccaggcactgaaagataaacttcacctgttctcactcagttgtgggagctgaaaattaaaacaatcgaactcatagagatagacagtagaatgatggttaatagaggctgagatgagtagtggggttggcagggaggagtggagatggttaataggtacaaagatacagttagatagaacaaataagatctagtatttgatagcacaaatgtgactacagtcaacaataatttatagtacatttaaaaataactaaaatagtctaattggaacatttgcaatacaaagaaataataaatgtttgaggtgatgcataccccatttacmtcaatgtgattattacccattatatgcctgtattaaagtatctcatgtatctcataaatatatacacctactatatattagtctgttctcacattgctataaagattacggcagctcacgcccgtaatcccagcactttaggaggccaaggcaggcagatcacctgaggtcaggagtttgagaccagcctgcccaacatagtgaaa

SEQ ID NO: 380384 - DNA, 611 bp, Homo sapiens
cagcgttttcagaaaagcttcctataccactagttcatcaggataatcagaaaacagttgatagttctgctgtcattccttctcacccatactatcatacagaaaccccatttttcagagatgtagatgaaatctctaggtcccagtgatagtagggagcaacccactgtattttgctttagctgatctgcctcatcagataacttggacaaagtcaaatatacctcccgrttttaccacattcccaaaaacctcactattaacgtctttacttgctgcagttaaatggtaataatcgcacagatgaaggtgatacatgaataaccaaggttgaaaagcacagtagaaagacaaaaaattgacagcaggaataacagaaggctgtgtacccaaagctggaaaggacttcatcagtactgaccatcagaattaaaagaaaaggctggtctcagcagctcacacctgtaatcacagcactttgggaggccaaaaggactgcttgagcccaagagttcaagaccagcctgggcaacaaagtgcgaccccatctctacaaaataataatcataatagaaagaaaagaacggcttatgagagcttgggcaatacct

SEQ ID NO: 380385 - DNA, 499 bp, Homo sapiens
ggtgaggtgttggcaaggttagccctctaacacccagcaaaggacatgcaagtaaataaataagggccctgaacataaaatgagcttttgcaaagctccagggttttttcttagaatctatttacttttagttgtactttatagaagctgaggagttgatgcctcagaccccagaagtctctctgcctgattctatgctaatatcactttgtctcacaaccctatgggtaggtgcaggtatttcttctccattttataagtgagaaaactgacaatactaaattttatatttatatatatatatatatatatatatwtttttttttttttttttttttttttgagacggagtcttgctctgtcacccaggctggagtgcagtgggacaatctcaactcactgcaacctctgcctgctgggttcaagcaattctcctgcctcagcctcctaagtagctgggattacaggcgcgtgccaccacgcctggctaatttttgta

SEQ ID NO: 380386 - DNA, 631 bp, Homo sapiens
tgaaatcatgtcatttatatgcaaatgaccacatcttcagcagctgctccttctccgttgaagcccagggacttatttgcacttaataaagcctcataaataggtttttcctctaaatgggtggggtagcaggaaacccactgcagccttttacagttacaagcttctttttgttttgaaagtgagagcagccacctctaacagaatggttctcagttgttagagaaaygcagttcctcattcagctgctctcccctttccctccttagaaaaaaaatgcccttttccttgatggtaccttctttcccattgcagctgtaggtatggtacaatctccagtctgagttggaatttaatccagacttcattacaaggagaggtgtcctctgagcacagtctcttgccaggtggtaagggcaggtgttcaactgggaaagacctcccaagctcccatcaggctgtcctgtctggggaggaggaggggtaactcctggcaggtggagaagaatttttccttttacaagttataagattctctttgaaaacactctatatagggaagggacagtgtatggagactatttgtacactctgattgcgcaatcaaacagcaataagagagcattgagaa

SEQ ID NO: 380387 - DNA, 613 bp, Homo sapiens
acattcctattgggagtctacctggttcatcctccctccagtcctagtccctaatagccccctttctatgctcctttatgccccatgactactgctgttgtgatgtcaaatcacaataatacaagctgacatgacttcagcccttgccatgcaccaggctaggtgctaagaacttaacatacagtatctcaggtcattctcactacaacaggatgagatagatatactgtcttaattttacaaggtaaactaaggctcaaagaagttaagtcgcttacttatgagaacaacactcawaaatgatagagccaggattcaaacctaggactgaagaaggccaaagtcaccctatttctcccttacaatgaatgagagacgaagagatcataggagtcatctagaatcttaagaatatttcattgcaattggttggtttattgacatgtcgttagtaccactccaaatcccttcagccctacctcttcctccagtcatggaaaactcagccagttctgtgcaggcttcagtttgcctcatgcacaagtaagcaggcagtgccttgcctcatcctgtgtctcccatcctctcacttcctgctttgtgacttctctga

SEQ ID NO: 380388 - DNA, 506 bp, Homo sapiens
aatctggatcctgctattccaccctcacagtctgtcatcctccttcatccttccctctggtcacactgattttcccaccactctctggactcaccttggccttctgtgtctttattcccgcatcagctgtgtcccctggaagagactttctcctctgtgtggtttggtaaattacattttcccacatggtcccagttcatatgcactaagaccaagattgacatttgttatgttcttttggttgcaagggatagaaattccttcaaaccacttaagtaatggagtttgttattaacataactatgggggtaagagacaggtgaagaatctcatagaaaccaagggcagcctgccccctccccttcaagatccaagacaggtctcagatctgagtagttttgtcaccctcctcagttayaagatgtcaagatctccattctcgtgctctcttgctagggtgcctcctactctggccctgtgtatctttgtgtgcgacatcactttct

SEQ ID NO: 380389 - DNA, 510 bp, Homo sapiens
gctgatgaacttggagccattatgaatttgtcagagggatgtgaaccagagcaactccatctcaaataggatctgggtaaaatgaggctgaaacctactgggctgcattcccagacacttaaggcattctgagtcacaggatgagataggaggtcaacacaaaatacagktcataaagaccttgttgataaaacaggttgcagtaaaggagctggccaaacccaccaaaaccaaaatagcgatgacagtgacctctggtagtcctcactgctatactttcaccattgccatgacagtttacaaaaatgccatggcaacgtcaggaagttaccctatatggtctaaaaaggggaggcatgaataatccaccccttgtttagcatatcatcaagaaataaccataaaaatgggcaaccagcagcccatggggctgctctatggatcagccattcttttattcctttattttcttaattaaacttgctttcactttgcgctgtggactcgccc

SEQ ID NO: 380390 - DNA, 510 bp, Homo sapiens
gctgatgaacttggagccattatgaatttgtcagagggatgtgaaccagagcaactccatctcaaataggatctgggtaaaatgaggctgaaacctactgggctgcattcccagacacttaaggcattctgagtcacaggatgagataggaggtcaacacaaaatacaggtcataaagaccttgttgataaaacaggttgcagtaaaggagctggccaaacccaccaaaaccaaaatagcgatgacagtgacctctggtagtcctcactgctatactttcaccattgccatgacagtttacaaaaatgccatggcaacgtcaggaagttaccctatatggtctaaaaaggggaggcatgaataatccaccccttgtttagcatatcatcaagaaataaccataaaaatgggcaaccagcagcccatggggctgctctatgratcagccattcttttattcctttattttcttaattaaacttgctttcactttgcgctgtggactcgccc

SEQ ID NO: 380391 - DNA, 579 bp, Homo sapiens
tagcacctaaatgtcataatcataagtgttcttacaagaaggagagagcaagagattatactacacagaggagcaggccatgtgatgctggcagcagcaattggagtgatgcacctgggagaggaggaaggggtcacaagccaaggaacatgggagccattagaagctaaaaacatcaaggaaacggattttctgttggaggctccagaaggaatcggcactgccaataccttgatttaggtccagtgaaactgattttggacttctgacctcaagaattataaaagaggcccaggcgggtagatcacttgaggtcaggagttcgagaccagcctggccaatatggtgaaaccccgtctctactaaaaatacaaaaattaaycaggcatggtggcaagcacctgttaatccttgctactcaggaggctgaggcaagagaatcacttgaacctaggaggcagaagttgcagtgagccaagattgcgccactgcactccagcctgggtgacagagcaagattccattttttttttaaataaagatgaaaacagatactgatacacagtttcctttccttta

SEQ ID NO: 380392 - DNA, 359 bp, Homo sapiens
ggcatcttcattcatctccagccctcctttattaagtcatgtataccatctcctctcttatgcttaatgtcatgccactcttcaatccttgtcccttctttccctctrtgcctgcttgtggtttactcctgctgacaccaaaggctgaggaggatgaaagaacaattccagccctgacagacagcagtagcagcaactacctctggcttctcctggggactttgccaagccacacctctgtctctccctccgctgtccctctgcagctggttcttcctcccgctgcaccctctccacccctacccacagtctcacacccagattctccctctctgcccagccaccttcagattggaggc

SEQ ID NO: 380393 - DNA, 562 bp, Homo sapiens
gcattggaccgggagggaatatttggtgtttacttgacttcccttggcttccttcctccacctctctgattacttcctcccctgctgatggcatcggggtcctgctgtggtccacagctcctcctctgctgtggaacccccaaacctcactggggtcttggcctctgcagcctcctaaggactggccatgtttttccatttcagaggtcagcactggacactgactctgtctgtcccctctatctcagctcwcttcttccattcacctggacaacgacgtttacacgttaggaagatctgttaaattcactaaccacgtagactttgcacctgttctgtcccttgttttttgctaagttcatgggatacagagacatataagaaaggttactgccctcaaagaaaatatcgtcttagcgaggacactcactcaaatggcacgtgaaaaatgatagcttccagaaaagaaatgtaaatagagggctatatgactggggaggatgaactggttacttgagggcaagaaagccagggttgaggaacttgtatggatagctgctgc

SEQ ID NO: 380394 - DNA, 389 bp, Homo sapiens
tagtcctcaccaatgggatgtaaggatcagtaacgtatgtcacttccaggccaatgtgtctgtgtatcagatgttcaatgattcacrtgctctctctgcctctcctgctcccagtctacctgctggataactccagggggacctcaaggctacaggatggtgcagccacagatggaagaagcctggttcccccagcaaccacctagaggacagcctcccaagcaggaacatccatattggacttcccacgagttagaaatgccctgttattgtataataccattaaaaccttggggtggttgcggcagttagtccatcgtggctaattcacctccctctcagagttgttatatagattgaataagatgagtatagtgacttgaatgggg

SEQ ID NO: 380395 - DNA, 389 bp, Homo sapiens
tagtcctcaccaatgggatgtaaggatcagtaacgtatgtcacttccaggccaatgtgtctgtgtatcagatgttcaatgattcacgtgctctctctgcctctcctgctcccagtctacctgctggataactccagggggacctcaaggcyacaggatggtgcagccacagatggaagaagcctggttcccccagcaaccacctagaggacagcctcccaagcaggaacatccatattggacttcccacgagttagaaatgccctgttattgtataataccattaaaaccttggggtggttgcggcagttagtccatcgtggctaattcacctccctctcagagttgttatatagattgaataagatgagtatagtgacttgaatgggg

SEQ ID NO: 380396 - DNA, 558 bp, Homo sapiens
tttgtagtgatttgtgtcacagcaactctatgaaagtaccgtagggagccatgtgccaggcctagygcagggcctggcatgaagaaggcactcagtaaattatgagggattttttttttttttttgacagagtctcaacgtcactcaagctaaagtgcagtggcgaaatcacggcttactgcagccttgacttcctgggctcaagccatcctcccacctcagcctctcaagtagctgggaccacaggcatgcgccaccatgcctggctcattaaaagaaattgtagagatggggtctcactatgttgcccaggctggtctagaactcctgggctcaagcaatcttctcgtcttggcttcccaaactgctgggattatagacatgagccaccgtgcccagattaaatgctgatttttaaaaaatcagtccttttatcctccttcacttccctccttagagacagagtcttctgggagatggtgctctgctgagaactcccagagaagattctagtgaagttcataataatattcactctgagtgtaaatgtagaccttg

SEQ ID NO: 380397 - DNA, 558 bp, Homo sapiens
tttgtagtgatttgtgtcacagcaactctatgaaagtaccgtagggagccatgtgccaggcctagcgcagggcctggcatgaagaaggcactcagtaaattatgagggattttttttttttttttgacagagtctcaacgtcactcaagctaaagtgcagtggcgaaatcacggcttactgcagccttgacttcctgggctcaagccatcctcccacctcagcctctcaagtagctgggaccacaggcatgcgccaccatgcctggctcattaaaagaaattgtagagatggggtctcactatgttgcccaggctggtctagaactcctgggctcaagcaatcttctcgtcttggcttcccaaacygctgggattatagacatgagccaccgtgcccagattaaatgctgatttttaaaaaatcagtccttttatcctccttcacttccctccttagagacagagtcttctgggagatggtgctctgctgagaactcccagagaagattctagtgaagttcataataatattcactctgagtgtaaatgtagaccttg

SEQ ID NO: 380398 - DNA, 558 bp, Homo sapiens
tttgtagtgatttgtgtcacagcaactctatgaaagtaccgtagggagccatgtgccaggcctagcgcagggcctggcatgaagaaggcactcagtaaattatgagggattttttttttttttttgacagagtctcaacgtcactcaagctaaagtgcagtggcgaaatcacggcttactgcagccttgacttcctgggctcaagccatcctcccacctcagcctctcaagtagctgggaccacaggcatgcgccaccatgcctggctcattaaaagaaattgtagagatggggtctcactatgttgcccaggctggtctagaactcctgggctcaagcaatcttctcgtcttggcttcccaaactgctgggattatagacatgagccaccgtgcccagattaaatgctgatttttaaaaaatcagtccttttatsctccttcacttccctccttagagacagagtcttctgggagatggtgctctgctgagaactcccagagaagattctagtgaagttcataataatattcactctgagtgtaaatgtagaccttg

SEQ ID NO: 380399 - DNA, 635 bp, Homo sapiens
cactaatattttgactttggtttcctcaggatattgaatcttgattgatttttattttcccccttttttacttttctgtattatcaagttctctatgacttacctctattactttgtaaatagaaaacattactcaaggacaaagtggtcatgtaggcctgttatagaaacccctgtttaccaggcctctggtttaataaaatgcgactagagtgactccatattgaagtgagcargcaggcattcacaaagcatgtttaaggttaatgctaatggtctgaaaatagccaaattctaagctgaccaccacttataattatgtaatatttatggccatacagagcatctcccaccaagcctgtacaatgtccagatatcttaagagtacagccaattttacttaaagataacatcggttagcaggcttagggtaaaagattcatggtcattgataacaccaatagcccttacctttggtaagcacatctacacattccaagtgtagagctccttctaatttcttgcaagtagacacactcacaaaggatggcatgctcctcctcctgctgaggatgccctactctgtaacaaagtagtttccaataaacttgcttctttcgctgtcctctgtgact

SEQ ID NO: 380400 - DNA, 635 bp, Homo sapiens
cactaatattttgactttggtttcctcaggatattgaatcttgattgatttttattttcccccttttttacttttctgtattatcaagttctctatgacttacctctattactttgtaaatagaaaacattactcaaggacaaagtggtcatgtaggcctgttatagaaacccctgtttaccaggcctctggtttaataaaatgcgactagagtgactccatattgaagtgagcaagcaggcattcacaaagcrtgtttaaggttaatgctaatggtctgaaaatagccaaattctaagctgaccaccacttataattatgtaatatttatggccatacagagcatctcccaccaagcctgtacaatgtccagatatcttaagagtacagccaattttacttaaagataacatcggttagcaggcttagggtaaaagattcatggtcattgataacaccaatagcccttacctttggtaagcacatctacacattccaagtgtagagctccttctaatttcttgcaagtagacacactcacaaaggatggcatgctcctcctcctgctgaggatgccctactctgtaacaaagtagtttccaataaacttgcttctttcgctgtcctctgtgact

SEQ ID NO: 380401 - DNA, 635 bp, Homo sapiens
cactaatattttgactttggtttcctcaggatattgaatcttgattgatttttattttcccccttttttacttttctgtattatcaagttctctatgacttacctctattactttgtaaatagaaaacattactcaaggacaaagtggtcatgtaggcctgttatagaaacccctgtttaccaggcctctggtttaataaaatgcgactagagtgactccatattgaagtgagcaagcaggcattcacaaagcatgtttaaggttaatgctaatggtctgaaaatagccaaattctaagctgaccaccacttataattatgtaatatttatggccatacagagcatctcccascaagcctgtacaatgtccagatatcttaagagtacagccaattttacttaaagataacatcggttagcaggcttagggtaaaagattcatggtcattgataacaccaatagcccttacctttggtaagcacatctacacattccaagtgtagagctccttctaatttcttgcaagtagacacactcacaaaggatggcatgctcctcctcctgctgaggatgccctactctgtaacaaagtagtttccaataaacttgcttctttcgctgtcctctgtgact

SEQ ID NO: 380402 - DNA, 635 bp, Homo sapiens
cactaatattttgactttggtttcctcaggatattgaatcttgattgatttttattttcccccttttttacttttctgtattatcaagttctctatgacttacctctattactttgtaaatagaaaacattactcaaggacaaagtggtcatgtaggcctgttatagaaacccctgtttaccaggcctctggtttaataaaatgcgactagagtgactccatattgaagtgagcaagcaggcattcacaaagcatgtttaaggttaatgctaatggtctgaaaatagccaaattctaagctgaccaccacttataattatgtaatatttatggccatacagagcatctcccaccaagcctgtacaatgtccrgatatcttaagagtacagccaattttacttaaagataacatcggttagcaggcttagggtaaaagattcatggtcattgataacaccaatagcccttacctttggtaagcacatctacacattccaagtgtagagctccttctaatttcttgcaagtagacacactcacaaaggatggcatgctcctcctcctgctgaggatgccctactctgtaacaaagtagtttccaataaacttgcttctttcgctgtcctctgtgact

SEQ ID NO: 380403 - DNA, 450 bp, Homo sapiens
aagcccctcctgacccctcctcactctctagctggctctgccctggaaactgatcactggggactgcagcaacaagctctttgtctgtctaccagttggattcaaccaaaggagatcaggtgtctgcagaagggtctgtacgccaaaaatagaatgctaagccgcttgattgactgaatggatcccacctcttggccaaggggatttcaaagaaacctgaaaaactagttcaggccataatggggaggggatgttggacatgcctcttaataaaataccttcctccctttggtattcaggcacaacttaccagcattaacattaaaacagaggtcttaagatgacaracagactctttgtagtaataaataccaaattccaacctgactgtagtatagcatcacatgacagatagcaggctctgaaagaaacaagtattttaaccccaaa

SEQ ID NO: 380404 - DNA, 590 bp, Homo sapiens
ctcaggtttcccagttgaagtgtatcctctaaagtggtgtgctggcaaaccagctctccaaaaagrcaaaagccctgatgtgtattgtttgtagatttccacagtatagctactcccatcactgtggtggattttcagctcctgatggttgaacacttggcttgcaaaggctctcacggtgccagtgtgagccagctgcagcacacctagggacaccgattcacacaggagtctacctttgctgcagctattttagatgataatgatggccattatctgtcagggccactgcccaaggccacagctaagcagaagtggaaacaccctcttcgtaggtcccaaagtggcatttcttgtgttctgagtcccacaagccctaacaacagctttctctctcttgctctctctcactcactaaggctcaaatcaggcctgggacagggttgagcaattgccaacctgtcaccatctcccacttctatgatgttgccatctctatccacctgttctggtccccaaactttgtgcttatagatacagtctcccttatacctgtccattcatgaaaaatgacatctgggcatgggtgt

SEQ ID NO: 380405 - DNA, 590 bp, Homo sapiens
ctcaggtttcccagttgaagtgtatcctctaaagtggtgtgctggcaaaccagctctccaaaaaggcaaaagccctgatgtgtattgtttgtagatttccacagtatagctactcccatcactgtggtggattttcagctcctgatggttgaacacttggcttgcaaaggctctcacggtgccagtgtgagccagctgcagcacacctagggacaccgattcacacaggagtctacctttgctgcagctattttagatgataatgatggccattatctgtcagggccactgcccaaggccacagctaagcagaagtggaaacaccctcttcgtaggtcccaaagtggcatttcttgtgttctgagtcccacaagccctaacaacagctttctctctcttgctctctctcactcactaaggctcaartcaggcctgggacagggttgagcaattgccaacctgtcaccatctcccacttctatgatgttgccatctctatccacctgttctggtccccaaactttgtgcttatagatacagtctcccttatacctgtccattcatgaaaaatgacatctgggcatgggtgt

SEQ ID NO: 380406 - DNA, 580 bp, Homo sapiens
ttcctagggaataaacaccatagcttgattcatattatcagttttggggtccatctascccataaaccacacatgactccactttgctgaaataggaaagatggtgcagtgatgcagtaatattagcaagaaacagccagataggatctaaatggggcaagggtgttgatttgaggttcaggagaagccttgtgccattttcccaacctcaccatataaagcatgggtgagggccaaagataaaagctgcttccgcccagagcacattcccagggatctcctggtacagtccacagtactgatgatcaaagcagtaacagcagggtctttgcaccacctaggccaactgagggttcataagctaagcaggcgttcagctttgttacccttggagaaatgctgcattttcactaaagagcatttcctgttgcagagaggagagctcggccccctgccgggataatcacaataaagtctccgttgataaaatggccaaggggcagtgtctcaggtttctctggtttgtaggttatcgagctcacttgtgagctccaatccttgtgagtggaagcatctttct

SEQ ID NO: 380407 - DNA, 580 bp, Homo sapiens
ttcctagggaataaacaccatagcttgattcatattatcagttttggggtccatctagcccataaaccacacatgactccactttgctgaaataggaaagatggtgcagtgatgcagtaatattagcaagaaacagccagataggatctaaatggggcaagggtgttgatttgaggttcaggagaagccttgtgccattttcccaacctcaccatataaagcatgggtgagggccaaagataaaagctgcttccgcccagagcacattcccagggatctcctggtacagtccacagtactgatgatcaaagcagtaacagcagggtctttgcaccacctaggccaactgagggttcataagctaagcaggcgttcagctttgttacccttggagaaatgctgcattttcactaaagagcatttcctgttgcagagaggagagctcggccccctgccgggataatcacaataaagtctccgttgataaaatggccaaggggcagtgtctcaggtttctctggtttgyaggttatcgagctcacttgtgagctccaatccttgtgagtggaagcatctttct

SEQ ID NO: 380408 - DNA, 596 bp, Homo sapiens
taatggcataacctaacttttaaggtaacagcatcattatatgtttaaagcaagaaaagaagaggaaataatgtttgtcaaaatctatcatgtgtcagacattttactgaactttctcccctaagcycaatgacataggtacttgtgtccccattccatgatggggaaatgggggctaagaaaggtgcggtgacttggttaaggtcatacgtgtagagatgaatgctagagaaaggattcaaaatcaggtctggctgttgctgagtttcctgtattttccaagttcttacactttccctaacttccctgccttcatctctgtcctctcctctgcttactctgttcttttctgttcctcaaacacacaaagctcattcccacatcaggactttctgtctctctttgtttggctgcttcctttcttatcatttgggactcatcacaaaggccaccttcttgtaaggtgacctgaccattccttttaaagtagtaccctctgggatattgctctgttaatttactttacagtacttctcactcacctactttgtttatttccgtagtctgtgaccccctacccacccctcactgaccct

SEQ ID NO: 380409 - DNA, 322 bp, Homo sapiens
gctgttttctagttcttggctattacaaataaaactgctataaacatttgtgtatctgggcatggtggctcatgcttgtaagtgccagcactctgggaggccaaggcaggaagatttcatcagctcaggagctctagaccagcctgggcaatatagtgagaccttgtctctaataaataaatarataaattagccacgcacggtggtgcatgtctgtagacccagctactcaggaggctgaggcagaaggattgcttgatcctaggaggtggaggtttcagtgagccatgatcataccactgcacttcagcctgggcaacac

SEQ ID NO: 380410 - DNA, 584 bp, Homo sapiens
tggtaaacttaatgatacttccagttcttttgctgaccctacaggcagaggactcagaggcagttccgcttctttcctaataatgctgtcttgcttaagccactgtcacaatatttacaggtagccactcacaaatagttacactttaaaaattcatgtaagtctgagttttggaatttgaaatacacttcccactgggaaaaaaatgtataaataaataaataaatatgtttctaggcaaccctttacaggcttattaaaccttaatctataatgtagctgaaatactatacatttatgatgaaaaaattaggaaaatcatatttcagatgcatattagttccactatatgacatttaagtaggattttatatggaatagtttkgctcctttaacaccattgttggtggtgagaagggtaagtagtggtgtcacgaggttctagagagaagacattgagaatggtcctcgagaaagcccatcccatctcctgtgtggcatggaccagccatctgcatgtgagacagtcttaagtcacatacttgtatatcaggagtattgtatgatcttactagttgcaaaat

SEQ ID NO: 380411 - DNA, 584 bp, Homo sapiens
tggtaaacttaatgatacttccagttcttttgctgaccctacaggcagaggactcagaggcagttccgcttctttcctaataatgctgtcttgcttaagccactgtcacaatatttacaggtagccactcacaaatagttacactttaaaaattcatgtaagtctgagttttggaatttgaaatacacttcccactgggaaaaaaatgtataaataaataaataaatatgtttctaggcaaccctttacaggcttattaaaccttaatctataatgtagctgaaatactatacatttatgatgaaaaaattaggaaaatcatatttcagatgcatattagttccactatatgacatttaagtaggattttatatggaatagtttggctcctttaacaccattgttggtggtgagaagggtaagtagtggtgtcacgaggttctagagagaagrcattgagaatggtcctcgagaaagcccatcccatctcctgtgtggcatggaccagccatctgcatgtgagacagtcttaagtcacatacttgtatatcaggagtattgtatgatcttactagttgcaaaat

SEQ ID NO: 380412 - DNA, 586 bp, Homo sapiens
cattgttggtggtgagaagggtaagtagtggtgtcacgaggttctagagagaagacattgagaatggtcctcgagaaagcccatcccatctcctgtgtggcatggaccagccatctgcatgtgagacagtcttaagtcacatacttgtatatcaggagtattgtatgatcttactagttgcaaaatgtgaaaaaattcatttagaataatcttgagtgagggagtgaaaagtatatatattttgaaatttcctaagcagatattgttggaaaaatgcctttttcatgcatttacagataatatattcatatatttagtgaccatttttagttgtgttttccttcttttgtctttaaaaaaaatggttttattaattattggtgctacttagttttaaatgyaaaggacttaattcatttaaaaagaaaaaaaggtaccataaagttaatagtttaaacatttaattctataattgttctagagttttaatgttttagttctttaccaggcacaattatttcaagagattttcattatgttgaagctaactttttaccattagttaacttatattcttatgaggaca

SEQ ID NO: 380413 - DNA, 416 bp, Homo sapiens
ggtggtatcttgatgggaattgcrttgaatttgtagattgcgtctggcagtatggtcattttcacaatattgattctacccatccatgaacatgggatgtgttttccatttgtttgtgtcatctgtgatttctttcagcagtgttttgtagttttccttgtagagggccttcacctccttggttaagtatattcctaagtttttgtttgtttgtttgtttttgcagctgttgtaaaagtggttgagtttttaaatttgatttgattctcagcttggtcattgttggtgtgtagcagtgctactgatgtgtgtacactgattttgtactttgatactttaccaaatttatttatccaatctaggagctttttggatgagtcttcagggttttctttttttttctttttttttttttt

SEQ ID NO: 380414 - DNA, 476 bp, Homo sapiens
gcttcctgtgtctgtatgtgtatatcttttgcaagatttgagaagtttttagctactatgttgttaaatagattttcttttcctttacccatcccttctccctctacaacacccaaaatgcaaatatttggccagtttatgctgtcccaaagtcagttaggctttctgcatttttttttttttattcctcctccattttattgtcattgtttgtyttgagacagggtctcactctgtcacccaggctggagtgcagtggagtgatcatagcttactgcagcctccacctcctgggaggctcaagggatcctcctgccttagtctcttgagtagctgaagttctgaaattctttattctgctagatctagtctgtatattttttaaattttatttcaatagtttttgggtcacaggtggtttttggttacatggatgagctatttagtggtgatttctgaggttttagtgcactcct

SEQ ID NO: 380415 - DNA, 618 bp, Homo sapiens
tattaaaaatgtatctgatttctctgtgaacagtaatatttcatatttttaagtttaaaaatgttagtgtaagccaggcacagtggcattcacctgtagtgccaaccactcaggaggctgagatgggagaccttttaagcctgagtttgagtcaggcctgggcaacatagatgtgagcacctatctctaaaaatgtaaataaataaaaatctcaaaaaaattaaaaatctcaagtgtaaaaacagttctgtagatagatggtagtgatggtagcacatcaatgtgaaggtatttaatgccactgaactgtacacttataacgaattaggataaattttatgttatgtgtatttactacaattttttaaaaatygtatatgtagtttaacaggtgtggtcaatatcaaaacttaggtattcaatcttgttcaattatataagcacaaaatcctggaaaaagtacctgtcatacaaaaaaataaacttcctaaatcaaagtgattttatgaaatgatcttcaataaatattttgaaatgaattcatttatggaagaatcaaaactaggtcagattgtccaaaccagactaagaaactgaatagggtattttatgaggtat

SEQ ID NO: 380416 - DNA, 624 bp, Homo sapiens
actgaaatcagaaaaacaattatgatctaaaggagaaatttagcaaagagataaggatmattaaaaagaactaagcagaaatcttagagctgaatagttgaatgaataaaataagaaatacaattgatagcttaaacagactagatcaagcagaagaaataatttctgaacttcaagaaggtattttgaaatattccagtcagaggggaaaaagaagaagaaacttctttttttaaagaaagactatgaaacttatggaacactattaagaaaacaaattatggcattatgagaatgtcagaggaagaaaggacagagcaaatcatagaaaacatatttaataaaataatgctgaaaatgtcaagtcaagaaaatatggacatccagatctaggaagttcaaaaatccccaattagattcaatacaaaaagactctctctaaggcatacaataatccaacttaaaagtcaaagaaacaaagagagaatgttaaaagctataagacataagtgtcaagtggcataaaaggaaatctcagttaaactatcagcagatttctcagcagaaactttctaggccaagagagaaagagattatatattcaaagtactgaaagaaaaaaaa

SEQ ID NO: 380417 - DNA, 565 bp, Homo sapiens
aatcagttaaatacctgccatcttaaaataatcgccagtaagattttaattattcatgctccctaatcactatatataaagctatctttaaggctgggcgctgtggctaacgcatgtaatctcagcactttgggggccaacgtgggtggatcacgaggtcaggagttggaaaccagcctgaccaacatagtgaaaccccgcctctactaaaaatacaaaaaaaaaaatttttagccaggcatggtggtgggcgcctgtaatcccagctacttgggaggctgaggcaggagaatcactggaacccgagaggcagaagttgcagtgagccgagatcgcaccaccgcactccagcctgggcgacagtgtgaaactctgtcccccgcccccmaaaaaaataataataaaggtatcttttaaaattattaattattattatatagtttgggtatttgcttccacctaaatgtcatatacaattgtaatcctcaatgttggaggtggaggtgattggatcatggggtcagatacctcatggcttggtgttgtcttcttgatagtgagtgag

SEQ ID NO: 380418 - DNA, 607 bp, Homo sapiens
ccatcctttggcatgggaagccattccagaaacttcaaaaccttagttctccctgtgcaattaattaagattcaataagagtactaatttggattcctgaaagtataatgctgggctgcttaggcttagtgttcattgagataaggaagagactagcagtgaggttggtgtgggacacctgactagcayatttcattatacagactttcaattaactctgttttgagttgttcttcgtactcccaccttgcctggtattgctgtctttgagccaggtagctccctgggataaggacttttctccatcatagactgttcacatgtgcacatttaatctgaatgataggctcacatattcctccatctatcagtgttccaatatgacttggaacttcagcctagaatttatgaatatctttttaaaaatatcctgtgcttgctttggcagcacatataccaaaattggaacgatacagagaagattagcatggtccctgcacaaggatgacacgaaaatttgtgaggtaaatttgagaggttgttttttctatcagcatttgcatttgctataattgtattgtggacttaggagagaggagagacaagt

SEQ ID NO: 380419 - DNA, 607 bp, Homo sapiens
ccatcctttggcatgggaagccattccagaaacttcaaaaccttagttctccctgtgcaattaattaagattcaataagagtactaatttggattcctgaaagtataatgctgggctgcttaggcttagtgttcattgagataaggaagagactagcagtgaggttggtgtgggacacctgactagcatatttcattatacagactttcaattaactctgttttgagttgttcttcgtactcccaccttgcctggtattgctgtctttgagccaggtagctccctgggataaggacttttctccatcatagactgttcacatgtgcacatttaatctgaatgataggctcacatattcctccatctatcagtgttccaatatgacttggaacttcagcctagaatttatgaatatctttttaaaaatatcctgtgcttgctttggcagcacatataccaaaattggaacgatacagagaagattagcatggyccctgcacaaggatgacacgaaaatttgtgaggtaaatttgagaggttgttttttctatcagcatttgcatttgctataattgtattgtggacttaggagagaggagagacaagt

SEQ ID NO: 380420 - DNA, 589 bp, Homo sapiens
ataccaaaattggaacgatacagagaagattagcatggtccctgcacaaggatgacacgaaaatttgtgaggtaaatttgagaggttgttttttctatcagcatttgcatttgctataattgtattgtggacttaggagagaggagagacaagttattttcagtgcgccattttgaactttaaaaggcactttcagacacttggttttaaaagatcaatccaggccgggcgcggtggcttacgcctgtaatcccagcactttgagaggcctaggagggygggtcatcaggtcaggagatggagaccatcctggccaacatggtgaaaccccatctctactaaaatacaaaaaaaaaaaaaaaaatacccacaaaacaacaacaacaacaacaacaaaacaaaactgtagtcccagcaacttgggaggctgaggcaggagaatcacttgaacccaggaggtggaggttgcagggagctgaaatcacaccactgcactccagcctggtgtctcaggagactccatctcaaaaaaaaagaaaaaaaaaagattaatctagcaattatatggagaatggactgtaagatggag

SEQ ID NO: 380421 - DNA, 649 bp, Homo sapiens
aagcaattaattatgcaggaggaaaaactctttaaataaagtgaagaaatttttgaagggagaagaagaaatatagttttatcaaatgttgttaataagtcaaataagtctgacattggatttagtgacctcctttgtaatggagatttccgtggattaatggcaaaagcctaactgaatattttcaaaagaaaataggaggaggggaatttcaaactgtgagtggaaaatacacaaacacacacacacacatacacacacacgcacacacccatacagttcagtttagttgtaaaggaaaggatargaatgcaatgataggtaaaaaggaaagagggtctagagtaatgttattattatttttaagattggaaaataaaatgccacatttgcatactattggaaaagtctgagaaaagagggaatatttggaacctggcattttgtcaatttcctttgaaaggttcattgaagaggttccttggtgatcccatgtcctcccactgggccaggactccagatgacccagagggtctaaggttgcaaagtcactgcaaccagcactataaagtcagcaaggagaagtcgtgctgccagagccctgatctaggactggtgactggagtgaactggaactgcagacagcacc

SEQ ID NO: 380422 - DNA, 577 bp, Homo sapiens
aaggattttaattataacattacttgcaatgacaaaaataaagccaacatttaaagcagtgcaggaataggtaaatattgtgatatagcattattaaatattctgtagtcaccaaaatttttttggataaagtataagacattcacaaaagctaaatctaggggtgtatatatggttaggttttattctattaattcttttctcttattacagtttcttaagtcatttatgccatctttttaaacatgaraatacaatatatgttaattatggagataaataccatcagcaaagcataaactatgaagagaaagtctgcatatcctttttcttcagtgcaggcaaattgaataaatgattaggttttaactggttgaaaagctacagtaaaaagataaaatatatttcaaagaactggaattatagcaaatatgcaaagaaaagaaacgtaaagttaatagcatcttttagaatttttgactcattttaatttatgtaattgcattgtattgtgtagtgaccaaaatgatatattattgaaggtaaataccatacatgtgtaaaagtatgtagaaag

SEQ ID NO: 380423 - DNA, 524 bp, Homo sapiens
gactgaaattagtgcaaaggcctgacagaggggagagagacagcaatggagaagaattctctgaacaagacagtggaaaggccctgaggtaggagctgatttggtgtgttggaggactagcaatgagacctcctgattttaaagcagagtcaacgagggaaaaagaggcagatgtctttgaagagacaatgatggattgtgttggattttgtagaccactgcaggaagtagcctgtactagtcactcaattactccttatcagagtacttacagttacaaatcatcctttgcttttccaaaattgggacttggwgtctctatcagttaaacagaataatcttcataaagattcaagtctcttcattaagtgaaataaaccaagcaaccacgatcatgcagtatcatgtttgtactgagaagcggcagtatctataataaccttaagtttcctgatcagaaccattgtcagcatgtggaaattaggcttgtctctatccagaaattttaagcactattaaattcc

SEQ ID NO: 380424 - DNA, 544 bp, Homo sapiens
gaacaaatatatatgtgggaagacataacttgtatgtgtgctgtaaattatatgtgcgatagaacctaagtgtcttattatctgttactgatatttcttgttcttgggtggccatatccatttaytatgagataagtctgaggtttaaaggtagcttagtatccctgattttagaagagcctcaatttcaaatattcaatcaattcgaagttctgactccccctcccggctccttctgccatgtcaagttttccccttcatctccactttcccaggttctttacaagggacattttagctatcttcttggcatctagaagatgagcatttcagactcttgctctattttgggtacctactggccatcactgagaggtctgccaatcaccaggcaagatttgttctgtatccacatggtgttgctagaagtattatatcttttggtaagagaggttcttcccttattatactgaaaagattgtgtccagttctctacttgatgctgtgtgtgtactgtaacaaaatttaagattattgtttgtga

SEQ ID NO: 380425 - DNA, 581 bp, Homo sapiens
tccagtgggtccccagactcatcccatagtaatttccccagtgccagaatgcataattggcacagacatacttagcagctggcagaacccccacattggctccctgattggtagggtgagggctactatagttggaaaggacaaataaaagccattagagctgcctgtacctagaaaaacagtaaatcaaaaacaatattgcatccctggagggattgcagagattaatgccatcatcaaggactttaaagatgcatgggtgctgattcccaccacatccccattaaactcttccatttggcctgtgcagaagacaaayggatcttggagaatgaccatggattatcataagcttaaacaactggtgattccaattgcagctgctgtaccagataggctattcaggctatttcattgcctgggcaaattaaacatctcctggtacctggtatgcagccattaacttggtaaatgccttgttctccatccctgtccataaggaccaccagaagcaatttatcttccgctagcaagaccagcaatgtacgtttaccatcctcccttgggggtatatcaactct

SEQ ID NO: 380426 - DNA, 566 bp, Homo sapiens
tggatctgcacaaagtaaattgaaaaccttatggaaagaattcatcattctagatgtcattaagaatatttatgactcatagaagatcaaaatatcaacactcataagagtttggaagaaattgacttcaagtctcatgaatgactttgaggagttaaagatttcagtggaggaagtaactgcagatgtggtagcaacagcaggagaactaaaattagaaatggaattggaatctgtgactgaattggtgcaacctgagaataaaactttaaaggataagaaattacttattttggataagcaaagaaagtggtttcttgagatgaaacctcttcctggtgaagatgctatgagcactgttgaaatgacaayaaatgatttaaaatattacataaaatttgttgataaagcagtggcagggtttgtgaggactgactccaattttgaaagaagttctgctataggtagaatgctatcaaacagcattgcatgctaccaaaattttatttgtgaaaaaaaaaaaagagagtcagttgatacaggaaacttcattgtcatcctatttt

SEQ ID NO: 380427 - DNA, 566 bp, Homo sapiens
tggatctgcacaaagtaaattgaaaaccttatggaaagaattcatcattctagatgtcattaagaatatttatgactcatagaagatcaaaatatcaacactcataagagtttggaagaaattgacttcaagtctcatgaatgactttgaggagttaaagatttcagtggaggaagtaactgcagatgtggtagcaacagcaggagaactaaaattagaaatggaattggaatctgtgactgaattggtgcaacctgagaataaaactttaaaggataagaaattacttattttggataagcaaagaaagtggtttcttgagatgaaacctcttcctggtgaagatgctatgagcactgttgaaatgacaataaatgatttaaaatattacataaaatttgttgataaagcagtggcagggtttgtgaggactgactccaattttgaaagaagttctgctataggtagaaygctatcaaacagcattgcatgctaccaaaattttatttgtgaaaaaaaaaaaagagagtcagttgatacaggaaacttcattgtcatcctatttt

SEQ ID NO: 380428 - DNA, 540 bp, Homo sapiens
ctattttaagcaaatacacaggtaatgaattattcaaaatgagtgtattagacatactgtccacctgagagtctaacaatttaccgattttcattgctttaatatgatctattcaaaggaaagtgctcagaattctgtgaatatttcatttatcttcacatcacctagagactcatctttgccttttgtctctattcaagtaattcattccatccttttttatttttatttttatactttttatgtacagagatgtttattatattatcatagcagaatacyagaaagtataattaacaatataaaagtgttaaatcatggtacagatacagaatggcattttagatatccattaaagatttttacaaagattttcaaccccatatggaaatatatatcacataattttaaatttaattttacattttttcttacaagttttagattcagggggtaaatgtacaggtttcttacatgtgtaaatggtgtgtcatggaggattagtgtacagatttcatcatgcaggtcataagcataata

SEQ ID NO: 380429 - DNA, 540 bp, Homo sapiens
ctattttaagcaaatacacaggtaatgaattattcaaaatgagtgtattagacatactgtccacctgagagtctaacaatttaccgattttcattgctttaatatgatctattcaaaggaaagtgctcagaattctgtgaatatttcatttatcttcacatcacctagagactcatctttgccttttgtctctattcaagtaattcattccatccttttttatttttatttttatactttttatgtacagagatgtttattatattatcatagcagaataccagaaagtataattaacaatataaaagtgttaaatcatggtacagwtacagaatggcattttagatatccattaaagatttttacaaagattttcaaccccatatggaaatatatatcacataattttaaatttaattttacattttttcttacaagttttagattcagggggtaaatgtacaggtttcttacatgtgtaaatggtgtgtcatggaggattagtgtacagatttcatcatgcaggtcataagcataata

SEQ ID NO: 380430 - DNA, 603 bp, Homo sapiens
gggttctccactggctggagtcctgttccttccaactstccaagcagctttttctgtctgctcaaatgtctgtgggggtcatggggtctcctgcagctaggattctggaagtccatggtgagggtgggccactccacacctttcaaactcacacctttttcaggagtcacttgaggccaagaaggagtcctggtggttgacaaccatatacaatgttcctagctttctcccacttcagtgcagggtctatgttgtccctgtatccactctcaatgccttccttccatagatctgtccagagtgtgctcgtcttcttggtaacctggtctctcactggaagaagatattcctggctccatctagtcagccatctttgtttccatcaatttttcaacatactttttcaaactacattttgctatctaacacactagaaaatcttctccaactcttttatgcctatccccaccccaaacaagattagcctttttcactgtgatctcctgtttgtatctgtgattacccaatatcccgtattccagataaggattgttgcaaactgatgttcaaccaaatgtaattcaatgatgaaggtccttaagt

SEQ ID NO: 380431 - DNA, 603 bp, Homo sapiens
gggttctccactggctggagtcctgttccttccaactgtccaagcagctttttctgtctgctcaaatgtctgtgggggtcatggggtctcctgcagctaggattctggaagtccatggtgagggtgggccactccacacctttcaaactcacacctttttcaggagtcacttgaggccaagaaggagtcctggtggttgacaaccatatacaatgttcctagctttctcccacttcagtgcagggtctatgttgtccctgtatccactctsaatgccttccttccatagatctgtccagagtgtgctcgtcttcttggtaacctggtctctcactggaagaagatattcctggctccatctagtcagccatctttgtttccatcaatttttcaacatactttttcaaactacattttgctatctaacacactagaaaatcttctccaactcttttatgcctatccccaccccaaacaagattagcctttttcactgtgatctcctgtttgtatctgtgattacccaatatcccgtattccagataaggattgttgcaaactgatgttcaaccaaatgtaattcaatgatgaaggtccttaagt

SEQ ID NO: 380432 - DNA, 607 bp, Homo sapiens
gacacattcaaaccattgcgcccatcttctggtgattttctggcaatctttggtgatccttggcttttatgaatattaatttttgtttttatcttcacatggtatttttcccctgtttgtgtgtctctgtgatcaaatctccctttttttcttttttataaggataccaktcatatcaggttagggcccaccctaatgatctcactttagttaattctttagttaattacatctgcaatgaccctatttccaaataagatcagattgtgaagtaccagaaattagcatttcaacatatgaattgcgggtaggggtagacacacaatttaatctataatgtagccctctttcttttttttccttttacaaccactcattgttttacactggattgaaatgtttgagtgtaataagacagagcaaaaattatatggtaggttttaattaggcaatgacaaaatgcaggtcatgatttcaaaagatgaactgaagtggaaaaatgaaagtcaggaaaggctatcatcagtgtgataataaaagttaacagaagttggaaataataagttttccattttgatggaaaattaaaacaaaagagaatatcttt

SEQ ID NO: 380433 - DNA, 607 bp, Homo sapiens
gacacattcaaaccattgcgcccatcttctggtgattttctggcaatctttggtgatccttggcttttatgaatattaatttttgtttttatcttcacatggtatttttcccctgtttgtgtgtctctgtgatcaaatctccctttttttcttttttataaggataccagtcatatcaggttagggcccaccctartgatctcactttagttaattctttagttaattacatctgcaatgaccctatttccaaataagatcagattgtgaagtaccagaaattagcatttcaacatatgaattgcgggtaggggtagacacacaatttaatctataatgtagccctctttcttttttttccttttacaaccactcattgttttacactggattgaaatgtttgagtgtaataagacagagcaaaaattatatggtaggttttaattaggcaatgacaaaatgcaggtcatgatttcaaaagatgaactgaagtggaaaaatgaaagtcaggaaaggctatcatcagtgtgataataaaagttaacagaagttggaaataataagttttccattttgatggaaaattaaaacaaaagagaatatcttt

SEQ ID NO: 380434 - DNA, 674 bp, Homo sapiens
caatatgtatttgtctatatttattatacgtaagacactaaattgacctaacatgtaactacagtttttttaaatgatctagtagtgctagaaaaataatcaatactttacagatttttaattttttatggtgttgtgttgcttcaaagtaaatctgaatatatctataacaattaaaataacacattaggataaaagtgtaggaattaagtgtactatgacatacagaagaaaatatcaaaagaatctatacaagtaataactgcaaatattcatcaggaaggtttttaattgcagttgataattaatattaatatagtaatgttcaartaaaaatattcatgtgtttcttgagtttcattaatcatatggtaaatcataagaatgatataattgcttgtaagttagagattacatctgtatttgctttttcaacttaatttgatttgtactaaatatgtattgttgttagctgattggaattaatattagtccattaatactcataaataaatacaacaaaatattgaaatttatacatttttaagtgatttttagaagataattttggatgaagaagaaatatttgtcaattagaatgtgatttaataacatttaggatgaacttatactaaacaacccatatcttatgttactatattttgtgacaaaat

SEQ ID NO: 380435 - DNA, 527 bp, Homo sapiens
taacttctttttatctataagcatgctggtattggatagaatgcaataaaaacaccttagattcttagtctataaaaaaggaagtagtagcaaaagtgaactaatctgacaccagwattcactcatgcatgaaagctgaaatgaacctttattcatatgtatttattgatatttattttaagtagtctgcatgtcagtgccattaaatggattgtataatctcccattttcctcagtcttcactacagccttttttctgtatctgctctccactttaatcacttccatttcttctagagatatttaatattgtgaccccaacaggaatgtgttaattctttggtgccattttctctttagagttatatcccctgtttggctcaataaatatttattgagtaaatgaattatcatcagtgtaagttacacacaaataactttttcatattacctatagcttattaacagaaaaaatatgcttatctgaaatggcaagacttacatctgtttgcttaattttcattgtg

SEQ ID NO: 380436 - DNA, 392 bp, Homo sapiens
ggaatttttacaaagtaatagatttcatgtaaaattatgaaattcaagggaagtaaaaatgtttactgtgaataatactagaatgcctgataaaattacctgcatccgtgctgttattacttcagtggtgcaaacatgtgacaaaaaaaaatgttatttagttttttaggatgtattatttaataagagatttctcatatccattcactatgattgcagttaacaggactcccagtattatcawgggattaaaggctcatttttccatgtcatctttatctaaacttccaattattttgagaaagttattagccactttgttttggcagaagcatttttatttaataatacctttgcaagctttaaggtaagatacataaattactgaatgc

SEQ ID NO: 380437 - DNA, 610 bp, Homo sapiens
ttggtgctcaagtttcagatacaagcaggttaatatctggttactagacagttattgggtaaccacttaaaatatacatttttaaatgtattaggatggaatgtgtccacacatctgtgggcacatagaagaatataaggaaaaatgtagaaatgctcctggtgaaacaaatgaagacattttttttcccagccatgtggtgtagctaatttaaagtttggaataaaaaataaactgcaaattgtttgatatttctgaaaaactcaatgcaatccaaatggaagggagaggaaagggttattagtcttccagaaggttgatgggacttgtaaggaggaattttgaattaaattataaatactagttatgttaaatgtgagttgcttttaggtgtttggatatatgggaatggaaaacagcagatgtctgactgaaaaatcagcatgggttgttgatgccatgggggtgaacttactgacaggagattataggtagaaagaaaagacaagaagaaattaaaactatgaagaatagtcackgaagggacctgggaatgagtcagtttgataataagagcaacaaccaaaacaattaatatttattggttgct

SEQ ID NO: 380438 - DNA, 422 bp, Homo sapiens
tgtgtaggtcagtgatttcttctgtgggccaattccaatgatagggaatgctgttatgaaattagtctctctattgtcattgtggattataagtttccaaaatagcagagggtagatggcagcatttaattcagtggcaaggtgaacataactgtataatagaccataaggttagaaagactttgacagtagctaatagacctatgtcaataactaatagactacagtgttcctaaggacaaaacagatgagctgccaagaattatattgcttgacttatataacccgaaataatcaagagcatgcaagcagaaagctgatgtcagayatcacagtggataataagcccttcttagttttcagacctaattcaattgacagacacaaaaaccactaattgaaagggaaactgtgaccattgt

SEQ ID NO: 380439 - DNA, 536 bp, Homo sapiens
tgtgtccttatgtcgactatctttcatgttttagaatgtttatagcagcaatattctctatgatattataatggaattcaacacatacccatttaaaatagtgtgaataaatagattgtggtatataccactatgaaatattgtactaagatgaaaataaatgatttacaactactaacagtaatgtaaatctcagaaataaaatatggaattacgaagcagaacagtgaatattctaaaggatttagaaatattgacaaaaatgaggcacaaggtgagttcttgtggtggtcttgggwtttcttgatctcttaaatgatttttaaaataatttgcattgctaaccaaagatcagtgagctctgcagaggcaaaggagaactttattttctaaaaaaggaatctgcagattagggagctgcagccctgggtgcaaaacaaaagtgcactctgaagaacaaagggaacgtctgccttaattaaacaaggacagttgtcacccaggttctcaatcagattcatttctgcaaatgaaag

SEQ ID NO: 380440 - DNA, 622 bp, Homo sapiens
tccttgtttccctatcaaatgcaatgctggaacaagaagcaagaggaacagcgactcaagcctgcattaaaaggaaagaagacagtatgatgatactaaaaaaataattattgactatttttaaatatgtacccatcttcattgccacagaggcaaagcagactgcctctacaccttttcatccctgcagccacaatatcctgctttttctttctccagtcttgttagttctgatattcattcaaaatgattacattcakgaaacaaagtgtgtgataataaactgaggagataaaaaagaggatgaatgaaaatcaagaactcacagaatagggaccctgcattcctctgtaatagccagtgatcgtagtaagtttggtaagaacacatatctgtggcgtttgctttcaagattagatgtaatgtattgcctgagaggtagaaagacaaagataatgggtaaggattaatttgttgggggaaaaatgagggatatgaaggtcttcaggtcaggtcaagaaacctatcctcaatcttttatcagcagctgtttttgacataaccatttaattttgacccttcctaaaaagagaaatataatctttgtttaaagaaactgttg

SEQ ID NO: 380441 - DNA, 635 bp, Homo sapiens
tttaaatagtcatactgccacaaaaaattaaagtacaaatttggtgctaatctataaaactatgtgacttaaattcttttctaaggtaggattttttctaaacaacaattgcaactattgtttttaacaaaaagtttaagctgccaactcaaatactatataataatttttggtttgttygaaatgtccagttctcttattccaaggatatattatgattgtacttttctacttacttggtttcaaagcataaatgtgtattttagcccattttctgttgctataacagaatacctgagactgagtagtttataaagaacagaagtttatctagcttacagttctagacactagtaagttcaagattgtgcagtagtcacctctggaaaggaccatgacatgctgtgtcatatggcagatggcatcacatgggtggcagcacttgcaagagcagcaaatgagtgcctgcaaaagagataggggcaaaggaggccaactcactttaaaagaacctgatctcacaaaagtctcaagcgtactaacccagtctcatgagaaagacatcaatcaatcttaacaagctgatcacctcttaaaggcctcacctcccaacaccattagattggaaactaaat

SEQ ID NO: 380442 - DNA, 226 bp, Homo sapiens
attgcaaaggtagcaatgaaacattattggggcaaatgaaacagcaaatgcaaagaaacagaggtataaaagtgcatggaatttgggatagatggaaacattgaccagattcttcatccctccctgatgtatwtgcttgctatggtcccatctttggcagcaggtgcttctctaatctgtgactatgggcataaacatgcaacttgatttaactaacaaaatacag

SEQ ID NO: 380443 - DNA, 673 bp, Homo sapiens
gatcaagcacacttcatatgtagtagtcgtataaataaaaggaaaatggtcagctttaaacatctgccacatccagggacaatgtaccccagacctattcccatagactgagaatgtttctgtgagcggcagctaactccagatcttatttgtgatgtaaaccaaaaagtgtctgagacaagtctcaatcagtttagaattgtgttttgccagggttatgaatcataacctgtggcacagcctcaggaggttctgagaacatgtgcccaacgtggttggattatagcttgcttttatatgttttagcgagacataaaacatcaatcagtacatgtgaagtatacattggtttggtccagaaaggcaggacaactccaaatagaggcttagaggtcttaagtggattcaaagcttttgtggttggcaattggatgaaaaagttaagttattacctaaagacctggaatcaatagaaaggagtgtctaggttaagataargggttgtggagaccaaagttcttattattttgatgaagtctcatagatggtcacccccaggggcaatagatagcaaatgtttcctattaagactttaaaatgtgctagactctcagccaatcttttcaggatcagaaagagacctggaaaggaaagggattctgtagaatgtaaa

SEQ ID NO: 380444 - DNA, 606 bp, Homo sapiens
aaagctatcctaagcaaaatgaacaacaacaacaacaataaaaaactggaggaatcacattatgtgacttcaaattatactacagatctatagtaaccaaaacagcatggtactggaatttaaacaaacacataaaccaatagaacaggctagggaacctagaaacaaatccatacacctatagtgaactcattttctacaatgatgtcaagaacatacactgggtgaaggatggtctcttcaataagtggtgctggaaaaaatggatatccatgtgcagaatgatgaaattagaccccatgtctcatcatatacaaaaatcaaatcaaaatgaattaaggacatcaaactatgaaactactacagaaaaacttttgggaaaatctacaggatattggtcttggcaaaaatttcttaaacgatgtaccaaaaacataggcaaccaaagcaaaatggacaaatgggatcacatcaagtcataatacttctgcacagcaaataatacaatcaacaaattgaagaggcaacccataraatgggacaaaatatttgcaaactacccatctgacaagggattagtaaccagagtatatgaggaactgaaat

SEQ ID NO: 380445 - DNA, 621 bp, Homo sapiens
gtggcacactggtcttgaagctcagtttacatgaagcatgctacttttatttattgtctatatttgtttggatgctggtatgtgttttgggggttcttatgaagcctatcgcagaagctaaatcttcagtaggttacccttccttgttaaccatgctgaggtacctgattggtcaatgaagaaaacatttactgccaactaaatttaacatctagcctaattcttgttacaacatacaagacagtcctttatttgcatggttctgatatgaacagattttatttaccatgatttatttaacttaccctagccctctacaaccacagttcaaatttcaatacccccttatatttacactgagaaattgcataatgtacaaacttgctacttcttcagtccatacatcgctatgtaaaaaacagacacacatcatgatcagtgatgaatcttgtcacttctttcaagatctgttrgtgactggccaccatgcatttgttattcacttcacactcaaaaagcaatgctgccgttgtattgcctccttctctcccctgataaattcaggagctattttacaaagatagatagtcaaaagagggaattgaccaataaagatgaaaa

SEQ ID NO: 380446 - DNA, 494 bp, Homo sapiens
attgtactttccttaaaattttcaacacaggttaaaatgagtgtaagagagattgtcaaaatgtggaaatttgctactaggatatttagaaactatatatcatatgagctttgaatttggttagggcataatgagacagaattgatayctaatgctaccaaattttgaagtaaatatatcaatcagctttatctaaaataatatggtgtcacagactgccccaaatttatgtggcacacaaaaatccacccaatttcttgcctgaagaagacaaactttgaaatgctgatttatacacaaaaagttccccatggcttcaggctgattctcaggtttaaaattgcactgtgctcagttttgtctattttcttatcctacttcctacattcccttgctgttccctcccagaagtacttccttcataaatcacttatacctaaatgcttgactcatagtctgcttctgggagaacaagatccaagaagcatcacctt

SEQ ID NO: 380447 - DNA, 494 bp, Homo sapiens
attgtactttccttaaaattttcaacacaggttaaaatgagtgtaagagagattgtcaaaatgtggaaatttgctactaggatatttagaaactatatatcatatgagctttgaatttggttagggcataatgagacagaattgatacctaatgctaccaaattttgaagtaaatatatcaatcagctttatctaaaataatatggtgtcacagactgccccaaatttatgtggcacacaaaaatccacccaatttcttgcctgaagaagacaaactttgaaatgctgatttatacacaaaaagttccccatggcttcaggctgattctcaggtttaaaaytgcactgtgctcagttttgtctattttcttatcctacttcctacattcccttgctgttccctcccagaagtacttccttcataaatcacttatacctaaatgcttgactcatagtctgcttctgggagaacaagatccaagaagcatcacctt

SEQ ID NO: 380448 - DNA, 617 bp, Homo sapiens
taattaaacctctttcatttataaattacccaatcttaggcagtgctttataacagcatgagaacggactaatacaggaaacataacaaaagaggcaacaattattttcattattttccaagtgtctgaacgaacagacttgttcatgtttacaacttaaaacaaaattattgccaatatcctgaagaaagatacatgttctgttgcattttaacattttatatgcatttggggttatgtttatttacttccccaattgccaagagaatagtattttcactttaaggtgaggattttaccattgcattccktaaaaatttatatctaagttttggaaaagtaaaatttggaacccttcctaattttctaccttgtttatttccccttctttttgtttcctttttgcctccatttcttcatttgtttttctgatttgtcactctttccatttcatcttttagtaaggtggggtaagtaaagcacagtattgagagtcagatgacctgatttcaaatctaaattctgtaagtaactatatcttggtcagatcacttacaatcttgagccctaaattaattcctctaaaactttagaggattaaaatagattaatttttc

SEQ ID NO: 380449 - DNA, 547 bp, Homo sapiens
tcaatgactcctaggagaaataaacgtaattcccatgtacatataaggaatattgggtaacataattgaaactgtattcagttatggtattaaaagtaaaccttctttgtacttccatagtatcagggacagacattccacaattatgaatataccagcaatatatatttatatattttaaaatgtatatgtatatttatagmatatattgaagctgtataggggtaactgaccttgtctttttcatttttttattcctagcacctccacagtgtgtggactactcaataggccctcattaactttttcagaatgaagaggcatagctggcatggtggctcagttctgtaatgtcagcactttgggaggccaaggtgggaggatggcttgagacaagaagttatagacaagcctggtcaacatagcgagaccctgtctctacaagcagttgaaaaattagccaggcataatgacatgtgcctgtagtcttagttatacaggaggcggaggtcgaaggatcacgttagtccaggaggtcgaggctgta

SEQ ID NO: 380450 - DNA, 593 bp, Homo sapiens
aagtataagggaaacatcaaaaagcaagaaaatatatgacacctacaaaggaatgcattaattctctagcaacagatctcaatcaaaaacaaatttgtaaaatcccagaaaaagaattcaaaatgctaattttaaataaactcagcaaaatacaagagaatactgaacaacaatacaaagaaatcagaaaaacaattcagcatatgaatgagaaatttgccaaacagctatcacaacaaagaaccaaacacacttcaggaaattaataatttaaatgaaatgcaaaacacatttgaaagcttcaacaatagactggatcaagcagaagaatctccgtacttgaagacagttcttttgaaataacttagtcagacaaaaatagagaaaaatgaaaaaaaaatgaccaaagtctamatgacatattggataccataaagtgaccaaacattcaaattttcagtatcccaggaggcaaagagaaaatgaaagatttggaaaacctattgaacaaaatgataagttaaaactttccatgtctagtaagagatttagaaatccatatacaagagcctcagtgatccccaaacagattc

SEQ ID NO: 380451 - DNA, 580 bp, Homo sapiens
ttaaagaaaaaaactcagtcctggcagcattcatcacctactaactgaagagtcttgtgcgtatgaatagctagcagctatatgcaaatactatgctgagtgccttgggtgagcctctgagactcagcacattaccagctatggtggtcatggggcaaaagtccttctgcttgagaaaagcccagggtaaggtaaaggagactttgtcttgcaccttaggtaccagcacagccacagagggattgaacaccaagcaggctcctagggtccctgattccaggacttgacttttggttagcatttctggagctgctctgggccagaggggagttcactgctctgaagagtgggtcccaagccaggcagcattcactacaagctgatttaagagccgttgggtcttcaggcctcaaggaaacattgacagtagtctggtagtactcctcatgacctgtactggcagtggctatggagtaaggctcctctgcctttggaaaaaggagggaaggktgtgaaggattgtttcttgtggtttgagtgccagctcagatgcagcacgatagaacaccaggtagactcc

SEQ ID NO: 380452 - DNA, 488 bp, Homo sapiens
ttcattcattgctggtgagaattcaaactgatatagcaacttcataagacactctggcagttttttatataactaaatatacccttattttatgatccagcaattgcactccttgttatttacccaaatgagttgaaaacatgtccacaccaaaacctacacatagatgtttgtggtagctttattcatagttgccaaaacttggaagcaaccaaaatrtcttttagtgggcgaattgataaataaaacagtggaacattcagacagtggagtattattcaacacacaaatgaaatgagagccatgaagagacatggaggaaacttacattcatattactaagtaaaagaagccaatataaaaaagttgtaaactgtatgtttccaactatatggcattctcataaaggaagaacataaaggaagaacagagaagagagagagataaataggtggaggacaaaggattttttagaacactgaaaacac

SEQ ID NO: 380453 - DNA, 612 bp, Homo sapiens
ccacttctattcaacaaactactagagatcataacaagggcaattagacataaaactaaatacaaaggcacccaaatttggaaaaaagagaactgtytctatttgtattagacattctcttttatgcagaaaattctaagaaatatacatacacacacaattagaactgataaatgaattcagtaacattgcaggacacaagacaaatacataaaaattaattatttctacatactttcagtcaacaatttgaaaatgaaattaagtaaactgcaatagcacaaaaaaagagtaacatacagattttctttttaaaaaaaagagtgtaagactcacacactgcgaactacaaaatattgctgaaagaaattacagaagatttgtatcatttatttgggttggtaatattaaaaatcctctcttctaggtatctgaaaaaaatacaataaattattgtttactatagtctcccgacagtgctataaaacactagaacttattcttcctatttagctgtaacttcgtattcaccaaccaatctcttcctatccctccttctcagtctctagtaaccactattctactccttacttctactagatcaaattcttc

SEQ ID NO: 380454 - DNA, 444 bp, Homo sapiens
tggaaaaaagagaactgtttctatttgtattagacattctcttttatgcagaaaattctaagaaatatacatacacacacaattagaactgataaatgaattcagtaacattgcaggacacaagacaaatacataaaaattaattatttctacatactttcagtcaacaatttgaaaatgaaattaagtaaactgcaatagcacaaaaaaagagtaacatacagattttctttttaaaaaaaagagtgtaagactcacacactgcgaactacaaaatattgctgaaagaaattacagaagatttgtatcatttatttgggttggtaatattaaaaatcctctcttctaggtatctgaaaaaaatacaataaattattgtttactatagtctcccracagtgctataaaacactagaacttattcttcctatttagctgtaactt

SEQ ID NO: 380455 - DNA, 486 bp, Homo sapiens
ctttgccttgtattttcctttaccatatcccttttctttttatttttacaataaatttcattattttttacttcataaataattcatgarcatataatttaaaacaaatagatcattacagaaaaagccaaagaccattttgaaaatgactactaatcaatgtcccctcctcctctgcaaataaagcaaactaatttaccaattggaaaacttactgcaaaacttatttttcttcttctctgcatttaacatataaataactagctttagaaaatacattaggaagtggtatactttaaccccaaatgaaatattatgtacaattctcccattaagttttcctcttaaaatacctttaaaaatctttctagctatgtctctcattaaaaatcaaaacaataaggcattgcatagaattacatagcatgaatatgtcatattaatagtttatacacacttatattgctaaacatgtaggttatttgt

SEQ ID NO: 380456 - DNA, 486 bp, Homo sapiens
ctttgccttgtattttcctttaccatatcccttttctttttatttttacaataaatttcattattttttacttcataaataattcatgagcatataatttaaaacaaatagatcattacagaaaaagccaaagaccattttgaaaatgactactaatcaatgtcccctcctcctctgcaaataaagcaaactaatttaccaattggaaaacttactgcaaaacttatttttcttyttctctgcatttaacatataaataactagctttagaaaatacattaggaagtggtatactttaaccccaaatgaaatattatgtacaattctcccattaagttttcctcttaaaatacctttaaaaatctttctagctatgtctctcattaaaaatcaaaacaataaggcattgcatagaattacatagcatgaatatgtcatattaatagtttatacacacttatattgctaaacatgtaggttatttgt

SEQ ID NO: 380457 - DNA, 486 bp, Homo sapiens
ctttgccttgtattttcctttaccatatcccttttctttttatttttacaataaatttcattattttttacttcataaataattcatgagcatataatttaaaacaaatagatcattacagaaaaagccaaagaccattttgaaaatgactactaatcaatgtcccctcctcctctgcaaataaagcaaactaatttaccaattggaaaacttactgcaaaacttatttttcttcttctctgcatttaacatataaataactagctttagaaaatacattaggaagtggtatactttaaccccaaatgaaatattatgtacaattctyccattaagttttcctcttaaaatacctttaaaaatctttctagctatgtctctcattaaaaatcaaaacaataaggcattgcatagaattacatagcatgaatatgtcatattaatagtttatacacacttatattgctaaacatgtaggttatttgt

SEQ ID NO: 380458 - DNA, 598 bp, Homo sapiens
tgtaagtccatttctgcatgttctacttcattcacttcattaatctatcaattcatcttccaaaatataattccartcactatacctttactacatgtcttaatatctggtaatacaaatcttacctttatgttctttttattaatttttttgcaaatgcctttaaatgtcaaggatgacaactttaaaagaagagctaaaaaagactgaaaagctgagcagagctttcagtggtcaccaggcactcaatagaagaaaagtacatttgagaatttgctaaaagagaaattttactaaaaagtcaaagctgtctcacctgatacgcctagaaggctatatcttagggaaagtggttaaatcagaggtagagaaagttttacaaagtgtaaaatccgggttagttaatttcctgattgaactgaggaaatctgtctttatgcaagctgttggaaggtagaactaatcatatcagtaggaaaaatattatacagttcttcaacagttttctaaatatacaatgtttagtactcaaaaaattactatgaatgcaagaaacaagactaagagaaaataacacaatagatcaagacccagaggc

SEQ ID NO: 380459 - DNA, 601 bp, Homo sapiens
ttatggaggctgagaagtccaaggtcactggtccacttctggtgagatattcttgctggtggggactctcctcagagttccaaggcggcaaagggcatcacaagacagggtgactcaatgggctaggtcagatctctttccttttcttataaagccaccagttccatgccatgataacctattaattcattaacccatcagtccattaattcataagtctatgaatgaattaagccttcatgagggcagagaacaacatttatttatttcataaaacattattattttatcttcaaaataaaaatacagtagaaaggwattaaagctaaaagtttattcttttgaaacactaataaaatgaacaaactttgtactatcaaaggaatagaaaaaaacaaataaattaccactattgctagtaatagatatatgacaatatattctgcagaacataaatgtaataagaaatcattctaggtaaccttataccagtgcatttgaaaatataaagaaatagacatgacttgaaagtaataaaagaggaaatacaacacttaaataattctatatctattacaaaaagtgaatctttaatttaaaa

SEQ ID NO: 380460 - DNA, 559 bp, Homo sapiens
caggtatggtcctcctcaaaaccaacagcatatcactgcacatcgaagcacacctcaggcagagaatgaggagtggtaatgtctttattgyaattgtattttaatactgacaaccagaaagtgattgaattttgttgagtttacctgaaagggacaagaataaatgttttgccatttagtggaaataatgaatcaagatagaatttggtataacagtaaaataaagtgcatttgtacgtttgtaaagttgtatcctgtaaaaatgttacctgacttatgtatttaaagtgaaataaactgttctatctctgaagaaatattgggcaatattacagatctcatactcgaaagacttgccccttaggcacatctgtctccccaaagccatgcagacagacttcttcaactgcaactggtagatgaatgtaaaggaattaacaagccaaaaccaatttgaatcagatgagatttgcatagtttctgttatttcatagaatctcatcatgaaattttagtatgtgctctcaggaaaaaaggatgttaaaaccaggttaaaaaa

SEQ ID NO: 380461 - DNA, 612 bp, Homo sapiens
cctcaaaaccaacagcatatcactgcacatcgaagcacacctcaggcagagaatgaggagtggtaatgtctttattgcaattgtattttaatactgacaaccagaaagtgattgaattttgttgagtttacctgaaagggacaagaataaatgttttgccatttagtggaaataatgaatcaagatagaatttggtataacagtaaaataaagtgcatttgtacgtttgtaaagttgtatcctgtaaaaatgttacctgacttatgtatttaaagtgaaataaactgttctatctctgaagaaatattgggcaatattacagatctcatactcgaaagacttgccccttargcacatctgtctccccaaagccatgcagacagacttcttcaactgcaactggtagatgaatgtaaaggaattaacaagccaaaaccaatttgaatcagatgagatttgcatagtttctgttatttcatagaatctcatcatgaaattttagtatgtgctctcaggaaaaaaggatgttaaaaccaggttaaaaaaaatctgtcattcaaatcacattctttgattgtgaaaatcttgacacaacactagaggaatcctagc

SEQ ID NO: 380462 - DNA, 617 bp, Homo sapiens
gacaggtctgaactttgtgttcttcaagttcaccaggatgagctatcagagtttgtatagcaaatataattactcacgtgaaaaattatagaaacagaatcaggaaatcaagctggaggagtgcagtagactgaactgctctaggtgttcctcagtggaatccatggtgtcattacctggcagagtaagatgagtggcagccatgtctgcacctgccatactcagccacagccacagtccttcccatagtcacagccacagccaagccgcagcccaggccaccagaaagatggctgtagtaggacatggtgttcagaagtggatgtttcagttgtggatcagggaattatttttctcagtttgaatgtcaccatctgcaaatgaaattttatacatcttcaatagtgtatgaggccgttcggtttcatatttcagagaaagctgcataataaaacttgacgaaatttatttcagtaagtacagatatccttataaaaatgtaacyattttgtctgaaactcaataataatgttacatgcccttaattagaagatgcttcctgtgtcttggtgatcttctcactcttgtttgttattaaagtctagactcaggttcct

SEQ ID NO: 380463 - DNA, 545 bp, Homo sapiens
tttgtccatttttgcccttccaccgtccaccatattcaagccaaacactgaatttgctggtgcattgaccttggactttccagcctccagaaacatggaagataaattgctattgtttataaattacccagtttgtggtatgttcttatagcagcaggtttagaccaagacagtttccttagatagccaccctccacccccyggaaaaaaatttgtatacagttatctttacaaaactctcttcaaatgtcccctttgagcacatcatctcctcctggccaagcttttgagtgacatagtaaagcttgtttttaatgatcccactatctttttaaattaataatcctatagccaggactgtggtagaatgtatttttccaaaagtgactatggcacccctatacccaatgagtattcaagtaccatgccaccctgaaatttatacctaagctttggctgacttttgtttaagtcttataatttcaaatctttatttacaaggtttggttctttgtatattactctgcaaagtctgtgtaacatca

SEQ ID NO: 380464 - DNA, 319 bp, Homo sapiens
gctactgtcctggttctttatggatttatttcttgttttgagtgtctgctcttaatcattcttcttgcctcttcaaaaactcyatgttctgtgttttaaatctattcacatcagttctcattaaactggtcaattcctggtatcatttctgacacactaatgatagaaatgctcagtttcaagcattttctcagtttccagatgtcattgattcacaggatttctatagctctttacatggtgattattattatcttggattgcatgactttaagcaacgctgaaatgtaaaggtgatgattcggctcagaaaagtttt

SEQ ID NO: 380465 - DNA, 535 bp, Homo sapiens
ttcccaacatctcaacttacaaatgctgaattttatatctcttcatagtttttctgtacattttaaaaatgcaacatgcctgcattgtattgtgtgaagctggaatcattatttttagggaacagtatctcaacaaaaataaaatccaacactctcaactgaagaacattataatacatcttaggatgactgttttagcttgatatcatgagatggtattaagaagcagtgtgagcagaactgtatttgaaatttatcctcatcttttgactgatttaaataagttacctctgctttgaatataaacragtcagcaggcataattcctgtggttagctgagttacccatccctaggaaggaacatattcagtttatacatgaatctgtagattcatatgtaggctatggatttttcattttgaattataggttacacaaaaatgtataaaactcaatctttttgtttttatgtggaatcccaattttgccataaggattccagtaccatcttaaccttttgttactcatatgtag

SEQ ID NO: 380466 - DNA, 522 bp, Homo sapiens
tgtgttgggaaagctggtcgcttgcatgcagtcttttgattcccacttaacgctataaaaatgggtcttgttcctggaacacttccttgccaaaagacaaaaagcctacagggctgagcatggtgtctcatgcctgtaatcccgcactttgggaggccgaggcaggtggatcacctgaggtcagaagttcaagatcagcctggccaacatggtgaaaccctgtctctacaaaaatacaaaaaaaaaaaaaaaattagcttggcgtgatggcagatgcctgcaatcccagctactcaggaggctgaggcaggggaatcccttgaacctgggaggtggagtctgaagtgagccgagattgcaccactgcgttccagcctgggaaasagagagagactccgtccaaaaaaaaaaaaaaaaaaaaggcctatataatcagtgccaggtttatcatcttgtgtagggatgcattacctgtttgaagctcagtgtgtgcctaaaattgtaagtcaatggctctcaggc

SEQ ID NO: 380467 - DNA, 449 bp, Homo sapiens
aacatctgtgacaattttctagtattaattagcaggctgctccaagatgggcattttcttctcccagaagatagaaaactttgagggagaagacaatgaaacacctgcagattatatatattttttctgttaaagaattttaacgatgctttttagaataccacatgaaataagagarttgaaattggatgtcaacaagggcacaccacatctgttgtaagagaaggtaatgaggagagcctgacaaaggcccctattcagaacatgaactcacttaactttcagagtctcactcagctgcacagtgtgaaaatctttctgctgacaaccctaaccaatgaaggataaatgctgttcctatgctagacacatttgaaaaagccagtcttcatgcagagttattgaagtaaagagagaacaggctcaatattggtaagaaataatgtatc

SEQ ID NO: 380468 - DNA, 530 bp, Homo sapiens
tcttgctatcattctcccccttccctctactcttcctgctcacccatgcttcatgcctgccacacattcgtacctatggattttctgcaatgcttcatgctgctgaacctcccctgcttctctcaggctgttccttcagggcagggaatagatagccctttctcatctaaccaactgacccttaacatctcagtttaagcctcatcttcaccagtggctccagtatctgaaatccttcttgacttccggagcatgctaaatattcatagccaacacagcatttgatttggttcacttgcctgcctttcagtatatgtgtgagttatatttatttttataaacatatttatattttattatataatgccaccttcttgtggtataggactatgtcttgctgtaccaacattgagtacatagtaggaacttgctatggtctaaatatatgtgttccyccaaaattcatatattgaaatccttaaccccaaagtgatagtattaggaggtagggcctttgcaaaggattaggt

SEQ ID NO: 380469 - DNA, 586 bp, Homo sapiens
ggattagtgtccttataaaagagaacagagaagtcccttatgccttccaccatgaaagggcatagtaagaaaccaccatctgtaaggaagtgggctttcaccagacaatgaatctgccagacctttgaagttggacttcttagtctctagaactgtgagaaatgaatttttatttttttaagctactgtttatgacgttttgttatagcagtccaaatggactaaraatactcactagttgattgataaatacataattaacatttaataatgtatgaatacaatagtttattttacttttttaatatatacacacatatctataaatttataaacatattattgtattatatgtctctccttctgcctctctgtacacacacacaccacgtacacacacaaatttttctttgcacagcccaattttttaaagttgggaaattcatgacatatctcatttaaaactgagcactttaatgttctttctatcttgctttttaatccttctgttttttttcttattaatctatgggctattgcttttcttttcatgtctatttgtacaatttcttctttttactgtaag

SEQ ID NO: 380470 - DNA, 504 bp, Homo sapiens
gtatttttggctattgggttatgtgaatttcttatcttttgaatattaacccctaatcagatatattgtgtgcaaatattttctcccaatcagtaggctgccttttctttytcttttttgctacacagaaaccttttagttagatgtattaccgtttgttaattttagcttttgtcatctgagcttttgttgtgatatccaaaaaaaaattattgctaaggccaatatcaaggagcttttcccatatgattctttgggtcagaacttgcatactattcctctgtctcattttactgaccaaagaaaatcagatggttgagtccttagagttggaggatactaaaaaattacatcagaagggacatgaattcaaggatgagagttgaattggaaacattttgcaatcttctgcagtgactttctctttccttccttaggactccatgaacatccctggaagctatgcattctctcaaataaagaaaactttccagatttaaaaaa

SEQ ID NO: 380471 - DNA, 504 bp, Homo sapiens
gtatttttggctattgggttatgtgaatttcttatcttttgaatattaacccctaatcagatatattgtgtgcaaatattttctcccaatcagtaggctgccttttctttctcttttttgctacacagaaaccttttagttagatgtattaccgtttgttaattttagcttttgtcatctgagcttttgttgtgatatccaaaaaaaaattattgctaaggccaatatcaaggagcttttcccatatgattctttgggtcagaacttgcatactattcctctgtctcattttactgaccaaagaaaatcagayggttgagtccttagagttggaggatactaaaaaattacatcagaagggacatgaattcaaggatgagagttgaattggaaacattttgcaatcttctgcagtgactttctctttccttccttaggactccatgaacatccctggaagctatgcattctctcaaataaagaaaactttccagatttaaaaaa

SEQ ID NO: 380472 - DNA, 598 bp, Homo sapiens
tatgctttttttgcttatgcttttggtgtcatatccaaggtatcatagccaagaccaatgatgtcatgaagcttttctcctatgttttcttctacatgttttacagtttcaggtcttaggttagtctttaatccattttgagttgattttcatatataatataaattaagggtctgatgttattctttttcatgtagctatccagttcttccaacattgttccttgaagggactgctttccccattgtatattcttgccacaatatgacaactcccaaaagaccaggtatagaaggaatttaccacaatactatgatggtcacrtatgaaaagcccacaactaacatactcaattgtaaaaaaaatggaaaggttttcctctaaggtcaagaacaagtcaaggatgctcattctggccatttatatttaaaatgctacttgaagttctagacagaataattagacaataaaaataaataaaagtcatacacatcggaaaggaagaagtaaaattatcgctacaaacggcatgatcttatgcacagaaaaccctaaagacttcacagaaaagctgttacaagaaaatcaaaaacttcag

SEQ ID NO: 380473 - DNA, 598 bp, Homo sapiens
tatgctttttttgcttatgcttttggtgtcatatccaaggtatcatagccaagaccaatgatgtcatgaagcttttctcctatgttttcttctacatgttttacagtttcaggtcttaggttagtctttaatccattttgagttgattttcatatataatataaattaagggtctgatgttattctttttcatgtagctatccagttcttccaacattgttccttgaagggactgctttccccattgtatattcttgccacaatatgacaactcccaaaagaccaggtatagaaggaatttaccacaatactatgatggtcacgtatkaaaagcccacaactaacatactcaattgtaaaaaaaatggaaaggttttcctctaaggtcaagaacaagtcaaggatgctcattctggccatttatatttaaaatgctacttgaagttctagacagaataattagacaataaaaataaataaaagtcatacacatcggaaaggaagaagtaaaattatcgctacaaacggcatgatcttatgcacagaaaaccctaaagacttcacagaaaagctgttacaagaaaatcaaaaacttcag

SEQ ID NO: 380474 - DNA, 598 bp, Homo sapiens
tatgctttttttgcttatgcttttggtgtcatatccaaggtatcatagccaagaccaatgatgtcatgaagcttttctcctatgttttcttctacatgttttacagtttcaggtcttaggttagtctttaatccattttgagttgattttcatatataatataaattaagggtctgatgttattctttttcatgtagctatccagttcttccaacattgttccttgaagggactgctttccccattgtatattcttgccacaatatgacaactcccaaaagaccaggtatagaaggaatttaccacaatactatgatggtcacgtatgaaaagcccacaactaacatactcaattgtaaaaaaaatggaaaggttttcctctaaggtcaagaacaagtcaaggatgctcattctggccatttatatttaaaatgctacttgaagttctagacagaataattagacaakaaaaataaataaaagtcatacacatcggaaaggaagaagtaaaattatcgctacaaacggcatgatcttatgcacagaaaaccctaaagacttcacagaaaagctgttacaagaaaatcaaaaacttcag

SEQ ID NO: 380475 - DNA, 544 bp, Homo sapiens
tagtcactacatcgtatctaagaaatcattgcccagtccaatatcaacaatcttctatgttttcttctaatagttttacagtttgaggctttatatttaagtctttaatttatgtcaggttgagttttttgttggatgtttgataagggtccaatttcattcttttgcatgtgaatatccagttaccccagcatcatttgttgragaaactacactttctctagtgtgtataataattatctttgccaggatcaaataactgcatatatatgggtttatttctgggctctccatactgctccattggtcattggtcgatatgtctgtctttatgacaatagcatagtgttttaattaattgacatgtatccatcaattatagttatttctctttttgatgtcaagttgtcctatcatgggctggtagaaacctttttaatttggtttaagtattttttgacaagactttagtagtatcttcggtaaattatttaattcttatatgagaagatcttccagactcatcttttatctttcctgccct

SEQ ID NO: 380476 - DNA, 544 bp, Homo sapiens
tagtcactacatcgtatctaagaaatcattgcccagtccaatatcaacaatcttctatgttttcttctaatagttttacagtttgaggctttatatttaagtctttaatttatgtcaggttgagttttttgttggatgtttgataagggtccaatttcattcttttgcatgtgaatatccagttaccccagcatcatttgttgaagaaactacactttctctagtgtgtataataattatctttgccaggatcaaataactgcatatatatgggtttatttctgggctctccatactgctccattggtcattggtcgatatgtctgtctttatgacaatagcatagtgttttaattaattgacrtgtatccatcaattatagttatttctctttttgatgtcaagttgtcctatcatgggctggtagaaacctttttaatttggtttaagtattttttgacaagactttagtagtatcttcggtaaattatttaattcttatatgagaagatcttccagactcatcttttatctttcctgccct

SEQ ID NO: 380477 - DNA, 572 bp, Homo sapiens
gggtttatttctgggctctccatactgctccattggtcattggtcgatatgtctgtctttatgacaatagcatagtgttttaattaattgacatgtatccatcaattatagttatttctctttttgatgtcaagttgtcctatcatgggctggtagaaacctttttaatttggtttaagtattttttgacaagactttagtagtatcttcggtaaattatttaattcttatatgagaagatcttccagactcatcttttatctttcctgcccttgattaagaagaggtcttttatttttctttaaagaaacactgatatttggagaagactctctggacactagtgatgttcactgttgctacattgtgattgcttatatgctgtttcaatggagagagccaaaaaaccctctgttttttttttwaaaaaaaagattaaaagtaatgagttcaaactaaaaatttcaattcaaattaaaaattatagagcattgatttaagcttttcaatttttgaaatggatgaactttttttaaagcttctatttatatcaagtttgctaacctcccatt

SEQ ID NO: 380478 - DNA, 627 bp, Homo sapiens
ctgttgggaaggcattattggttttggaatgtgaagacatggaattttggaggggccaggggcagaatcataaggtctggctctgtcctcacccaaatatcatcttgaattgtaactcacacaattcccacgtgtcatgggargaagccggtgggaggtgattgaattatgggtgcgggtctttcctgtgttgctcttgtgatagtgaatgagtctcatgagatctgatggttttaaaaacaggagtttccctgcacaactctcttctcttgtctgccaccatgtgagatgtgccttttacattccaccatgattacaaggcctctccagccacatggaactctaagtccattaaaacctctttttctttccaatctcaggtatgtctttatcagcagaatgaaaacagactaatacaccaggaaaaatgtaactcaaattataatgtgtcttatatgtttcttagaattttctgttttatctaactatacatatccctctgcagtattctaaaaaaccagacctatttaattgaaaagtacagtcctataactggatactcagtatcactgaaataaatgaataaattttaactggtaattgaaaaagaattattagttgcagctc

SEQ ID NO: 380479 - DNA, 548 bp, Homo sapiens
ggaggcataaccacaaccaggtcaccaaagattccatggtcatttaatacccaggtgtcacaaaatccatagacattcctatagacagagccacatgcacattccccatagacatttccttgtgtggcagacagacttttgaaatgactcccaaatgatcctcacttcctgttatacatactcttgtgtagtccccttcccttaagtgtaggatgagcctaggttcttgcttctaatggatagaatacacaaaatgagacgggatgtcactttgaagattaggttttcaaagactgactttcatcttgctggcactctctttgactcttttcatgagttctttgatggagwtgcccacatggcaaacaactgtggttagttaggaacctagggttccagtccaacatccttcgaagaacttaattcttcccacagccatgtgagtgagcttggaagaggattcttcccctgtgcagacttcatttgggactgtagcccaagccaaccgctagcgaaagcctttcaagaaactctgaaacagataacct

SEQ ID NO: 380480 - DNA, 543 bp, Homo sapiens
tgtttgggggcacctattccaataactgtatgtgttagtgttttctcacatgtattcaaagctttgcatagcaaaacaatgtctgtaggttttagttaacagattatattgtggtgtgtaaatacaaaactatggaaatatatgtagagggtgaggaaagacttcccaaaagaagtggggtctaaactttgttggcaaaagaatacaggtactttggggtgatgagaagtcaaagaaagagaagaatgtagaggctgaaaagaagttcagacgattgcrgatagactagtttggctgttgtgcagtgctagagagatgtaaacgcatgaagatgtatcatggcaagaataaaaagctaaggtagcattggagacctcctaagaattttattaggtggatctcatgatgattattttacttttaaataacattaatttgactgtgttcatgggagaaattaaagagaggaaagattgaacctaaagagacccattgagagactcttgtagttacattatgataaatcacagagacatagaggaa

SEQ ID NO: 380481 - DNA, 565 bp, Homo sapiens
tacatctccttccactgccccatttctctgtttctcttgtaagtgttttgtgctgtcacatgtcacttaactatggggatatgttttgcgaaatcatccttaggtgatttcttcattgtgtggacatgatagagtgtacttacacaagcctaggcagtatagccaactccacacctaggctatatgtatacacctagatatatacatttggatgaatctttaccatttgtaatcagtatcaaaatgttatccatgagaaaaatattttacatgatcctgctttatttttctctacagcatttttcagacatttatatttgcttgtttactgctgtgtcctctcactagaaggtaacctccaagagggtaaaaaatttgatctatttactgctctatctgcaacttctatgacattgccastaggcattgaacaattttgttgagttaattggtgaaattgctaagagtgatagttaatttttcttcctagtttatgaggttctctgcagaacactgtctcatgtgtagtcttattgatgcctcaataattatatgaatgtattac

SEQ ID NO: 380482 - DNA, 671 bp, Homo sapiens
ttgtcttagcatgtgtatttgtgtgtgtgtatatatatatgctgaaattgtatcagcatgtgtatttgtgtgtttgtatatatatatacacacatatatatatacacatatatatacatgatacatatacatacatgctgatagatacatactgatatatgtatacatacaaatgttgtaattgcatatacacacacatatgtcagcatctacctatctgtttgtctatctatctatctatctatctatttatctatctatggagagagagagataatatatatgggcaaagagaacagaggwgagatgagggcctataatagctcttagtcaattctgtgaacatggaaagcagatgtttcaagtgatggctgcctgttcagatctgagaaatatgaaggttttgtgatctcaagagaaaccagtaagatgcaacttatcatatcataatacattctcaatagaataagaaactaaaaaaaggaattgtaacctttgttagtaaccattcattacagaaaaactatacaaagactgtacaggaaaggaaatgttctagtatgctatggctaaggtatgaacaatattgttattatcaccataaggtaaacattgagtatcaatttaaaagcctcattaaaaaatgaaaaatggatgtagaaaggggaagt

SEQ ID NO: 380483 - DNA, 671 bp, Homo sapiens
ttgtcttagcatgtgtatttgtgtgtgtgtatatatatatgctgaaattgtatcagcatgtgtatttgtgtgtttgtatatatatatacacacatatatatatacacatatatatacatgatacatatacatacatgctgatagatacatactgatatatgtatacatacaaatgttgtaattgcatatacacacacatatgtcagcatctacctatctgtttgtctatctatctatctatctatctatttatctatctatggagagagagagataatatatatgggcaaagagaacagaggtgagatgagggcctataatagctcttagkcaattctgtgaacatggaaagcagatgtttcaagtgatggctgcctgttcagatctgagaaatatgaaggttttgtgatctcaagagaaaccagtaagatgcaacttatcatatcataatacattctcaatagaataagaaactaaaaaaaggaattgtaacctttgttagtaaccattcattacagaaaaactatacaaagactgtacaggaaaggaaatgttctagtatgctatggctaaggtatgaacaatattgttattatcaccataaggtaaacattgagtatcaatttaaaagcctcattaaaaaatgaaaaatggatgtagaaaggggaagt

SEQ ID NO: 380484 - DNA, 671 bp, Homo sapiens
ttgtcttagcatgtgtatttgtgtgtgtgtatatatatatgctgaaattgtatcagcatgtgtatttgtgtgtttgtatatatatatacacacatatatatatacacatatatatacatgatacatatacatacatgctgatagatacatactgatatatgtatacatacaaatgttgtaattgcatatacacacacatatgtcagcatctacctatctgtttgtctatctatctatctatctatctatttatctatctatggagagagagagataatatatatgggcaaagagaacagaggtgagatgagggcctataatagctcttagtcaattctgtgaacatggaaagcagatgtttcaagtgatggctgcctgttcagatctgagaaatatgaaggttttgtgatctcaagagaaaccagtaagatgcaacttatcatatcataatacattctcaatagaataagaaactaaaaaaaggaattgtaacctttgttagtaaccattcattacagaaaaactatacaaagactgtacaggaaaggaaatgttctagtatgctatggctaaggtatgaacaatattgttattrtcaccataaggtaaacattgagtatcaatttaaaagcctcattaaaaaatgaaaaatggatgtagaaaggggaagt

SEQ ID NO: 380485 - DNA, 480 bp, Homo sapiens
aaatgggtccacagtttatataatgtagtacttcattgcccttataatcgataaacatacgccctgggataagagaaaakagaaaggcatgaatgttccccagatccatcgtgcttcccacccatctccagcagaggagtagggcattttattgttgaatggtgttgtgtttttcactcaccagcctaaatgcaagccaacaacttcattttgttttcagctgaagaaatagtgatctactataatttcagagaaaaaaaaatgggttgtattggactgaacaggttgacctccattatatctttctctgcaaagattgttaagagtaatttttcttggctgggcacagtggctcacgcctgtaatcccagcactttgggaggctgaggcggatggatcacttgaagtcagcagttcgagaccagcctaaccaacatggtgaaaccccatctctactaaaaatacaaaaattaactgggc

SEQ ID NO: 380486 - DNA, 480 bp, Homo sapiens
aaatgggtccacagtttatataatgtagtacttcattgcccttataatcgataaacatacgccctgggataagagaaaagagaaaggcatgaatgttccccagatccatcgtgcttcccacccatctccagcagaggagtagggcattttattgttgaatggtgttgtgtttttcactcaccagcctaaatgcaagccaacaacttcattttgtkttcagctgaagaaatagtgatctactataatttcagagaaaaaaaaatgggttgtattggactgaacaggttgacctccattatatctttctctgcaaagattgttaagagtaatttttcttggctgggcacagtggctcacgcctgtaatcccagcactttgggaggctgaggcggatggatcacttgaagtcagcagttcgagaccagcctaaccaacatggtgaaaccccatctctactaaaaatacaaaaattaactgggc

SEQ ID NO: 380487 - DNA, 559 bp, Homo sapiens
gcagtctcccagtagatagaaaacatctaaagctagtgatcagtagcttcctgataagatctcaggagctgggcaagtgtgctcaagcatgcgcactaagaggcaaaagggcagcgtttcactgtgtatcaccttcctctagcaacgttcaacgggtaagggaaaaatgtgtggagagagcatgtgcacaacttcagtaaacacactgcattgggcccctcccaagtgctaacaggccactgtgcatatggacagcccaagggaagaatcaggggaaaagtaatgcagaccctggaagcctgacgacatataaagccccatgtcaaaggccaaacaccacgcttcagtctctcaagtcacctgcttgagagattggagggccaactcttccaagcgtactttacttcctttcatttctgctttaaaagtttttaataaactctcacttctgctctaaaacttgcctckgtctctcactgccttaagcccccttggttgaactctttctcctgaggaggcaagaattgaggttgctgcaaacctatattgattcactgct

SEQ ID NO: 380488 - DNA, 647 bp, Homo sapiens
tttaaatgcttccctggtgattctaatgggaaacaggattgagaatccctcatgggagaaagaaaagaaaaataaaaatttgtttagcactggtatggtttaagacctggtgtcatggtcgtaacagaagccagctgctcttagctgtagtgggtgctgggtccttcccactgtcttggggacagcacgtgcccattctctcccagaatgttttacctccaaatacccacataagaaaacttaaaacaggcattcgtttcaataasaggtgataaacaaaagaatgagaaacattcatttattatttgtgcctttttttctccaaatgttcctatttcctccaatctattctgaataatatgaattggaagagtaaaatgataggcatatctatagaaagactcaataaccaccctggaattggataggctagcaccagatatagcattagcttatggagaagtccataggcgttggataaggaaagtaagatgcaatcaaaggaacattaatggaaggtttaaccttgagccacacagattatggaacttgttcatgaatttctacccctaactcttacccttcccaaggctcctggaaatatgagtgagagaagaaaggagaggggaaattggtatattactgaa

SEQ ID NO: 380489 - DNA, 607 bp, Homo sapiens
tctttatagcagtgtgagaatggactaagacagcaacaactagatggaactggaggttgttatgttaagtgaaatgagctgggcacaaatagtgcatgttctccctcatacgtggaaactaaaaaagtggatcttayagaggtagagagtagaatggtggttactagaggctgggaagggaaaagggagggacaatgaaaagaagtcagttaaggagttcaaaaatactgttagatagaagaaataagttctaatatttgattgtatagtagggaaactatggttaacaataatttattgtatatttcaaaataactagaagagaagaattgtaatgtacagaacagaaaaaaaagataaatgtttgaggtgatggatatcctaattaccctgatttcatcattacacattgcatgcagatctcaaaatatcacatatactcctcagatatgtaaaattatataatatgtcaataaaaaataagaaatttaagaatttttcttaaagagaattcattgtttactagactagaatggattatggagaaaagaattttttaactgtattttaaaatctaggatcaagctttgccctaccacaaaaaaac

SEQ ID NO: 380490 - DNA, 607 bp, Homo sapiens
tctttatagcagtgtgagaatggactaagacagcaacaactagatggaactggaggttgttatgttaagtgaaatgagctgggcacaaatagtgcatgttctccctcatacgtggaaactaaaaaagtggatcttacagaggtagagagtagaatggtggttactagaggctgggaagggaaaagggagggacaatgaaaagaagtcagttaaggagttcaaaaatactgttagatagaagaaataagttctaatatttgattgtatagtagggaaactatggttaacaataatttattgtatatttcaaaataactagaagagaagaattgtaatgtacagaacagaaaaaaaagataaatgtttgaggtgatggatatcctaattaccctgatttcatcattacacattgcaygcagatctcaaaatatcacatatactcctcagatatgtaaaattatataatatgtcaataaaaaataagaaatttaagaatttttcttaaagagaattcattgtttactagactagaatggattatggagaaaagaattttttaactgtattttaaaatctaggatcaagctttgccctaccacaaaaaaac

SEQ ID NO: 380491 - DNA, 617 bp, Homo sapiens
taagtaacatctccgaggaaacacagctgtgacaaaactgcgactcaaacccaggtcctctgatatacagaatcggtatgtattatcacatattataaataaagagagagactaacttatatttatagtcaactcaccaggggtaagagagaaattacgtcaytacacatgtccctctaatttttccttaaagtagcttttagaaattgacttcttgacctgtggacctgttcatctttaagtagatgctggtgattacttcatttttataaaattaaatttcagattaaacccctttttttcactgttttccctcatattttcaaattctgataaacacaaaatttaggtagaagagcaatatatatgtgaaagggaaaaaacctacatcagattctgttgctcttggaacttccaagacatggtgcccatattgttcatctaaagttgaatacctggatacactaactaactttaataatgtataacctggtatatgataggtattgttaaaattttacgtgaattcgtaacaagaaagcagatagttactgataagcatttcagagttatataattaattttcttgctgacagaacataggtggctcaaacttt

SEQ ID NO: 380492 - DNA, 625 bp, Homo sapiens
tgaacataatttttacttttctagagacttttactatactgcaataaagttaagyataccaatcactttttaaaacaacatatttgaataagtttaattatattattttcccagctattgtttgaaaaaaagagaagacaaattcctattatgttgatcacctagtttacccagttttagacaaaaatggaataccctagaagttcattataataccaaaattgaaatattcataataatgcaggtctttaatgtttatataattcgacttgcagtgttataatggtttaagttcagtaattttattaatgtatcacactatctgcaccccttatcaataaatataaatgtaatcaatgtatttattctttaaacatttactgtgagcctaccatggtaaagactgctagatttataccaaaaagatcacaggcaaacagagcttaggtaacatgctttatgctttatgacaggtaaggattcaattttaaggtaaacatacttaatgtaagctacatatctggccatggcagactgtattctacaaaatgtccatagcaatatctcccattccaaatgctattctgaaatgagaactcgccattctcccatcaagagaggtaga

SEQ ID NO: 380493 - DNA, 589 bp, Homo sapiens
ttcacccctaacccacagttctgacacataggagtttcacagtccatgaggatgactgtttctgcagcttctcttcrtaacacttgataccatgtgaccatcatcctctgtctctgtttcatcaacagctttctctctactgactttagttttctcaaactacaatatgataaaatctctctcttactaaaaactttccccttaagactgtgctctccatgaaatcaacaccttctttctttcctcaccactcagccaagcttcttgaaaagcaatttggattcaatattgatagtcacaattcccattcattctgcatcccactgaaatctatttatgcctacatcactactatgaaactgagaaaattgataatgctaaccgtgtttccagccttgtgtccctggacttcttactgctcttaatcaatgcaaatattattctctcagctgctagctttccttcctccctggtcaatcttctgtgagctctttttatgaagcaccacagatatgctgatgctctacaggtttctactttcagcctaatgtatataattcatatatatgtataatataattatatatac

SEQ ID NO: 380494 - DNA, 428 bp, Homo sapiens
aatcaacaccttctttctttcctcaccactcagccaagcttcttgaaaagcaatttggattcaatattgatagtcacaattcccattcattctgcatcccactgaaatctatttatgcctacatcactactatgaaactgagaaaattgataatgctaaccgtgtttccagccttgtgtccctggacttcttactgctcttaatcaatgcaaatattattctctcagctgctagctttccttcctccctggtcaatcttctgtgagctctttttatgaagcaccacagatatgctgatgctctacaggtttctactttcagcctaatgtatataattcatayatatgtataatataattatatatacgttatacatatatgtatgtatatcattcatgtgtgtgagtgtgtgtgtgtgtgtgtgtgta

SEQ ID NO: 380495 - DNA, 580 bp, Homo sapiens
tattacaaaatatcaccaagcagggatatctctgcctatgaggccagggattattatagtataaacaatcccatattccacatagtgatatatagtgctttcacccaatttgtaccatgagtagtacaaattggatttcacaaattggattgtggacttgttttgtatgtatgtgtgtagacttcatgtaatcttataaacactcattctttctacaagactttccaaataacagtataatgcatgtaaagtaacatataagaacataygcattcagacaattctgccaacattaacctgctatagagatccagcactctatttacttgaccgcttcaagtcctcagaccttgtaattaatgataaatcaagtcaaaataacatcattccaaagagggtggtgaatttataatttatgaaaagtaggaatggagaaataatgtagatttggtttttaaatcaactatgtaaatgcattagagaggttgaagagagaggatggaaagaatctattagaaggtcctagaaatgcacttattcctggcttttactcaataagactctggctaataaatattca

SEQ ID NO: 380496 - DNA, 555 bp, Homo sapiens
ctccaccgggttactttctgattcaagtttaatagaaatatagtcagttatctctaagccttcttatgttttatcatttggattatgtttcatgaaaaaaggaaaagtaatacttgttttgaaaacatacacatatgtatctgtcctaaagcatttcaaatattatccatagtttatcattactgaagacaactgacattcatcctgaaacactttgctccacaaacatctgtttctttcccttttttaaatcacctctcctactttttcaagcaaatgaagtcattcatcttcactataaagagtaaaatttcataagatttaaaaaagcacacattcagcatatgacataatttcctttagattttattctattaaaaaaaagctatggaagccaagagtaattcttctctgatttattcgctatgagtttcattaaagatcattaactatttttaacactattgcatttattgttattctatcttttttaaaaatatatttaaaggtattttttctwatgtcctggaattaatttaagaaccagagttgagg

SEQ ID NO: 380497 - DNA, 555 bp, Homo sapiens
ctccaccgggttactttctgattcaagtttaatagaaatatagtcagttatctctaagccttcttatgttttatcatttggattatgtttcatgaaaaaaggaaaagtaatacttgttttgaaaacatacacatatgtatctgtcctaaagcatttcaaatattatccatagtttatcattactgaagacaactgacattcatcctgaaacactttgctccacaaacatctgtttctttcccttttttaaatcacctctcctactttttcaagcaaatgaagtcattcatcttcactataaagagtaaaatttcataagatttaaaaaagcacacattcagcatatgacataatttcctttagattttattctattaaaaaaaagctatggaagccaagagtaattcttctctgatttattcgctatgagtttcattaaagatcattaactatttttaacactattgcatttattgttattctatcttttttaaaaatatatttaaaggtattttttcttawgtcctggaattaatttaagaaccagagttgagg

SEQ ID NO: 380498 - DNA, 568 bp, Homo sapiens
ccatcagaatgctaatctatggcatttttgagtttccaagaaatgatgtcccacaactatatttatggaattacatgtcagtgtaaaacatagatgatttaaccaattcacatgcaacgtcaccgaaggtttctgtgaattatcattgctgtgccaggctttcttcactccctcttaatacatttattcattgyacattctaagactataggtaatttacctctctggtttcccaaaatctgtttatgtaaaggtgtattactttcttgtgtctgcgatagcaaattactacaaactgggtaatttaaaacaacagaaattcactctcatagtctggaggcaagatgtccaccatgaaagtgtgggcagagccacactcttttctataggttcggagggagaacactccttgcctcctccagctgctagtggctgcctgagcattcctgagtgttcctgggttgggaacatagcacttcagtctctgcctctgtgttaatatcaccgtcccctcttctgtcagtcaaatctcacctctgtatctcttgtaagaatacttgtcattgga

SEQ ID NO: 380499 - DNA, 568 bp, Homo sapiens
ccatcagaatgctaatctatggcatttttgagtttccaagaaatgatgtcccacaactatatttatggaattacatgtcagtgtaaaacatagatgatttaaccaattcacatgcaacgtcaccgaaggtttctgtgaattatcattgctgtgccaggctttcttcactccctcttaatacatttattcattgtacattctaagactataggtaatttacctctctggtttcccaaaatctgtttatgtaaaggtgtattactttcttgtgtctgcgatagcaaattactacaaactgggtaatttaaaacaacagaaattcactctcatagtctggaggcaagatgtccaccatgaaagtgtgggcagagccacactcttttctataggttcggagggagaacactccttgcctcctccagctgctagtggctgcctgagcattcctgagtgttcctgggttgggaacatagcacttcagtctctgcctctgtgttaatatcaccgtcycctcttctgtcagtcaaatctcacctctgtatctcttgtaagaatacttgtcattgga

SEQ ID NO: 380500 - DNA, 629 bp, Homo sapiens
catttgtaagtgagcagtaagttagcattctgtctgaacattcatttagtctttttaacatttctgtcaatttgcctttgcatatgcatagctagtggaacaatgtattagtctsttctcacgctgctaataaagaacttccccgagactgggcagtttataaaggaaagaggtttaattgactcacagttcagcatggctggggaagcctcagaaaacttacaatcatggcagaaggggaaagaaacacgtcccggttcacatggtggcagcaagaggtgccgagcaaaagtgagcaaagccccttataaaaccatcgggtctcctgagaactcactcactatcacgagaacagcagcacggggtaactactccatgattcagttacctcctaccgagaccctcccgtgacacatggggattaggagaactacagttcaagatgagatttgggtgaggacacagccaaaccacatcactctaagtataatgaatccttgttaactggaatactggaaatatagagaaacaggcatacagttgtgaaatcaaagactttttttttttaaatttcagctcctcaatccactagctgtgtgaccttgagcaagctagtcagcccttctgag

SEQ ID NO: 380501 - DNA, 588 bp, Homo sapiens
aacactaacaagcccttcagcacttcttttgagggccattttaagcagggaaatcactaatataaagcttaaaacatttcgacaaacatggcactaaataaaccatgaaaaggacgcttgtttaccgtgtgagaactgacacaagaaagcaaagtgtatccttgttttacctcagstgggaacatgcacatcaggcgctcaaatttttggcctctttgtgagtctgtgggaatatgaccatgaaaatgccacagataccaatttgggggtttacaaataaattacaccaagtcagcgaatttgcagatatggaatctgcaagtaatgaaaacgaaactgtatgtttggtttggtttggtttggtttggtttggttggtttggttttgtttttagaaacagggactcaccccagagctcgagtgatcctcccatctcagcctcccaagtagctgagactacaggcttgtaccacagcacccagctaagtttatttttatttttttgtagagatgatatttcactgtgttgcccaggctgttctcgaactcctgatctcaagcgatcgtcccgcctcagcctcccaaagt

SEQ ID NO: 380502 - DNA, 565 bp, Homo sapiens
tacatctccttccactgccccatttctctgtttctcttgtaagtgttttgtgctgtcacatgtcacttaactatggggatatgttttgcgaaatcatccttaggtgatttcttcattgtgtggacatgatagagtgtacttacacaagcctaggcagtatagccaactccacacctaggctatatgtatacacctagatatatacatttggatgaatctttaccatttgtaatcagtatcaaaatgttatccatgagaaaaatattttacatgatcctgctttatttttctctacagcatttttcagacatttatatttgcttgtttactgctgtgtcctctcactagaaggtaacctccaagagggtaaaaaatttgatctatttactkctctatctgcaacttctatgacattgccagtaggcattgaacaattttgttgagttaattggtgaaattgctaagagtgatagttaatttttcttcctagtttatgaggttctctgcagaacactgtctcatgtgtagtcttattgatgcctcaataattatatgaatgtattac

SEQ ID NO: 380503 - DNA, 511 bp, Homo sapiens
ccactgctttatctggtcagtactgrtttgagattcatggcaggagatggggactttctaacactccatagctgggtaccctctcttacaacttcttcctctttcgctgccttttcccaggaagtcaagatggtccatttgtgcccatgccccagtcagacccaggccaggttgttttgaatggaagttataggggcagtagaataatactttgatttctagattatttttttgcctcagtgcttattttaaatggcctaaaaatcaagtctagtctagacaatgttggcaagaatctaatcccgatagattagaaataaagtatgaaaagagccagatggaagcagtgcctagtctaagatcacctaggaatataaaagagatggtgatggagagatactgaatgatgcaaccaggtgtggtcacaagtacaaatgtttaggttgaaatatgggaaggagatgacatatctggagggaaactgaggaagtaagcaggaggtgcatgtgag

SEQ ID NO: 380504 - DNA, 511 bp, Homo sapiens
ccactgctttatctggtcagtactgatttgagattcatggcaggagatggggactttctaacactccatagctgggtaccctctcttacaacttcttcctctttcgctgccttttcccaggaagtcaagatggtccatttgtgcccatgccccagtcagacccaggccaggttgttttgaatggaagttataggggcagtagaataatactttgatttctagattatttttttgcctcagtgcttattttaaatggcctaaaaatcaagtctagtctagacaatgttggcaagaatctaatcycgatagattagaaataaagtatgaaaagagccagatggaagcagtgcctagtctaagatcacctaggaatataaaagagatggtgatggagagatactgaatgatgcaaccaggtgtggtcacaagtacaaatgtttaggttgaaatatgggaaggagatgacatatctggagggaaactgaggaagtaagcaggaggtgcatgtgag

SEQ ID NO: 380505 - DNA, 631 bp, Homo sapiens
tttcgctgccttttcccaggaagtcaagatggtccatttgtgcccatgccccagtcagacccaggccaggttgttttgaatggaagttataggggcagtagaataatactttgatttctagattatttttttgcctcagtgcttattttaaatggcctaaaaatcaagtctagtctagacaatgttggcaagaatctaatcccgatagattagaaataaagtatgaaaagagccagatggaagcagtgcctagtctaagatcacctaggaatataaaagagatggtgatggagagatactgaatgatgcaaccaggtgtggtcacaagtacaaatgtttaggttgaaatatgggaaggagatgacatatctggagggaaactgaggaagtaagcaggaggtgcatgtgaggggaagttgaggtcactatgtaagttatgttaggtatattttaactgattaactctctgggcaacgctctcaaacttagatgaacatctgagtgacctgtggtttaaaaaaaaaaaaaargctatatgactcctgcctgaaacctgttgaatcagaatctccagggtagtatttgttttagaaagctttttaggagatgagttgaggaagatatatttagg

SEQ ID NO: 380506 - DNA, 583 bp, Homo sapiens
attttgtttgctgttgtatccctagaatctataacagtacctggcacatagtagatggatctggatcttcaataaatgttgaactaatgaacgaatgaatccattgtttaaaagatgcaattaagaacagtagaaatctggctggacacggtggctcatgcctgtaatcacagcactttgggaggctgaggtgggcggatcacttgaggtcaggagttggagactagtctggtcaacatggtgaaaccccatctctactcaaaatacaaaaattagccgggtgtggtggtgcatgcctgtaatcccagctactcgggaagctgaggcaagagaattgcttgtacctgggaggtgaaggtygcagtaagccgagattgtgccattgcactctagcctgggtgacaagagtgaaactacatctaaaaaaaaaaaaaaaaacaaaaaaaaacagtagaaatccctgaaaccagatgaaccacaccaccaaacaagttgagactgcacatcatcctcttcacagaggtgaataaaaaattgatgttgaaacttgatctaagctaattgtttatcttcttatttattc

SEQ ID NO: 380507 - DNA, 533 bp, Homo sapiens
tactgcagcagtgtggagatgagctgcattaaaacattggccggccatagtggctcacgcctgtaatctcagcactttgggatgccaaggcagaaggaccacttgagctcaggagtttgagacaaacctgggcaacagggtgaaaccctgcttctactaaaaaatacaaaaattagccagctgtggtggtgcgtgcctgtagtaccaactacttgagaggttgaggtgggaggatcacctgagccygggaggtcgaggctgcagtgagctaaagtcctgccattacacttcagcctgggcaattagagtaacatcgtgtctcaaaaaatatatatatatatatatatataatatataatatatatatataatatatataaattccttttgcactctctcaggcctgccagtaagaactgttctgtttctctgcaagagagacagagactgccaatggctatgaggcatattcactggtaggaaggccctcaacacagctggcacatgagactgatgctggttttctctggggg

SEQ ID NO: 380508 - DNA, 533 bp, Homo sapiens
tactgcagcagtgtggagatgagctgcattaaaacattggccggccatagtggctcacgcctgtaatctcagcactttgggatgccaaggcagaaggaccacttgagctcaggagtttgagacaaacctgggcaacagggtgaaaccctgcttctactaaaaaatacaaaaattagccagctgtggtggtgcgtgcctgtagtaccaactacttgagaggttgaggtgggaggatcacctgagcccgggaggtcgaggctgcagtgagctaaagtcctgccattacacttcagcctgggcaattagagtaacatcgtgtctcaaaaaatatatatatatatatatatatartatataatatatatatataatatatataaattccttttgcactctctcaggcctgccagtaagaactgttctgtttctctgcaagagagacagagactgccaatggctatgaggcatattcactggtaggaaggccctcaacacagctggcacatgagactgatgctggttttctctggggg

SEQ ID NO: 380509 - DNA, 533 bp, Homo sapiens
tactgcagcagtgtggagatgagctgcattaaaacattggccggccatagtggctcacgcctgtaatctcagcactttgggatgccaaggcagaaggaccacttgagctcaggagtttgagacaaacctgggcaacagggtgaaaccctgcttctactaaaaaatacaaaaattagccagctgtggtggtgcgtgcctgtagtaccaactacttgagaggttgaggtgggaggatcacctgagcccgggaggtcgaggctgcagtgagctaaagtcctgccattacacttcagcctgggcaattagagtaacatcgtgtctcaaaaaatatatatatatatatatatataatatataatatatatatataatatatataaattccttttgcactctctcaggcctgccagtaagaactgttctgtttctctgcaagagagacagagactgccaatggctatgrggcatattcactggtaggaaggccctcaacacagctggcacatgagactgatgctggttttctctggggg

SEQ ID NO: 380510 - DNA, 485 bp, Homo sapiens
tctatctgatcccccagtaaattgaatggtgcctgtccacattaaggaaggatctttcccactcactccaccaactcacatgcccatctgctctggaaacagcatcacaggcacacccagaagtaatgctttatcagttcttcagatattccttaatccaatcaggttgacacctaaagtaaatcctcaaacattcttccatagcctttttgatacttacatgatacctcattacatagataatattattttaaatctaacatgttttattataagaaacaacaccgcattgaatatccttatatctttgtcactgtatctttccacatacttttcattatttccttaggaaaaaatagtggaagaatgatggttctgcaaactctgaatgcttctcatatrtattgccaagttacaatccagaaaggtgtaccaatttataatctaccccaaacttcataaatgatccatagctctgaaaaccc

SEQ ID NO: 380511 - DNA, 611 bp, Homo sapiens
ttcagcttttcaaattgaacatgtttagagattgctatagctcacagtatatcccagaatcaacatgaatgttattttgcatgcatgtgtgtgtgtgtgtgtgtttgtgtgtgtgtttatgtagcagggagttagactgtcatattcattcccctttgattatatcccttgccagttggctaagcttaagaaattctgaacacaagtgttgccagaattctacccccacaacctggctgacagctttatcaacaaccctggagggagaacagtctccagcctgtyctcccatctctgtagtgccaactgcagcctgaatgtttgggcttcagtggtaaacagaagcagataagccccaatgagctaaagtgagcagatatttgttttactagcaacaaaaacaaataagtaactacataaaaagcaagccatgacattcagaatgtgcatgcccttttaatgcactgaagatttaagcaatcagcaatttaaacttagcaatgaaacttaatgaatattgtattcaaaatatcaataatcacattggaaaataaaatcaccttcattaaacaaataccacctttcaactgtctagaaggtaaatcataaca

SEQ ID NO: 380512 - DNA, 611 bp, Homo sapiens
ttcagcttttcaaattgaacatgtttagagattgctatagctcacagtatatcccagaatcaacatgaatgttattttgcatgcatgtgtgtgtgtgtgtgtgtttgtgtgtgtgtttatgtagcagggagttagactgtcatattcattcccctttgattatatcccttgccagttggctaagcttaagaaattctgaacacaagtgttgccagaattctacccccacaacctggctgacagctttatcaacaaccctggagggagaacagtctccagcctgttctcccatctctgtagtgccaactgcagcctgaatgtttgggcttcagtggtaaacagaagcagataagccccaatgagctaaagtgagcagatatttgttttactagcaacaaaaacaaataagtaactacataaaaagcaagccatgacattcagaatgtgcatgcccttttaatgcactgaagatttaagcaatyagcaatttaaacttagcaatgaaacttaatgaatattgtattcaaaatatcaataatcacattggaaaataaaatcaccttcattaaacaaataccacctttcaactgtctagaaggtaaatcataaca

SEQ ID NO: 380513 - DNA, 593 bp, Homo sapiens
tcaattacccaaaaacattggctggaggtgacaagaagggaattatatcagctaagtcctccaaggaggtagcttagcagtgcagtcttggcagtttcactccagggacaggtctgttccagagtcgaggctggtccagaaagatggaactagctgctcagaggggcaagctagaaagtagtaaaatattatttaccttttggttatttaataatgagacacttaaaaatagatacccatcagggtagcaatggttttttaatggaaaataaaaagtgttggcaaggaggtggagaaattgtaattcttgcgtattgctagtgrgaatgtaaaatgacacagccactgaaacattaaggtggctcctcagaaagttaaacatagaattaccacatgattcagcaattctacttctgaatatattcacccaactattgaaaacaaggactcagatatttttatacaccaaagttcacagcaacattattcacagtagccaaaaacctggaaacaacccaaatgtctatcaacagatgaatggataaacaaaatgtggtatgtatacacaatggaatattaatgagcctttaaat

SEQ ID NO: 380514 - DNA, 654 bp, Homo sapiens
cacagtgacagtagcaagtcagagttcctgtttttgcctccagttccctgtgtaagactttccatacctttcaaagggatcttttctcctaatatttctgggtttcctccaaaggaggctcatctagccacaaatcawtatgacagccacagtcactcagcctattctccttctgggatttggtctcctcccttggtggtgttggctgtttctggtgccatttgaagccacttatggcaatggagattgctggagaatggagaaagcaagggagctttcttcttatgctcccaaaatgaataagccaccttgtctaccacttgtggttgcccctccattttctcctataactgcgtatcttaacaggacagagtcttccaacaaatagagtttgaggagatgctctttacccaaggactgtttatttaggtttgtattcatgtgagatcttgctttagggtgaagaagaagaagattttaagcaactgttgttgagttattattgagtgctaattggtaccagttgctatgggataaagatacaaagggacattcctggcttgtgaggaactagttcaaaccatctagtttaagtagaataaacatagtaaaagttcaaagaattttgcaaaaattaagaaatcgaacaaaaca

SEQ ID NO: 380515 - DNA, 555 bp, Homo sapiens
atattaagcccttcaagtggtctttctaaagactccctcacaaggtttgaggaaagtagaaggacctgtttcccaaggctcataacccaccaacaattctctctaaaggagttttctcaccatttggcttctgatatggcttagctatgtccccactcaaatctcatgttgaattgtgrtccccagtattagaggtgagtcctggttggagggaatttggatcatgggggtggtttctagtggtttagcacctaatgctgtctcgtgatagagctcttacaagatctagttgtttaaaagtgtgtagcacctcccggttctctctctctcctgtctgccatgtgaagatggcttcccctttgccttccaccatgattgtaagtttcctgaggcttcctcagaggtagaagcctgtatttcctgcagaactgtgagccgattaagcctttttttaaaaattttttataaattactcagtctcaggtagtagcaatgcaagaacagtctaatacagcttccttatcttttctaaaaggctggaaagtgttacaaact

SEQ ID NO: 380516 - DNA, 491 bp, Homo sapiens
ttttacaggttacctagttcttctacccaatgcagggatacttaccacagcatccctggctgatggtcatttagtctttgctaaatttccttctagaagtggctcaatgcattttcaggcgtctctattaaattaactgatgcaaacggttatctgaacatttgtcaggcattgttstgagtctgccacatctatcatctcatttagtccttacctaaggatgggtacttctaatattgcttttttcctaatgaacaactagtttgccaagtttacatatccaacaatggctggaaccaagtcttaattccacagtctgacttcaaagctgtgctcttaaccttcctgatacactcatgtgtttctattctgccatttgctgagaaaaagaggaagttaaatttctctcttttttgacagctcttcaaatatttccagagatcattcgtgtgtctgtgtcacccttacctgtgacatccaactcttcccta

SEQ ID NO: 380517 - DNA, 530 bp, Homo sapiens
ccatagattatgttgctggctctgcatctgggccacagataggtcatctcttttggaattatacaacatttgattgctagactaacgtatagtcaagtctcaacagactcgtctttatttgtagctttctccattcccttcccctcctctacccccaggctraaaaggcctgacacaagaactttcctgaattctatgaggcagagccagaataaagatcagttgattcagatgttattgagtgttatctgaacagacatttagtctagctatagaatctagctataaagtctatttggcattatctaaaatacttattcggtatgaaaaattctgtattcatcttattactattccctgtggctctgaaattgatatcttcataggtgctatagcatttcagtactttgagcaatctttatggttgtacatgtataagaataagaataaacacactttaagctaaaaattggagaaaatcaggtctgaattggcatgagggatggtctataagccatatactattttta

SEQ ID NO: 380518 - DNA, 577 bp, Homo sapiens
tgagaagctagagacttagaagaagagggagaattccagaggaagatcacatactcccacagtgaggggggcacaagactgaaagagaaaaccaagacctacccctcccacatcaagtccctctagctacaaatctggttggtaatgaaaacgactgaaactttaaaattggaactttaaattcaatagatcctcactaaccaaaggatctggaaagctactgaatccatccatgatatcataaggaatctgctttaagtgggtggaaaattaaggaacagtccccaagaycaccctcatttctggcaccaattgtaagttcaagggttcccaagaccaccctcagatttggtaacttgctaggactcacagaacccactgaaatctgtcatacacatgattatggtttattacagtgacatgatacagattaaaatcagccaagagaagagaggcatgggacagagtccaggaaagttccactcatgcagcttccagctgtcctctcccagtgcagtcgcagacagcattaacttgcccagcaacaaaatgggacgatgcacactgagtactgcca

SEQ ID NO: 380519 - DNA, 577 bp, Homo sapiens
tgagaagctagagacttagaagaagagggagaattccagaggaagatcacatactcccacagtgaggggggcacaagactgaaagagaaaaccaagacctacccctcccacatcaagtccctctagctacaaatctggttggtaatgaaaacgactgaaactttaaaattggaactttaaattcaatagatcctcactaaccaaaggatctggaaagctactgaatccatccatgatatcataaggaatctgctttaagtgggtggaaaattaaggaacagtccccaagatcaccctcatttctggcaccaaktgtaagttcaagggttcccaagaccaccctcagatttggtaacttgctaggactcacagaacccactgaaatctgtcatacacatgattatggtttattacagtgacatgatacagattaaaatcagccaagagaagagaggcatgggacagagtccaggaaagttccactcatgcagcttccagctgtcctctcccagtgcagtcgcagacagcattaacttgcccagcaacaaaatgggacgatgcacactgagtactgcca

SEQ ID NO: 380520 - DNA, 551 bp, Homo sapiens
atatgacccagcagtaccactgaataaatattcaaaggaaaggaaaggaaattgatatgtctaagggatatctgcaccctcatgttattataaaactatcacaatagccaagttatggaattagcttacatgtccgtaagtggatgattggataaagaaaatgtgatacatacacacatatacacataaatatacatacacccaatggaatactatttcagccataaaaaagaataaaatcctgacatttacaaaaacacgaagggaactggagaactttatgttaactgaaataagccagacacagaaagacaagtgtggaaaccaaatgctgatctcacggaggcagagtaaaatgatagttactggaggctgggaaggrtatgtagggagatggagaatgaagagaggttggttaatgggtacaaatacagtcagatagaaagaataagttttagtgtttaatggaacagtagggtgactacagttaacaataatacattgtacatttcaaaataactagaagatttgaaatgttcccaacacaaaga

SEQ ID NO: 380521 - DNA, 602 bp, Homo sapiens
cacaagtatccaaaactgaccttccccatgcctggtcccatagagggtatggagggccacagcaatcaatgaatggggcagaggagcaggtggctgagaacccaatctgaggagtcagggagggagcaggaggcaggactacttgcagccaaggctctaggttcccagtgcatgttctattgtcccatcagacattagttataaagcgcaaattcaataatccagtgttaagaatttcaaaatgatgccagcagagcattaaaccctaagtgcagggtccctttctgagtgtggaccctatgcaactgcacatgtcacacacttgtgaagctgaccttgtgcagwtaaaatggtttctagtgaaccacagtgaagaaggtataacttattcttacacattcagacatctctatctgaaactatgtactcacaggtgtatcctgtcatggaaaaggtagatttgtgcgctctggaaactgttgatttctactaagtagtcaaactgtactaagttcattctgtatcactcagataagtgcaacttgtgtaatatttccaagtgttgtcagtgcctggtgttttctcaaatccagtagacaaga

SEQ ID NO: 380522 - DNA, 602 bp, Homo sapiens
cacaagtatccaaaactgaccttccccatgcctggtcccatagagggtatggagggccacagcaatcaatgaatggggcagaggagcaggtggctgagaacccaatctgaggagtcagggagggagcaggaggcaggactacttgcagccaaggctctaggttcccagtgcatgttctattgtcccatcagacattagttataaagcgcaaattcaataatccagtgttaagaatttcaaaatgatgccagcagagcattaaaccctaagtgcagggtccctttctgagtgtggaccctatgcaactgcacatgtcacacacttgtgaagctgaccttgtgcagataaaatggtttctagtgaaccacagtgaagaaggtataacttattcttacacattcagacatctctatctgaaactatgtactcacaggtgtatcctgtcatggaaaaggtagatttgtgcrctctggaaactgttgatttctactaagtagtcaaactgtactaagttcattctgtatcactcagataagtgcaacttgtgtaatatttccaagtgttgtcagtgcctggtgttttctcaaatccagtagacaaga

SEQ ID NO: 380523 - DNA, 559 bp, Homo sapiens
tagtttcatggctccagctttgttctttttgctcagattgtaaaagtaactttttaattcatgctagtgaggtagcatggagcataaggtaggagaacataaacaacactaattgttcactgttttaaattcacattaaccagtaatcagcagtcttttaagtaggtttttgctgactaaaaacagtagcaaaacattgctacttagattcttactctgtgctcaacttttgctatatcctgaggagcacagccctggccccaaagcagggagaaggggtttcccactgaactacctagcagtcatgaatagacaattaccctttgaacacatgaaaagccaacccttcttctaccatgcaagggcagcatacattgctttaaggtgactagacaacagcagttttggagaaaatgacttcagttctctgagttttaattttgtcattggtacmacaagaaggcttggtgcttttagcctctgaggccttttcttagttccaatattctatggttcccagccatttcaattgctgaattcaggaaggttagattttatt

SEQ ID NO: 380524 - DNA, 515 bp, Homo sapiens
aaatcttttgagaggcttaccttttttatatgaaagaataatttcactaatttcaccaatttcaccaatttaattttacaaactatttttacattaactcatttccctaattaatgaattaactgcccctagtaaatgtgcatggtaagtcttcatcttctcatagagtgtgtgaccttagagaaaacacgaaggagaaatggactgtctcaaactcacatcatgctgtattcctcttctttcagttaaagctacctaggtgcttcaaatttgttctactaaacttttttctttgtatcatttgtcttttcctatcattgcattatttaactaaaaagaaataatttgcttagtgatatacttgaaaattcatataaaagacgtatgaaaagtaggtctcactttgtttcatacctmaatgaatgaaatcatagatcaattatttggtcatttactttacttttttatcattaaggtgtgttctgggttttctaaccagtaaattttaaattctt

SEQ ID NO: 380525 - DNA, 597 bp, Homo sapiens
cactgtatcacaaaatcagccatagwtaatgtattattgaatgagcatgtccttgttccagtaagattttgtttacaaagaaaaagaagaaaaaggagttgggctgaagttggcctacaggatgtaatttgccaatctcagttctagcagaatatctctcagttctagcacagtatgctagaaggtgacaagtcataaaggaaaaatggaaaaggacaagatgaggggaatggaggagagtgagtagattaaaattgtaaatgcaatgatgagtgtgggcctcattaagaaggtgcaagcttaatatgagcaaagaatagaaggaggggaagagagaagtcacacgtccttttgtcaaagttgctccaagtagatggcacatccagtaaataagatgcctggtttgctttgggatgagcaagttggccagagtttctacaatggagtaagagaaaggtagaagagaagtgtggtcaagtaatgttcagtgtgcaacactgtgtatgtcgttatatgccgatgcatagctacttgcttttactctgagaaaaatgaggaaccctcattcttaattgtatatagtaataattataattt

SEQ ID NO: 380526 - DNA, 604 bp, Homo sapiens
tggccctgtgtagaccaaagccctgggcccctggatgccttatcttccaaagcacatagaaccaagtattaaatgggaaacacatttttattgagataacccatggaaatattagaatttatctattactacaaataatattacttgccattctctaataaagatgttgctaacatttcagcctgatataaagttatgtgccaatgtgtacctttgaaattgtgttgaaagtctctaaataggctattataaaaatctgtctcccatagatagcctgtagaaagatggaccacaggtagatgccaaaacaaccatgcccatacgaactctctttcaccatttatctttccataatacagaagggaaatagaaggcatatataaagaaaagtgttcccaaggcagtcctagattataggtactaagtggaacatgtcgtgcctaattacataggcaaatcaaagtattatcttttaggtggctttttaactttgggattgagtgccctatacaatttacaccttggycttgatagtgacatttgaataaactaagaaggagatgctgcctgtcatagaaggctgctatgatcaacacaatctatg

SEQ ID NO: 380527 - DNA, 414 bp, Homo sapiens
tttgtcatttttataaaatgacatcagttatcttatctccctgtggtggctcctaggttcttggtcttttgtttgcacctagatgtaaagctcaacatattttcagactctcctaaaactccactaatgaaaacatgactgtgaaatgcttattttctgtagtttttaactgggaaacagagaagggatatttgtattacaataaacaaatgaagagccgtttgtctagttttattctccacagtcacacagtttttgttgactcttgcctgctctttcytccttttttcatctatggtttctccttgacccttcatatctttaagtttttttgttattattattttttattattaggaagcaacttagcttcctcttgtttcttgcatatcaggaaaattagcaagagaaatt

SEQ ID NO: 380528 - DNA, 559 bp, Homo sapiens
ggctaacttcagatgaaagtgtgaaaaaaactattttaaaaactaattttttaaaggaagatcattacaagataagcttatatacattagtaagttaattatgaacatagttcaaagtagtttttttcattgaaagtattatcaattcattctttacatgagttcaaataaaaccatatttctgtaacacagaacaaaacaaaacgttctgaatatttgaatgtggtgaatgtggatattgcaacaaattttctttacttctcattagacyatatccatgagaattattatggtccttttcagtaatatttgcattattgttactataaaactttctgctattttatacatttagctaattttttctattattttaataatagggtgttttaattaacataagctggctaaataaaatggtactgtggaatttgctctcaaatagattttactccaataaatattttaatgatattgattgtctcttagaaaagcaaatgagacattcaaaaataaataaatagatataaatccaatctaaatgtaatagtaattctat

SEQ ID NO: 380529 - DNA, 561 bp, Homo sapiens
tcactcactatcatgagaagagcatggaggaaatctgtcccatgatctaaccacctatcatcaggcccttccttcaataataggggtttagaatttgacatgagrtttgggtggggacacaaatccaaaccatatcagaaggcttgaaagaaatgggatattaagaaatagaaaactgggaagtggcaaattgcccgtaaatgcactgcatttggtttattaatatcaattattgaaaatttgccatgtgtcaggtactgtaccaagcactttaggtataaacctaacttaaatctaaaaaaagagaaattttgaattccaaatttacaaatgaagaaactgagaccaggacatgtattgacctaagatcacacatcagaggagagattcaaaaccatgtcaattttatttacatacccagattctcaacttctgtgctaccctggagagaacgacatggcctgtaatggtaaaagaaagtttcattagaaaatataactgagtttgggtatgtaattgagtttgggtatgagaagtggaactcacaacagtcattgaaga

SEQ ID NO: 380530 - DNA, 561 bp, Homo sapiens
tcactcactatcatgagaagagcatggaggaaatctgtcccatgatctaaccacctatcatcaggcccttccttcaataataggggtttagaatttgacatgagatttgggtggggacacaaatccaaaccatatcagaaggcttgaaagaaatgggatattaagaaatagaaaactgggaagtggcaaattgcccktaaatgcactgcatttggtttattaatatcaattattgaaaatttgccatgtgtcaggtactgtaccaagcactttaggtataaacctaacttaaatctaaaaaaagagaaattttgaattccaaatttacaaatgaagaaactgagaccaggacatgtattgacctaagatcacacatcagaggagagattcaaaaccatgtcaattttatttacatacccagattctcaacttctgtgctaccctggagagaacgacatggcctgtaatggtaaaagaaagtttcattagaaaatataactgagtttgggtatgtaattgagtttgggtatgagaagtggaactcacaacagtcattgaaga

SEQ ID NO: 380531 - DNA, 561 bp, Homo sapiens
tcactcactatcatgagaagagcatggaggaaatctgtcccatgatctaaccacctatcatcaggcccttccttcaataataggggtttagaatttgacatgagatttgggtggggacacaaatccaaaccatatcagaaggcttgaaagaaatgggatattaagaaatagaaaactgggaagtggcaaattgcccgtaaatgcactgcatttggtttattaatatcaattattgaaaatttgccatgtgtcaggtactgtaccaagcactttaggtataaacctaacttaaatctaaaaaaagagaaattttgaattccaaatttacaaatgaagaaactgagaccaggacatgtattgacctaagatcacacatcagaggagagattcaaaaccatgtcaattttatttacatacccagattctcaacttctgtgctaccctggagagaacgacrtggcctgtaatggtaaaagaaagtttcattagaaaatataactgagtttgggtatgtaattgagtttgggtatgagaagtggaactcacaacagtcattgaaga

SEQ ID NO: 380532 - DNA, 601 bp, Homo sapiens
aacattcaacattctagttacttttctatagctccatatatattttctgtaccattataaacatcacactttgaggacatgaactatgtcatttaacttcttgtatgctttttctaacaagcaattaactactaaggccataaactgtgcttatcttgtttagcaatgtgtccctgaaaccaaaagcagtgtctgacccataacacattctgaacaaatgtatgtatgccaaatgaactaatcaataaataattggtggatattttgccagtaaaagataattataaatttcattttagtattttttctttagggtgtttttgacagcgaaatttaaatattaaaataattcgagtagatgaaacatatatttaagagtactcactgtgtgtgatatwgtagccctacgcatgaaagatctagaaataaggagatattgccccaatcttaaggagctcgcagcctagctgaggacacaaacgttagggtagatacacagtacgtgctgataaggaaagttgaaggatgtatgtcaaaggaacatgcgaaagttgagaaataataagtaaaacatcaatgcaacagtgatcgtatggagggg

SEQ ID NO: 380533 - DNA, 505 bp, Homo sapiens
aaactaaagaactttagaacgtgaagttacactttgatcatatattttgttatgctgttatctccactgggctaattcttttttttaatttgacaaaaatcacatatttttatgctgagcctcaactctaacatttatgctaatatttctaacttctcttctgccccttcctcctagtgtagggccagatattaatttaattaatgtatcatttgactttttccatatcataagttaaagyttagcatccaaatcctaaatgtcttctcaatggacacttcattttcgcttgcaatttattaatgtcaatgggcagtaatccctttaaatatgttaagatgttttattatcataaaaagtaattcaactcgacatactaggatttctctgaagctcatcttatgaaaataaaatatgcctcaattcctgggctttagaaactatatttttctattcatgaagtacaatatcagttctctacttcttttttgattatccatacttg

SEQ ID NO: 380534 - DNA, 505 bp, Homo sapiens
aaactaaagaactttagaacgtgaagttacactttgatcatatattttgttatgctgttatctccactgggctaattcttttttttaatttgacaaaaatcacatatttttatgctgagcctcaactctaacatttatgctaatatttctaacttctcttctgccccttcctcctagtgtagggccagatattaatttaattaatgtatcatttgactttttccatatcataagttaaagtttagcatccaaatcctaaatgtcttctcaatggacacttcattttcgyttgcaatttattaatgtcaatgggcagtaatccctttaaatatgttaagatgttttattatcataaaaagtaattcaactcgacatactaggatttctctgaagctcatcttatgaaaataaaatatgcctcaattcctgggctttagaaactatatttttctattcatgaagtacaatatcagttctctacttcttttttgattatccatacttg

SEQ ID NO: 380535 - DNA, 594 bp, Homo sapiens
ggttgtcttcttttctgcaatatttccattgcttgttacagtgctgggtatctagtacatgccccaaaacaatttttgtctttttgaataaatgaataaaactgcacctcttaacacctcagaattagaggagttatttgagtcatccctgcattctgaaactagactttctttcctaaatattgggcaaatataaaggttttccatccttttcttaagatcctcttcttgtaggctgttcatcgatttatgcatgtatttctgaaactataatgtatgtcycagtcagaatgaagttctttagatccctacatgtttaggttagtattgaccctcagacccaggcagagatgggcctgaagataaggattagatttttccagccctgagagaatgggagccaggaagtacattgccaagacagctagtatatagattgatgtctttgatgtctcgctagtgccttcttccctgctccagaaaaatcatatacttttgggatgacatataattaacaataaaaatgctagtgagaaaagcacacatttttaatatttagataatgactatgttagtgattatcatactagatat

SEQ ID NO: 380536 - DNA, 634 bp, Homo sapiens
atgtttaggttagtattgaccctcagacccaggcagagatgggcctgaagataaggattagatttttccagccctgagagaatgggagccaggaagtacattgccaagacagctagtatatagattgatgtctttgatgtctcgctagtgccttcttccctgctccagaaaaatcatatacttttgggatgacatataattaacaataaaaatgctagtgagaaaagcacacatttttaatatttagataatgactatgttagtgattatcatactagatatgagttaatgattaattgggattattattgtaatagtagcaggagaacagttttacaaaagagattaattagaaataaattttcaagaagctggaatggataagacaaagaggacgaggcttaattatatagtgtaaagagcatcagatatgtcactagagatgtagatttgattggctaacagacacatgcatttattctgtaagtatacattggtcatctatgatgtrctagacaatctatgttttggagttatggcagtgatcacaagaaaaaattggtatcttcactgagtttacattctgttataggttgagttgtgacactccccccaaaattagtatgctgaagta

SEQ ID NO: 380537 - DNA, 533 bp, Homo sapiens
tgccaaaatggaagagaaccaatgattaacagtacaaacaatagccaacaccatagacatttcagttgattcagcttacatgattctgactgaaaaattgaagttgtgcaaastttccactcgatgggtgccaaagccattgtacccagatcagctgcagacaagagcagagctttcaaaaaaatgttaaacaagtaagatcaagattctgaagcatttcttcaaggaattgtaatagaagatgaaataggttaacggtatgatcctgaagacaaagcacagtcaaagcaatggctaccaagaggtggaagtggtccactcaaagcaaaagcacattgatcaagagcagaaatcatggcaacgttttttgggagattgtattagtctgttttcatgctgctgataaagacatacccaggactgggcaatttacaaaagaaagaggtttaactgacttacagttccatggggctggggacgcctcacaagcatggtgaaagatgaaaggtatgtctcacatggtagcagacaag

SEQ ID NO: 380538 - DNA, 593 bp, Homo sapiens
acagcagccttaaaaacaggcacagtgattatagcactatgtaatgagtgtgaaattagaggcaatgcaggggtagagaggaaagacatccaacccagcaagaagtggtaacctggcgggtcttggaggatgaatagggttgtgcycagatgaagaaacagggctgcctccagcacaagccgtttttcagaatttgaaaaattattcactttgaacatataaatccacaaaagcatatgccctctgagcattcaattaggtaaaggtatccctgcctccatattgacagcaccctgggacaagctggattttggctctgggttgaggcccctcagcctttcactggcaagagcttgcacaaccatttacccaatctcagtagacctaagtggagaagggcattccagagtgagaacaccaacagaaaaagtacctaggcctgctagagcatgggggagagtggggagccacagatggtttggtgttgctgaagagtgtacacaagaaggcatggagaagtggggcatgaaaccaggtgcaggtgaggttagatcacgcagggccttgcttgccatgctaaggaattataggct

SEQ ID NO: 380539 - DNA, 636 bp, Homo sapiens
gatctacctgccagtccatgagactcagtcatgtgtaggatattctagtcaaggatcgttcttttatcaaacaagtttaagaaaaacatttttttgttttgttgttgttttttttttggaaaggataaaggaccctcactgagaactcaaagacaagaagttaaacaaggggagttcataggaacctcaaaatcattagacatcttctctctattcctttcttgggacaaaatatgtatttattttttctctataagaatgctccattttttcctctgcaaaccagcttccttgataaggcactattctgttaactttgagttaacactgttaactcgaattctaaatctgtcttctctatgtgcgcttagaccttcacttcccaatatgcactgcttttgatgtttgagttcagattctcaaaagtggggatcagctaaaggaccacaattctgcaatgtrtccaattacctttggtaagactaaggcacaatctgatacaaacatgtagttccaggcctacttcttcagcagaacagggctggaagcttctgagaagggaaactgaactgggtacataggaaagtgatcgaaacaggttaaggtcacaagagcaactctgtcttagatgtctca

SEQ ID NO: 380540 - DNA, 361 bp, Homo sapiens
acagcccttggcaaccactaaactactttctgtctctatggatttgactattctggacatttaatataaatagaatcatacagtatgtggacttctgtgtctaacttctgtcacttggcataacattttaaaggttcactatgttatagcctatattttatttctttctgtaactgaatatctcattgtatgaatatatcacattttgcttgtacagycttgctgatagacatttgggttgtttgcactttttagctatgataaatatgctgctagaacattcatatacaagtttttatatgtaaacatgcttttatttacattgagtatatttctaggagtaggcttatttggttatatg

SEQ ID NO: 380541 - DNA, 585 bp, Homo sapiens
caaataaaattatacacatttrtgttgtacaacatgattgtttgaaatatgtatactttgtggaatggctaaatcaagctaattaacatatgcattacttcacatgcttagcatttttttgtaagaacacttaaaatctactctttcagcaattttcaagtgcacaatacatttattaattatagtcactatgttgtacagtagatctcttaaacttagtcttcctgtctaattaaaattgtgtctcctttgaccaacatcttctcaatcccccttgtcccccaggccctggtaaaaccaccttactctctgtttctgtgaatttgtctttttaacattccacacaagtgacaccatgtggtatttgtctttcttctgtgcctggcttatttcacttagcacaatgtccttcaggttcatctatattgtcacaaatgacagaatttccttcatttcttaagactgaatcgtattccattatgtatataccacattttaaaaatccgttcatccactgatagatgcttaactgattccatatcttggctactctgaagagcgctgcaatgaacatgggagtgcaga

SEQ ID NO: 380542 - DNA, 601 bp, Homo sapiens
aattgcactccataaggggattttatggtcattgaaatagtgacctgattctaaatgaagcctttccacttttggaggcctaggtgagagaattgcttgagcccaggagtttgggaccaacatgggcaacattgtgagatcctgtcactacaaaaaattttttttaaagtaactaggcatggtggcgagcccctgtgggcccagatactcaagagactgagacaggaggatcacttgaccccaggagttcaaggctgcagtgagccatgatcacaccattgcactccagcctgggcaatagaatgagacccwggctccaaaaacaaacagtaacaaaaatgaagtctttccacattgtcttagggatacatttttctctaaattaaatattgttgtgccaaataattattgtcttcatgactgctcatataaatatttgatattataattaatattttaaagtgcccagtatatgtaagacaggctgtaagtgctttctattccctatattttcttatatttatattccttatattttgacacaccacacaaaatgtataagttagaagttgctgcataacaaccaccatattgagctcac

SEQ ID NO: 380543 - DNA, 337 bp, Homo sapiens
agttaatggctgcatgatattcagaacgttacttcatatttttgaacttcagttttctaatatgaaaacgrggttaatagcagcacttacctcataaactattgtgaggacaaaagaagatataacatacaaagtgtttaggacaattatttacacactgtacatatttaatacgtatactctggttcttattcctggtagggtttttgagattgtgcacaacttctgatcaaggcaagtcagaaaacaaaccttataactaatgggtatttgcattttatccctgtttctccttgagtggactcagtcattctctcacaaaacctcatacatcaaa

SEQ ID NO: 380544 - DNA, 599 bp, Homo sapiens
ctgcttccccaagctgtgctgggggcaactgttcagcatgtagcattacacaaatcatctctacttcagtcagaaacagaaaaagggaaaggggaaaaaaatgagggctgaacctgagctacaggttaaagggaataacctaggatagaaggcatggagtctaaattgcaatacctgtggcccctgcacgcaggagaaaattaagtgggaatcatgccattcaacaagttccatgtccttagaaataaacttcagaatgttgaaaaagtagtagcatccactgatgcccatgcctgttatccccaagtgtatcacagctaggcaaaagaggtgtccagaatgtcctgtataaggcatccagaatgtcctggactgtgggaaagaaaattttcaaagcatagctcaccactaggttttacacagagcaggtgagaggctagaagacagtgacaagggaacagaaatacagaactattccgttccatcaatatgaacacycacatccaggaatgggtgctgtttacttttttaactctttgcaagcattatgactttgtacagtaatgcatccaacatatgagatattgagcacacaccca

SEQ ID NO: 380545 - DNA, 559 bp, Homo sapiens
gtctccattatattattatacagaatggcttcagcagccccccaaaaagaaaaaaaaatcacttatgcttcacctattccatgttttcctcctaccccagaacttctggcaaccactaaacattttactgtctacagttttgccttttccaaaatgttaggaaattggaatcatacagtatgtagccttttcaaactgaatttttgctttagaaatatgcatttaagtttactttaggtctcttcatggtttaatggcttatttctttttatcactgaataatcatctattgtgtggattactatagtttgtttatccattcatctattgaagaacattttgtttgctttcagtttttacaactatgaataaagctactataaacatttacttgcacatttttatgtggacataaatttgcrtagcagttgggtaaatacctaagatgcaattgcttgattttttggtaagactatgtttagctttgtaagaaattgccagacagttttccaaagtaactgtcccattttatacattaccactagcaatgtatgagagt

SEQ ID NO: 380546 - DNA, 618 bp, Homo sapiens
aggccatcttgaagtagaggagaggcttgaagaaaagcatggataaggatcacaatggtgaatgatcctcatggggaatcaagacactgtttggtttgaaggataatgccttagtaatacccacagatcaggaaccttaaagggttgggatgtgtcccacctctatctggattgatactggatattttaggttccatttctataggaaagggcatcagaggacctgttagtayaaaagggcttgggcagaggaaataagtttgggtaggagaaataattaatattaatttctaattcttaaaagatctcctggaaggattttctacctaataaaaatgcccacaaaaggaatgggttgcagagtgagaaaagccacttgcttaaaagtataaataaattttactgtgggtgggaaatgtttaattagagagtttcaaccttcaaaatgtaaatgaagacaaagaaagagaaagggggagtttataccatataagtagttacctgtgactagcaaatatctggcacaagagaagtgctcattaaataattcttgaattaaatataagtgacagaaatcttggcaatattagacttttctttatttctattttaaaaaat

SEQ ID NO: 380547 - DNA, 618 bp, Homo sapiens
aggccatcttgaagtagaggagaggcttgaagaaaagcatggataaggatcacaatggtgaatgatcctcatggggaatcaagacactgtttggtttgaaggataatgccttagtaatacccacagatcaggaaccttaaagggttgggatgtgtcccacctctatctggattgatactggatattttaggttccatttctataggaaagggcatcagaggacctgttagtacaaaagggcttgggcagaggaaataagtttgggtaggagaaataattaatattaatttctaattcttaaamgatctcctggaaggattttctacctaataaaaatgcccacaaaaggaatgggttgcagagtgagaaaagccacttgcttaaaagtataaataaattttactgtgggtgggaaatgtttaattagagagtttcaaccttcaaaatgtaaatgaagacaaagaaagagaaagggggagtttataccatataagtagttacctgtgactagcaaatatctggcacaagagaagtgctcattaaataattcttgaattaaatataagtgacagaaatcttggcaatattagacttttctttatttctattttaaaaaat

SEQ ID NO: 380548 - DNA, 618 bp, Homo sapiens
aggccatcttgaagtagaggagaggcttgaagaaaagcatggataaggatcacaatggtgaatgatcctcatggggaatcaagacactgtttggtttgaaggataatgccttagtaatacccacagatcaggaaccttaaagggttgggatgtgtcccacctctatctggattgatactggatattttaggttccatttctataggaaagggcatcagaggacctgttagtacaaaagggcttgggcagaggaaataagtttgggtaggagaaataattaatattaatttctaattcttaaaagatctcctggaaggattttctamctaataaaaatgcccacaaaaggaatgggttgcagagtgagaaaagccacttgcttaaaagtataaataaattttactgtgggtgggaaatgtttaattagagagtttcaaccttcaaaatgtaaatgaagacaaagaaagagaaagggggagtttataccatataagtagttacctgtgactagcaaatatctggcacaagagaagtgctcattaaataattcttgaattaaatataagtgacagaaatcttggcaatattagacttttctttatttctattttaaaaaat

SEQ ID NO: 380549 - DNA, 563 bp, Homo sapiens
tcccttacttcctgcccaaatttgtttgtcctatcctagattctcagttttttgtccagttttttttttttagacagagtctcactttgtttgcccagcctggagtgcagtggcatgatctcggctcactgcaacctccacctcctgggttcaagcgattctcctgcctcagcctcctgagtagctrggattacaggcatgcaccaccaagcccgggtaatttttgtatttttagtacagatgaggtttcaccatgttggtcaggctggtctcgaacttccaacctcaggtgatccgcccgcctcagcctcccaaagtgctgggattgcaggcataagccactgtgcctggcccagttttttgtccttttaccaggttaagtctctttttagttgtcttttctttgtcctctcagtttaatgttgttattagactgaccagatgtccacttttaacttacgctttcaatatctcctcagagccacattctgcaacacatggccctgttgcatcccatttaaggcttgctggaaaccaacccttgtacaggccttaagcttgtc

SEQ ID NO: 380550 - DNA, 563 bp, Homo sapiens
tcccttacttcctgcccaaatttgtttgtcctatcctagattctcagttttttgtccagttttttttttttagacagagtctcactttgtttgcccagcctggagtgcagtggcatgatctcggctcactgcaacctccacctcctgggttcaagcgattctcctgcctcagcctcctgagtagctgggattacaggcatgcaccaccaagcccgggtaatttttgtatttttagtacagatgaggtttcaccatgttggtcaggctggtctcgaacttccaacctcaggtgatccgcccgcctcagcctcccaaagtgctggsattgcaggcataagccactgtgcctggcccagttttttgtccttttaccaggttaagtctctttttagttgtcttttctttgtcctctcagtttaatgttgttattagactgaccagatgtccacttttaacttacgctttcaatatctcctcagagccacattctgcaacacatggccctgttgcatcccatttaaggcttgctggaaaccaacccttgtacaggccttaagcttgtc

SEQ ID NO: 380551 - DNA, 588 bp, Homo sapiens
atcccatttaaggcttgctggaaaccaacccttgtacaggccttaagcttgtccagtgaatgcaaatacacatcagcagtgagattgattgaagaaaaataagactgatgacaagtagagtaacttctatatttgaattgtactgarctattattatatctcccagagaaacattcaaactcaatattattattatcatttccattttacagtttaggaaactgaggcccagagaggttaaataacttgtccaagtttaatagtaaataaatgtatacctgggatttgaaaaaattgtttagttaatagattctcagcttcaatgctgcatttggaggtgattatagcaaagatccagggaagaagagatggtttgattgagaccatgggagggggaatggaaaggaaagaagccttccctaaaaaatcattattggtaatatgcaaaacctagtgcccctcctcctgatggtaggacaatttcagggaatggtctaagagaatagatggccctggatctcatcaggatgagacagacgtaacaacagggtaaagctcacctataattcaaagagcagctggcagtaa

SEQ ID NO: 380552 - DNA, 588 bp, Homo sapiens
atcccatttaaggcttgctggaaaccaacccttgtacaggccttaagcttgtccagtgaatgcaaatacacatcagcagtgagattgattgaagaaaaataagactgatgacaagtagagtaacttctatatttgaattgtactgagctattattatatctcccagagaaacattcaaactcaatattattattatcatttccattttacagtttaggaaactgaggcccagagaggttaaataacttgtccaagtttaatagtaaataaatgtatacctgggatttgaaaaaattgtytagttaatagattctcagcttcaatgctgcatttggaggtgattatagcaaagatccagggaagaagagatggtttgattgagaccatgggagggggaatggaaaggaaagaagccttccctaaaaaatcattattggtaatatgcaaaacctagtgcccctcctcctgatggtaggacaatttcagggaatggtctaagagaatagatggccctggatctcatcaggatgagacagacgtaacaacagggtaaagctcacctataattcaaagagcagctggcagtaa

SEQ ID NO: 380553 - DNA, 555 bp, Homo sapiens
catctgggtttgtcactaatcttctcaaatgggttagtcatcaaggctctttattaactgtcaagcaattgattccagatgaaagttttcagaattgctgctgaaaacgtgcaggaggccctagagattggacacgtttctgatgagtcgatttgcctttattccaccattttcaatgtccattttgatggtgcaactagagtaatctcagctaatgaaaaaataatttagtccaaagtggctgttgatagagttgtgtaatgacgtatatgtgcttgatgtattataattcataataaatttataaaaatattattcataataatatttataccgattattattgctttattataaatcatcattgcgtttttatgatgggaagattacactataagactaccttattttccccccagagagggactatgacctgcaccagaaacctgtgtttcttttttcctttgtactgcatccaacggtgcacgtgttrtatctttctcagccactttggagaatcacttgacaatgaattggaatttggctggaaacttg

SEQ ID NO: 380554 - DNA, 462 bp, Homo sapiens
tacatagatagatacatagataggagacaaatagacatgggggcccacatttaattaccaagatcatgaaattattataagtgtgccatgaagtctttctccttttacatttattttttttttttacaataaggattctatgcaaaagtatgagactcttctgccaatttctgcctgcctgctaaaaaattcagacattgtaatrgttaatttccagctcatgtggatcaaatttctgtaggttagcagaaagcaaataggagtcccaaatgtctgtcacttaaataagagatacattatttaaactaaaaggacacttattacagcaggaattctattacacatcaatcaaaaccagggatttgcctaaggttagtcttgtccttgttgttcagccaaactctgctcttcaactttagatttaacctttagaagaacgtatgactgaattttagctttatt

SEQ ID NO: 380555 - DNA, 529 bp, Homo sapiens
gtaatgggacattaataaactgatgagttacattcatttgtaagaatccagttaataacaactgggtagtgaaaagctataatttgacatgcacttgaattcatgtaaggttcattggaaaccaagatttcagcagtagtgaaagtgaagtcccagactttacctatcaatgggtgggggctagtaatgtactgctrtcttggtgagaactgcctggaaattagttggaaccaaatatgtggaaggaaaaaattattgattccaattgaaaggggctggagatgacaggactgacagctgatgcctagttccccactgccagggccaaatcgaatctggaagattggaagttatgtgaatcagcccaaggtggaattacaaactagagagaccagctgtgatgtttctggacattgccagagaagccagagatggtcccaatcaaaaagacaaaaccagtgaggggcatcttaaggtcattaaataaaaaatagcattgattgttagagccaaaagactttttaagctc

SEQ ID NO: 380556 - DNA, 592 bp, Homo sapiens
ttgcaaagctatagtaatcaaaacagtgtgatgccagcataacagcagacacataaactgatgaaacagaatacagagcccagaaataaacccagtcatatatagtcaagtagttgttaaaagggccatcaaaaatatacaataatgaaaggatagtctcttcaacaaatggcattgagaaaactgagtatctacatgaaaaaaaataaattggaccattatcttacaccatacacaaaaattaacttgatgyaaattaaatgttcaaatgtcagatctgaaatcatgatcttacacgtttcctagatgaaaacattgtggaagaaagctccttgaaattggtcttggcaatggattttttaatatgccccaaaagcagaggctataaaagcagaaataaacaaacactattgcatcaaactgaaaagcttctgaacagagaagggaacaattgacaaagtaaagagacaacccacagattgggagaaaatatttgcaaatcatatatcaaagaagaagctaatatctaaaatatataaggaactcctacaactcattagcaagaaaacaaataacctgatccaaaaatgag

SEQ ID NO: 380557 - DNA, 580 bp, Homo sapiens
atacacccgaaatcttctgacagagtagatgttaagtatcctcactgccccctagcccaaccaatggtaactaygtgaggtgatgggtgtgttaattagcttgattgtagtaattattttgccactggcacataaaacatgtctaagaaatactgatttttacttactttccatgttccttccttcctttgcagtatggttattacatactacaatgtgatccaatcatcacattgtacaccttaaatatatgcaatttttatgtgtcaaatatatctcaaaaacctggaaataaaaagagtaaacaaaaagaacaaaacaaaagaatagtatattcccaaagccccctgccatcaatctgaattcagtgtccttgctgcttgtttcttaagcccagaatgtattcctatcatgttacttttatactgtatagtaatctgattttttccttgcaagactaaaaaagatattatctttcctgtccatgagacccaatgaaacacatggcacattttatttttggggttgttttgttttgttttgttttgtttgagatggagtcttgctctgtcgcccaggc

SEQ ID NO: 380558 - DNA, 646 bp, Homo sapiens
gtcttgttataaactgagttgtttctccctcaaactccaattcatatgttgatgccgtaacccccaatgtgactgtgtttagagatagggcctttaaagaagtaattaaggttaaatgaagtcattagagtgggccctaatccaatacaactaaagtctttataagaagaggaagagaaaccagggatgcacacgcacatggaacagaaccatgtgaggacacagctagaaggtgaccattggcaagccaaggagagaggcctcaagagcaaccaaccacctgacacagccccttgatttgagacttccaggctccagaactgtragaaaataaatttctgttgcctgagacaccctgtttgtggcattttgttatagaagccctagaagactaatataggtcccatctcagtagggatataaaaataaaattgtctttcttttcaatcgctgccttcaactctgctttatcaaatctctctttttcatccttaattatatcttggttagattccagaaaatttcccatcgctttcagttaataactttccatttcattctgaagcttcaatcacaaacttgagttaaatctctttgtcccacttccccttacttcgtggatcaagagacctgaggtaggcagtgg

SEQ ID NO: 380559 - DNA, 646 bp, Homo sapiens
gtcttgttataaactgagttgtttctccctcaaactccaattcatatgttgatgccgtaacccccaatgtgactgtgtttagagatagggcctttaaagaagtaattaaggttaaatgaagtcattagagtgggccctaatccaatacaactaaagtctttataagaagaggaagagaaaccagggatgcacacgcacatggaacagaaccatgtgaggacacagctagaaggtgaccattggcaagccaaggagagaggcctcaagagcaaccaaccacctgacacagccccttgatttgagacttccaggctccagaactgtaagaaaataaatttctgttgcytgagacaccctgtttgtggcattttgttatagaagccctagaagactaatataggtcccatctcagtagggatataaaaataaaattgtctttcttttcaatcgctgccttcaactctgctttatcaaatctctctttttcatccttaattatatcttggttagattccagaaaatttcccatcgctttcagttaataactttccatttcattctgaagcttcaatcacaaacttgagttaaatctctttgtcccacttccccttacttcgtggatcaagagacctgaggtaggcagtgg

SEQ ID NO: 380560 - DNA, 646 bp, Homo sapiens
gtcttgttataaactgagttgtttctccctcaaactccaattcatatgttgatgccgtaacccccaatgtgactgtgtttagagatagggcctttaaagaagtaattaaggttaaatgaagtcattagagtgggccctaatccaatacaactaaagtctttataagaagaggaagagaaaccagggatgcacacgcacatggaacagaaccatgtgaggacacagctagaaggtgaccattggcaagccaaggagagaggcctcaagagcaaccaaccacctgacacagccccttgatttgagacttccaggctccagaactgtaagaaaataaatttctgttgcctgagacaccctgtttgtggcattttgttatagaagccctagaagactaatataggtcccatctcagtagggatataaaaataaaattgtctttcttttcaatcrctgccttcaactctgctttatcaaatctctctttttcatccttaattatatcttggttagattccagaaaatttcccatcgctttcagttaataactttccatttcattctgaagcttcaatcacaaacttgagttaaatctctttgtcccacttccccttacttcgtggatcaagagacctgaggtaggcagtgg

SEQ ID NO: 380561 - DNA, 474 bp, Homo sapiens
gctgctgtggtctgaatgtttgtccctcacatggaattccggaacactgctacaagggtctgaatgtttgtccttcacataccattccagaacactgctgccgtggtctgaatgtatgtccctcacataggattccagaacactgctactaggttctgaatgtttttcccacacctaggattccagaacacttctgctggtgtctgaatggttgttcctcasatatgattccaggacactgctatgagagtcttaatgtttgtccttcacgtaggattctagaacactgctcccgtggtctgaatgtttgtccttcacatagcattccagaacactgctgctggggtctgaatgtctgcctctcaaatcagattccagaacactgctgctggggtttgaatgtctttccctcacatagaattccagaacatggctgggagggtctgaatgtttgtccctcacatgggataccag

SEQ ID NO: 380562 - DNA, 474 bp, Homo sapiens
gctgctgtggtctgaatgtttgtccctcacatggaattccggaacactgctacaagggtctgaatgtttgtccttcacataccattccagaacactgctgccgtggtctgaatgtatgtccctcacataggattccagaacactgctactaggttctgaatgtttttcccacacctaggattccagaacacttctgctggtgtctgaatggttgttcctcagatatgattccaggacactgctatgagagtcttaatgtttgtccttcacgtaggattctagaacactgctcccgtggtctgaatgtttgtccttcacatagcattccagaacactgctgctggggtctgaatgtctgccyctcaaatcagattccagaacactgctgctggggtttgaatgtctttccctcacatagaattccagaacatggctgggagggtctgaatgtttgtccctcacatgggataccag

SEQ ID NO: 380563 - DNA, 474 bp, Homo sapiens
gctgctgtggtctgaatgtttgtccctcacatggaattccggaacactgctacaagggtctgaatgtttgtccttcacataccattccagaacactgctgccgtggtctgaatgtatgtccctcacataggattccagaacactgctactaggttctgaatgtttttcccacacctaggattccagaacacttctgctggtgtctgaatggttgttcctcagatatgattccaggacactgctatgagagtcttaatgtttgtccttcacgtaggattctagaacactgctcccgtggtctgaatgtttgtccttcacatagcattccagaacactgctgctggggtctgaatgtctgcctctcaaatcagattccagaacactgctgctggggtttgaaygtctttccctcacatagaattccagaacatggctgggagggtctgaatgtttgtccctcacatgggataccag

SEQ ID NO: 380564 - DNA, 469 bp, Homo sapiens
aatactccagctggcttctgagtgtttgtccctcacataggattcctgaagactgctgctgtcactatagtcgttgygagtgtctgagtgtttgtccttcaccaaacactaaatatcctgcccctttagtcttggactttccagcctccagatctgtgagcaataatctctgttgtttatgaattactcagtctaaagtattttgttatagtagcctaaaaagactaagagagcatcacctgccctgtcacctcatcaccgcattactaaagctatactaacagcagtcacttttagtgggtgcttcatgcatgagaataaagggaaaaaattgcaaggcatactaaaatccaaaaaaagaaaaaaatacaatttgtgtcaacagagcaagcttcagaagcagacaaagatatgattttggaatttttttaaacctctggagaatatgctaagagcctaatgaatgaag

SEQ ID NO: 380565 - DNA, 469 bp, Homo sapiens
aatactccagctggcttctgagtgtttgtccctcacataggattcctgaagactgctgctgtcactatagtcgttgtgagtgtctgartgtttgtccttcaccaaacactaaatatcctgcccctttagtcttggactttccagcctccagatctgtgagcaataatctctgttgtttatgaattactcagtctaaagtattttgttatagtagcctaaaaagactaagagagcatcacctgccctgtcacctcatcaccgcattactaaagctatactaacagcagtcacttttagtgggtgcttcatgcatgagaataaagggaaaaaattgcaaggcatactaaaatccaaaaaaagaaaaaaatacaatttgtgtcaacagagcaagcttcagaagcagacaaagatatgattttggaatttttttaaacctctggagaatatgctaagagcctaatgaatgaag

SEQ ID NO: 380566 - DNA, 469 bp, Homo sapiens
aatactccagctggcttctgagtgtttgtccctcacataggattcctgaagactgctgctgtcactatagtcgttgtgagtgtctgagtrtttgtccttcaccaaacactaaatatcctgcccctttagtcttggactttccagcctccagatctgtgagcaataatctctgttgtttatgaattactcagtctaaagtattttgttatagtagcctaaaaagactaagagagcatcacctgccctgtcacctcatcaccgcattactaaagctatactaacagcagtcacttttagtgggtgcttcatgcatgagaataaagggaaaaaattgcaaggcatactaaaatccaaaaaaagaaaaaaatacaatttgtgtcaacagagcaagcttcagaagcagacaaagatatgattttggaatttttttaaacctctggagaatatgctaagagcctaatgaatgaag

SEQ ID NO: 380567 - DNA, 469 bp, Homo sapiens
aatactccagctggcttctgagtgtttgtccctcacataggattcctgaagactgctgctgtcactatagtcgttgtgagtgtctgagtgtttgtccttcaccaaacactaaatatcctgcccctttagtcttggactttccagcctccagatctgtgagcaataatctctgttgtttatgaattactcagtctaaagtattttgttatagtagcctaaaaagactaagagagcatcacctgccctgtcacctcatcaccgcattactaaagctatactaacagcagtcacttttagtgggtgcttcatgcatgagaataaagggaaaaaattgmaaggcatactaaaatccaaaaaaagaaaaaaatacaatttgtgtcaacagagcaagcttcagaagcagacaaagatatgattttggaatttttttaaacctctggagaatatgctaagagcctaatgaatgaag

SEQ ID NO: 380568 - DNA, 520 bp, Homo sapiens
attcagctctttatacatctctgtaaaagcccttgagtaccaggggcattgtcagtgagyggtaatactttgaaaggaatcttatttattgagcagtagttgtcgacagtgggcttaagatattcaataaaccatatttgtaaaccgatagtctgtcatccaggctttgttcccatttgtagagtacaggcagagctgtgttttatcataattcttcagggcccttggattttcagaatagtaaatcatcattggtttcaagttaacatcaccaactgcattaggccttaacaaaagattcagcatgtcctttgaagccttaaatccaggcatcaactcctctctagctgggaacatcctggatggcatctccttctaatagaaggctgttttgtctccattgcaaatctgtttagtgtagccatcttaatcaattatcttctagatagctttctgcagcttttccatcagtacttgttgctttatcttgcgcttttatgttatggagatgacttttttc

SEQ ID NO: 380569 - DNA, 527 bp, Homo sapiens
aaactttgaaataccctgtgagtcaaaaaagtattcacaaggggaactggaatgtatttggaacaaacttgttataaaaatctcatttctggtagactaaagktgacaacttctttcctgctcctctctctgtgaggaccaattccccttaaaccttgaccaaactactgacttatttggccaacagaaggtgacaaaggtggtatttggggacttcagaagccaggctgagaaaacagaacacttatccaggagaaagccagtcaccaggcaggaaatcccactcccctgagacctcatgatggaaaccacacggccagtccatgactagctacatgcattgacatcccccactgagcctccagcaacaccgactcccaacaactagtgagcctccagcaacatccactcccaaccactagtgagccaccctgcacatcacctcactgtgctttcacacaatccagcttggctgcaactatgtgtgagatgagctgaccaccaagactctctaagccaaaaaacaa

SEQ ID NO: 380570 - DNA, 520 bp, Homo sapiens
attcagctctttatacatctctgtaaaagcccttgagtaccaggggcattgtcagtgagcggtaatactttgaaaggaatcttatttattgagcagtagttgtcgacagtgggcttaagatattcaataaaccrtatttgtaaaccgatagtctgtcatccaggctttgttcccatttgtagagtacaggcagagctgtgttttatcataattcttcagggcccttggattttcagaatagtaaatcatcattggtttcaagttaacatcaccaactgcattaggccttaacaaaagattcagcatgtcctttgaagccttaaatccaggcatcaactcctctctagctgggaacatcctggatggcatctccttctaatagaaggctgttttgtctccattgcaaatctgtttagtgtagccatcttaatcaattatcttctagatagctttctgcagcttttccatcagtacttgttgctttatcttgcgcttttatgttatggagatgacttttttc

SEQ ID NO: 380571 - DNA, 520 bp, Homo sapiens
attcagctctttatacatctctgtaaaagcccttgagtaccaggggcattgtcagtgagcggtaatactttgaaaggaatcttatttattgagcagtagttgtcgacagtgggcttaagatattcaataaaccatatttgtaaaccgatagtctgtcatccaggctttgttcccatttgtagagtacaggcagagctgtgttttatcataattcttcagggcccttggattttcagaatagtaaatcatcattggtttcaagttaacatcaccaactgcattaggccttaacaaaagaktcagcatgtcctttgaagccttaaatccaggcatcaactcctctctagctgggaacatcctggatggcatctccttctaatagaaggctgttttgtctccattgcaaatctgtttagtgtagccatcttaatcaattatcttctagatagctttctgcagcttttccatcagtacttgttgctttatcttgcgcttttatgttatggagatgacttttttc

SEQ ID NO: 380572 - DNA, 407 bp, Homo sapiens
agtccgtgctggccacgaagagagggctgggtgcctgctccatgtccccagccactagagtccttccagatgagaccaaggacatcatgaagcaaccaaccaacaccgccctgtccagtgtcttgacccagaaaattgtgacatgtaaaaagaataaattcctggtttaagccagtaaggttactggtacattgttacatctcagataattaaaaccttgaaaawctcatgagagatcacaagtagaaccttgatctgaaaaggcatgtagcgatttatattgagtattaggttaaaaatgcaagaatggagcatagttaatattttacgttaaagctaaaactataattgcctacttcaaattttcagttaattaggttgtcactttttgttcttaactaagaaat

SEQ ID NO: 380573 - DNA, 407 bp, Homo sapiens
agtccgtgctggccacgaagagagggctgggtgcctgctccatgtccccagccactagagtccttccagatgagaccaaggacatcatgaagcaaccaaccaacaccgccctgtccagtgtcttgacccagaaaattgtgacatgtaaaaagaataaattcctggtttaagccagtaaggttactggtacattgttacatctcagataattaaaaccttgaaaatctcatgagagatcacaagtagaaccttgatctgaaamggcatgtagcgatttatattgagtattaggttaaaaatgcaagaatggagcatagttaatattttacgttaaagctaaaactataattgcctacttcaaattttcagttaattaggttgtcactttttgttcttaactaagaaat

SEQ ID NO: 380574 - DNA, 407 bp, Homo sapiens
agtccgtgctggccacgaagagagggctgggtgcctgctccatgtccccagccactagagtccttccagatgagaccaaggacatcatgaagcaaccaaccaacaccgccctgtccagtgtcttgacccagaaaattgtgacatgtaaaaagaataaattcctggtttaagccagtaaggttactggtacattgttacatctcagataattaaaaccttgaaaatctcatgagagatcacaagtagaaccttgatctgaaaaggcatgtagcgatttatattgagtattaggttaaaaatgcaagaatggagcatagttaatattttacgttaaagctaaaactataattgcctacttcaaattttcagttaattagkttgtcactttttgttcttaactaagaaat

SEQ ID NO: 380575 - DNA, 243 bp, Homo sapiens
ttactcattttaaacagctrtctgaaataggaagtgcaatataatctttaaagaatctgaaaacatgacagaaatgtttaaactataaacatatattgtatatgttagcatattgtatacattgcatattaacataagctagaatcattgacataaatttatataaacaaaaggtataaaatatgacaatgttcttcttgatttttctctttgcatatttctttattggcctttgtcaaatgt

SEQ ID NO: 380576 - DNA, 243 bp, Homo sapiens
ttactcattttaaacagctgtctgaaataggaagtgyaatataatctttaaagaatctgaaaacatgacagaaatgtttaaactataaacatatattgtatatgttagcatattgtatacattgcatattaacataagctagaatcattgacataaatttatataaacaaaaggtataaaatatgacaatgttcttcttgatttttctctttgcatatttctttattggcctttgtcaaatgt

SEQ ID NO: 380577 - DNA, 243 bp, Homo sapiens
ttactcattttaaacagctgtctgaaataggaagtgcaatrtaatctttaaagaatctgaaaacatgacagaaatgtttaaactataaacatatattgtatatgttagcatattgtatacattgcatattaacataagctagaatcattgacataaatttatataaacaaaaggtataaaatatgacaatgttcttcttgatttttctctttgcatatttctttattggcctttgtcaaatgt

SEQ ID NO: 380578 - DNA, 535 bp, Homo sapiens
acaaacaaaacatcagtgagataccatttcacaccagtcagaatgacttttgttaaaaaaaataataaataaaaaaattaaaaaagatgttggggaggctgtggagaaaagtgaacacacactgtttgtggcaaagttaattaattcagctattctggagagtttggaaattaagaagtaagaaagactgttggatacagcaaccccattactacactaggggtataccagaaggataataaatcattgtaacaaaaagatgcatacacatgtatgttcactgcagcactattcacaataacaaagacrtggagtcaatccaggtgcatccaaggtacgttgaaaatccaaggtagattggaaaattccatatataccatggaatactatgcagccataaaaagaacaaaatcacatcgtttgcagcaacaaggatacagctggaatccactctcctaagcaaaccaacacagaaacagaaaccaaatatctcatgttttcactcacgtgggagctacacattgggtgcacattg

SEQ ID NO: 380579 - DNA, 362 bp, Homo sapiens
cccctctgaccaggccctcattgaccaggctccaagccactaaggccccacattgaccagggaccaggcctctggtatactgtatatgcctcaccaaccagtttttcattgtttatgttccaactgatcaggccccactaataaggccaccactgactaggtccccccactgaccaggcttccaatgattaggtcaccaggtccccactgatgaggmctttactgaggaggccgccactaaccaggcccctgctgatcaggtcccacatgactaggtcctgatgaccaggtcatctctgaccatggtccactgaccaggcccatgagcaacggggctcaaagtctcattacaatgtccccct

SEQ ID NO: 380580 - DNA, 524 bp, Homo sapiens
aggccaccactgactaggtccccccactgaccaggcttccaatgattaggtcaccaggtccccactgatgaggcctttactgaggaggccgccactaaccaggcccctgctgatcaggtcccacatgactaggtcctgatgaccaggtcatctctgaccatggtccactgaccaggcccatgagcaacggggytcaaagtctcattacaatgtccccctcagctcatagaccctccctccctgcatgtgtgcccagaggtcaggctctggggttttttttgagacatggcctttcctccaagacacagggagagacagttggcctcaggctccaggttcccagctccacactcaccccaaaggccctctgggcccgtctcaaaggagaaagtgaggtggcctgacactgcctggacacaccatctaccctattcctgagtgtcagagtgtgaggaagggagggacatttggcagatgagacacactgtgctgttgggtctcccagggcccttcccatatagccc

SEQ ID NO: 380581 - DNA, 524 bp, Homo sapiens
aggccaccactgactaggtccccccactgaccaggcttccaatgattaggtcaccaggtccccactgatgaggcctttactgaggaggccgccactaaccaggcccctgctgatcaggtcccacatgactaggtcctgatgaccaggtcatctctgaccatggtccactgaccaggcccatgagcaacggggctcaaagtctcattacaatgtccccctcagctcatagaccctccctccctgcatgtgtgcccagaggtcaggcyctggggttttttttgagacatggcctttcctccaagacacagggagagacagttggcctcaggctccaggttcccagctccacactcaccccaaaggccctctgggcccgtctcaaaggagaaagtgaggtggcctgacactgcctggacacaccatctaccctattcctgagtgtcagagtgtgaggaagggagggacatttggcagatgagacacactgtgctgttgggtctcccagggcccttcccatatagccc

SEQ ID NO: 380582 - DNA, 524 bp, Homo sapiens
aggccaccactgactaggtccccccactgaccaggcttccaatgattaggtcaccaggtccccactgatgaggcctttactgaggaggccgccactaaccaggcccctgctgatcaggtcccacatgactaggtcctgatgaccaggtcatctctgaccatggtccactgaccaggcccatgagcaacggggctcaaagtctcattacaatgtccccctcagctcatagaccctccctccctgcatgtgtgcccagaggtcaggctctggggttttttttgrgacatggcctttcctccaagacacagggagagacagttggcctcaggctccaggttcccagctccacactcaccccaaaggccctctgggcccgtctcaaaggagaaagtgaggtggcctgacactgcctggacacaccatctaccctattcctgagtgtcagagtgtgaggaagggagggacatttggcagatgagacacactgtgctgttgggtctcccagggcccttcccatatagccc

SEQ ID NO: 380583 - DNA, 524 bp, Homo sapiens
tggcaggtactccttaagtctcctaagtaataaaaactgtaaaatgcaaataagccttcgatgacctttactaacttttactaaagtatcaatgatgacttggttgtttaaacagctgacatttgggcaatttgagtatgtcaarctcaataatactggttttcatttgcaagatccacttaaaacttaaggaggctaaaaaacatcatttaaaataccctataaattatcatcatatatatcatacaaaaatatcctacttcagtaaatattgtaatgttatacattttatgagaaacaactaaaatgtgtaaatagcccagtaataaagttttataatcttttaaatcatacaatttttctttaagacattatggttaaatattctcttcgttagatgtggcttacccgtggattctagagaagaaagtagatgggagcaagtgtccaacacagcagcagctggaaagaaaaataaagaattatgttctttacctaaaacacttcagttgactaagtgtgcg

SEQ ID NO: 380584 - DNA, 509 bp, Homo sapiens
ttccaatgacatttttgataaacagaaaaacctatcctaaaattcatatggaatctccagggcccatgaataggcaaatcgatcttgaaacagaacaaaattaaaggtctcaaaacaattacaaaactgcaataagccaaaaaaaaatgtggtcatggcataaatacactcttgacacacttatggaccaacacaacagagacctcagaaaccaaccctggcatatatggtccgatgatcttccacaaggatgccaagaccactcaatggtgaaggacagtttctgcaacaaattgtgttggggaatttgtatatctacatgcaaaacagtgaagttggactcttaccttacaccacgttaaaattaattcaaagtgaattataaacctaaatgtaaaactagaactatcaaactcctagggaaaacaaatttgkaaaatgctttatgacgatgaagttgtcaataatttttaggatatgacattaaaagctcaggcagtaaaagcaaa

SEQ ID NO: 380585 - DNA, 373 bp, Homo sapiens
  misc_feature (1)...(373): n = A,T,C or G
tgggggttcacttttgagggagttctcctctgagacntgatctctgctgggcagtcttgcccatgagatggggctggtctgatctcagcactccttagtctgcttgcctctcccaggaccccagcctggccacacctgcttacagggcactctcggatgcccacagcatagcttccgtgctagtggaccgtagctgatcagtggagagctgcagcaaggttgccccaacagccacgcaccagtctgcacattacctctccatactgcagccctttatatggaaacatcctacatcactttgctgtgtgtgtttacacatgtgggttttgctgtacttkccctgagagcacacgggagtgcagcacacacacca

SEQ ID NO: 380586 - DNA, 388 bp, Homo sapiens
tcccttcctttcaccatatamaaaaatcaactcaagatggatgaaggacttatgtaagacccaaaactatataaaccctagaagaaaacttaggaaatatcattctggacataggcgcaggcaaatatttcatgatgaagattccaaaagcaattgcaacaagaagaattgacgagtgggacctaatgaaactaaagagcttcagcacagcaaaagaaactatcaacagagaacaccctacagaacagaagaaaatattttcaaattacatatctgaaaaaggtctaatacttagcatgtataaagaatcaataagcaaaaaacaaacccactacaaataggcaaagaacatgaacccccacattcaccatcctcaagtccatgtgca

SEQ ID NO: 380587 - DNA, 388 bp, Homo sapiens
tcccttcctttcaccatatacaaaaatcaactcaagatggatgaaggacttatgtaagacccaaaactatataaaccctagaagaaaacttaggaaatatcattctggacatagrcgcaggcaaatatttcatgatgaagattccaaaagcaattgcaacaagaagaattgacgagtgggacctaatgaaactaaagagcttcagcacagcaaaagaaactatcaacagagaacaccctacagaacagaagaaaatattttcaaattacatatctgaaaaaggtctaatacttagcatgtataaagaatcaataagcaaaaaacaaacccactacaaataggcaaagaacatgaacccccacattcaccatcctcaagtccatgtgca

SEQ ID NO: 380588 - DNA, 388 bp, Homo sapiens
tcccttcctttcaccatatacaaaaatcaactcaagatggatgaaggacttatgtaagacccaaaactatataaaccctagaagaaaacttaggaaatatcattctggacataggcgcaggcaaatatttcatgatgaagattccaaaagcaattgcaacaagaagaattgaygagtgggacctaatgaaactaaagagcttcagcacagcaaaagaaactatcaacagagaacaccctacagaacagaagaaaatattttcaaattacatatctgaaaaaggtctaatacttagcatgtataaagaatcaataagcaaaaaacaaacccactacaaataggcaaagaacatgaacccccacattcaccatcctcaagtccatgtgca

SEQ ID NO: 380589 - DNA, 388 bp, Homo sapiens
tcccttcctttcaccatatacaaaaatcaactcaagatggatgaaggacttatgtaagacccaaaactatataaaccctagaagaaaacttaggaaatatcattctggacataggcgcaggcaaatatttcatgatgaagattccaaaagcaattgcaacaagaagaattgacgagtgggacctaatgaaactaaagagcttcagcacagcaaaagaaactatcaacagagaacaccctacagaacagaagaaaatattttcaaattacatatctgaaaaaggtctaatacttagcatgtataaagaatcaataagcaaaaaacaaacccactacaaataggcaaagaacatgarcccccacattcaccatcctcaagtccatgtgca

SEQ ID NO: 380590 - DNA, 468 bp, Homo sapiens
cccctgtcctgtacccatatatgccccagaccccaggctccagaagcagacaagcagatgaggagatgaacagaagagcagaattgcagaatgatgtggmagaaagaagagaaggagcatctgaatgccaagaggagtttggctggcagtggttggagagatcagcctctggatggcaaagctcccggggaagatcatcttcccattccatcccctttccagcttcccatccatcccattgagtgccacctccaccactcaataaaacccccacattcaccatcctcaagtctgtgtgcaacttaattctttctggatgctggacaaggaactgggtaccaagagggcactgaacaggttaacacttaagccgtctgtggatggcaaagctaaaagagtgcactgtaacacatgcccacttgggctgtgggagtcgcatgaacccacccctagacagtaccatggcca

SEQ ID NO: 380591 - DNA, 629 bp, Homo sapiens
cctgtctgcatgcttccctgcccagtaaggggtttgacagcacacacggtggccagacaagccacacccctgttgcacatcctgccaaggggagtcagggaagtctccagtttcatcaggaatgtaaatttgttcagccattgtggaaagcagtttggagatttctgaaataacttaaaacagaactaccattcaacccagcaatcccattattgggtatatacccaaakgaatatatatcattctgtcatagacatatgcacgcatattttcattataacactattcacaatagcaaagacacggaatcaacttagatgcctgttaacagaagactggattaaaaaaatgcagcgtacatacaccatggaatactacacacctataaaataggatgaaataatgtcttttgcagcaacatgaatggagctggataccattattctaagtgaattaatgcaggaacagaaaaccaaacaaacactgcatgttctcacttataagtgggggctaaacattgagtccacatggacacagagaagggaacaatagacacaaggtctactgtgggtggagggtggggggagagtgaggatcaaaaaactccctattagatactacgttcacta

SEQ ID NO: 380592 - DNA, 629 bp, Homo sapiens
cctgtctgcatgcttccctgcccagtaaggggtttgacagcacacacggtggccagacaagccacacccctgttgcacatcctgccaaggggagtcagggaagtctccagtttcatcaggaatgtaaatttgttcagccattgtggaaagcagtttggagatttctgaaataacttaaaacagaactaccattcaacccagcaatcccattattgggtatatacccaaatgaatatawatcattctgtcatagacatatgcacgcatattttcattataacactattcacaatagcaaagacacggaatcaacttagatgcctgttaacagaagactggattaaaaaaatgcagcgtacatacaccatggaatactacacacctataaaataggatgaaataatgtcttttgcagcaacatgaatggagctggataccattattctaagtgaattaatgcaggaacagaaaaccaaacaaacactgcatgttctcacttataagtgggggctaaacattgagtccacatggacacagagaagggaacaatagacacaaggtctactgtgggtggagggtggggggagagtgaggatcaaaaaactccctattagatactacgttcacta

SEQ ID NO: 380593 - DNA, 629 bp, Homo sapiens
cctgtctgcatgcttccctgcccagtaaggggtttgacagcacacacggtggccagacaagccacacccctgttgcacatcctgccaaggggagtcagggaagtctccagtttcatcaggaatgtaaatttgttcagccattgtggaaagcagtttggagatttctgaaataacttaaaacagaactaccattcaacccagcaatcccattattgggtatatacccaaatgaatatatatcattctgtcatagacatatgcacgcatattttcattataacactattcacaatagcaaagacacggaatcaacttagatgcctgttaacagaagactggattaaaaaaatgcagygtacatacaccatggaatactacacacctataaaataggatgaaataatgtcttttgcagcaacatgaatggagctggataccattattctaagtgaattaatgcaggaacagaaaaccaaacaaacactgcatgttctcacttataagtgggggctaaacattgagtccacatggacacagagaagggaacaatagacacaaggtctactgtgggtggagggtggggggagagtgaggatcaaaaaactccctattagatactacgttcacta

SEQ ID NO: 380594 - DNA, 553 bp, Homo sapiens
gaaaaatatcagatataacttatatacccaaaagtatgacttaaaaacagcatgacaatctttatgatgggatattgtgcaactactagaagcatattttcagagattatttattaacatatgataatgactacattgagtggtttttagaagcatgaattgaaaccatgtataagcatgamtttattgaacttatatataacattacacacacatttacataattataaaataagtatgctcatgttcataatatgtatttatttatattcatatgtaaggccaataggaagtaatctctgtatctgagttattatttcataaataatttatgcttgttctgtgaaaataaaaacactgctatggatcttccaagtatcctgaaaggataccgtttataattaaacaataacaattttagaaataattattttaaataaggctatgataaatctggtttcattgcacactttaactttggaacatttcatgaagcttcccttgatcacgactctcatattcaggagttttttgagatcaaaatgggacaatc

SEQ ID NO: 380595 - DNA, 553 bp, Homo sapiens
gaaaaatatcagatataacttatatacccaaaagtatgacttaaaaacagcatgacaatctttatgatgggatattgtgcaactactagaagcatattttcagagattatttattaacatatgataatgactacattgagtggtttttagaagcatgaattgaaaccatgtataagcatgactttattgaacttatatataacattacacacacatttacataattataaaataagtatgctcatgttcataatatgtatttatttatattcatatgtaaggccaatargaagtaatctctgtatctgagttattatttcataaataatttatgcttgttctgtgaaaataaaaacactgctatggatcttccaagtatcctgaaaggataccgtttataattaaacaataacaattttagaaataattattttaaataaggctatgataaatctggtttcattgcacactttaactttggaacatttcatgaagcttcccttgatcacgactctcatattcaggagttttttgagatcaaaatgggacaatc

SEQ ID NO: 380596 - DNA, 553 bp, Homo sapiens
gaaaaatatcagatataacttatatacccaaaagtatgacttaaaaacagcatgacaatctttatgatgggatattgtgcaactactagaagcatattttcagagattatttattaacatatgataatgactacattgagtggtttttagaagcatgaattgaaaccatgtataagcatgactttattgaacttatatataacattacacacacatttacataattataaaataagtatgctcatgttcataatatgtatttatttatattcatatgtaaggccaataggaagtaatctctgtatctgagttattatttcataaataatttatgcttgttctgtgaaaatamaaacactgctatggatcttccaagtatcctgaaaggataccgtttataattaaacaataacaattttagaaataattattttaaataaggctatgataaatctggtttcattgcacactttaactttggaacatttcatgaagcttcccttgatcacgactctcatattcaggagttttttgagatcaaaatgggacaatc

SEQ ID NO: 380597 - DNA, 606 bp, Homo sapiens
caacgacttggaaccaacccaaatgcccaccaatgatagactggataaagtaaatgtggcatatatacaccatggaatactatgtagccataaaaaaggatgaatccacgtcctttgctgggacatgaatraagctggaaagcatcattctcagcaaactaacacaagaacagaaaaccaaacaccacatgttctcactcataacttggagttgaacaatgggaacacatggacacaggaaggggaacatcacacaccagggcctgtcagcgtggggggctaggagagggatggcattaggagaaataactaatgtagatcatgggttgatggatgcagcaagccaccacggcatgtgtatagctatgtaacaaacctgcatgttctgcacatgtaccccagaacttaaagtataattaaaaaaaaaaagaaatttgtttttaattaagcttttaatcatagaacttgtaaagaaaacccttttgaatcttttactaccacatcatagctgggacaaactgctgacgttttaaaagtaacacaaatatcaaacagaaagaactagacttaggaaccaaactcaggtttctgtagtgaacagggcag

SEQ ID NO: 380598 - DNA, 405 bp, Homo sapiens
aatctattttttagacatgcaaatggataactttaaatagcagtagcgatataatcagagtgcacagttgctctgggacaaaacttggaaatgagcatatttttagattcttaatgttttacacactttagcattccacagcaccattacatactcatttttctactagaataccttggtaaaaattcacagtagagatcaggcttgtccttcatacattaactaatcaagtaggaaagtgcaaatgagaacacagtgccaaayataggcaccacatggaaacaagcatggaactgccaggaagccatctttgtagctttgtagcccaattatatttttcctaatgtattgcacacaaaacttgggggaaaaaaaaagaggcagagagaaaacaggttatatcag

SEQ ID NO: 380599 - DNA, 651 bp, Homo sapiens
ggacaatcagtatgaatctattttttagacatgcaaatggataactttaaatagcagtagcgatataatcagagtgcacagttgctctgggacaaaacttggaaatgagcatatttttagattcttaatgttttacacactttagcattccacagcaccattacatactcatttttctactagaataccttggtaaaaattcacagtagagatcaggcttgtccttcatacattaactaatcaagtaggaaagtgcaaatgagaacacagtgccaaacataggcaccacatggaaacaagcatggaactgccaggaagccatytttgtagctttgtagcccaattatatttttcctaatgtattgcacacaaaacttgggggaaaaaaaaagaggcagagagaaaacaggttatatcagccctatctcacaatccacaagttcatcctgttagaggagtaactatgtaaaacaaattttatctgttgaatgtcctatttagttaatcgcaaaactgtacgagaacacacttgtgacttatttagcagcttgtttgttcgctttccactggcttcacaaatgtcctttggaaatagaatgtacatttggaaccttgtacaccttttctttctccagtaccctcttgtcactt

SEQ ID NO: 380600 - DNA, 651 bp, Homo sapiens
ggacaatcagtatgaatctattttttagacatgcaaatggataactttaaatagcagtagcgatataatcagagtgcacagttgctctgggacaaaacttggaaatgagcatatttttagattcttaatgttttacacactttagcattccacagcaccattacatactcatttttctactagaataccttggtaaaaattcacagtagagatcaggcttgtccttcatacattaactaatcaagtaggaaagtgcaaatgagaacacagtgccaaacataggcaccacatggaaacaagcatggaactgccaggaagccatctttgtagmtttgtagcccaattatatttttcctaatgtattgcacacaaaacttgggggaaaaaaaaagaggcagagagaaaacaggttatatcagccctatctcacaatccacaagttcatcctgttagaggagtaactatgtaaaacaaattttatctgttgaatgtcctatttagttaatcgcaaaactgtacgagaacacacttgtgacttatttagcagcttgtttgttcgctttccactggcttcacaaatgtcctttggaaatagaatgtacatttggaaccttgtacaccttttctttctccagtaccctcttgtcactt

SEQ ID NO: 380601 - DNA, 552 bp, Homo sapiens
cacacaaaacttgggggaaaaaaaaagaggcagagagaaaacaggttatatcagccctatctcacaatccacaagttcatcctgttagaggagtaactatgtaaaacaaattttatctgttgaatgtcctatttagttaatcgcaaaactgtaygagaacacacttgtgacttatttagcagcttgtttgttcgctttccactggcttcacaaatgtcctttggaaatagaatgtacatttggaaccttgtacaccttttctttctccagtaccctcttgtcacttccatcactaaggtgacagaagcaactaggggcaatgcatatgtagcacacctgggtcagaggtatcctccaggggaaggatcagacctgcttgaaagcatgtcgttggaattgggaggcttctagtagctataacataagcactgatgtttactcttccctgccctccactttgatcactctgggaaacgttttttttcttaaaaaatcaattgtattgaaacataatttacataaaataaatactattttaaagtgcacagtttg

SEQ ID NO: 380602 - DNA, 552 bp, Homo sapiens
cacacaaaacttgggggaaaaaaaaagaggcagagagaaaacaggttatatcagccctatctcacaatccacaagttcatcctgttagaggagtaactatgtaaaacaaattttatctgttgaatgtcctatttagttaatcgcaaaactgtacgagaacacacttgtgacttatttagcagcttgtttgttcgctttccactggcttcacaaatgtcctttggaaatagaatgtacatttggaaccttgtacaccttttctttctccagtaccctcttgtcacttccatcactaaggtgacagaagcaactaggggcaatgcatwtgtagcacacctgggtcagaggtatcctccaggggaaggatcagacctgcttgaaagcatgtcgttggaattgggaggcttctagtagctataacataagcactgatgtttactcttccctgccctccactttgatcactctgggaaacgttttttttcttaaaaaatcaattgtattgaaacataatttacataaaataaatactattttaaagtgcacagtttg

SEQ ID NO: 380603 - DNA, 552 bp, Homo sapiens
cacacaaaacttgggggaaaaaaaaagaggcagagagaaaacaggttatatcagccctatctcacaatccacaagttcatcctgttagaggagtaactatgtaaaacaaattttatctgttgaatgtcctatttagttaatcgcaaaactgtacgagaacacacttgtgacttatttagcagcttgtttgttcgctttccactggcttcacaaatgtcctttggaaatagaatgtacatttggaaccttgtacaccttttctttctccagtaccctcttgtcacttccatcactaaggtgacagaagcaactaggggcaatgcatatgtagcacacctgggtcagaggtatcctccaggggaaggatcagacctgcttgaaagcatgtcgttggaattgggaggcttctagtagctataacataagcactgatgtttactcttccctgccctccactttgatcactctgggaaacgttttttttcttaaaaaatcaattgtattgaaasataatttacataaaataaatactattttaaagtgcacagtttg

SEQ ID NO: 380604 - DNA, 606 bp, Homo sapiens
caacgacttggaaccaacccaaatgcccaccaatgatagactggataaagtaaatgtggcatatatacaccatggaatactatgtagccataaaaaaggatgaatccacgtcctttgctgggacatgaataaagctggaaagcatcattctcagcaaactaacacaagaacagaaaaccaaacaccacatgttctcactcataacttggagttgaacaatgggaacacatggacacaggaaggggaacatcacacaccagggcctgtcagcgtggggggctaggagagggatggcattaggagaaataactaatgtagatcatgggttgatggatgcagcaagccaccayggcatgtgtatagctatgtaacaaacctgcatgttctgcacatgtaccccagaacttaaagtataattaaaaaaaaaaagaaatttgtttttaattaagcttttaatcatagaacttgtaaagaaaacccttttgaatcttttactaccacatcatagctgggacaaactgctgacgttttaaaagtaacacaaatatcaaacagaaagaactagacttaggaaccaaactcaggtttctgtagtgaacagggcag

SEQ ID NO: 380605 - DNA, 606 bp, Homo sapiens
caacgacttggaaccaacccaaatgcccaccaatgatagactggataaagtaaatgtggcatatatacaccatggaatactatgtagccataaaaaaggatgaatccacgtcctttgctgggacatgaataaagctggaaagcatcattctcagcaaactaacacaagaacagaaaaccaaacaccacatgttctcactcataacttggagttgaacaatgggaacacatggacacaggaaggggaacatcacacaccagggcctgtcagcgtggggggctaggagagggatggcattaggagaaataactaatgtagatcatgggttgatggatgcagcaagccaccacggcatgtgtatasctatgtaacaaacctgcatgttctgcacatgtaccccagaacttaaagtataattaaaaaaaaaaagaaatttgtttttaattaagcttttaatcatagaacttgtaaagaaaacccttttgaatcttttactaccacatcatagctgggacaaactgctgacgttttaaaagtaacacaaatatcaaacagaaagaactagacttaggaaccaaactcaggtttctgtagtgaacagggcag

SEQ ID NO: 380606 - DNA, 617 bp, Homo sapiens
tgagtgtatgttttgacttacttcgttaatttttttgacatggaattgttagctttcaatgctgctgcaaaggcttccttatattcttctaactcagttgtaacctcttcataagcagtttacattttgtagaatttacattctacatctttaagtgtgagttccttcttatttagtgaagccgtattatccttgtttaactgctctaattgttttttatattgtgcttgtaactaaaacaaaggaaaataatacacttttaaaacaataacataattattatatgtttgttgcctttcattttgagtcagtgattcaaagaacatttctgaatatgttaaaaaagaggctgaagcttaaaatacttcagcaatatcaaaactaataactgaattcagaattaagactgatttataaaaatttgaaatcataattatgttagtattaatgtaatctggtcatataaaaagtaatagaatccattcataatttgaaaaagtgatcaatgaacaatgtagcttaacaccaattcaaaagtatcacataatttmtaaatcacaattttttcctatgccaactggtcttaatcatcaaatgactccataatgagaatcatt

SEQ ID NO: 380607 - DNA, 628 bp, Homo sapiens
tcaccttcctacaagtctcagaatacttcaaagctccctttgytatttctgatggtatttatggctcaacatttttttatagctacaggctttcacagaattcacgtcattattggatcaacattcctcagtctgccttctccgccaattaaaataccactttacatctagtcatcactttgcctttgaagccgctgcctgatatcgacactttgtagatgtagtatgactattcttgtatgtttctatttattgatgaggatcttactcttttagtataaatagtaccatgatttccaaagttttgatagcatccgaaaaacagtaattcacctaacattaaccctagtaatcaacaccctattagccctgttactaataattattacattttggctcccacaacttaatatatatatgtagagagagagaaaaatatatatatatgtataaaataaatatatatagaaaaatctagcccttatgaatgcagatttgaccctctatcctctgcccactttcccttctccataaaattctttctagtagccatcacatttcccctatttgagttagaactcgccctactactacccttactgtgagcccttcaaacaatctgatacta

SEQ ID NO: 380608 - DNA, 628 bp, Homo sapiens
tcaccttcctacaagtctcagaatacttcaaagctccctttgttatttctgatggtatttatggctcaacatttttttatagctacaggctttcacagaattcacgtcattattggatcaacattcctcagtctgccttctccgccaattaaaataccactttacatctagtcatcactttgcctttgaagccgctgcctgatatcgacactttgtagatgtagtatgactattcttgtatgtttctayttattgatgaggatcttactcttttagtataaatagtaccatgatttccaaagttttgatagcatccgaaaaacagtaattcacctaacattaaccctagtaatcaacaccctattagccctgttactaataattattacattttggctcccacaacttaatatatatatgtagagagagagaaaaatatatatatatgtataaaataaatatatatagaaaaatctagcccttatgaatgcagatttgaccctctatcctctgcccactttcccttctccataaaattctttctagtagccatcacatttcccctatttgagttagaactcgccctactactacccttactgtgagcccttcaaacaatctgatacta

SEQ ID NO: 380609 - DNA, 628 bp, Homo sapiens
tcaccttcctacaagtctcagaatacttcaaagctccctttgttatttctgatggtatttatggctcaacatttttttatagctacaggctttcacagaattcacgtcattattggatcaacattcctcagtctgccttctccgccaattaaaataccactttacatctagtcatcactttgcctttgaagccgctgcctgatatcgacactttgtagatgtagtatgactattcttgtatgtttctatttattgatgaggatcttactcttttagtataaatagtaccatgatttccaaagttttgatagcatccgaaaaacagtaattcacctaacattaaccctagtaatcaacaccctattagccctgttactaataattattacattttggctcccacaacttaatatatatatgtagagagagagaaaaatatatatatatgtataaaataaatatatatagaaaartctagcccttatgaatgcagatttgaccctctatcctctgcccactttcccttctccataaaattctttctagtagccatcacatttcccctatttgagttagaactcgccctactactacccttactgtgagcccttcaaacaatctgatacta

SEQ ID NO: 380610 - DNA, 628 bp, Homo sapiens
tcaccttcctacaagtctcagaatacttcaaagctccctttgttatttctgatggtatttatggctcaacatttttttatagctacaggctttcacagaattcacgtcattattggatcaacattcctcagtctgccttctccgccaattaaaataccactttacatctagtcatcactttgcctttgaagccgctgcctgatatcgacactttgtagatgtagtatgactattcttgtatgtttctatttattgatgaggatcttactcttttagtataaatagtaccatgatttccaaagttttgatagcatccgaaaaacagtaattcacctaacattaaccctagtaatcaacaccctattagccctgttactaataattattacattttggctcccacaacttaatatatatatgtagagagagagaaaaatatatatatatgtataaaataaatatatatagaaaaatctagcccttatgaatgcagatttgaccctctatcctctgcccacwttcccttctccataaaattctttctagtagccatcacatttcccctatttgagttagaactcgccctactactacccttactgtgagcccttcaaacaatctgatacta

SEQ ID NO: 380611 - DNA, 294 bp, Homo sapiens
aatcttcccagagccctgttgtctctaatattggaatctatagccttgttttctcagacgcctagattacaggcctctctcttgaacacctattggtatggtatctggggatcctttaaatacwtgatgattggcaggggttaaatagcggaaatcagtgcctgacaattcgccttccaggatatggactgtcattccctctcttggtgggcctcagtctcttatccataaaagtagagattgtaatactcatttgaattgcagatacctcaacccgaacacacctaatataat

SEQ ID NO: 380612 - DNA, 441 bp, Homo sapiens
cacttgaacctgggaggcagaggctgtagtgagctgagattgtaccacgaagcagcctgggtgacagagcaagattccatctcaaaaaaaaaacctagaagaaatggataaatgaaattgaagccataataaaacatctcctrgcaaagaaaagcctggattcaatggcttcactggcttcatggattaattttaccaaacattgaaggcagaattactatcaatcctacccaaactatcccaaaaaacagagaaggctgtagtatttccaaacacatcctatgaaaaagaccattcatcacgtctaagtgagatttatcccgatgatgccaacatggttcaacatatgcaaatcactcaatgtgacacatcatatcaacagaatgaaggacaaaaaccatatgataatttcaattgatacagaaaagcatttaataaaat

SEQ ID NO: 380613 - DNA, 441 bp, Homo sapiens
cacttgaacctgggaggcagaggctgtagtgagctgagattgtaccacgaagcagcctgggtgacagagcaagattccatctcaaaaaaaaaacctagaagaaatggataaatgaaattgaagccataataaaacatctcctggcaaagaaaagcctggattcaatggcttcactggcttcatggattaattttaccaaacattgaaggcagaattactatcaatcctacccaaactatcccaaaaaacagagaaggctgtagtatttccaaacacatcctatgaaaaagaccattcatcacgtctaagtgagatttatcccgatgatgccaacatggttcaacatatgcaaatcactcaatgtgacacatcatatcaacagaatgaaggacaaaaaccatatgataatttcaatwgatacagaaaagcatttaataaaat

SEQ ID NO: 380614 - DNA, 520 bp, Homo sapiens
gtgatattgttcctaatatccatagggggagagggtgataccactcccaatagtgcagaaaaggtacagcccygctgtgatatcattcctaatatccagaggggacaggatgatattactcccaatatcacagagggcatacaccccttccccatgatattgttcataatacccagggggtagaggatgatattactcccaatatcgcagtgggtgtacaaccaccctgtgatattgttcctaatatccatgtggaaagggtataaagttactcccaatatcacaggggttgtacaacccccttgtgatattgttccttatattcgggggagagacaatgatatagctgtccatattgcaggtggtgtacaacccccctgggaatttgttcctaatattcagtggggaagatgatattaattaaaatgtcacggggggtatacaacccctttgtgatattattcctaatatccagggaaagaaagaatattattcccaatatcgcaggggatgtacaccc

SEQ ID NO: 380615 - DNA, 520 bp, Homo sapiens
gtgatattgttcctaatatccatagggggagagggtgataccactcccaatagtgcagaaaaggtacagccctgctgtgatatcattcctaatatccagaggggacaggatgatattactcccaatatcacagagggcatacaccccytccccatgatattgttcataatacccagggggtagaggatgatattactcccaatatcgcagtgggtgtacaaccaccctgtgatattgttcctaatatccatgtggaaagggtataaagttactcccaatatcacaggggttgtacaacccccttgtgatattgttccttatattcgggggagagacaatgatatagctgtccatattgcaggtggtgtacaacccccctgggaatttgttcctaatattcagtggggaagatgatattaattaaaatgtcacggggggtatacaacccctttgtgatattattcctaatatccagggaaagaaagaatattattcccaatatcgcaggggatgtacaccc

SEQ ID NO: 380616 - DNA, 551 bp, Homo sapiens
atctccacttgaagttccaacttgaagtcatttcttaggtcacccttaagaacacaggctgttcaatgcggacaggtcacctcttgtgttatgctgcctagatgttcatttcaccaaatacatcctaaatcatcaccccyaagttcctagtttcacagatctccagggcagggtccccgtgcagccagcttctttgctaaggccaatcaaatgtaatcttggcttctattaataggaaattcctcattttcatctgagaccttttaagtctggacttcagtgtttaacttttgtcagccttctgatcacaagtatttaacaattctctatagtggtccaatattttcctcatcttgctgtcttctaagctttcccaattcttctgacctctgtcttttactcactctgaacctggttctacattgtcagctatctttatcagagcctggcaatgtggtaaaacagaaaagtccattttcgggggaaaattcacgaaggcttcagatatttgcatgaaaagaagctgagtgctggttgccaagacaaagggg

SEQ ID NO: 380617 - DNA, 551 bp, Homo sapiens
atctccacttgaagttccaacttgaagtcatttcttaggtcacccttaagaacacaggctgttcaatgcggacaggtcacctcttgtgttatgctgcctagatgttcatttcaccaaatacatcctaaatcatcacccccaagttcctagtttcacagatctccagggcagggtccccgtgcagccagcttctttgctaaggccaatcaaatgtaatcttggcttctattaataggaaattcctcattttcatctgagaccttttaagtctggacttcagtgtttaacttttgtcagccttctratcacaagtatttaacaattctctatagtggtccaatattttcctcatcttgctgtcttctaagctttcccaattcttctgacctctgtcttttactcactctgaacctggttctacattgtcagctatctttatcagagcctggcaatgtggtaaaacagaaaagtccattttcgggggaaaattcacgaaggcttcagatatttgcatgaaaagaagctgagtgctggttgccaagacaaagggg

SEQ ID NO: 380618 - DNA, 189 bp, Homo sapiens
gaggtgacatagagttttcagtgaccagacctcatgagaagtcactcattattgtgaggacggtacaaggggatggtgctgaaccattcatgagaaatttgccttcataattcaattacsttatgccaggatccaccttccacattaggaaatataattcaacatgagattcggaggagacacatattc

SEQ ID NO: 380619 - DNA, 498 bp, Homo sapiens
acatagagttttcagtgaccagacctcatgagaagtcactcattattgtgaggacggtacaaggggatggtgctgaaccattcatgagaaatttgccttcataattcaattaccttaygccaggatccaccttccacattaggaaatataattcaacatgagattcggaggagacacatattcaaattgcatcatcaatctttgaatataaagacatccacagtaggctttatccagccaacttctttgagaatctttatagggtttgaggtctagatcatatacactaaaatattcattcttcaaaaagcaataaagtggtattatcatttttccaaaagttacagcagtagtttaggcattcatagcatgatttagttcacatttgctactgtttctattctatcaccatattaactgtttcctatacaattctctattcagctggatttcagttgagcacaaaaccatccttgtactagctctttgctagtgtta

SEQ ID NO: 380620 - DNA, 498 bp, Homo sapiens
acatagagttttcagtgaccagacctcatgagaagtcactcattattgtgaggacggtacaaggggatggtgctgaaccattcatgagaaatttgccttcataattcaattaccttatkccaggatccaccttccacattaggaaatataattcaacatgagattcggaggagacacatattcaaattgcatcatcaatctttgaatataaagacatccacagtaggctttatccagccaacttctttgagaatctttatagggtttgaggtctagatcatatacactaaaatattcattcttcaaaaagcaataaagtggtattatcatttttccaaaagttacagcagtagtttaggcattcatagcatgatttagttcacatttgctactgtttctattctatcaccatattaactgtttcctatacaattctctattcagctggatttcagttgagcacaaaaccatccttgtactagctctttgctagtgtta

SEQ ID NO: 380621 - DNA, 594 bp, Homo sapiens
tattagttttagcagtttttttggtggaatctttagggttttctacatataagatcatgttagcaaatgagacaatttaacttcttccttttctatttggatgccatttcattctttttcttgcctaattgctctggctaggccttctagtactatgttgaatagaagtggtgagaatggatatccttgtcttgttcctggtcttagaggaaaacttgactttcactgttgagtatgatgctagctgtgggcttgtcatgtatggccttcttatgttgagttacattgttcagtacttaatttgtaaaaagattttatcatgaaaagatgctaagttttgtcagatgcttttctgtatctattgagatgatcatttttatccttcattctgttactgtaatatggatcacatttattgatttgtgtattttgaaccattttcgcatcccaggaataaatctaacttgatcatggtgtattattcttttaatggattgttgaattttgtttgctagtattttgttgaggattcttgcatttgtgtttatcagggatattgtctygtatttttcttttcttgtagtgttcttatct

SEQ ID NO: 380622 - DNA, 550 bp, Homo sapiens
aaggatggaacgggagcggccccattgatcaatggcctcccggtaggcccggccctgtcctccacagcgaccaccarcggctgctgcattggaaggcgctggcatttagaggggagggtccaagcgccttgcatggggccttcgaacagcctgctggggagagggcgctctctactctccccattgtttagaatccccacccccggtcccgcacggaggcctctttccccaagtaaacccagggctgcagtcctcaaagaaaaatggaaagaaacacatctgcccagcagggctggaactccaccatgcaagagtaacagctggggctgtaggttgcagagggtccctgggcctccatctcacctgcccctcagcctgggcctgctgagcagagatccagtctccctgccctgccacacaccacggctcctaacgcttgatcaaatgaatgagaatacaccttcagctgctggtgctgggggctgggacctctgcccctacattgagcagatacaatccaggatgctcagttcagttggaatttaagata

SEQ ID NO: 380623 - DNA, 537 bp, Homo sapiens
gttgggttttttctgcaggatgtggggcagcacacagcaggagctgcagcgttcactcgaggcactaacaggtcctggagtccaggagctgcccaggtgccacggaggccccaggcagaggaggacagccaaggacttccaggagtcatgggcagtccgaggcccagacgtggcaggcttttctggcatctgggtggaggaatgaaggagcagtctatggatttatgagcaggattggctatggaaactgtagggcccctggcttagaaggagtaagaacttcagatcgtgcattaaaccacgggcgtccagcccttstgagcccgggatcctgttcacctgtgaaggttgcctcagctgaagcccagcaaaaaaaggctgtggagtctggagacctggatttgacaccatgtcctttagggaaaccagctttaaactctcccagcctcagtttctttcttttaccttttcttcttttttctatgtgtttgtctatctgcgaatatctttattttgaaatttataaatgatagtttt

SEQ ID NO: 380624 - DNA, 557 bp, Homo sapiens
cttctctctgaaatgccctggacgggtctgcaagagagagaacccttggagaggattccattaaacaatgatctctggccagatgttctgtttttatgccacattttttctttttctttttttttcttttttcttttttttttttttgagacggagtctcactctgtcgcccaggctggagtgcagtggtgccatctcagctcactgcaacctccatctcccaggttcaaccgattctcctgcctcagcctcccaagtagctgggattgcagacatgtgccaccatgcccaactaattttgtatttttagtagagatggggttttaccatgttggccaggctggtctygaactcctgacctcaggtgatccacccactcagcctcccaaagtgctgggattacagacatgagccaccacaccaggcttaagccacatttttgatgacctgtggaggccccatttcccatttttagggaaaggaaggactcacattactgagaaaacttggtgtaggccaatgatttacatggcagtgttccaaaggaggataaggtc

SEQ ID NO: 380625 - DNA, 563 bp, Homo sapiens
ctgcacttgtaaaataagaaaccacgctaagtgtctgcttctcaattcataaagaagacatgaaattctaaatatcttaccaagcccaaaataagccaagcaaagtgctcttataattcaaaatataacaaagaataacgcaaaatatgctcaaatcatccttaatttgtgtcttaaaatttgattgggatagctgcaccatttacagcaaggaagcttctcagattgtgcatccacgtattttgtagccattgtcaattttgacatttaccagaasgatttcaaaatgcaagtatgcagattcaatacaccacgggtccagccgccttcctcaggcacatgagaacatggaatacacaccagtgcacatccacgtgccacttctgttccctgacaccagtgttacaggagtcatgggattccagatgaccaggatgtagcatcagcctcatgcctgacttgaatctcaaaaccactctctgccactgtgcttgaagatcagtgaaaatactgccttgtgctcacattagccttgttctagctccaggtgaccagccaacaag

SEQ ID NO: 380626 - DNA, 642 bp, Homo sapiens
gttcttttgttgttctgtgggaaaagaaatagagatacttaatgaacctggaaacaatgattgcgagattttgcattcttggaggaattgttatcattcatttccatcctcttgatatctgatctctaaatccggaagagacttcaaaaagctgcaaaagaaaacaaccaccaacacarccaaatcaatcaaacacaggacattctatataagcctggttttaatcacaaatcaaattgagatcacgataaacatatttttcttacagataccactttttcccacaatatcctctaaaattcattaatatgataatactcagaaaatggtagagtatcttggtcactggttcttgcgaggtccagagcggaacagaaatacgaattatcttcatcgtttatccccagacagcaaaagggctggaatggagtagatatccctccagcccatggcaatcctcattcttctgaggtcatggttcttacatcaactcctctttcagcgattgtggatgaagtagggcttggtgttctgtgagtctcctcccatatggttatgtgactctactgtgatttttatcctgaatatgtttatgttctatctcttgaaaaagagtacagtatccttagcggtaaagctata

SEQ ID NO: 380627 - DNA, 621 bp, Homo sapiens
tcacaaatcaaattgagatcacgataaacatatttttcttacagataccactttttcccacaatatcctctaaaattcattaatatgataatactcagaaaatrgtagagtatcttggtcactggttcttgcgaggtccagagcggaacagaaatacgaattatcttcatcgtttatccccagacagcaaaagggctggaatggagtagatatccctccagcccatggcaatcctcattcttctgaggtcatggttcttacatcaactcctctttcagcgattgtggatgaagtagggcttggtgttctgtgagtctcctcccatatggttatgtgactctactgtgatttttatcctgaatatgtttatgttctatctcttgaaaaagagtacagtatccttagcggtaaagctatagttggccttcattgatgaccactgaacctaccatggtgtgtaaaaattgtgtgcgtgacacaggtcctccaaggaattgtgtattaattctcacattacagttgatgtagacttttgcacacatattaataaaaaaagaagagaactaaagaactagagaaactgggtgagcaaatatctcactgtggaggcaggaacaaaaa

SEQ ID NO: 380628 - DNA, 621 bp, Homo sapiens
tcacaaatcaaattgagatcacgataaacatatttttcttacagataccactttttcccacaatatcctctaaaattcattaatatgataatactcagaaaatggtagagtatcttggtcactggttcttgcgaggtccagagcggaacagaaatacgaattatcttcatcgtttatccccagacagcaaaagggctggaatggagtagatatccctccagcccatggcaatcctcattcttctgaggtcatggttcttacatcaactcctctttcagcgattgtggatgaagtagggcttggtgttctgtgagtctcctcccatatggttatgtgactctactgtgatttttatcctgaatatgtttatgttctatctcttgaaaaagartacagtatccttagcggtaaagctatagttggccttcattgatgaccactgaacctaccatggtgtgtaaaaattgtgtgcgtgacacaggtcctccaaggaattgtgtattaattctcacattacagttgatgtagacttttgcacacatattaataaaaaaagaagagaactaaagaactagagaaactgggtgagcaaatatctcactgtggaggcaggaacaaaaa

SEQ ID NO: 380629 - DNA, 475 bp, Homo sapiens
tggaaacaacccaaatgtccatcatcaggtgggtgcataaacaagtgacagtgtccccaccgaaggacagagtgctacggagcggtccccaggagagagctgcagagggcacagcagcacgggtcaacctccaacacaggctgctgagtgaaaggctgggccctaggaagtcctggaccaggcaaactcttccatgctgacattcacagattctggctttctaggsgcagggtgggaaaaggatggaccggaggggagtgcacgggaaacgtttggggtgatggagacaccctacatcttgtgtaggtgattacaatagtgtaattgcatttgtcaaaatgcactcaattgcatacataaaatggagatgatattttgcgtaatttatagtttggtacagtgacttttaaaagaaaatcacagagatgcaagaaggagagaccatgtcttctgcgcctgagcaagcagtgggcaa

SEQ ID NO: 380630 - DNA, 527 bp, Homo sapiens
ggcggagcttgcagtgagccgagatcgcgacactgcactccagcctaggtgacagcaagactccgtctcaaaaaaaaaaaaaaatatatatatatatacacacacacacatatatatgtgtatatatacacatatatatgtgtacatatatgtgtacatatacacatatatatgtgtgtacatatatgtgtatatatagatacatagatatagatatagatcaaaacatcacattgtactccaaaattatacataattagtrtttgacagttataaataaataaataatagatatttttaaaaagacttttttaaaaagaaaatgactccagataggataacactgcaggaaggaaggactctactgaaaaggataaatatattggttttctaaaacaacaacaaaaatactatcttatgtagtttataatacacacacgtgcatatatatactatgtagaatatagtagtatatcaaaatagtgcaaagggcaaaagaagagaaaagacactggacaattttaagg

SEQ ID NO: 380631 - DNA, 598 bp, Homo sapiens
cttggttgttgtatgtatactgtcccatttttagctgtatttagtgagagaaataggaaaaagtatatctactctatttttctagacctaaagaaatgccagagtctgtttgatatgctgtcaccaaataccatggactgggtggcttataaacaacacaatgtatttctcacagttctggaggcggggcatacaagacgaaggtgctggtagagttggcgtctgaggggagcctgcctctgggtccagatrgccattttcccactgtgccctcacatggtggaaggcacaggagagttctctgcggtctcttctataagagcactcatcccatccatgaagcttgactttcatgacctaatcacctcccaaagttcttgtctcctaataccatcaccttgagagtaaggattttgatatatgaatttgggggaacataaatattcagaacatagcaagaactttcaataaatttcaagatatttcattgaattgatctgggttggggctcacaacaagtgattctactaatttctagggaaagttgtaaaccactgatgtgtctcaaaaccttaattaactgaagagttaagaaaac

SEQ ID NO: 380632 - DNA, 565 bp, Homo sapiens
atatttgtatgctttgttattgttgttgttgttgttcaagaattttccaagtgattttgcaaagggtcagratcgtttcatattttcaccaacaacgtatgaatgactgagtttctctgtgccaccgatagcatttggtgttgtcactagtttttattttggctattctaataggtgttttgtgatatctcctgtgaccttaatttgcattttttaaggttagtgatgttgaactttttatgtgctttttttctatctgtatgtctttttcagtgaaagatctcttcatgttatttcctattttctaattggatcattttgttttttactgttgagctcagagagatctttacaaattctaaatatgagtcctttaactgatatatgttttgcaaatattatcccttggtttgtagctgtctttccatccttttaatggagtctttcacagagcaaaatttttgttttgataaagttcaattcatggatctttttcttttatgaattgagcttttgataccacatctgagtactcttcatcaagcccaagttctgaatttttttt

SEQ ID NO: 380633 - DNA, 560 bp, Homo sapiens
gattttggagtgatatactcatacaggctaaaacttggatgaacctcaacaatcttatactaagtggaaaaatccagacataaaatgtcgtctattgtatgattgcatgtatgtgaaatattcagaatagaaaagtagagacacagagacagaaaacagattagtgattytgagggatttgtaggcagggtgattggcaattaacttatacatgggtatgagacctccttttagggtgatgaaaaatattttggaactagatagaggaggtagttgcagtacactgtgaaggtactaagtgccactgaatggtccactttgaaatgattaatttcatgttataaacatttcactttaattaagaaacagtaacaaatatttgaatgaaattcaaagagaaattcacaaaatgtaaaatatcataaatatgaaacaaacacaatcccatactaacaaaacattggaaatcagggtgctgtccgaagattgttgagtgaaatttagcaatcctagaacttaggttctctctgccccgggggagtgtgtgaatcttactttcc

SEQ ID NO: 380634 - DNA, 560 bp, Homo sapiens
gattttggagtgatatactcatacaggctaaaacttggatgaacctcaacaatcttatactaagtggaaaaatccagacataaaatgtcgtctattgtatgattgcatgtatgtgaaatattcagaatagaaaagtagagacacagagacagaaaacagattagtgattctgagggatttgtaggcagggtgattggcaattaacttatacatgggtatgagacctccttttagggtgatgaaaaatattttggaactagatagaggaggtagttgcagtacactgtgaaggtactaagtgccactgaatggtccactttgaaatgrttaatttcatgttataaacatttcactttaattaagaaacagtaacaaatatttgaatgaaattcaaagagaaattcacaaaatgtaaaatatcataaatatgaaacaaacacaatcccatactaacaaaacattggaaatcagggtgctgtccgaagattgttgagtgaaatttagcaatcctagaacttaggttctctctgccccgggggagtgtgtgaatcttactttcc

SEQ ID NO: 380635 - DNA, 590 bp, Homo sapiens
gtgactttcaattcacactctcctgaaactagtgtctcatcagtccctgaacttcttacttccatgactctaataacgttttcttagcgttcattctcctgcttctgtggtaaagatggccaccagtcctccgctgcccctctcatctggragtgacatccagttcccctccttctgaatctgcactagctccctgtgtctctaccagcaggagagatggaatgaggcttggccaggtccaggctgtcctgggagccagcagcagctcctgccttggtgctcgggagtcctgggagctacataaggaatctggctacactgttggagaggcctgagggagaggccagaggatgtgtgagagggacccaggggagcccgccctctgccctcttcaccacagtgccaggcatgagtgtgaagctgcctggggcactctggactatgctagctgccaacaaaatggggccgagcaccccattatgagatattaaaaatggttgttgttttcaaaccattaggttttggggtagtttcttagacagcataagataacaggaacaacgctatgcagcctgtgaccctactggacc

SEQ ID NO: 380636 - DNA, 592 bp, Homo sapiens
tagttattttgcggaagagtttagctgatgacattagcaagcaagtagagatgcgggctgtgtgttatgggaagggtttatggggctccaagagttaacccactaaaggtcaatagtaaaaagacatttttgaggtttttttgtgtgtgaactatgaaataagttgtttagcctaagggcccccaaaatgggatgtctattcccctgggctgcaaaaaacaatttttggaagagaagtagatatctcttcccatagataagaaaagacgtcaacctccctggtatttgatgcccggagtgacaccagtgagctcccatcagatggtcccaagacacaagtagcacaagagccagcctragggcacactgggacttctgcatgcagaggctgcaaatcttgtcaaaaggaatccacatgacattatctagcatttgccagctaaccttcacaaagtggacaagtggcttgaaagcttcaagaaaaagagcttcaggtttgtactaatacaaataagcaggcatattaaacagggaagaagcctgcctccttctcccattaacagctgtttcagccaattaaaagggagccatt

SEQ ID NO: 380637 - DNA, 597 bp, Homo sapiens
catatgtgctttaaaaactaaggtacattaaaacagcattaccaaaaaatatacacattacaatgtcttgatttctaacttcagatcataaatgttctaatttcacattattatgttaaaattaagactataaacattgttaattatgacttcatgtcaagcccacacacattaattcagtggtatcatttctggtatatggcrtacattcgtatctagaagaagctacatatttatctctatttcagaatgtgagattagacactcgagtacactgataaataagacagacatctcagtcaatactgggctatctgtgtatctaatagttcttattagggccctgtttaaccttattttatggtactgctgagggaatgtcacacaaagctcactgctgtggggcaagaagagaaaccaataggtgggtaagttcctgtgggcccctgaggcgttgctaacaaataactatgctgatgatgctagtaacaataattatagccactgctatttcttagaaatggcaggcattatgtgacatgtgttatatgcattaccttgtttaaatattatgacgaccagatgaggtaggacata

SEQ ID NO: 380638 - DNA, 598 bp, Homo sapiens
caacttaaaatgatagaaacaaagtgaaatgaaatatttaatatttctattaaatggtgttcagtcatatgtgctttaaaaactaaggtacattaaaacagcattaccaaaaaatatacacattacaatgtcttgatttctaacttcagatcataaatgttctaatttcacattattatgttaaaattaagactataaacattgttaattatgacttcatgtcaagcccacacacattaattcagtggtatcatttctggtatatggcgtacattcgtatctagaagaagctacatatttatctctatttcagaatgtgagattagacactcgagtayactgataaataagacagacatctcagtcaatactgggctatctgtgtatctaatagttcttattagggccctgtttaaccttattttatggtactgctgagggaatgtcacacaaagctcactgctgtggggcaagaagagaaaccaataggtgggtaagttcctgtgggcccctgaggcgttgctaacaaataactatgctgatgatgctagtaacaataattatagccactgctatttcttagaaatggcaggcatta

SEQ ID NO: 380639 - DNA, 598 bp, Homo sapiens
caacttaaaatgatagaaacaaagtgaaatgaaatatttaatatttctattaaatggtgttcagtcatatgtgctttaaaaactaaggtacattaaaacagcattaccaaaaaatatacacattacaatgtcttgatttctaacttcagatcataaatgttctaatttcacattattatgttaaaattaagactataaacattgttaattatgacttcatgtcaagcccacacacattaattcagtggtatcatttctggtatatggcgtacattcgtatctagaagaagctacatatttatctctatttcagaatgtgagattagacactcgagtacactgataaataagacagacatctcagtcaatactgggctatctgtgtatctaayagttcttattagggccctgtttaaccttattttatggtactgctgagggaatgtcacacaaagctcactgctgtggggcaagaagagaaaccaataggtgggtaagttcctgtgggcccctgaggcgttgctaacaaataactatgctgatgatgctagtaacaataattatagccactgctatttcttagaaatggcaggcatta

SEQ ID NO: 380640 - DNA, 598 bp, Homo sapiens
caacttaaaatgatagaaacaaagtgaaatgaaatatttaatatttctattaaatggtgttcagtcatatgtgctttaaaaactaaggtacattaaaacagcattaccaaaaaatatacacattacaatgtcttgatttctaacttcagatcataaatgttctaatttcacattattatgttaaaattaagactataaacattgttaattatgacttcatgtcaagcccacacacattaattcagtggtatcatttctggtatatggcgtacattcgtatctagaagaagctacatatttatctctatttcagaatgtgagattagacactcgagtacactgataaataagacagacatctcagtcaatactgggctatctgtgtatctaatagttcttattarggccctgtttaaccttattttatggtactgctgagggaatgtcacacaaagctcactgctgtggggcaagaagagaaaccaataggtgggtaagttcctgtgggcccctgaggcgttgctaacaaataactatgctgatgatgctagtaacaataattatagccactgctatttcttagaaatggcaggcatta

SEQ ID NO: 380641 - DNA, 595 bp, Homo sapiens
atgtactccaagccacacccccataaggatttccatctcaggtggtctgaccagaaaccctggagctgaggtgctcctcctctcatcctataggtcccctttccatccagagccaggagagtctctgctgtctttctctaatgatggtagttgcctcttgtcaaccttgaccccagagcattaatgactggattgtaattttcttccctggggattaggaacctacagtccttctcacttccatttctactaagtaaaaaaaaaaagcaagccaaatataataactacagctaatatttattaaatatctattacaaatcagataccacactgtgactctattatgtaygtaaggaaatttaatttcttcaacaactcatttgccctcttactccttctttgaagtcatcattattctccatacagaagttagtaaattgtgggtgggaggtaaggaaattccagagccactgattgaccagagcttgtattcaacactaagcatacactctttgtcctacaatatgttttcttccagtgcagggttttacatgcccaagtggctgatactgggtttagatagctatttttccat

SEQ ID NO: 380642 - DNA, 595 bp, Homo sapiens
atgtactccaagccacacccccataaggatttccatctcaggtggtctgaccagaaaccctggagctgaggtgctcctcctctcatcctataggtcccctttccatccagagccaggagagtctctgctgtctttctctaatgatggtagttgcctcttgtcaaccttgaccccagagcattaatgactggattgtaattttcttccctggggattaggaacctacagtccttctcacttccatttctactaagtaaaaaaaaaaagcaagccaaatataataactacagctaatatttattaaatatctattacaaatcagataccacactgtgactctattatgtatktaaggaaatttaatttcttcaacaactcatttgccctcttactccttctttgaagtcatcattattctccatacagaagttagtaaattgtgggtgggaggtaaggaaattccagagccactgattgaccagagcttgtattcaacactaagcatacactctttgtcctacaatatgttttcttccagtgcagggttttacatgcccaagtggctgatactgggtttagatagctatttttccat

SEQ ID NO: 380643 - DNA, 595 bp, Homo sapiens
atgtactccaagccacacccccataaggatttccatctcaggtggtctgaccagaaaccctggagctgaggtgctcctcctctcatcctataggtcccctttccatccagagccaggagagtctctgctgtctttctctaatgatggtagttgcctcttgtcaaccttgaccccagagcattaatgactggattgtaattttcttccctggggattaggaacctacagtccttctcacttccatttctactaagtaaaaaaaaaaagcaagccaaatataataactacagctaatatttattaaatatctattacaaatcagataccacactgtgactctattatgtatgtaaggaaatttaatttcttcaacaactcatttgccctcttactccttctttgaagtcatcattattctccatacagaagttagtaaattgtgggtgggaggtaaggaaattccagagccactgattgaccagagcttgtattcaacactaagcatacactckttgtcctacaatatgttttcttccagtgcagggttttacatgcccaagtggctgatactgggtttagatagctatttttccat

SEQ ID NO: 380644 - DNA, 563 bp, Homo sapiens
cagcagtcctgaagaagccgcaagttagggtctagtgaatactcacacaacagcagaggtgaccagtgatagcgatttgcgcaggtatttttagagcaaggsatggggacttcacttgtgttctttgtcacactcccttctattccagaaagagggcctccacttgggggttaactacactcaccattcatgcatttctttggggtcagctgggaacctatattcccttccctggcacttccacctgtgcttggctggctcagtctaggacctaccttctccatggcttttaaacaaggactcagagagttgagtcattttcactctcttgtggcagaagatgagagttttcagtaactgatcaagttaggagttgccagcaatcatgttttctgtctggtcaatgcatttgcagaaaaggagagtcacacggattgtcagagaggagcagagttgcgagatcatgttggtggcatgagttcctgattgaaagcctatctgatattcagccagattccaaccctcggaatctacctccaccttccagccctgaatccttgcag

SEQ ID NO: 380645 - DNA, 563 bp, Homo sapiens
cagcagtcctgaagaagccgcaagttagggtctagtgaatactcacacaacagcagaggtgaccagtgatagcgatttgcgcaggtatttttagagcaagggatggggacttcacttgtgttctttgtcacactcccttctattccagaaagagggcctccacttgggggttaactacactcaccattcatgcatttctttggggtcagctgggaacctatattcccttccctggcacttccacctgtgcttggctggctcagtctaggacctaccttctccatggcttttaaacaaggactcagagagttgagtcattttcactctcttgtggcagaagatgagagttttcagtaactgatcaagttaggagttgccagcaatcatgttttctgtctggtcawtgcatttgcagaaaaggagagtcacacggattgtcagagaggagcagagttgcgagatcatgttggtggcatgagttcctgattgaaagcctatctgatattcagccagattccaaccctcggaatctacctccaccttccagccctgaatccttgcag

SEQ ID NO: 380646 - DNA, 496 bp, Homo sapiens
agtacaaattggaccacaataataaggagatactgccttcagggcatggggaattccagaggtcgagggtagggtgaggacaataaaggaaggaaatctttgtcttctgatcttcatgggatagacagcattggggcttggtgtaagttaaacttyagcctatgtaaattaattgcaaaactttttgttatccacctccctttctccttccctgatttcttcttcttttcaagtcctgtagttgttgattcaaattctaaaatcaggaaaatctttctgatttggtgaatattgatgagtgtttctttttcatagtttctgtcaatttcagcactgccactttgtaatttttctaccattatggattccacttgaagggcaaatggaaaggcagacagttcttctgtaaccataataataaacgttagtgtggaatattaacaacttagctgttatgagccttgggtggacttttgttgggctagtcaactcacct

SEQ ID NO: 380647 - DNA, 496 bp, Homo sapiens
agtacaaattggaccacaataataaggagatactgccttcagggcatggggaattccagaggtcgagggtagggtgaggacaataaaggaaggaaatctttgtcttctgatcttcatgggatagacagcattggggcttggtgtaagttaaacttcagcctatgtaaattaattrcaaaactttttgttatccacctccctttctccttccctgatttcttcttcttttcaagtcctgtagttgttgattcaaattctaaaatcaggaaaatctttctgatttggtgaatattgatgagtgtttctttttcatagtttctgtcaatttcagcactgccactttgtaatttttctaccattatggattccacttgaagggcaaatggaaaggcagacagttcttctgtaaccataataataaacgttagtgtggaatattaacaacttagctgttatgagccttgggtggacttttgttgggctagtcaactcacct

SEQ ID NO: 380648 - DNA, 496 bp, Homo sapiens
agtacaaattggaccacaataataaggagatactgccttcagggcatggggaattccagaggtcgagggtagggtgaggacaataaaggaaggaaatctttgtcttctgatcttcatgggatagacagcattggggcttggtgtaagttaaacttcagcctatgtaaattaattgcaaaactttttgttatccacctccctttctccttccctgatttcttcttcttttcaagtcctgtagttgttgattcaaattctaaaatcaggaaaatctttstgatttggtgaatattgatgagtgtttctttttcatagtttctgtcaatttcagcactgccactttgtaatttttctaccattatggattccacttgaagggcaaatggaaaggcagacagttcttctgtaaccataataataaacgttagtgtggaatattaacaacttagctgttatgagccttgggtggacttttgttgggctagtcaactcacct

SEQ ID NO: 380649 - DNA, 496 bp, Homo sapiens
agtacaaattggaccacaataataaggagatactgccttcagggcatggggaattccagaggtcgagggtagggtgaggacaataaaggaaggaaatctttgtcttctgatcttcatgggatagacagcattggggcttggtgtaagttaaacttcagcctatgtaaattaattgcaaaactttttgttatccacctccctttctccttccctgatttcttcttcttttcaagtcctgtagttgttgattcaaattctaaaatcaggaaaatctttctgatttggtgaatattgatgagtgtttytttttcatagtttctgtcaatttcagcactgccactttgtaatttttctaccattatggattccacttgaagggcaaatggaaaggcagacagttcttctgtaaccataataataaacgttagtgtggaatattaacaacttagctgttatgagccttgggtggacttttgttgggctagtcaactcacct

SEQ ID NO: 380650 - DNA, 581 bp, Homo sapiens
gaatgtttaataaactaatttgcattgaaaaacttcaagaataggccattgaatttagtctcacattaatttgactattgagctacttttttaatgtgtgatttatttcagagaaataacaatccaagggaaacatactggaaaatgctttatgaaagcagggattcagggaaaaaattggttaattataaggtatgaacttcattccctgggatactctaggtaaacagtcatggaaaaataatgactatctcccttctttttctgatggcctattctttaattttcttatcttattacaatggctggaatttcctgaaaaatattaactagtaataaaartgaaaaatattttattcattttcttgcacattcttttaattcttggctttttaatcaaatgtattgcacattgagtacaatgatttttttagttggaaatagatattcttttcctagcatcttctcactcttaggttacacagagggttctaattttaatttgtaaggttattataatttattgatatcttttggacatttgcaaaagtattatatgttttttctcccttaagatacta

SEQ ID NO: 380651 - DNA, 623 bp, Homo sapiens
attatatttttcctttctttgtagtaaaacaaaagcaatttgaggggtaagtccttcacagatattgtcaaggtcttacacagttatttacctttcacgcctttgcacttttcctgaactaattttagaatttatattttccaagcaaactgttcattttccatgagatatcttgttcactaacaaacwtgtatgtcatgttactttttaaaaatatttatagtaaaaaaggttttaaacactaattgaaacaatggtaaaataaacacatatatacacaccaacttaactgaacaagtgaatattttgcagtttccaaacataacgtggcttcatcaacaaacacttaagcatgaaactcctgaaaaggggctctattccaatacaggagcaattcatacctaataaaatgaacaataattcctaataccataaaatacagggtttatgttcatattccctctgttgtactaatgatgtcctataagcttttcaaacactttacgttccaaccaaggttttgtattggatataattagatatgtccctttagtctttttaatctagaacaggtcccgagctctgtctttattttccttcatgacgtattttttagtgttaag

SEQ ID NO: 380652 - DNA, 623 bp, Homo sapiens
attatatttttcctttctttgtagtaaaacaaaagcaatttgaggggtaagtccttcacagatattgtcaaggtcttacacagttatttacctttcacgcctttgcacttttcctgaactaattttagaatttatattttccaagcaaactgttcattttccatgagatatcttgttcactaacaaacatgtatgtcatgttactttttaaaaatatttatagtaaaaaaggttttaaacactaattgaaasaatggtaaaataaacacatatatacacaccaacttaactgaacaagtgaatattttgcagtttccaaacataacgtggcttcatcaacaaacacttaagcatgaaactcctgaaaaggggctctattccaatacaggagcaattcatacctaataaaatgaacaataattcctaataccataaaatacagggtttatgttcatattccctctgttgtactaatgatgtcctataagcttttcaaacactttacgttccaaccaaggttttgtattggatataattagatatgtccctttagtctttttaatctagaacaggtcccgagctctgtctttattttccttcatgacgtattttttagtgttaag

SEQ ID NO: 380653 - DNA, 623 bp, Homo sapiens
attatatttttcctttctttgtagtaaaacaaaagcaatttgaggggtaagtccttcacagatattgtcaaggtcttacacagttatttacctttcacgcctttgcacttttcctgaactaattttagaatttatattttccaagcaaactgttcattttccatgagatatcttgttcactaacaaacatgtatgtcatgttactttttaaaaatatttatagtaaaaaaggttttaaacactaattgaaacaatggtaaaataaacacatatatacacaccaacttaactgaacaagtgaatattttgcagtttccaaacataacgtggcttcatcaacaaacacttaagcatgaaactcctgaaaaggggctctattccaatacaggagcaattcatacctaataaaatgaacaataattcctaataccataaaatayagggtttatgttcatattccctctgttgtactaatgatgtcctataagcttttcaaacactttacgttccaaccaaggttttgtattggatataattagatatgtccctttagtctttttaatctagaacaggtcccgagctctgtctttattttccttcatgacgtattttttagtgttaag

SEQ ID NO: 380654 - DNA, 644 bp, Homo sapiens
cataatattaatgttttctttattatttaatatgtgtaagttattaaaaattcaccataccaacattatgactaaacataaagttactgagtaaaaattwagactacttggctgttattgccttatttttaaaaacatttcccagtggcattttgcagtagagttttatgttcaaatgccacttgaaatagttcaattgaatatgcccttaggattatttgtttcaacctcttttctatttaaatctgttttgttttcctttttaattatattcaaacatttatatgatacataaatcaatattagatttaaaagtttcatttccatccccatcttatttttgcttttttgttacacaaagatagcataatatactcagtaatttgcatattgcctttttcacttcatatctgtatgaggaaatgagtttaaagagatctttctcatgcttttgaagctgccaatactctacagtggggtaaaatcatactttattgagccagccaccatttccggatattgggttgctcctgatattttatttacagaattgcatttccttgcatttaagtttgttcatatttgtggaggtatatctttgacttagattctctgagacagttttgttgggctcaagggtaaag

SEQ ID NO: 380655 - DNA, 644 bp, Homo sapiens
cataatattaatgttttctttattatttaatatgtgtaagttattaaaaattcaccataccaacattatgactaaacataaagttactgagtaaaaatttagactacttggctgttattgccttatttttaaaaacatttcccagyggcattttgcagtagagttttatgttcaaatgccacttgaaatagttcaattgaatatgcccttaggattatttgtttcaacctcttttctatttaaatctgttttgttttcctttttaattatattcaaacatttatatgatacataaatcaatattagatttaaaagtttcatttccatccccatcttatttttgcttttttgttacacaaagatagcataatatactcagtaatttgcatattgcctttttcacttcatatctgtatgaggaaatgagtttaaagagatctttctcatgcttttgaagctgccaatactctacagtggggtaaaatcatactttattgagccagccaccatttccggatattgggttgctcctgatattttatttacagaattgcatttccttgcatttaagtttgttcatatttgtggaggtatatctttgacttagattctctgagacagttttgttgggctcaagggtaaag

SEQ ID NO: 380656 - DNA, 590 bp, Homo sapiens
catacattgctcataatattaatgttttctttattatttaatatgtgtaagttattaaaaattcaccataccaacattatgactaaacataaagttactgagtaaaaatttagactacttggctgttattgccttatttttaaaaacatttcccagtggcattttgcagtagagttttatgttcaaatgccacttgaaatagttcaattgaatatgcccttaggattatttgtttcaacctcttttctatttaaatctgttttgttttcctttttaattatattcaaacatttatatgatacataaatcaatattagatttaaaagtttcatttccatccccatcttatttttgcttttttgttacacaaagatagcataatatactcagtaatttgcatattgcctttttcacttcatatctgtatgaggaaatgagtttaaagagatctttctcatgcttytgaagctgccaatactctacagtggggtaaaatcatactttattgagccagccaccatttccggatattgggttgctcctgatattttatttacagaattgcatttccttgcatttaagtttgttca

SEQ ID NO: 380657 - DNA, 579 bp, Homo sapiens
gaacaaaactgagatttccctggggaagaagaaactccatgtgcggactgcagcatcagctgctgcctgagagtgtccagccttctggctcattctagaaatttcagactggcctagccagcccccataatcacataaatcaattacttgcaataaatctctttctttatgtctctctctgtctctctctctgtctgtctctctctgtgtgtgtgtgtgtgtgtgtgtgtgtgtgtrtcttactggttctatttctctgatagaaccctactgataatatagcctcatcaatagaatcaataggataaaatgaatagatcaacagaatagaatcacctctttaagtaagacagcaaaggcaaacgtttttaagagtatgctggtaaagtacttatagataatctgaaatgttaagtgttatctttagaaaatctagacctctcctaaaaggatttagatattagattgttaaagtataacctattttgaggggggatccacatattttggaagaaaacatggtgggtcatggcaggaacaatctatagatgacacaacagaacgcagacgttggaggtc

SEQ ID NO: 380658 - DNA, 579 bp, Homo sapiens
gaacaaaactgagatttccctggggaagaagaaactccatgtgcggactgcagcatcagctgctgcctgagagtgtccagccttctggctcattctagaaatttcagactggcctagccagcccccataatcacataaatcaattacttgcaataaatctctttctttatgtctctctctgtctctctctctgtctgtctctctctgtgtgtgtgtgtgtgtgtgtgtgtgtgtgtatcttactggttctatttctctgatagaaccctactgataatatagcctcatcaatagaatcaataggataaaatgaatagatcaacagwatagaatcacctctttaagtaagacagcaaaggcaaacgtttttaagagtatgctggtaaagtacttatagataatctgaaatgttaagtgttatctttagaaaatctagacctctcctaaaaggatttagatattagattgttaaagtataacctattttgaggggggatccacatattttggaagaaaacatggtgggtcatggcaggaacaatctatagatgacacaacagaacgcagacgttggaggtc

SEQ ID NO: 380659 - DNA, 569 bp, Homo sapiens
ggcatccagttactggatagcagtgtttcctttctctggccactttttgttcaccagctctgagtcccagggatgcggtgccctcctctcccgggatttaatgcatggagggtagccctgccttcccttcacttagtaggtaatgttttagtagggttggtctttgtgattgttgtttttctatctagacttttgcatgattttcttcttctttttctttaacyccacctttttcttcttcgctttcaaaactcaacttcttaataatttgcactaggaacaaaaagcatctttaaggcatcagaccttactttactttaactcattttcccacagttatgttcctgattgctgcttctgccttactcattgttgcctctcttttttatttaatttatcttgtttgttcttttattcttcatcctgaaatatttattcatatactaacaatatacttaaattctgatcttttctgtattaaacttcattatcattgtttaccttaattttattttcttgtttcatatgtatccttttatatttataccttcatctaatctacctcctta

SEQ ID NO: 380660 - DNA, 569 bp, Homo sapiens
ggcatccagttactggatagcagtgtttcctttctctggccactttttgttcaccagctctgagtcccagggatgcggtgccctcctctcccgggatttaatgcatggagggtagccctgccttcccttcacttagtaggtaatgttttagtagggttggtctttgtgattgttgtttttctatctagacttttgcatgattttcttcttctttttctttaactccayctttttcttcttcgctttcaaaactcaacttcttaataatttgcactaggaacaaaaagcatctttaaggcatcagaccttactttactttaactcattttcccacagttatgttcctgattgctgcttctgccttactcattgttgcctctcttttttatttaatttatcttgtttgttcttttattcttcatcctgaaatatttattcatatactaacaatatacttaaattctgatcttttctgtattaaacttcattatcattgtttaccttaattttattttcttgtttcatatgtatccttttatatttataccttcatctaatctacctcctta

SEQ ID NO: 380661 - DNA, 569 bp, Homo sapiens
ggcatccagttactggatagcagtgtttcctttctctggccactttttgttcaccagctctgagtcccagggatgcggtgccctcctctcccgggatttaatgcatggagggtagccctgccttcccttcacttagtaggtaatgttttagtagggttggtctttgtgattgttgtttttctatctagacttttgcatgattttcttcttctttttctttaactccacctttttyttcttcgctttcaaaactcaacttcttaataatttgcactaggaacaaaaagcatctttaaggcatcagaccttactttactttaactcattttcccacagttatgttcctgattgctgcttctgccttactcattgttgcctctcttttttatttaatttatcttgtttgttcttttattcttcatcctgaaatatttattcatatactaacaatatacttaaattctgatcttttctgtattaaacttcattatcattgtttaccttaattttattttcttgtttcatatgtatccttttatatttataccttcatctaatctacctcctta

SEQ ID NO: 380662 - DNA, 569 bp, Homo sapiens
ggcatccagttactggatagcagtgtttcctttctctggccactttttgttcaccagctctgagtcccagggatgcggtgccctcctctcccgggatttaatgcatggagggtagccctgccttcccttcacttagtaggtaatgttttagtagggttggtctttgtgattgttgtttttctatctagacttttgcatgattttcttcttctttttctttaactccacctttttcttcttcgctttcaaaactcaacttcttaataatttgcactaggaacaaaaagcatctttaaggcatcagaccttactttactttaactcattttcccacagttatgttcctgattgctgcttctgccttactcattgttgcctctcttttttatttaatttatcttgtttgttcttttattcttcatcctgaaatatttattcatatactaacaatatacttaaattctgatcttttctgtattaaacttcattatcattgtttaccttaattttattttcttgtttyatatgtatccttttatatttataccttcatctaatctacctcctta

SEQ ID NO: 380663 - DNA, 602 bp, Homo sapiens
actgttattactcaagttcaaattgctgtcatcctctccctggatttctgtatatcctctttttttggcctctctgtttattctcttttcctcctacaaaagatagagtggccttttaaaattataaaccaaattgttacttttctgtgtgaaatggctattagtaacatttcaataaaataaaatttttctgtagtataaaatcccaattcatttccaggtctaaaaagtctctatgtaattggatctcctacytttaccctatattctactctcacttctgtctatccacagtggcttcctttttagatgaaataagtgctgaatagattgggaaaaaaatatagaagtagcagcctgatgacttcaatgaagtagaagaacaagtgacactgcagagtaaaagacaatgaaaattaggacattgtggtcaggagaaaagatgcttgcaattacattttctgtcatgaggcagttttgggtgaaaagtttcatcagcgttgcctctgtgtaggtggtggctcatgatgaatgctattggaaacatattggagttgaagcaattaataaaataagaggctagagagtgggacgggctaact

SEQ ID NO: 380664 - DNA, 602 bp, Homo sapiens
actgttattactcaagttcaaattgctgtcatcctctccctggatttctgtatatcctctttttttggcctctctgtttattctcttttcctcctacaaaagatagagtggccttttaaaattataaaccaaattgttacttttctgtgtgaaatggctattagtaacatttcaataaaataaaatttttctgtagtataaaatcccaattcatttccaggtctaaaaagtctctatgtaattggatctcctacttttaccctrtattctactctcacttctgtctatccacagtggcttcctttttagatgaaataagtgctgaatagattgggaaaaaaatatagaagtagcagcctgatgacttcaatgaagtagaagaacaagtgacactgcagagtaaaagacaatgaaaattaggacattgtggtcaggagaaaagatgcttgcaattacattttctgtcatgaggcagttttgggtgaaaagtttcatcagcgttgcctctgtgtaggtggtggctcatgatgaatgctattggaaacatattggagttgaagcaattaataaaataagaggctagagagtgggacgggctaact

SEQ ID NO: 380665 - DNA, 577 bp, Homo sapiens
ctctcatttttgtagatttagtactgttcatgtcctgatattagtattgtcactaaacagtctttttattcaacaaacactcatagatcacatcctgagataggctctctgaaatggtccctgattccatgattttttttcgtggagatataactcacatrccataattcactcttttaaaatgtacaatccgatggtttttagtatgttcacaatgttgtacaaccatcgacactatccaattccaaaacacttaattaccccgagaacaaactctgtatctataaacagtcacttcacactttttcctatctctatggatatgactattctggacatttcatacaaataaaaatatgtgaccttttgaatctgatgtccttcacttaacatcatgtttttaaggttcatccatgttgtagcatgactcagaacttcattacttatggttaaatagtagtcccttatatggactgataaagtaggacttaaatctactattttgctatttgttttctacatgtgtatgcctttttttgctcctctatttctccattgctgccttttttctgaaata

SEQ ID NO: 380666 - DNA, 577 bp, Homo sapiens
ctctcatttttgtagatttagtactgttcatgtcctgatattagtattgtcactaaacagtctttttattcaacaaacactcatagatcacatcctgagataggctctctgaaatggtccctgattccatgattttttttcgtggagatataactcacataccataattcactcttttaaaatgtacaatccgatggtttttagtatgttcacaatgttgtacaaccatygacactatccaattccaaaacacttaattaccccgagaacaaactctgtatctataaacagtcacttcacactttttcctatctctatggatatgactattctggacatttcatacaaataaaaatatgtgaccttttgaatctgatgtccttcacttaacatcatgtttttaaggttcatccatgttgtagcatgactcagaacttcattacttatggttaaatagtagtcccttatatggactgataaagtaggacttaaatctactattttgctatttgttttctacatgtgtatgcctttttttgctcctctatttctccattgctgccttttttctgaaata

SEQ ID NO: 380667 - DNA, 473 bp, Homo sapiens
aatctactattttgctatttgttttctacatgtgtatgcctttttttgctcctctatttctccattgctgccttttttctgaaataaaaattttccagtgtgcaattttaattcccttgtcatktattttactgatttttggttgttagtttcttagttattgcctggtgttataattaacatcttcacttatagcaacctagtttggattaataccaatctaattacaatagtatataacaattttgctcttatacggctttgatttttcactgtctttctgctgttattttcatataaattatatttttatacagtgtgtgcccctctatacagatttactgctttataaaatttttctttttgattttttaaaatgcaattttcttttaaatcagatagtagaaaacagttacaaacaaaatatacagatatttatgaggtaaatgcatatatttatttatgtaataacc

SEQ ID NO: 380668 - DNA, 518 bp, Homo sapiens
tcttatgaaataatgtaatatacccttttttactttttagtatcagtatttattttctttactggaatctgttttaagggtgattgattggattaygtttactgccagctaaaacttgcattttctctgtctattagtagagaacaaatagaaagaggcagtggcaatactaatatgaactgagtcaatattagtcttttgatcaattagagtacatttatgtatataatttttgtaaactacttacaagctaaactagtaggaaaaaatgaatagattttatttcaatggaagcaaactaccacacctatccttcaagtattccttggactgccgtcaaagcatgtgaagtttggttgaaagaaagagaaaaataattggttgactctgaattgaagcttaagtagggttgaggaaatggaatggttgctactgagaacagagtttcagtggatcgactactgtcctaaattctgtaataaatacagtctacacagtcatagatttaagcatgttta

SEQ ID NO: 380669 - DNA, 494 bp, Homo sapiens
cttctcacagtaagcctgcctcttggtttttgtgactgaagattctgagatggtcaatatttgcaggatggtctgacaaatgcgsctgtaatagcaacaatctgtgagtatgggctagtctggttttatttgtagtttgttggtacttcagtgggtccataacttagaacatgaaatatgtattaatttcttaggcatgtaacaattatttctccagagcacaaaaacacaaggatttatgcaccaaaagtgtttgtagtcagacctgactccctgctggccacaatcatataagaatgtacaaatgtggaacacttctgaatttattcatttcttagctttcttctaattactaatttcacttaatgaactgtgccagaagatcataactaccctgaccaacagtttttaataagacaaacaataagccatgaagagagaagggccaaattacttatcgaagaaggatttacatgaaatgagggctgaattgt

SEQ ID NO: 380670 - DNA, 494 bp, Homo sapiens
cttctcacagtaagcctgcctcttggtttttgtgactgaagattctgagatggtcaatatttgcaggatggtctgacaaatgcggctgtaatagcaacaatctgtgagtatgggctagtctggttttatttgtagtttgttggtacttcagtgggtccataacttagaacatgaaatatgtattaatttcttaggcatgtaacaattatttctccagagcacaaaaacacaaggatttatgcaccaaaagtgtttgtagtcagacctgactccctgctggccacaatcatataagaatgtacaaatgtggaacacttctgaatttattcatttcttagctttctyctaattactaatttcacttaatgaactgtgccagaagatcataactaccctgaccaacagtttttaataagacaaacaataagccatgaagagagaagggccaaattacttatcgaagaaggatttacatgaaatgagggctgaattgt

SEQ ID NO: 380671 - DNA, 578 bp, Homo sapiens
cattcgcaaatcagatacaaacttatttaccctcaacctgaaagaagtcagggtgaacctaacatttaaaagaaatgtattaaatctttacaattcttttcttctttttcttgtttcattttttttcattgtcgtccgtgatgtagggaaaaaacagaaggtatttaaagtgagtaaatattctgtgaattttcttagtctaatcctctttaaaaatgtaaaaagtagttgactatgacagtgtggtagagacagcaagaattagcccaagattggatgatttccacaaagaacttgcaagctgggatacatatacaaccactttctgagatgctttctctggtagttcagatactctgacctcagttagacagaacaggctgcataccatcttagmaagattataaacaaaaatatcaaaatggtttagaaaggaaataacactaaccatctgaaactgctactgatagaaagcaagtgtagaagttgaagatcatatgagtcactttaataaccatcttaataataactttgttcaaagctgctacttgtagctcttaaaatgattaacaattatt

SEQ ID NO: 380672 - DNA, 578 bp, Homo sapiens
cattcgcaaatcagatacaaacttatttaccctcaacctgaaagaagtcagggtgaacctaacatttaaaagaaatgtattaaatctttacaattcttttcttctttttcttgtttcattttttttcattgtcgtccgtgatgtagggaaaaaacagaaggtatttaaagtgagtaaatattctgtgaattttcttagtctaatcctctttaaaaatgtaaaaagtagttgactatgacagtgtggtagagacagcaagaattagcccaagattggatgatttccacaaagaacttgcaagctgggatacatatacaaccactttctgagatgctttctctggtagttcagatactctgacctcagttagacagaacaggctgcataccatcttagaaagattataaacaaaaatatcaaaatggtttagaaaggaaataacactaaccatctgaaactgctactgatagaaagcaagtgtagaagttgaagatcatatgagtcactttartaaccatcttaataataactttgttcaaagctgctacttgtagctcttaaaatgattaacaattatt

SEQ ID NO: 380673 - DNA, 495 bp, Homo sapiens
tgaaggaagcaatagaaagaattccatcccacacacagcacattctgtcatgtctctctgcagcaaaagaagtgtctgcttgacctgcctaacatgctacttaacaayaatgctaccatcaacagccacctttgctatcagcagctgcagtgggatgcttattgactatgtgctctactaaacacggcatatagatgacttaacttcatccttcaagtacccttatgaacgacatcctattattttccctgtttttacaaaagaggaaaccaagtcttagaaagttggagtaacatttacaactttctgttagttgttcagagttgtaagattcttcacccacatttatagattaaaattatagattaaattatagattaaaattaacctccatcctgcctcattaaagttgagggaattctgcactcctccacctgcatagtgatactagcatacaagcttttatctgtttcattgaccatgatcttaattatc

SEQ ID NO: 380674 - DNA, 514 bp, Homo sapiens
tcatccataaaggcaacaatggagactatgcaatgaaaatggcagagcaacttcaactgcatcagacagggaagtaaatcttaatttactaagccactgagagtcccaagcttgtttatcactgcaccacaacttagcccaacctgactaatactggcagtggatactgtatcatgaaacttttaagatgtggcagagcatcaggcatcaaagaagctaattcacaggctggaaatacggtgatctaagttgcacaatgagaagcaggttgtaaaactattatcratgataacttaatagacaagactacagcccactgcatcagaggctctagaggaagaaaatggaaagatgtaatacccatagtgtatcttggctaatataggctgcatttggcaaggcattacataaaaaagataagctcaggaaagatttggctagtttggaacactaaattatctcaggagtcatgcttcattgaaatagcagtatttctgaattttcacagggctat

SEQ ID NO: 380675 - DNA, 514 bp, Homo sapiens
tcatccataaaggcaacaatggagactatgcaatgaaaatggcagagcaacttcaactgcatcagacagggaagtaaatcttaatttactaagccactgagagtcccaagcttgtttatcactgcaccacaacttagcccaacctgactaatactggcagtggatactgtatcatgaaacttttaagatgtggcagagcatcaggcatcaaagaagctaattcacaggctggaaatacggtgatctaagttgcacaatgagaagcaggttgtaaaactattatcaatgataacttaatagacaagactacagcccactgcatcagaggctctagaggaagaaaatggaaagatgtaatacccatagtgtatcttggctaatataggctgcatttggcaaggcattacataaaaaagataagctyaggaaagatttggctagtttggaacactaaattatctcaggagtcatgcttcattgaaatagcagtatttctgaattttcacagggctat

SEQ ID NO: 380676 - DNA, 478 bp, Homo sapiens
cacatacacacgtgtgtgtacatacacacaagtgcatgcacacacatayacacatatatacatacatatacacatgtgtatatacacatgtgtatatacatacatatacacatgtgtatatacacatgtgtatatacatacatatacacatgtgtatatacacataagtgtatatagatacatatacacatatgtgtatatacacataagtgcatatacatacatatacacttatgtgtatatacacataagtgtatatatgcgtgtatatacgtatataaacacatatgtgtatatatgtgtgtgtgtgtatatatatatagacagagagagaaagggagagagacagacacagagaaagagaaagtgacagggagaaaaagagaagagggaaaatgggaaatgacaaagaaaaatactacttcacatagctgatgggaccctcaaaattatccgaaatgataatgacattttatgt

SEQ ID NO: 380677 - DNA, 478 bp, Homo sapiens
cacatacacacgtgtgtgtacatacacacaagtgcatgcacacacatatacacatatatacatacatatacacatgtgtatatacacatgtgtatatacatacatatacacatgtgtatatacacatgtgtatatacatacatatacacatgtgtatatacacatawgtgtatatagatacatatacacatatgtgtatatacacataagtgcatatacatacatatacacttatgtgtatatacacataagtgtatatatgcgtgtatatacgtatataaacacatatgtgtatatatgtgtgtgtgtgtatatatatatagacagagagagaaagggagagagacagacacagagaaagagaaagtgacagggagaaaaagagaagagggaaaatgggaaatgacaaagaaaaatactacttcacatagctgatgggaccctcaaaattatccgaaatgataatgacattttatgt

SEQ ID NO: 380678 - DNA, 609 bp, Homo sapiens
tggtgaggcaagcttctggcgtgactgtccttagaatgtgtactgagtttcctcayggttcactgctcccgtctgtgactcaacgagaaatgtagaacacacgtgaaaactgtgtgagccataggcatttgatttggtgggtggggggcgcggagctacattgaattcataactatggaaattgttttttccaacattaaattcataacaatggaaatagttttttctctgtaaattttctgcctcccttaatctatagtgctacctgaccctttaacattggccatgaacaaatcacagaactattttccttaaaagatgagtgagaggaaattctaaaactggttaggagcgatgttttaaaaattgccatgtattaatactatcaaataaccaaatattatttgatcatatcaaatcagggcgaaaggtaaattttatgagattcaagtgcaacttacctaaaagtaatattttaaaattgacaccctgttttcctacaaaagtcccatggtctcttaatttgccagtgaaaattactgggctaattttgtttgttaatgagataaatgccaaacacaagtgtgagttaggcttgacactgtgaat

SEQ ID NO: 380679 - DNA, 515 bp, Homo sapiens
tcactccccacagcctggatttcaaaacctttggcttgtttaagaagttaagaaaatcagctttgagattcaatgcctctctgggccattgattcctaaagagagtagcatatcccactaggaggtatttttggaaagctgtggggttacttttggttaagatttagagggtaggggctattggtatttagtagatgggggtccagaattatcaacatggtgtaatgaaggagacagtcccacaatgaaaaatcattccatcccaagtttgtgtaggccaaaaaatctgattataacttttttagcttagaaccttaactctaatggtgcttctgtatggtttaaatataaacgatacatttagtttgtataaaccaatataaaattcccagtaatgcacctaccacatatgtgagggaatatcactatgccttgtttgatatattaccragggttttttcctatttgaaaaagtcaccaaggttctactttttgttgagtcacatagctggata

SEQ ID NO: 380680 - DNA, 552 bp, Homo sapiens
taaggttaagagcctctgttctatgcagttcctatttttccactttccatattgagtgcttcctgtgtgccagatactaagtatttcccatacttgctctccttcactcttcccaaccttctatcgatgatataaaactacataattttatattrtttatataaactaaagcttaaagaatctaagtaaaccagtaagtggaaaaatccaagattcaagttcaagtccacctagctgcaaggcctggcatcttaaccattccacttttttaactaatgtagaaaaaggtcatcttttaaaaatattactaccatatttctatgtatatagtttaataacctagttattgaagatatttatctagcaattaaaaggagcagcaactaagcactagagccttttgttttaatgtaccctttgtgtagtttttaataaactctgttacctaattgccttacttagcatatctctgtgctattaaaacttctttaatgttttatgtggaaaaaatactaatccttaaaatgtaagttattagctaagaatttttaa

SEQ ID NO: 380681 - DNA, 562 bp, Homo sapiens
aatatttttttattaacccatgagttaagtattatcgcctttattctttattatacagaaggacaactgagggctccaagaggtttaagtgacttaagagactccaaccacagagtgtgcaagctgggatttgagcccggcatgttctattatgctaatctactcaacttcatgtgtgtggggatttgaggcagttacagcgagtcatattacgactgaggggagttttggtgcgggctatggattaaacctccagttaagtcttgcttacacctaggaagtctaatatccagtgaatgttcccaactgtctctaacacataaggatttcgctggatttgggcagttaacatgccacttcaaggatgrgaatgtttcttgggaaatccaacagtgacaggaaagcttgagtacactctttaatagcatgcaaatgatggggctggaaattcccagaaccgttttccactgtcctgcactctctctatttttggtattgctattcaatagctctcatgtcctaggaaaatcatatcactgctgagaaactctttctttaaagg

SEQ ID NO: 380682 - DNA, 569 bp, Homo sapiens
agtgcgtttcctttgtttccctcctccaccactgaacaatagcaccagcaggaaatatgtaactgatgttccacatgtggaaggagctacacaataataaactctaaagtgggtcattgttcctaccyatcgtataagagacaattgcagatgagcaaaagtttgtttcccaacatgtatttcatttcagattaatagtgatgcttactttattctcaaataacttccaatttaaaaaaaaaaaaaaatcaaaccataagtggatgatcattggaatacagcttccaccaacttttaaaaaagaaatagtaataataacaacatcacatagtcatgaatgttgaattttggaaagaaaggcttgaaatttaaaatgaaaaatttcaatacagcctaccagccccaagcagcaaggttttcattaacatagcaaaccacatagctgtctcttacatttactgattagtgtttttgtttaaagaaagttatggatggccacagatataaacttgacatcattttgccccttattgaattaaaatgaatttaaaaatgtagtttttacttac

SEQ ID NO: 380683 - DNA, 497 bp, Homo sapiens
cctgttcttcattcatggataattagaaagaaaaagattcctctatataaaaaagggagaatatatcatgcaagatacagaggaagagaataataytgataaagacattacaaaaaaaaagaaatattggtcagaaagacactctctgccttcaaaaatacagaatatgaaataaaatataagatgaagtgaaacaatactgtaaaataaaagataaactgttaagggcagtacaaaaaattttcctccaagaaaacaaaatatgttagagacgttaaaatgtatattagaagagaagaaataaaacagaaaattataacagatgaatgatacagagaatagaaaacaaagatcccaaacaagaatgattattaacttttaaagaagagtctagagcagacagaaaataagtaataaagacgtaaccattagatctatttctggactaaaaaagatatgaaggtgcagaacaaacggatttaccatacacaaagtaa

SEQ ID NO: 380684 - DNA, 558 bp, Homo sapiens
attattaacttttaaagaagagtctagagcagacagaaaataagtaataaagacgtaaccattagatctatttctggactaaaaaagatatgaaggtgcagaacaaacggatttaccatacacaaagtaatgttactaaagaaataccaacatctagacatatttcagggcaacaaaattaaattccaaaaaaaaaaagagcaaatgcaaaacccaggcagaaagaaaaataattaatctcagatttctttttctcagtcttaaaaaccaaaggacagtagcgtaacatctattctacagagttcttttaaaaagtttgggtcttatgattttatatcagccaatttstgtaatcagtcattgacatataaaggtgatgaaaaatatatacaaccagattaatctcaggcacagaggtggtctgacctcttgtgctccttctctggcccactccagccagtttggcttccataagcttctccaaaatagcatgcttactaccccatcttccccaaacttatttaacattacagctttagctggtgcaagagaacaaat

SEQ ID NO: 380685 - DNA, 580 bp, Homo sapiens
aataccttttaacgtatttagataattttctcccatcagcgataacaagaattatcatatcaaaaactgaattccactagcaatcataaacctaatggaattaggtttccctgacttggaagattctaggcttgtgctcattctaagagagagaataatgtcctgggagcctacagccatcactcagaactytaacccaaagtagaagaaagattgaagaccactggtttcagacaatgatacctaaattattctgcctggtgaatatctaaatgaccaaggcacttgattgttctctgcttgaaggaatacaaaagcctttataccctagaaggcaagaagttctttatttaaaaaaaaaaaagaaaagaaaaaattttggcctggttaaaatgcacttcattttgttcctcatgttgaccagtaattacatactcttccccctgcaaaagaaaaaacactactcattctaaaatagcagtattgacccttttgagatatttcaaaaggatattttcaaaaagacatttcaaaatcctagaagcaaagaaaatatagttgaaatccaggaaagctgaga

SEQ ID NO: 380686 - DNA, 640 bp, Homo sapiens
actactcattctaaaatagcagtattgacccttttgagatatttcaaaaggatattttcaaaaagacatttcaaaatcctagaagcaaagaaaatatagttgaaatccaggaaagctgagaaggtacacagtaagtaattaatttggagacaactgtcaagaattcctctgaggggtgggtagtatgtacttcaacgacaccttattaatgaggtggccaagaaaaaccccaaaccaaaattgattgaaaagaggatgcrtgagtatctaatgcaaaccctgcaggaacactgatcacaatgccaggggccaaggtatagtctttcaggtaaatatcctgtaagacccccaaaacatagtcaaagcctgggggggaccccagctcacacgacagatgaataatgtacccagacaccgatattcactgaaagagcagctaggggtccaagccgctcacagacaccaaggaaggtgctgtaaagagtcagcagccatggcccgactagctggccctgcaggcatttatttagcacagttttaatgacaaaggctttgagtcaacacatctgtgtgtaattaatttggttgtccccaccccgggagagccatcctgcctgtgagtgatcaaaggttagtttta

SEQ ID NO: 380687 - DNA, 392 bp, Homo sapiens
gaggtggccaagaaaaaccccaaaccaaaattgattgaaaagaggatgcatgagtatctaatgcaaaccctgcaggaacrctgatcacaatgccaggggccaaggtatagtctttcaggtaaatatcctgtaagacccccaaaacatagtcaaagcctgggggggaccccagctcacacgacagatgaataatgtacccagacaccgatattcactgaaagagcagctaggggtccaagccgctcacagacaccaaggaaggtgctgtaaagagtcagcagccatggcccgactagctggccctgcaggcatttatttagcacagttttaatgacaaaggctttgagtcaacacatctgtgtgtaattaatttggttgtccccaccccggga

SEQ ID NO: 380688 - DNA, 583 bp, Homo sapiens
gatgtgcctttgtgtgatgagctgagaaagagctggtagaatgctaatgactaggtaacggggcctctcaaatccttttcaaaataattcaaaatgtaatagttatttatctgtgtaataataagaaatacaggttttgtctccgcctccctttcctagtagacagttcctaaaaccaagtgataggtgtcttttcatgtgctaatgggatggctggtggcggggctcctgaatagcctcaagatgggggctgggtgccaggagaaccaaccaagtgattacacagttggaactttcagccccatgctacctcccacyccacccctcaatctctagggagcagaggagggctgaaggttgaggtgatcaccaatggccaatgatttaatcaatcatgcctatgtaaggaagcctgtataaaaaccagaagggcagggttcagagagcttccaggtggttaacagcaacacatccacatgctgggagcatggtgcatcccaagatccacagggacagaagccccagtgctcaagaccttccaggaccttgccctgtgtatctctttatctggctgttcatttgt

SEQ ID NO: 380689 - DNA, 538 bp, Homo sapiens
cagggtctgtcgggtggtaggggcaaggggagggagagcattaggacaaatacctgaygtatgcagggcttaaaacctagatgatgggttgacaggtgcagcaaaccaccatgggacatgtatacctatgtaacaaacctgcacgttctgcacatgtatcccagaacttaaagtaaaattagaaaaaaaatatcctcatgtatataccttccaaagtgaatgtagtttcctaatattggcttgcttcacctcaaagagtaggagaccagggtggctgaagtgttaagcagcaaaaaattggaacaagcagaggttaaaattcctcatcaatataaaaactgaaactgaactctgacagtcagacacaaatactggcttctaaaacccatatctacccacacaaatacacacacatagaaagttacagctttactcagctttatataattaacatatatagctgctatgaagatgtttgggaataattttaattaatttaactagattcgtattagttgtattatactacattttttct

SEQ ID NO: 380690 - DNA, 538 bp, Homo sapiens
cagggtctgtcgggtggtaggggcaaggggagggagagcattaggacaaatacctgatgtatgcagggcttaaaacctagatgatgggttgacaggtgcagcaaaccaccatgggacatgtatacctatgtaacaaacctgcacgttctgcacatgtatcccagaacttaaagtaaaattagaaaaaaaatatcctcatgtatataccttccaaagtgaatgtagtttcctaatattggcttgcttcacctcaaagagtaggagaccagggtggctgaagtgttaagcagcaaaaaattggaacaagcagaggttaaaattcctcatcaatataaaaactgaaactsaactctgacagtcagacacaaatactggcttctaaaacccatatctacccacacaaatacacacacatagaaagttacagctttactcagctttatataattaacatatatagctgctatgaagatgtttgggaataattttaattaatttaactagattcgtattagttgtattatactacattttttct

SEQ ID NO: 380691 - DNA, 538 bp, Homo sapiens
cagggtctgtcgggtggtaggggcaaggggagggagagcattaggacaaatacctgatgtatgcagggcttaaaacctagatgatgggttgacaggtgcagcaaaccaccatgggacatgtatacctatgtaacaaacctgcacgttctgcacatgtatcccagaacttaaagtaaaattagaaaaaaaatatcctcatgtatataccttccaaagtgaatgtagtttcctaatattggcttgcttcacctcaaagagtaggagaccagggtggctgaagtgttaagcagcaaaaaattggaacaagcagaggttaaaattcctcatcaatataaaaactgaaactgaactctgacagtcagacacaaatactggcttctaaaayccatatctacccacacaaatacacacacatagaaagttacagctttactcagctttatataattaacatatatagctgctatgaagatgtttgggaataattttaattaatttaactagattcgtattagttgtattatactacattttttct

SEQ ID NO: 380692 - DNA, 553 bp, Homo sapiens
ttgacttaggatgtttaggggaaatatcccagattcttggctctagggacagagaacaatctcattcactctccacggggctgaagacagcttgtgcccttctcyaccgcctcgttagtaatagctggaaacaacaggtgtccctccgtgggtgaaagatgaaacaaacaatgcagcatccatgccgcagaattccgctcagaaataacacggagcaaactaccgatacgcatgacagcttggatgaatccttagggggttaggctgagtgagaacagccggtccccaaagcttacatgctgtatcattccatttgtaggagagtctcaaaatgacaaaactattgacatggagaacatgttcctggatgccttgggtcagggaggggacgggcaggagggcttgggtggggctgtgcgagggcagcgtggggactccttgcagtgaccaagtgttctgtatcctgactgtcaatgtcagcgtcctggttgtgatattgcactacagttttgcacgatgttgtcatggggagaagctgagtataaagggtagg

SEQ ID NO: 380693 - DNA, 421 bp, Homo sapiens
ccaacaattctatttatcaagtacaaacaggccccgacttgcgttggttcacttaygatttctctgctttacgacggtgctgtgaaagtgatacacattcagtcaaaaccatacttggaattttgaattttgatcttttcccccgctagggatgcacagtgcaatactcccacatgagatattcagcacttaatcataacacaggctttgtattagatgatgttgcccatctgtaggctaatgtaagtgctctgagcatgtttaaggcaggctaggctaaacaatgatgctcagcgaattaggtgtattaaatgcattttcagcagggcatggtggctcacgtctgtaatcccagcactttgggaggccgtggcaggaggatcacttgagctcaggagttcaagaccagcctgggcaacat

SEQ ID NO: 380694 - DNA, 421 bp, Homo sapiens
ccaacaattctatttatcaagtacaaacaggccccgacttgcgttggttcacttatgatttctctgctttacgayggtgctgtgaaagtgatacacattcagtcaaaaccatacttggaattttgaattttgatcttttcccccgctagggatgcacagtgcaatactcccacatgagatattcagcacttaatcataacacaggctttgtattagatgatgttgcccatctgtaggctaatgtaagtgctctgagcatgtttaaggcaggctaggctaaacaatgatgctcagcgaattaggtgtattaaatgcattttcagcagggcatggtggctcacgtctgtaatcccagcactttgggaggccgtggcaggaggatcacttgagctcaggagttcaagaccagcctgggcaacat

SEQ ID NO: 380695 - DNA, 608 bp, Homo sapiens
aattctggtcataacctttcactctctgtgtgacgctgggcaaaacccttcccctctctgagcctcagtttcctcatctgttaattgaaaatgtcagggaaagtgtggtctctaggattccttctgtttgtcgtcttggagatggcccctcctatgtttggagagcttcccacattatgaatttccgtcctttgcccccaggtagaaaccagaactcactttcccagcctcctttgctgctgtggtactgtcatgtgacctggacaccaccaatcagatgcacaggcatgagcctcccatgggcagggcagtattaggcaacagagaggcactgcttgtgccttgtcctttagtggggagggacagcagtggtggaatcctggtggtaacacccatgcagggcatacctgtggtgggggctgaggtgtctgtgttggcagcaggagcctctctactgggagctactggtggaacgtgctgcctcctccaagcctgattccctgacctcctacacaatcygtgatttgcgtactagcccttaaaaaaattccatttcagctgagaccagctagggtgggtcctggtgcttgcacctaagaaccgtgata

SEQ ID NO: 380696 - DNA, 474 bp, Homo sapiens
acacaatctgtgatttgcgtactagcccttaaaaaaattccatttcagctgagaccagctagggtgggtcctggtgcttgcacctaagaaccgtgataaatgcaccacccaacttgaagattccatcattccaaatagggtctggtggtctaagactaggttttaatttgatgtgattttttgagacagggtctcaatctatcactggggctggagtgcagtggtgtgatcatggctcactgcagcctccacctcccaggctcaagggttcctctgagtagctcaggcacacaccaccatgcccagctaatttttwatttttttggtagagacagggtctcacagtgttgcccaggctagtctcgaactcctgggctaaagcagtcctcccacctgcacctcccaatgtgctggattacaggcatgagccactgtgcccagccctaagactaggtttttaaatgaagatagagt

SEQ ID NO: 380697 - DNA, 529 bp, Homo sapiens
tgggcttgtggtaagataatgaggaaaagaaaataatcaaagataagtcttatgttttttggctcaataaagtgggtggaaggttataccacttactggcagtaaggaaagtttgggttggggtcagagtcagaaatccaaagttttctttgggacattttaagtttgaaatacttatcagaaatctagctagggatgccaaatagacagacaaccgaatttagaaatagggagagatcagagctgtgagtgtgtatatgacaccatcagtatatagttgagatcaagggagtgtgacaaaaaagagaaaaatagggaaaggggtcaakcttggttgctgcagcccactaacacttacagattaattggatgaggagatgccaacggaggaaactgataaaggaaagtgagaaaggaaaggtcaatgttgtgtcaaagatgcaaagcaaagaatttcaggaaggaaagcgcaatctagtctaccaaacactgttaaacagtacagtaaggaccactggctctgacaaat

SEQ ID NO: 380698 - DNA, 570 bp, Homo sapiens
tgtagaaaattcaagtgccacaggaaagatcccttttcaatatcatcactaccaccaccagtctcattattcaggcataaaaagagccactgtcaacatctgggtggttatccctccaggatgcattctacatctttagccatatcttttaatggcaatgaatgcagagcacatttttacatggttgttacttgttatttaatcaatcacttattaatgagcayttaaattcttttcagttatttttaccatttcaagtttcaatgaacgttcttataccttcacatttgctcttttatcagtttatctccttttctacccttacttaatttcaaagtagcagtctcttaaaatgattcagatgttcttacaacttagatgatatggcataaatacttaacaatgcttgaatacttagtccctgttggggttctaggtccttttctccttggttttctttcatgaggaagtcagcagggtcagatgaggtcataaaacatcatctaatgagtaagagggggaactagggcattgcaaccctatgctgtcaaacaaatgagtatgtactga

SEQ ID NO: 380699 - DNA, 523 bp, Homo sapiens
atcataatcaaacttttgaaaagtaaagacaaagaaaacctttaaagcagcaagaaagaaatgacaccttacatatggtggataaatagtttgaatgacagctgatttctcatcaaaaatcaaggaggccagaaggaaatggcataacatttttcaagtatgtaaataaaagaaaaaacaatccactctgaattttatatctggtaaaataatccctcagaaatgaaagggaaagaaagactttatcagacatataaaaagcaaaacaacctgctaytaacagacctacttctcaagaatgcctaaaggaaattctctaaatctttggaaataaaaaagaagcaatcttgaaacatcaggaaggtaagaagcaaaaatatgagtaaatacattaggctttccttctcttgagctttctaaattattttggacagttgaatcaaaacacagcgttggaaaaaaagacaatatatattcaattttgttcactagaatactctctcttgaggccttcagccaccaa

SEQ ID NO: 380700 - DNA, 626 bp, Homo sapiens
tgcaattattatttctttccccataatataacatttatttggtgccaggcacatttctttgtttggccaactcttcattcttaaacatacatttctagctcctttgaaagtcctttcctgaacgtttgaggttgttgcctgcctttcctctgtaactatcattaacaccttgtgtttttatgctcattaccattgagaagcctctgattatctgcacatccgggtcctcttctatgagaagggaaatagatcatcagaggtcacatatccattaagtggtggagctgaggttcagacccaagcctttttggctccagagtatgtgtcttcatagccagtaccccagtcttctcatttattaattatgttttatatcatctctgctttatcaattcacctatctttctggttcctatttcaggatcatttgcttttatttttatttcacctttgtttctgtatttttgttgtgcacttttttaaattcttatatttaaaaaatattaattccttaattcacttttttttctgatttggcaattaaagcttgtaaggcaattcacttatctttcagtrtagcttggcaacaattttaagttttaatatagagttaattgtgattaatt

SEQ ID NO: 380701 - DNA, 590 bp, Homo sapiens
acaatgcattgtattcttgaaagttgctaagagagtagattttaagtgttctcatcacaaaaaatgtacgataattcatatgttaattcattcaatttagctcttccacaatttcaaaacaatatgttgtacaggataaatatgtgcaatttttgtcaactaattttttaaaaaaagatcaaactgtcaaagcagattcacacaaatcacatgtcatgcgtgcaacaaaattwactaaatgttagcaaagaatattagcacaagacagccacgagctccatgagtttctatgaggtcctgaatccatcaaacaagcctctttgaagttctttttcacacaccaagatgtgaggatcacaaactgtatgtggtatagtttggcacagtagaggccattccagtttgaggtttctcagtttgggtattttagtaggctggtaacagcttttgtatccagctgcatcctacaaattaataaaattctaggcttaattaaaataagttatccagagagatcagagatattctgtaaaaccgtctttcacaaaaacttaatcttcttgtaaatggatcccatcacagtgtctctg

SEQ ID NO: 380702 - DNA, 524 bp, Homo sapiens
agttttcaactggggggcaattctttcctgccaggacatttgacaatctctgaagatattttttgttgtcatactggggtagaggaagtactaatgacatctagtgggtagataatagggatggtacttaacaatctattgtacatagaaaataataatctggccttaatagtgctcaggtggggaaactctgctctaaagccacatgactttaaaaaagccagaagagccagacttccaagtatctagctaaggactcaagtggaataatgaagaatctgatctctggctatcactgattagattgcttgttaagcatcatcttgtcattgttatcttaagatcttcctaagccactggaaatatctcactttggatgccagtgtatccctctcccaacagcccattcccttctaagctggttcatagtttggggaacttaggaactgaggaagtaaaamtaagaaaaggaaaggaagaatgtgttgaaggggaaaaaaatgaagagacagactgaaatataa

SEQ ID NO: 380703 - DNA, 467 bp, Homo sapiens
caaaaccacagtgagatatcatcttacsctagttagagtggctaacagagaaaagggaactttcatatattattggtaggaatgtaaattagtacagccattatggaaatcactatgggggttttacaaaaatctaaaaatggaactaccatgtgctccagcaatcccactgctgggtatccatccaaagaaaaggaaatcagtatacaaaaaaagaggtttgcactcccaaatttactgtggcattactcacaatagacaagataaggaatcaacagacgaatggatagagaaaatgtggtatatgtacacaaaatggaatattacccagacataaaaaggaataaaatcctgtcatttacagcaacatggatgaaactagagatcattatgttaagtgaaataatccatgcacagaaagaaaatatcacatgtcctcagtcatatgtggaagctaaaagaattgg

SEQ ID NO: 380704 - DNA, 590 bp, Homo sapiens
acaatgcattgtattcttgaaagttgctaagagagtagattttaagtgttctcatcacaaaaaatgtacgataattcatatgttaattcattcaatttagctcttccacaatttcaaaacaatatgttgtacaggataaatatgtgcaatttttgtcaactaattttttaaaaaaagatcaaactgtcaaagcagattcacacaaatcacatgtcatgcgtgcaacaaaattaactaaatgttagcaaagaatattagcacaagacagccacgagctccatgagtttctatgaggtcctgaatccatcaaacaagcctctttgaagttctttttcacacaccaagatgtgaggatcacaaactgtatgtggtatagtttggcacagtagaggccattccagtttgaggtttctcagtttgggtattttagtaggctggtaacagcttttgtatccagctgcatcctacaaattaataaaattcwaggcttaattaaaataagttatccagagagatcagagatattctgtaaaaccgtctttcacaaaaacttaatcttcttgtaaatggatcccatcacagtgtctctg

SEQ ID NO: 380705 - DNA, 530 bp, Homo sapiens
aaatgcaaggcagtgatcaaccactaccctgattaacccttcaatactttcccagtctctactgtagcagattctttgctttttttctttttaatttaaaattcaacaataccagtakcaagtcagtttctgaatcaggtcaggccattgcccattttcatgctaacttcttagcttgcaaagactttgttcttctgttgtttagagaaactttctagaatccatttaagggacacaatctttttgaagttttactttatattttcccaactgtcaagctcttagaagtttctttgtatcactttctttgtaccctcaaacttcattttctttctttcttttttaattgagacagggtctcattctgtcatccaggctggagtgcagtgatgtgagtacggctctctgcagcctcgacctcctggactcaagtgattctcctgtctcagcctccaaagtagctggaactacaggaatgtgccaccacacctggctaatttttgtgctttttgtaaagatgggactttgcc

SEQ ID NO: 380706 - DNA, 325 bp, Homo sapiens
ctcggcttttcaacattgctcacaaagcccatcacacccttgcctgaacctaactctcctgcatcattttttcccattctctacttcccaatgtgtatgtcagtcatgtcaggttataattcccaaaagagacattatgttgctccctaccttcacrtatgttgctcacttgacctgaaaaccttttttactcttttcagtctattaaacttctgatgatttttcatagctcaggtcctgcttcccccaggatgctttaatttaaccatagagagaatgattagacgtcccccagcatgtccttatagtgccctgttctcatgtg

SEQ ID NO: 380707 - DNA, 589 bp, Homo sapiens
tttgtttttattgcatttgattttgaggacttggtcataaattctttgcctagaccaatgtccagaagagttttccttaggtttctttttgggacttttatagtttcaggtcttgcatttaatcctttattcaatcttgagtcaatttttgtatatggtggagatagaggtctagcttcattcttctgcatatggctatccaattttcccagcatcctttattaaatacgggtgtccttcctccrtggtatatttttgtcagcttgttgaagatcagttggttgtaggcatgtggctttatttctggtctctattctgttccattaatctgtgtgtctatttctttaccagtaccatactgtttcagttactatagccttgtagtatagtttgaagtcaaataatgtgatacctccagctttgttctttttacttcaggattactttggctattcaggccctttttttttttggttctataaaagttttaggaagttttttctaattctgtgaaaactgacattggtaatttaataggaatttcattgaattgtatattgctttgagcagtatggtcattttcacaata

SEQ ID NO: 380708 - DNA, 589 bp, Homo sapiens
tttgtttttattgcatttgattttgaggacttggtcataaattctttgcctagaccaatgtccagaagagttttccttaggtttctttttgggacttttatagtttcaggtcttgcatttaatcctttattcaatcttgagtcaatttttgtatatggtggagatagaggtctagcttcattcttctgcatatggctatccaattttcccagcatcctttattaaatacgggtgtccttcctccgtggtatatttttgtcagcttgttgaagatcagttggttgtaggcatgtggctttatttctggtctctattctgttccattaatctrtgtgtctatttctttaccagtaccatactgtttcagttactatagccttgtagtatagtttgaagtcaaataatgtgatacctccagctttgttctttttacttcaggattactttggctattcaggccctttttttttttggttctataaaagttttaggaagttttttctaattctgtgaaaactgacattggtaatttaataggaatttcattgaattgtatattgctttgagcagtatggtcattttcacaata

SEQ ID NO: 380709 - DNA, 468 bp, Homo sapiens
atggcaaaatcattaagtattttcaaagaagattcatggtatttatttcaaaaacagtcagaatactttctctatgccataattcaataatgtctgtttttttttcttctggagatggagtcttgctctgttacccaggctggagtgcagtggtgcaatctcagctcactacaacctccgtctcctgggttcaagtgattctcctgcctcagcctccagagtagctgggattacaggcccatgccaccacatccagctaattttgtattttttgtagagacagggtttcaccatgttggccaggctgatctcaaacttctgaccttaggtgatccacctgcctcgacctccaaagtgctaggattrcaagcatgagccatcacacccagcccaataatggcatttttaagaaaccttccattattaaaaatcacataaaaaaaatgattcagtaaaagaaaagtttag

SEQ ID NO: 380710 - DNA, 353 bp, Homo sapiens
tgaaatggattcttatctttgtaagttgagacaaagctcctatgaatacttcgaccttacaagcctgcacaataactactgaaagcttttctagagccatatgctgccatcaccaaccctatctatgragggaatgtgtgtggagaagaaacagcattaattaccatttttgccaagtgcaagcaataattgctagcatgcagagatagtcatacaaaataataattcagaattactgtcctgatcccagcctgcatattcagaacctccttgctcaactcctgcaatcctgtttccacaaatatttccagaagaaatatttgcccatcaacattctattcgttgtagttaca

SEQ ID NO: 380711 - DNA, 439 bp, Homo sapiens
tggtgaatatagttcataacaatgtattgcatacttgaaaatcactaaaagagtggattttaagttttctcaccacaaaaaataagaagmagctgggataataaatatattaattagctcgatttagccattgtaaaatgcatgcatatttcaacacaccacgttatatagcatgaatatatataatttttgtcagttaaaaaataattaaagaaagataaaaaagatttaaaaagaaggaagccttgtcaattgtgacacaaagatgaatctagaagactttattcttagctcgttatgccaggtacagaaaaatattctgtgtgatctcacttgtatgtgggctctagacaagcagagagtagaatagtggttgctaggggctctgggatgggggtgggaatggggagaagttggtcaaaaggtacaaaatttcagt

SEQ ID NO: 380712 - DNA, 439 bp, Homo sapiens
tggtgaatatagttcataacaatgtattgcatacttgaaaatcactaaaagagtggattttaagttttctcaccacaaaaaataagaagaagctgggrtaataaatatattaattagctcgatttagccattgtaaaatgcatgcatatttcaacacaccacgttatatagcatgaatatatataatttttgtcagttaaaaaataattaaagaaagataaaaaagatttaaaaagaaggaagccttgtcaattgtgacacaaagatgaatctagaagactttattcttagctcgttatgccaggtacagaaaaatattctgtgtgatctcacttgtatgtgggctctagacaagcagagagtagaatagtggttgctaggggctctgggatgggggtgggaatggggagaagttggtcaaaaggtacaaaatttcagt

SEQ ID NO: 380713 - DNA, 523 bp, Homo sapiens
ctgtcctttcttgctctctttcttgtgctcttaccatattattccttctgccatggtatgacacagcaacaagatgcttgccagatgcagttcccttgaccttgggctttacagcctccagaactgtaagaaatagatctctgttctttataaattactccgtgtcaggtattttgttatagtagcacaaagcrgagtaagagaataccataaaatacaatttataagtatgtaaatatgcattttaaatgcatacaagatataactgttcccccaggagtctggcatccccagtaagacacaattatatttcagaatataataaaactcataacattgtataacaggaaatgcatgcctaaaataatatgtaggcatgttattttaataggaagtggtgggataggtagacattctgtccttaaaaagttttttgctaatatttttgaagaggattgggctccatatatgacctgctcagagcaatttactttgtttaagaaaaattattatacagattaca

SEQ ID NO: 380714 - DNA, 549 bp, Homo sapiens
ggagctttcagttaacactcctttggtaaatttattattttgctaagtagcccattctctcttggatcaactatattttatacatttaacacaaagcatttctctttcactgtatctcattttgccttccagggttacactatgttcagtcaaatctttataccacatgttaatacttcagttgtttgaaggcatgtggtatggtagaaagaacactgaactaggaatcaagagacttgagttactgttgcaactctaccactaactagctttttaacctcaatatccttgtatctcttcttgttcctagtatctaaaactggagagtagcagcagyaaactaaatgactacagaacccctgtgcctctctttttttctgtggctttagcattgtcaaccatccagggaaatgttgaggggagcctttcatgtttcattttaaatacaatgtggcatacaaatatttcatattaaatacaacatggcatagaaagttggtgctcacctttacttgtgcttttggacatgctgatagaatatctttctca

SEQ ID NO: 380715 - DNA, 553 bp, Homo sapiens
taatgatagtaccaatctcaaaagctgatgaaatgagataatatactagttattatgccagataatatacctggcatctagtaagtcttcaaaaaatcttagctgtcattatttattatactggctttctcgtatttaagtacttaaaactcttaggtatgctgaatatttggtcttgatttctcaattctgtggttacagtttttagttcattttaatgcattgttttgaaaatatgtcagttctatgataataaatcctgtgatagcatttagcacaagtgcaracaaaggctttagcttcccctgtgggtacatcatagtaatcatggcatcaacagcaacatgcttcttgattagatcaattaattcaggaagacaagatatttattttgcatttttcaatttttatgctccatggtgacttcctattgttaaatgcttgtcattactcttacattttatttcatctagaccactgaatggtgtaatgaacttacaattacatatatgagagcaatttatctaatatcaattctccaccaaaatcatga

SEQ ID NO: 380716 - DNA, 499 bp, Homo sapiens
tttgaagctgaaatttgattttggggagcctatcaaatgtgttaaaggtttaaaacacttgacattatgaaatagaattccaggttaccataagtcacttatttagccaaaatgmtgactcaaaaaaagaaggtaaaaacctttacacattaagagagaagacttagctttctaaacaatctgtctcttgtttttccctttttctttcggtagtttatttgcaaggcaaacaaaaatctttcatcatcctttaacattacctgaaaatcttaatcagtttgaccatgagctgagattctcctaatccttttataaccctttacaaatctttgttaaagatgaggccaatgctctgataaactcttgtgcttttattccaatgttcaatttacagaaaaaccaaataatgcccttgtgaatttagtcgatatgttcacacacagcatttctttttcaagattaatctttaaaaacctcacataacttgtttaaaccttta

SEQ ID NO: 380717 - DNA, 451 bp, Homo sapiens
aactgtacacataaaagggattaagatggtaaatgtgttatacatttttcaccacaattgaaagcatatattatttttaattaattttagcctggtaatctctcagtgtcaccttgttttggtgctgctctatgtagattgttcaacatagtacaaaacacgactggaaaagatcaatcttgctgacatttactcgggcttaagatatggctcaagggccttgctcttttggtcttgtgcaaaccgcccacagtccacctgctggctggatgccctcattgcaggcaaagcaccaggatttcttataataccacccatagacccaagtaggatcctggtggcctcgtggtaagctgtgacaggaatgcacaaggatctccyggcttgttggctggcatcgctggcccagtgatgtgaggtgaagggattctttgctctgactcagctcaat

SEQ ID NO: 380718 - DNA, 600 bp, Homo sapiens
ttactggaaataatctggcttttgagtcaaagaaattcacctttccttgtcaatttggtaatagtctgtttcctcttagctttgggagctaaagaaagagtaatcacttgggcttccaatgactaagtctgtgatatgcaaggaaagaaatgtaaaaatatccttcaaaggaaatgagaaacataagcagcaagtcatctcccttcttcctgttccccaggtaatttcactgccttattatcatctgcatggggctcatttggaggtagggatgaacatattttcaagcaaatttaggttaaggtgggaggtagagaggttctataaagttgcacatcttaggaatgaaggctctgtatagccaggcagcatgggaatgagaatgaagacacggctgaaggtccaggcagcagaggccagatggacattgctttctctctgtctgcctgctgccttctcccatmcctcctggactgactcttagcttgttccctctgctactctgtagagcacatggctcatgatttcctagttctagtctccaaatacaacatattcagcttgatcttcctcagaacctggctcctagtttctcttttc

SEQ ID NO: 380719 - DNA, 578 bp, Homo sapiens
attatagttcatgaagactatgggctatgcttttttttaggtgccattccagaatcatggccagagtggagtcacttgctctggatgttgtggtgtggaggcactggtcagctgccacaccaaaggttgagctgctcctggatcagaatacagaaccccctttccttgcttgtattgtatttcaaatgccagtttccattggcatttaatgaaatccacttgtggtggtgtggaatcggggtctttttgccaaccttgcagatgaacagtttaaatttacttttgatttagctattgctcacyacagaagaaagttagcagtttattagatgaataagagcatgaggatagatcccaagagaaccaattactgacaccgtggaaatctgccctgtggagatgagctattgtgaggcacagccaccagagcgtgttctggctcatgtgccatcttggtatagtcacccagacttgagcccagacgcacatgcacctaaaaatagatacaattatatgcgatgtgtgtgactcttgatgagcacatgaaaaatgttgcctctccacctcaagtacactgc

SEQ ID NO: 380720 - DNA, 578 bp, Homo sapiens
attatagttcatgaagactatgggctatgcttttttttaggtgccattccagaatcatggccagagtggagtcacttgctctggatgttgtggtgtggaggcactggtcagctgccacaccaaaggttgagctgctcctggatcagaatacagaaccccctttccttgcttgtattgtatttcaaatgccagtttccattggcatttaatgaaatccacttgtggtggtgtggaatcggggtctttttgccaaccttgcagatgaacagtttaaatttacttttgatttagctattgctcaccacagaagaaagttrgcagtttattagatgaataagagcatgaggatagatcccaagagaaccaattactgacaccgtggaaatctgccctgtggagatgagctattgtgaggcacagccaccagagcgtgttctggctcatgtgccatcttggtatagtcacccagacttgagcccagacgcacatgcacctaaaaatagatacaattatatgcgatgtgtgtgactcttgatgagcacatgaaaaatgttgcctctccacctcaagtacactgc

SEQ ID NO: 380721 - DNA, 578 bp, Homo sapiens
attatagttcatgaagactatgggctatgcttttttttaggtgccattccagaatcatggccagagtggagtcacttgctctggatgttgtggtgtggaggcactggtcagctgccacaccaaaggttgagctgctcctggatcagaatacagaaccccctttccttgcttgtattgtatttcaaatgccagtttccattggcatttaatgaaatccacttgtggtggtgtggaatcggggtctttttgccaaccttgcagatgaacagtttaaatttacttttgatttagctattgctcaccacagaagaaagttagcagtttattagatgaataagagcatgaggatagatcccaagagaaccaattactgacaccgtggaaatctgccctgtggagatgagctattgtgaggcacagccaccagagcgtgttctggctcatgygccatcttggtatagtcacccagacttgagcccagacgcacatgcacctaaaaatagatacaattatatgcgatgtgtgtgactcttgatgagcacatgaaaaatgttgcctctccacctcaagtacactgc

SEQ ID NO: 380722 - DNA, 599 bp, Homo sapiens
aatctaagatgcaaaaattgatgaaatggcagagaaataggcaaatcaactgtatgagacagtttaactcatctttccctgaaacagattaatcaagcaacattttcagaaataaccctgataagcagaaatacaaagactttcacaataccattgataaactggagatgctagatatgtatagaactcagtatcaaataaacaaaagaactgcatgtgcttttcaactaaatctgaaaaacttatyagaaaactacacacagtccagcataaagggagttctaagggatgaacatttacatactctgttctccaactacaacacaacaaagttagaaattaacatcaaaaggctggtttttaaatcccatatctttggaaactaaataacatattactaaacagcctatgggttaagaagtaaatagtaaattaagacatatttaaaactgaatgataatgaaaacatttcatgtcaaaattttgagacatatctaaagttgtgtccaaagatgacactcatcaatttatatttatcagaaaataagaacgttaaaaataaattgatgaagttttaatctcaacacgttaataaaaga

SEQ ID NO: 380723 - DNA, 560 bp, Homo sapiens
tcacagttcttcaggctatacaggaagcatgayactggcttctgctagcttctggggaggcctcaggaaacttatcatggtggaagatgcaggggaagccttcttacatggctggagcaggagcaagagagagacgggaggtgctgcacacttttaaacaactagatctcacaagaactcactctccatcctgagaagagcacaccaaagggctggggctagaccattcatgaaggattcacccccatgatccaatcacctcccaatagtccccacctccaacattgaggaatacaaataaacatgagatttaggtggggacacagagccaaaccatattctaggtgatgaggaggactttaagcaacaggttaaatcaaaacatcagtctttaaaaatgtacatggagatcagtgaggaggatgcactgaagaaaaggatggattgaagaggaagggacttgaggctgggatgctggagtggatgtttggcttccacggttgggagacaggaggaaaacaggaggttaaaaatacagatttgagagtcatgagtgtttt

SEQ ID NO: 380724 - DNA, 537 bp, Homo sapiens
atgcatgtgggtttcagtccccagcaggagactgtgattagtttgggagattctcacatcctcaaattctttcactgctcaatcaaccccaaagcagacccggctccaggaacggaaccaatttggagcacatttctaagtggcttggggaacagaagccccagtcctctggatctcttcctggcaatacctgctttgatagaaagctcgctttgctatagattccctagactgcgaaacctggaggaaaagcagcaacaagggtattttatggggacactgatgactgtgatacctcttactccttagccaccagataattcttttactaataaactttattttttagaccagtgttaggtttcttaaaaagttgagcagaaaatacagtgagttctcagatagctccttcccccaccctaaacctcaccccacagaatttcctctaccattaacatctcgcacgagwgtggagtattagggtgtgcgctctgtgtcacacatcctcccggttttcacagtgcataatgtcatgca

SEQ ID NO: 380725 - DNA, 583 bp, Homo sapiens
atacaactgcacatagccatgtctctgccactggagtctcggttggatcttttctgtcttccgtggggcatctggctctcttcagtaggggggctgtcaagggagaccatgacaagaagttgtcacgaatgagtctgacacctgaaagtggaaatcactcagaaagctggcggtggtggtgcaggttttagggactggtccttccacatagttgatgataagcagatatgttgctaacacttcctatcaattaaagtctttgccatctagttggtgactacatttctagtttcacccaacgcatgacaaatgcttcttaaacaaataagtcttgaagttttgccctctcatactatttttttaaatacagagatatgagaaaaacagggaggaaaagggaagaggctttggaaacagacagacatcaagagttcaattccaatccyaacattatctctgagggcaggggcctctaaatgcctctgcttcctcctcaatgaaacagagagaataaaacttcatttgattgttccaaggtttatgcaagagaatgtatgagatgggtccaaacacaggcccaggc

SEQ ID NO: 380726 - DNA, 564 bp, Homo sapiens
ttttgtagtcatctcacagttcttggaaactctgctctgttatttgttttgttttgtttttggttggggatggggagtggggttggtcattttttctttgctttccagttttggaaatttctattgacatatcctcaaacttggagattctttccttgtctgtatccaatctactaatgagcccatgaacagcattcttcatttctctttcaatattttttatctctagcctatctctttgcttacattatccatctgcttttggatgttgtctattttttttcattaaagcccttagcatattgatcatagttttggagttctaaaaattattcctgtactgaaaattccaaaattcctgccatatctgactctggttctgatatttgttcagtctcttcaaactgtagggttttttccctattagtatgttttgtaatttttttattgaaaggtaaatatgattcctcggggtatttttctccaatgttcactgtgaggatgctagagcatctcagggtgaaayacaaatatgtggagacttcttctgagtgtgtcccctgg

SEQ ID NO: 380727 - DNA, 624 bp, Homo sapiens
agcatctggactgtaggcttgtgagaccctgagcagtgaattcagctaagccatggccagactgctgacccatggagactgtgagatgctttaaactgttaagtttgctcagtttgataggcagcaataaaacackaatatagggtgatgttgagtaatggactgaatttgtgattcatgtgacgattaacatttatataagcttaaatatactccagaaatacaaagactattattatacctgtaggaaaaggaattagaaaactctcatggagtatagcataatgaattcactcaacaacatgtaattaaatgcagcaaagttcattttgggactctttacaagacttcatacctaacattttaagcagacatcagcacacaacaaatcataatttatcaagctacaaagacacttcaagtatctaatttgttaataaaatctcacattttacatctcaaataattgtcccaaattattacgatataattactctatattttagtaataggaaggtactcattttattttcttttaaagaaagatgttttgtattcttttatggttattcaggtgtggccaccaaaggggacagaggagacaaaaataacctgtgaatataa

SEQ ID NO: 380728 - DNA, 596 bp, Homo sapiens
attatacacaactcttttcacttagtgccacataatttttaataccttatctaaataatttgtgttgsagcagcacaaaactggggggcattaatgctgtacacatttatgcagatgggagaaagactaataaaagaaatcattatggcctgaaatttaatagatgtcttgtgtttaatctcctaggtttactagacatgacagaagtctgcagaggcatttttagatcatcattttttagcactaatctgtgcctgccctgcatgtctggtgccaacgtttaattgtagcctagagaatctgagaaatgaaagaatctctccccacaccaatgtgctggcaacattattttactgttgtctccttaatctcctctactcttttgcaattagttttattactactgctcatttaatgagaccatggagtttggtgccagatggtgccattagttaaatctggaagactctaatggaattgagctcaaagcaggttaaaagtaatagaattacaaattttaatggtcatcacctcatagcgcaccgctctgtgtacctgttacataccagaaattagtgccggtttcaaacagaaag

SEQ ID NO: 380729 - DNA, 596 bp, Homo sapiens
attatacacaactcttttcacttagtgccacataatttttaataccttatctaaataatttgtgttggagcagcacaaaactggggggcattaatgctgtacacatttatgcagatgggagaaagactaataaaagaaatcattatggcctgaaatttaatagatgtcttgtgtttaatctcctaggtttactagacatgacagaagtctgcagaggcatttttagatcatcattttttagcactaatctgtgcctgccctgcatgtctggtgccaacgtttaattgtagcctagagaatctgagaaatgaaagaatctctccccacaccaatgtgctggcaacattattttactgttgtctccttaatctcctctactcttttgcaattagttttattactactgctcatttaaygagaccatggagtttggtgccagatggtgccattagttaaatctggaagactctaatggaattgagctcaaagcaggttaaaagtaatagaattacaaattttaatggtcatcacctcatagcgcaccgctctgtgtacctgttacataccagaaattagtgccggtttcaaacagaaag

SEQ ID NO: 380730 - DNA, 572 bp, Homo sapiens
ggcaacttaattgtggcaatggggcgggacctgaccagttgcagttctctgtgaggattgcccagagcaatgtggagtggggtgtaaagtgaaaacctctgttagtatgcagcaccttaatactgaccccagcatccatccatgcttttggatggaatcaacttctgcttgtcattcctttcctcttacaacttaactacattcaatctgtcaaggatgacacttctgagactgacattatgtaagtctctttatagatacaatttttcttggcattttcaatttggtaggggagaagaggaacagcgtcaatttgtagttttccacctttcctgcaatgggaggttccaatttttcccctgtgtttattctgatgtgtgtgtttgtgtgtgtgtgtgtacacatgcacacaatatgtaaatatttctgtgtgtacatacatataagtatgcatacacatgttcrctacagataaatcaatacttatacgtgtatgtaggtagatatatatacacacatgtataggtatgtatttatacatcatatatgtatatgtagatatacatattata

SEQ ID NO: 380731 - DNA, 603 bp, Homo sapiens
tgtttgtttgtttgttttttgagatggagtctcactctgtcacccaggctggagtgcartggcacggtctctgttcagtgcaacctctgcctcccaggttcaagcaattcttctgcctcagcctcctgagtagctgggactacaggtgcgcaccaccacacccagctaatttttgtatttttagtagagacagagtttcaccatattggccaggctgatctcgaactcctgacctcgtgatcagcccgccttggcctcccaaagtgctgggattgcaggcatgagccaccgcgcttgtcccaattggggcatcttatatgattggtttggggagcacatttggcttctttttggttggtcctgagttggaaatcgggcaagaaatagggaagctgcagtccttgaccaagtcctgactgttataggctgattgctgcagaggttgtggtttggcgtcccagctggttgctgcaaaggttgagtgtcacagttttactgtcatttagggtctggccatgtccatttgtatattcagtgtctcagcctccaccctttctcagccactcccttccatggtcatgacctgaacctcatcattactaa

SEQ ID NO: 380732 - DNA, 603 bp, Homo sapiens
tgtttgtttgtttgttttttgagatggagtctcactctgtcacccaggctggagtgcaatggcacggtctctgttcagtgcaacctctgcctcccaggttcaagcaattcttctgcctcagcctcctgagtagctgggactacaggtgcgcaccaccacacccagctaatttttgtatttttagtagagacagagtttcaccatattggccaggctgatctcgaactcctgasctcgtgatcagcccgccttggcctcccaaagtgctgggattgcaggcatgagccaccgcgcttgtcccaattggggcatcttatatgattggtttggggagcacatttggcttctttttggttggtcctgagttggaaatcgggcaagaaatagggaagctgcagtccttgaccaagtcctgactgttataggctgattgctgcagaggttgtggtttggcgtcccagctggttgctgcaaaggttgagtgtcacagttttactgtcatttagggtctggccatgtccatttgtatattcagtgtctcagcctccaccctttctcagccactcccttccatggtcatgacctgaacctcatcattactaa

SEQ ID NO: 380733 - DNA, 606 bp, Homo sapiens
tgttttttcttttgaaaattgttatattgtgtggttttaaaatatttaaaatctccaaacagaaatccactgaagtgcaataattttattgtaggatagactgaaaacaatatttaacccagcaactgggcatcaaagtgagaaagattatatgctagaatggcacagggaacgtgttccatggtctgcattgctgactgccacagaacgccttgggagcaggcttgaggctttcagtgtcattatgtaagtactcatagaccacttagccatgagatatgacttgtacatttatataaaggagaaaagaaagtcattttccaagttagtttccacagcaacratattccatattttcttcttctgtgtctaaacatgagcatgcctcaactagggggtggaatataattcttgcaaaataccagttaagaccaaccgtgagtgtgaaagcttcagggatcacattcattcaacaagcactgattacaagcctaccctagaccaggaactgtgggagaccttggagatgtagggaggaagaagccccaaggtctgccctctagatccttgtgtgcaatgagaaagagccagatagaaggatgaatt

SEQ ID NO: 380734 - DNA, 595 bp, Homo sapiens
atacaaatgaaaatctctggttaattctggtattatatcatcactgtactatttccccctaccaacactgcaactttaaaaattatttcatgtctatttgcatgtacattacaaaggcatcaagaatagagagtagtttygttagaacggtgggagcaggagccagcagactgaaaagagaaagaattaattgaaggtagattctcctttcccgaagtctgcttgtgccacagaggaccataggatgtcaagttgagggggggattctgggttaatggctgagtttggagtaatgggggccatgggagcctgtcttttggtgaaggtaacaacagtgggaagtggttgaagatttgatggactacttttgttactgttgtcacattatggtgggtcactactcacatgagggtgctcacctcacctccctcatggccctttccatgcccactaccaaagacgacaatcaatagtagtacacgagtggcaaaacctaaagtctgaaacctgtactattttataattatctatcatcggagctcataatgccctgtgaagggattttgttggtattttaaaatttctttacaattag

SEQ ID NO: 380735 - DNA, 535 bp, Homo sapiens
cagcacttctttcctttgtgcttctaaggctgaccaatgctcatgcatgcactctatagatgtgaccatatttttcttcaattattgtccagctctgggagccattctgggtctttaagatgatggtggttctgatcaattatatacggatcggaattttaacccccaaagaactcacttccaagtcctgtgtgtgtgtgcacgagtgtgtgtgtgtgcatgagtgtgtgtgtgtgtgcatgagcatgtgtgtgcatgagtgtgtgtgtgtatyggggagggttactgtcaagtatgtggtctacattcccttgaatgcagctattcctgaccccaggaaagtcaggaggacctaaaatagaagagcgagcacaacaagtgcccatgaaatgcccggcctgtgccaggcaatagacatacagcaacaaaccagacagacctggtccctgtcctcctggagcctagagtctggtggggacactgctgttcataaaatagccacatagattacagtaagagacttcaacaagtactg

SEQ ID NO: 380736 - DNA, 501 bp, Homo sapiens
cccaaggtcacatggtaagtgggggaggtagcactcaaactcaggatatctaactccagatgacacgttgttaactcttgtgtgttatactgttgctagagaggcagcctggcctgggagagcaatgaagtgtgacagttctctgccacttaccagctgtgtgactttgggatggttacttaagtyctctgtaaaataaggatgataatagtatctacctcatagggtagtattactagtgacggatttgatacatataaaacatttagtatcatgcttggcttagagtaaggatccaatgtatgttagttatttgtatagacagtaatcccctccagtttaggatccatgtctcagtcctctttgaatctttactcccaacacatagcacagtgcaaagtccacagtagaaatggattcaacattactggaataaattaggagattaaatattctacaagatagttaaaatgaaaccttatttttataggtgatttatta

SEQ ID NO: 380737 - DNA, 550 bp, Homo sapiens
ctaagttggttaatactagggagtggcatttgtgggggagggaaaggtatagtactacattcccttttgtgtcgcttgaatatttcatagaacttatgttatcttataataaaaacatttgacaatcactttcaaaaatagactgtatgatgcatgaaakgataaaatagcaatgtcctaggggaaagataagccttctgtaaaaagcaatcccagagacttagtgttaagcaagtctgtaaacagaggctaagatttaaaacaagactaacatcccaacttggcagatgaatacagcacaagagcatggaactcacagaggacaaccccagtttgaccagatttattcccttagtcacactggatacggtgattcccagctccttagtgaagatgaactggagactctgggtccttagaggctgttgagtatgatcacaataaactgcttgtgattcttatttttgagtgtgagtacaaggtaatcctggaagagactgaatatcatccttgaaaatgcataacatgggactgtcctgtgggcatcttg

SEQ ID NO: 380738 - DNA, 571 bp, Homo sapiens
ctatctgactttggcttcttctcatgcagcttgacatccacccaccacacccaccaccagagtgatcccaggaatgctatgtcacaagtgagaacaccagtaatcccagctacttaggaggcagaggcaggaggatcacttgggcccaggagatcaacccagcctaggcaacatagtgagaccctatctctaaataaataaataaataatattattcttaaaagaatttgaggttttcatggaggtagagagtaaaatagtaattaccagaagctgggaagtgaagggaggtaggagataaagagaagttggttaatggttataaaaatacaaatacagttagatcaaaggaataagttctaatatttgataatacagtagaaaagttctaattaacaataatttgttggatagttcaaaatagctagaaaaaaaatttgtaatgttcccaacacaaagaagagataaatggctgggtaatggatagcctaatgatcctratttgatcactacacatgtatcatggtatacatgtattacgtatatgcccaaaatatgtacaactacaatg

SEQ ID NO: 380739 - DNA, 571 bp, Homo sapiens
ctatctgactttggcttcttctcatgcagcttgacatccacccaccacacccaccaccagagtgatcccaggaatgctatgtcacaagtgagaacaccagtaatcccagctacttaggaggcagaggcaggaggatcacttgggcccaggagatcaacccagcctaggcaacatagtgagaccctatctctaaataaataaataaataatattattcttaaaagaatttgaggttttcatggaggtagagagtaaaatagtaattaccagaagctgggaagtgaagggaggtaggagataaagagaagttggttaatggttataaaaatacaaatacagttagatcaaaggaataagttctaatatttgataatacagtagaaaagttctaattaacaataatttgttggatagttcaaaatagctagaaaaaaaatttgtaatgttcccaacacaaagaagagataaatggctgggtaatggatagcctaatgatcctaatttgatcaytacacatgtatcatggtatacatgtattacgtatatgcccaaaatatgtacaactacaatg

SEQ ID NO: 380740 - DNA, 571 bp, Homo sapiens
ctatctgactttggcttcttctcatgcagcttgacatccacccaccacacccaccaccagagtgatcccaggaatgctatgtcacaagtgagaacaccagtaatcccagctacttaggaggcagaggcaggaggatcacttgggcccaggagatcaacccagcctaggcaacatagtgagaccctatctctaaataaataaataaataatattattcttaaaagaatttgaggttttcatggaggtagagagtaaaatagtaattaccagaagctgggaagtgaagggaggtaggagataaagagaagttggttaatggttataaaaatacaaatacagttagatcaaaggaataagttctaatatttgataatacagtagaaaagttctaattaacaataatttgttggatagttcaaaatagctagaaaaaaaatttgtaatgttcccaacacaaagaagagataaatggctgggtaatggatagcctaatgatcctaatttgatcactacacatgtatcatggtatacatgtattacktatatgcccaaaatatgtacaactacaatg

SEQ ID NO: 380741 - DNA, 460 bp, Homo sapiens
caatatcaacaccccagtgtgctgataagtgggagatggtttttcaactgtcagaattgggatgcaactgtcagagtacatgaaatcagccacataaatatcagaggcccacccactctatgacagcataaaacctcaaactttttatcaaattaggaaataaaaataaaggaaggctctgtgtgtgccatctcatggaggagmcaactatggtcatatccagattttctgtacctcctttccctaaacatttgttttaatgccaaaggtatgacttctttcactaaacgatatctgtcctctgggactgcacttagtgttagagttttacttttttaaaacaactaaaaatgtgaaaaaataatatatttgaagctggcattgtattaaaagaccaatattcccatcagagcttctatgagagagaactgcaaggactctggttctgtgattggcaatg

SEQ ID NO: 380742 - DNA, 460 bp, Homo sapiens
caatatcaacaccccagtgtgctgataagtgggagatggtttttcaactgtcagaattgggatgcaactgtcagagtacatgaaatcagccacataaatatcagaggcccacccactctatgacagcataaaacctcaaactttttatcaaattaggaaataaaaataaaggaaggctctgtgtgtgccatctcatggaggagccaactatggtcatatccagattttctgtacctcctttccctaaacatttgttttaatgccaaaggtatgmcttctttcactaaacgatatctgtcctctgggactgcacttagtgttagagttttacttttttaaaacaactaaaaatgtgaaaaaataatatatttgaagctggcattgtattaaaagaccaatattcccatcagagcttctatgagagagaactgcaaggactctggttctgtgattggcaatg

SEQ ID NO: 380743 - DNA, 346 bp, Homo sapiens
ttacagaaccgtaggaaactaatacatcatctttgaagcaagactaattttttctttgggagagggaaacatttcaaggcagcagtttggttcggaaaagataaagcctcttctgctgtgtttgaatgtggacacatggaggaggcaagctattgtttatctgggcaatagctgtcccagtgaggagtgggggtggtgatgaggacagggaggaaatgtaggtgaggcaggtaaaggctttcccactccctctcctggtgggcctcaaaggatgttggaggcctgaatttggacagaggggatgcctgkgggaattcttgtttatgtgggaaggtagccagaaggg

SEQ ID NO: 380744 - DNA, 405 bp, Homo sapiens
caaaacccggctttcaattattttagatataagtccaaagatgagattgcttgatcatttggtaattttatttttaactttttgaggaatctcaatatggttttccataccaattttgccattttatcatcccaccaagagcatacaaaagttccaatttcttcatatcttcmcctgttttttttttcatagtagctatcctgatggatgtaaggtgatgttagagttttgatttgcatttctatgatgattagtgacactgggcatcttttcatagccttgttgaccatttgtgtattgtccttggagaaacgtctattcaagtctgttgcctgctttctaattgggttgatttttgtgtgtggatgagttgtaggaattttttatgtactcagtatattaaca

SEQ ID NO: 380745 - DNA, 604 bp, Homo sapiens
ctaattttttttgtattttttaatagagacgggattttcaccgtgttasctaggttggtcttgatctcctgacctcgtgatccgcccacctcggtctcccaaagtgctgggattacaggcgtgagccaccgcgcccggccaaggtgagcaatttcttatgaagcagatgggtatagtagttgcatgccttacgtccaattacactctatttgtgagtacttagatatttttattgtgtatgaaatagggtagagataatgtatctagaaaacgttttcttctatcttttgtctcataattccttgaatatattaagcattacttttgaattcaatgtctgctttatccattacctagattccacagatagtacattgtgatctgaatgtctcacatttccagtatctataaaagaaagtccacaaatatactttaaaccatatgcttctgtttgtttattcttctctgaaaacaaatacattttataattgcatagtctactcttttgactatttcatcttttttttctttctttcttttggttttcaacaaagtctatctctgtcacccaggctggaatgcagtggcacaatctcagctcact

SEQ ID NO: 380746 - DNA, 604 bp, Homo sapiens
ctaattttttttgtattttttaatagagacgggattttcaccgtgttacctaggktggtcttgatctcctgacctcgtgatccgcccacctcggtctcccaaagtgctgggattacaggcgtgagccaccgcgcccggccaaggtgagcaatttcttatgaagcagatgggtatagtagttgcatgccttacgtccaattacactctatttgtgagtacttagatatttttattgtgtatgaaatagggtagagataatgtatctagaaaacgttttcttctatcttttgtctcataattccttgaatatattaagcattacttttgaattcaatgtctgctttatccattacctagattccacagatagtacattgtgatctgaatgtctcacatttccagtatctataaaagaaagtccacaaatatactttaaaccatatgcttctgtttgtttattcttctctgaaaacaaatacattttataattgcatagtctactcttttgactatttcatcttttttttctttctttcttttggttttcaacaaagtctatctctgtcacccaggctggaatgcagtggcacaatctcagctcact

SEQ ID NO: 380747 - DNA, 556 bp, Homo sapiens
taatggtacgtgtttctgagaaatctaattggagatattttgtattgttaaagtcttttatcagtattttcagaggtcatttttgttgttgtttatgttatttacagtgaggtctcgtgttccttacttgtttctttatatttcaaacagatgcatagacaagctcactgggaaccatgagcatgtggggaytgtggggagggccgggtgaattttctctattttagggtaatcaggtacaaacccacctatcactgtagaaaatctcaaaagtgtctgacacttttttttcctactatctttcaaacttctaaagaaccttttattttatttttaaacttgaaattagaaacctgccttctctttcctgtatgttggtatgcaaatatgatgttagaggttattaaaagtcatgcataggactttcaatttatccccttattttcagcccaaattattaccccattctctggcattttcaagccaaagatttcatcatttcaagctctctttgtttccctttcaacagcatattcctatgcaagcacttctgccc

SEQ ID NO: 380748 - DNA, 556 bp, Homo sapiens
taatggtacgtgtttctgagaaatctaattggagatattttgtattgttaaagtcttttatcagtattttcagaggtcatttttgttgttgtttatgttatttacagtgaggtctcgtgttccttacttgtttctttatatttcaaacagatgcatagacaagctcactgggaaccatgagcatgtggggactgtggggagggccgggtgaattttctctattttagggtaatcaggtacaaacccacctatcactgtagaaaatctcaaaagtgtctgacacttttttttcctactrtctttcaaacttctaaagaaccttttattttatttttaaacttgaaattagaaacctgccttctctttcctgtatgttggtatgcaaatatgatgttagaggttattaaaagtcatgcataggactttcaatttatccccttattttcagcccaaattattaccccattctctggcattttcaagccaaagatttcatcatttcaagctctctttgtttccctttcaacagcatattcctatgcaagcacttctgccc

SEQ ID NO: 380749 - DNA, 601 bp, Homo sapiens
atagttacaaactattagactgggagacaggagaaccaagctctaagtttcatgtataatttttggattcagattcttcaactgacaaaacagctactggcacagagctatattaaaatttaaattttgctttaaaaattctgtattatctaaatgtaaatggtaattttattatcattattccatggccaacataaaaataagttatccacaatgaggcatttgattttatatgaattcaaagccaaaargaatttaagatctatacacattgacatttttatactgaagtgtgtcccttccagaaatctgcctaaaatgtcaatatttttgagtcctaaattcatcttatttttgaaattgaccacacttaagttcacgtttgatataatttaattataaattggtgttgatgatttaattaagttttcatgtagttgtgtgtttaagatatattaaaaattctagaacaactgaattatatagatacaataatcagaaaatattctgagtacacaaaaatttatatttgtttatgtgacatatgtttaatactttctctttgaatatttttggagaattaaaatgacaacaacccaag

SEQ ID NO: 380750 - DNA, 608 bp, Homo sapiens
gtacactcataatctatccagaatctggtctttttttaaacctacctcaactactagagcattccgcctgaactagccttttacctaatctccctatagttattctttatagaatattaagaaccattcttctaaattcttaatcaaatagtgtcactcttctgcataaaatattcaaagagttgtccatttcattctcrgtacatccaaagtcctccacatggcctatcagatatttctctgctatctcataccttatccccctccatgcaaacactgtcttcctttcggcctttcaaatacacgaagcatatgactgcctcaggttttctttgattggaatgtttttcctgaaatatccatatggtttcctccttgacttctttccaatgcatgctcaattgttgccttatcttaatctttactgtatcagtctattctgatcacaatttttcttctaatttctatatacttatgaacagataataaggttgttggaaattcatctttaggtaggttaaaacatatgtttgtgtttatggtttcaggtccaaaatttaacatgcttggaagccctgacttctgtccttcaataagaaaatgctgga

SEQ ID NO: 380751 - DNA, 641 bp, Homo sapiens
aaaatgtatattgtaaattctaaggcaatcactaaaacttttttttgaataaatgtaattgaaatataagagagcagataaaatgaaatwgtatgtgttcaattaaaaccagataaggcagaaaaatggggctttagagaaacatgaagcaaagaatagataaatggaaaacatttacaaatatggtagatattaaactaagtatatcaataatctctttaaatgtatatggtcgaaatactgcacatgtattaaaagacagaatttataccaattcaaataaatttaaaaaaagacccaactatatgttgtctacaaaaagcccactttatgtaaagactccagtaggttaaaaatatggagatggagaagactcaccatgttaacactaatcaaaagaaaactggctgagtaatattccattgtgtatttatacccaatttctttatccattcatcttttggcggagacttaggtttattctacattttggctattgtgaataatgctgcaataaacattagaggcaatatatctctttgatataaatatttcctttctttaggatataaatatttccttcctttaggatatgtatatgtatatgtatatgtatatgtatattttagatgatatggttt

SEQ ID NO: 380752 - DNA, 641 bp, Homo sapiens
aaaatgtatattgtaaattctaaggcaatcactaaaacttttttttgaataaatgtaattgaaatataagagagcagataaaatgaaattgtatgtgttcaattaaaaccagataaggcagaaaaatggggctttagagaaacatgaagcaaagaatagataaatggaaaacatttacaaatatggtagatattaaactaagtatatcaataatctctttaaatgtatatggtcgaaatactgcacatgtattaaaagacagaatttataccaattcaaataaatttwaaaaaagacccaactatatgttgtctacaaaaagcccactttatgtaaagactccagtaggttaaaaatatggagatggagaagactcaccatgttaacactaatcaaaagaaaactggctgagtaatattccattgtgtatttatacccaatttctttatccattcatcttttggcggagacttaggtttattctacattttggctattgtgaataatgctgcaataaacattagaggcaatatatctctttgatataaatatttcctttctttaggatataaatatttccttcctttaggatatgtatatgtatatgtatatgtatatgtatattttagatgatatggttt

SEQ ID NO: 380753 - DNA, 641 bp, Homo sapiens
aaaatgtatattgtaaattctaaggcaatcactaaaacttttttttgaataaatgtaattgaaatataagagagcagataaaatgaaattgtatgtgttcaattaaaaccagataaggcagaaaaatggggctttagagaaacatgaagcaaagaatagataaatggaaaacatttacaaatatggtagatattaaactaagtatatcaataatctctttaaatgtatatggtcgaaatactgcacatgtattaaaagacagaatttataccaattcaaataaatttaaaaaaagacccaactatatgttgtctacaaraagcccactttatgtaaagactccagtaggttaaaaatatggagatggagaagactcaccatgttaacactaatcaaaagaaaactggctgagtaatattccattgtgtatttatacccaatttctttatccattcatcttttggcggagacttaggtttattctacattttggctattgtgaataatgctgcaataaacattagaggcaatatatctctttgatataaatatttcctttctttaggatataaatatttccttcctttaggatatgtatatgtatatgtatatgtatatgtatattttagatgatatggttt

SEQ ID NO: 380754 - DNA, 615 bp, Homo sapiens
gtcaaatgcatttttcaacttcagaatttctacttgattctttttaattatttcaatctcttggttagatttctctgataggattctgaatttcttctctgtgttatattgaatttcattgagttttctcaaaatagctattttgaattctctgtctgaatggatacatatctctgtctctccatgattggtccctggtgccttacttagttcatcttgtgaggacatgttttgctagatggtcttgatcctgtggatgttcatcagtgtttgagcattgaagagttagatatttattgtagtctttgcagtctgggcttgtttgtacccatccttcttagtaaggctttccaggtattcaaagggacttgaatgttgtgatataagtcattggtcactgtagccatatctgcattaagggacactccaagcccaatatcactgcggcccttgcaggcttattgaagtaccaccttggtggtcttggatgaaatccagaacaattctctagattatcaggcagagactcttgttctcttccctktctttttccaaataaatgggaatccctctttgtgtgctgagctgcctggagctggggaaggggtgacacaa

SEQ ID NO: 380755 - DNA, 535 bp, Homo sapiens
tgcaaacagagtgtattataggtgcrctgaaaaagagcatataaatccaacttttaatatgagaatttcttcttggtgaattgagttttgaaatataagcaggagttagttgaataggaaacaggaaaattgcattctaggaagaggagcagcatagacaaagcgtggttggtgaaaatgcaggacatgacatggcaccttgaggtatcaaggagagttccccatagctggaggagagagaacttaaaggaggcagtggctagataataaatggtctttttctaaattaagcattatggtttttttcctgtgagctaccaggataaaataaagaagaattggaagcagggtgctgggatggtccaattgtacattagaaggatatctctggcaccagtgagatggacatgttttttgatcaccaggtctgttttgaccttctagagactataatgtgtccttgaagaataatctgtaggactatatcagagtttcctggaactcactgccttaggggtccatcaatggataacct

SEQ ID NO: 380756 - DNA, 535 bp, Homo sapiens
tgcaaacagagtgtattataggtgcgctgaaaaagagcatataaatccaacttttaatatgagaatttcttcttggtgaattgagttttgaaakataagcaggagttagttgaataggaaacaggaaaattgcattctaggaagaggagcagcatagacaaagcgtggttggtgaaaatgcaggacatgacatggcaccttgaggtatcaaggagagttccccatagctggaggagagagaacttaaaggaggcagtggctagataataaatggtctttttctaaattaagcattatggtttttttcctgtgagctaccaggataaaataaagaagaattggaagcagggtgctgggatggtccaattgtacattagaaggatatctctggcaccagtgagatggacatgttttttgatcaccaggtctgttttgaccttctagagactataatgtgtccttgaagaataatctgtaggactatatcagagtttcctggaactcactgccttaggggtccatcaatggataacct

SEQ ID NO: 380757 - DNA, 583 bp, Homo sapiens
ggcccctgtgctgcaggtctgctggagattgctggaggtccactccagatcctgttagcctgggtatcaccagtggaggctgcagaacatcaaagattgctacctgttccttcctctggaagcttcatcctagaggggcacctattagatgccagccagagctctcttatatgaggtgtctgtcagcccctactgggaggtgtctcccagtcaggatactcgggggtcagggacccacttgaggaggcagtctgtcccttatcagatctctaatgctgtgctgggaggtccactgctctcctcagagctaccaggcagggatgtttaggtctgctgaagctgcacccacagccgcttcttcccccaggtgctctgtctcagggatatgrggattttatgtataagtccctgactgtggctgctgcctttcttcagagataccctgcccagagaggaggaatctagagaagcaatgtgtccacagtggccttgctgagctgcagtgggctttgcccagtttgaacttcccagtggctttgtttacactgtgagggtaaaactgcctactcaagcctcagcaata

SEQ ID NO: 380758 - DNA, 675 bp, Homo sapiens
ccctcccctgcattccatttatacagtctgactaataatatgcctctatttagtttccggcttctggtgggaattatatattaaacatggcctaacttcttgtttctacattaagatcatcttgggggaaaaatagctatttctgcttttttctaatatatgccccatagtaagaaggcataaactcattctataggaagggtaatcaattccttaatcatctcataaaggcataaaagcagaagttcctggtcgaattcatttcattgcccttgatcaacagcaatatcacagaactggaccaaaatgtgtgccattcttaatttagagcaaaaagaccctgaaagaaattattaaaatcaacatatgtagttataatatgatacccttagatcaagtttgccttttattttttataagctcacacatctcagtataagaaatatgagcaactttccactttaccctataattcaagtatgaatatttagaagaatraaatttgattgttttctcaaatattatattaaaacccaaagaataaatcaggaaagtccatgaatattcatgggtttcaaacgatgcatctctcagtttcaatttagtgaacattaatattcgcttaaacgtatgaacataaaacatacaaatatgtatgaatttcaatacatgatg

SEQ ID NO: 380759 - DNA, 675 bp, Homo sapiens
ccctcccctgcattccatttatacagtctgactaataatatgcctctatttagtttccggcttctggtgggaattatatattaaacatggcctaacttcttgtttctacattaagatcatcttgggggaaaaatagctatttctgcttttttctaatatatgccccatagtaagaaggcataaactcattctataggaagggtaatcaattccttaatcatctcataaaggcataaaagcagaagttcctggtcgaattcatttcattgcccttgatcaacagcaatatcacagaactggaccaaaatgtgtgccattcttaatttagagcaaaaagaccctgaaagaaattattaaaatcaacatatgtagttataatatgatacccttagatcaagtttgccttttattttttataagctcacacatctcagtataagaaatatgagcaactttccactttaccctataattcaagtatgaatatttagaagaataaaatttgattgttttctcaaatattatattaaaacccaaagaataaatcaggaaagtccatgaatattcatgggtttcaaacgatgcatctctcagtttcaatttagtgaacattaatattygcttaaacgtatgaacataaaacatacaaatatgtatgaatttcaatacatgatg

SEQ ID NO: 380760 - DNA, 416 bp, Homo sapiens
tcttagcttctttgcattaggtcagaggatgcttctttacctgagtggagttcgttcttactcaccttccgaagcctacttctgtcaattcgtccatctcatcctccatccagttctgcacccttgctggaaaagtgttgcaatcatttgaagaagaagaggcactctggctttttggggtttcagtgttgttttgttaattctttctaatcttcatgagtttgtctagtttcaatcttcgaggctgctgaggtttttgtgggaatattttttgttcatgctgttgttgttgctttctgtctatttgtttttccctcaatagtcaggttcctcytctgtaggtctgctgcggtttgctgcaggttcacttcaagttctattcatctggttcactacagcatctggagatgtcactt

SEQ ID NO: 380761 - DNA, 346 bp, Homo sapiens
ggtttgtgtctctttaatgagagatgtatatttaaatgtctaagagattaatgttacaatgttaaacaagttaacagctcttttacttaggttttttcatcaaggcctatgattagtgtgcagggggaaccaaaggtttygaagcaaatactggtaaacaagcagttagtcttgataaatagcgattgtaattggctcacattctcttttctaatactagactctcaaagcatcttaatagttcatattagtcacaatgatttaagataaattaaaatcgggtattaggatttgcaaatcatttgatttttatgtgaaaacttatttaagattattttatattaat

SEQ ID NO: 380762 - DNA, 567 bp, Homo sapiens
gaataacaccttttccacatcagccaataacagttcaagttagactgcatatgcatcctctaagctttcaactggctataactcttctactgccagcggtgctatcaacaaaatattctcaaacacacttccgtcacaagataattagttcttgaatacactgcaaaaacatattctttatggcatatctaggctcataaagaagtgacgtaaatgtcccaagggagaaaagaagcaaacaacaaaaaagtaaactaagagaatggaaagtagttagtaaatgctaaactcaagattgtctttgagacatagatgagtttcagcaccragattaaaacatgaagcttcagcccacagcaaagttctgttggtgctatggattgaattgtgtgtcccacccactccccaaattcatacattgaagcactaactctgagtgtgactgtatttggagacaggacctttaggaagtaattaaggttaaatgaggtcataagggtgggaccctaacccaataggataaaatctcttctgagaagagccaagagggtgggagggtacgagggg

SEQ ID NO: 380763 - DNA, 615 bp, Homo sapiens
ttttatgtaaacaactagtctcctcttttgggtattgtgactgctacatttccttcactgagggtgcctrttatttcctcactatatgatgtctctttatcatgtttagtgcttctgaccttaatctaattttgtctgattttactattctcatttatactttgttttaattttcttgatatctatttgtccatcccactatttaagcctttctttattgatagtttcttttcaatgtagttcttaaaaagagtttctttattttattttattttatttttgagatggagtcttgctctgtcgcccaggctggagtgcagtggaacaatcttggctcactgcaagttctgcctcctgggttcacgccattctcctgcctcagcctccagagtagctgggactagaggtgctcagaaccgcgcctggctaattttttttgtatttttagtagagacggggtttcactgtgttagccaggatggtcttgatttcctgacctcctgatctgcctgcctcagcctcccaaagtgctgggattacaggcgtgagccaccgcacccggccaaaaagagttattttttaagccaatgtaacaatttgcctctgaatagaatt

SEQ ID NO: 380764 - DNA, 477 bp, Homo sapiens
caccaggcaagttaaacaggcaggggaaactttattcaaggttattttgataggggagagaaactgagttcaactccactgaaagaaactgctgggaggatttcaagtgctggcgtgaatttctgggaaagtcctggaggacattagggtgcaggctggtcactgtggtcaagccatctctgtttactatttggtgcttattagagctaggcccctaccttcccacagagactgggagatggaagccatgttttccttgatgattccatttcagggaaggctcccaggcccttcagaaacacattctggtgtcataaaatgactaacaagcttctaaaaagwattacatctcaaagggatttccttaaagcaaggaatttagagtttcaagttttctaaaataaatgtcccaagaagaggaagatcaggtgcctgtagtcagaaagaaacctatttaaagtttagtcaaggtaatgg

SEQ ID NO: 380765 - DNA, 576 bp, Homo sapiens
gagtttttttaatttaacaattgcttatctcaaatgaagttcatatgtgtgaaaaatttcagaaattattgtgattcagtaattagctatttgtaaacacagttctggaactgtagatgatattaatagaaacttatttttaagtatttaattttgctgtgatacaacacaatgggcttatatataaacttcagataacctcatttatttatgataatgatgcagcattgcataatatctttccaatgaaaaattttcagctgagcttaccagatgtactttaaaagcatgcacatatagtcagtagactcaaaacttattcctatgatacataaaataaagcatatttaagattatgsaccctaaacttcttacagtgaaatttgaatattataaaaaagcatacacttctgatatgaaaatttatcttcattcttccctttagacctaactttcaaaatatgtagctatacctgaagtgtaaaggttatgcttattccagggttcttacattcaggaaatttataaagttttaagagcattagatattagcaggattgtgttgccatagcaacc

SEQ ID NO: 380766 - DNA, 554 bp, Homo sapiens
cctaaaacaatggagaaaatatctccaaggcatgtcagaggtcttcacgacagcctctcccatcacaggcatggaggcctgggaaggaaaaatggttttgtggacttggcccagggtccccatgctgtgtggagtctaggaactyggtgccctgcgccccagccactacagccatgactaaatagagccaaggtacagcttagagaatgcaagccccaagccttggcagcttccatgtggtgttgagtgtgcaggtgcacagaagtcaagaactgagttttgggaacctccacctagatttcagaggatgtatagaaatgcctggatgtccaggaagaagtttgctgcagcggcagggcccttatggagaacctctgctagcgcagtgcagaagggaaatgtgaggttggagctcccccaaaaagtccccactagggcactgcctagtggagctgtgagaagagggccagtgttctccagaccctagaatggtagatccactgacagcttgcttttcttcacatgcctggagaagcctcagacactcaatgccc

SEQ ID NO: 380767 - DNA, 554 bp, Homo sapiens
cctaaaacaatggagaaaatatctccaaggcatgtcagaggtcttcacgacagcctctcccatcacaggcatggaggcctgggaaggaaaaatggttttgtggacttggcccagggtccccatgctgtgtggagtctaggaactcggtgccctgcrccccagccactacagccatgactaaatagagccaaggtacagcttagagaatgcaagccccaagccttggcagcttccatgtggtgttgagtgtgcaggtgcacagaagtcaagaactgagttttgggaacctccacctagatttcagaggatgtatagaaatgcctggatgtccaggaagaagtttgctgcagcggcagggcccttatggagaacctctgctagcgcagtgcagaagggaaatgtgaggttggagctcccccaaaaagtccccactagggcactgcctagtggagctgtgagaagagggccagtgttctccagaccctagaatggtagatccactgacagcttgcttttcttcacatgcctggagaagcctcagacactcaatgccc

SEQ ID NO: 380768 - DNA, 554 bp, Homo sapiens
cctaaaacaatggagaaaatatctccaaggcatgtcagaggtcttcacgacagcctctcccatcacaggcatggaggcctgggaaggaaaaatggttttgtggacttggcccagggtccccatgctgtgtggagtctaggaactcggtgccctgcgccccagccactacagccatgactaaatagagccaaggtacagcttagagaatgcaagccccaagccttggcagcttccatgtggtgttgagtgtgcaggtgcacagaartcaagaactgagttttgggaacctccacctagatttcagaggatgtatagaaatgcctggatgtccaggaagaagtttgctgcagcggcagggcccttatggagaacctctgctagcgcagtgcagaagggaaatgtgaggttggagctcccccaaaaagtccccactagggcactgcctagtggagctgtgagaagagggccagtgttctccagaccctagaatggtagatccactgacagcttgcttttcttcacatgcctggagaagcctcagacactcaatgccc

SEQ ID NO: 380769 - DNA, 504 bp, Homo sapiens
ctgtcagtctttcctctgagtcacattctgtcagccaccatttgcattcatcaaaaagggtcttgatgctaagagcagagatcccatcttgaattctgcaaagaacaaagtaaacataaatttcaaatgtagagtcatgattttaaaatggtcagcatgtgctgccacagagaagaaaattgcttttcaaaatggtaaaatatagatattattgacatatctgtctccatcagcatttaytggagaacagaaaaaagatttcaaatacctatagctgagatgttatgtgaacaaaagttaaagtgcaggaaaagaacaaaacaaaatctattgtcatctaactctctatcctttatagcatctgagaaatagatttcccctagtacaataaattgcttcaaaatggctaaagtaactttgcttattaggcacttttgggagtcttacattataacttagccaatttacaattattctgaggctaatggttttccagatataatt

SEQ ID NO: 380770 - DNA, 620 bp, Homo sapiens
tacaatctgttcctcatcaactaaggcttaaaaaatcctttggatgtattaaaaattcttaccttccctaccaataggagtttgggaatacgtgataatcaaagtaggatgcagatataaaactaccctcatgctatgtttatccaaatagaaaatggcaagttaccgttactaatatcctgtttctttttctttgtgttgactcaggagagttaaatgtgctgtaaatcaggagactgatgtagactgtcagtctttcctctgagtcacattctgtcagccaccatttgcattcatcaaaaagggtcttgatgctaagagcagagatcccatcttgaattctgcaaagaacaaagtaaacataaatttcaaatgtagagtcatgattttaaaatggtcagcatgtgctgccacagagaagaaaattgcttttcaaaatggtaaaatatagatattattgacatatctgtctccatcagcatttattggagaacagaaaaaagatttcaaatasctatagctgagatgttatgtgaacaaaagttaaagtgcaggaaaagaacaaaacaaaatctattgtcatctaactctctatcctttatagcatctgagaaatagat

SEQ ID NO: 380771 - DNA, 362 bp, Homo sapiens
gtgccatgtcagtttatcattgccatggcaacacctgggagttactaccccwttccttagtgatgacccaatgaaccaaaagctacgaccccttccctagaaatttctgcataaaccaccccttaacctgcatgcaattaaaagtgggtataattatgactgcaaaactgccctgagctgctactctctgcccatggggtagccctgctctgtaggaacagtcacagagttgtaacactgcctctttaataaagctgttttcttctacctctggtttgctcttgaattccctcctgggcaagtccaagaacgcttgtagaccaagcctcactttggggcttgccttccctgaatcaaaactg

SEQ ID NO: 380772 - DNA, 362 bp, Homo sapiens
gtgccatgtcagtttatcattgccatggcaacacctgggagttactaccccattccttagtgatgacccaatgaaccaaaagctacgaccccttccctagaaatttctgcataaaccaccccttaacctgcatgcaattaaaagtgggtataattatgactgcaaaactgccctgagctgctactctctgcccatgggrtagccctgctctgtaggaacagtcacagagttgtaacactgcctctttaataaagctgttttcttctacctctggtttgctcttgaattccctcctgggcaagtccaagaacgcttgtagaccaagcctcactttggggcttgccttccctgaatcaaaactg

SEQ ID NO: 380773 - DNA, 539 bp, Homo sapiens
gtatgttcatcacaacactattcacaatagcaaagacatagaatcraatcagtctaggtgcccatcaatgatggattggatgaaagaatatgtggtacatgtacactatagaatactacgcagccataaaaaagaatgaaatcatgtcctttgcagcaacacgaatacagctgggggacattatccttagcaaattaatgcagaaacataaaatcaaataccacatattctcactttaaagtggaagctaaatattgggtactcatggacataaaggtggcaacaatagacactgggaactactacagtttggaggggagcaagggctgaaaaactatctcttgaatactatgctcactacatagttaatgggatcattcatatcccaaatttcagcaacacacaatataatcaagtaacaaacatctacatgtaccctcaaaatctaaaataaaagttgaaattataaatcaataaattaacacacgctccatgtatagtgttgattttaatttggaatatgtaaaaatttaaatatt

SEQ ID NO: 380774 - DNA, 596 bp, Homo sapiens
taccacataaatatttctttgttactacaaaagcattagtaccagatagtacatgtccaatgggtaaaactaatgtaaaagaaaaggaattgatttcatatgaaatacagcattcttgctaaattatcatgcgccatttgaaagtttcatagcgtttgaaatatagaaaagaactaggaaatctgtgccatcagatagaatacatgttgaaatcaatagaaatttgataaggtggttttagctttaaccaaataagatcatccgtcctgtattggtgttgcaatttggctttcatttaatttataatttattgaattcataattttataaaaacyataaggacaagttgtttataacatttttgtcaatatttaaaaattgtaagttaatactaaggatctaaaacaatttttatgtaaaaggggattaagaatcattcaacttgagaaacactgttttaatagattctttgaaaacctcaagacatatgttaagtaattcaacttttaaattcaggcatgttattacatctagaacaataatgaattcatgtactacctagaaaataagatagctacacagctgcagtcaaaaat

SEQ ID NO: 380775 - DNA, 364 bp, Homo sapiens
tcctcttgggttttgttgaaattcatattgtaagccatgttgcgaaatatgctaggagaataagaataaatgtacttcatttatgtgaagggaagtaactttttcaaggagttttgataacgtagttgtttctggaattcatcacatatgaagagtagctttgctttcatttttgtgttgacaaaggagtaaaataagctccatcaccttyttggatgcaaatccaaacctggtcattgtgtaacctctttatctgaggaagaacatttgagaggagcaaagaggtttcaaacatattaataaaactgcagcctaccttttttatcttcccaaagcagacactgctctgagaagaaggtgggtc

SEQ ID NO: 380776 - DNA, 560 bp, Homo sapiens
ctaaccatttagtacagaatcaagcaccaaatttatccatatatttaaatgtgctggacttagatttcatttttatagggaattacatataacatctgattccttgacttgaattgcttctaggttaggaatcaaaaactcaaactttaatatagcccagattatgacattcaagtgtgaaatgggcatatggtaggagtgataaatttgaaagcacaggctaccttcaaagacacagcagatattcaataccactcaactmttttcatgcaagtatgtgggcccactttctagatttcctaacttctggagaaaagttctggattttaatatgtaatctatttttatatattaatttatttttaatttaaaaatttctattgatacatattagttgtacatgtttgtgggtagagatgatattttgatacctgcacacagtgtgtaatgatcgagtcagggtaattgcaatatccatcacctcaaacatttatcttttctttgtgttgggaacagctagttctatactttaaaagacccatgtgatctaaacaaaaact

SEQ ID NO: 380777 - DNA, 550 bp, Homo sapiens
agtgcacggtgaagctcagcaaagctcctaagtgttagagaaataaatcctaattcacatgttagaatatcttagggaaaackcagactcattacatccagaactgaactctaacccatactcctttccctctttccaaaattgaaaaaaaaaacttaaagaaaaattatcttccatgtcccgcattttcacaaccaatcacctaacctataaataagaaagttcaactcgggattctcccttctccctgtgctatggcaattcctctctgcatcctatcagcagacaatacttgtcatttctgtgcctacatttgtctttttttgcatagagctattaccactaccacactttgatttcacacctgaatcattattatagtctttgcctcttcatcctccacttctatcctatttgtacactactgtcagagtaaaacttcttaattgaaaagcagctaattttgtctcttcttcctaaaaatggtgtcctctctcacacactctaccaaggtcaaagactttattttagtacaccggacctctcataa

SEQ ID NO: 380778 - DNA, 550 bp, Homo sapiens
agtgcacggtgaagctcagcaaagctcctaagtgttagagaaataaatcctaattcacatgttagaatatcttagggaaaacgcagactcattacatccagaactgaactctaacccatactcctttccctctttccaaaattgaaaaaaaaaacttaaagaaaaattatcttccatgtccygcattttcacaaccaatcacctaacctataaataagaaagttcaactcgggattctcccttctccctgtgctatggcaattcctctctgcatcctatcagcagacaatacttgtcatttctgtgcctacatttgtctttttttgcatagagctattaccactaccacactttgatttcacacctgaatcattattatagtctttgcctcttcatcctccacttctatcctatttgtacactactgtcagagtaaaacttcttaattgaaaagcagctaattttgtctcttcttcctaaaaatggtgtcctctctcacacactctaccaaggtcaaagactttattttagtacaccggacctctcataa

SEQ ID NO: 380779 - DNA, 532 bp, Homo sapiens
tttttcacttaccataatgtcctttaaattcatccacattgttgcaaatggaaggatttttttctttttaragttgagtaatattccactgtatgtatataccatattctctctgtccattcatctgctgatggatatttgggttgtgtccataatttggctgctgtgaatagtgttgcaataaacatgggagtgatgatgtctctgcaagcttatgatttcaattctttgggctatatattcaagagtaagattgctggatcatatagtagttccatttttaattttttgaggaacctccttactgttttccatagtggctgcacatttacagtcctaacaacagtgtagaagaggttccatttctccacagaattgccaacacatgttatttctccttcttctttttcttcttcttctgatgctgctgcctcttcttattctttggcctcccaaagtgctgggattacaggtgtgagctgctacacctggtgtgcagttttttaacagcataattagataagcaggcatt

SEQ ID NO: 380780 - DNA, 532 bp, Homo sapiens
tttttcacttaccataatgtcctttaaattcatccacattgttgcaaatggaaggatttttttctttttagagttgagtaatattccactgtatgtatataccatattctctctgtccattcatctgctgatggatatttgggttgtgtccataatttggctgctgtgaatagtgttgcaataaacatgggagtgatgatgtctctgcaagcttatgatttcaattctttgggctatatattcaagagtaagattgctggatcatatagtagttccatttttaattttttgaggaacctccttactgttttccayagtggctgcacatttacagtcctaacaacagtgtagaagaggttccatttctccacagaattgccaacacatgttatttctccttcttctttttcttcttcttctgatgctgctgcctcttcttattctttggcctcccaaagtgctgggattacaggtgtgagctgctacacctggtgtgcagttttttaacagcataattagataagcaggcatt

SEQ ID NO: 380781 - DNA, 587 bp, Homo sapiens
aacttccaacattcagaaaccaacacagaaaagtgcatcatttatccaatcacttctattcaagagatccaataatgtaacatacgtgaacaaatttgataatgatacaaatttatgacaatattgtttttaaacaaagtttctacttctgagtaactaaagtatagaaaagaagtccaagttaatggytttaatttaaaaaattggtacttggagaaatgaagtggtaaatttactaagtgacaatttagccaaagtgtattgggggaatagaaaaaaagaaaactaagagaggctgagtaaagcctaaggaacagcaaatacattcagggaagtgtagctctcaaaggcctgtcacagtaagaatgaagggatctttaacatttgcccttgtccacaattatgactacatcaaaatgtgtactggttgcaatataagaaatagtaaatgatataagcctatgactgtgtttctattttaaagtcactacattatgcaaagtagtcattattggtgaatagtatacatttctacatagctataaatctggccaaaattccctatgtgacaactatgtcttctgatc

SEQ ID NO: 380782 - DNA, 533 bp, Homo sapiens
acagcaaatacattcagggaagtgtagctctcaaaggcctgtcacagtaagaatgaagggatctttaacatttgcccttgtccacaattatgactacatcaaaatgtgtactggttgcaatataagaaatagtaaatgatataagcctatgactgtgtttctattttaaagtcactacattatgcaaagtagtcattattggtgaatagtatacatttctacatagctataaatctggccaaaattccctatgtgacaactatgtcttctgatctttgtaactcctgggccaagmatacaccctgataccctgtcaggttttaataaataaatagcaagcaaataaattaaatgttattaatgagtatcaactactactaaaagttaatgaataaataattgtgtcacactatttaaccttattttctctaacgatgttttatcaaatctaatatgatttgcctaaaataagttgtagattcaactccttacaaaccatgtatttttgcctatatgtgcattctttcaagagc

SEQ ID NO: 380783 - DNA, 593 bp, Homo sapiens
ctttttctaaacttccccacacccctttccatttatagccaatgccctctgagcagagcaaggccatatagagcagagcctatgccagacttcaagacagcagcacttctgcatgagatgcaatgaacaaagaaagaggaaattttatcttctagttcactggcctggcttggcttttacagtgcagcattctcaagtaaagtatctaaaacactccaaaaaaaaagagcatcctgtgctttttctaacatttcccatctacactctgctttcctaaacctagatgtcataaactgtggagagaagtataaaagggattcattcaagacctgtccccaggggtcccgtcacaattctgtgccatgtgcttgtaatcagcagtcrctccagagaatgaagactcagatcccttggattcttctgcctggccttttagaagcccactggtctatgccctgcccttcgctgaaggcacctcaagcttattgaaatgttggccagccatgacttttaaccactcccagaattctttgttacaggattactcacatccctgaggccatggatggaataactgatctgtaaacaaaagg

SEQ ID NO: 380784 - DNA, 563 bp, Homo sapiens
agtgtatgtgtctttttggtagaatgatttaatttcctttgggtatattcccagtaatgagattgctggatcaaatggtagttctatgttctttgagaaaactccaaagtgctttctacagtggctgaactaatttacactcccaccaacagcgcgtaaacattcctttttcctccttttaaatatacattttagttattttggagtgtgtttggttgcatgcaatagaaacttgaatctagtggtttggccattttttttctttcataggaagaaatcagaggtagataactcaggattggcatgggggcctcccatcatgccattaaagagggtttgatgtatgttatctgccatctttaatgtctggctttcattcttakaggacagactggctggtgaacatctaggcaccatgcctgagttcaaagaaggaaaaggcagaaaagcaatgaatttccaatgaactcttacctttcatatcaagaaatattatagacttagccataaaggtgctttcatagttacaaaggagtatggggggtaggtaattttaggtgggc

SEQ ID NO: 380785 - DNA, 557 bp, Homo sapiens
cagggcaggctacatgcaatgactagtctaaataggaagcataaattcccctaattataaacatttctgtaagtatattccagctatagagttccctatagaatcatttgaggtctcggttgcaataaaaacccagtgcctaatcctgctttcctattacttaacagtttttgttgctgcaaatttccaatacaaagtctatttccacagggatttgacctatggaaattaaaacagagagtggtcctacacggcaaactctaaaatgagatttttgagcaagatcacttttgacaggttgacaatcaggattaatcactgcagatgtgtagaatactgatagaacctgtctgggttctaatgcagtagaacccagtgcagcagaattaataaaactaataaccaataggstattggttagtctataactaaactaatagaacaatagtctataactaactaataactaataggactaataacccagtagaactgcattctaatgcagtagaactggttgctaatgcagtagcagtgcaattgataaaagtagtgaa

SEQ ID NO: 380786 - DNA, 599 bp, Homo sapiens
ggtcttaggacagaatttatgactaagtcctcagaagcaattgcaacaaaacagaagttgacaaatggggcttaattaaactaaagaacttctgaatagcaaaataaactatcaacagagaaaacagatgatgtagagaacgggagaaaatatttgcaaactatgcatctgacaaaggtctaatatccagaatctattacaaacttaaacaaatcaacaagcaaaaacaaaaaaccctatttaaaaaatgagcaaaggatctaaacggatrcttctcaaaagaggacataaaagtggccaataaacatatgaaaaaaatgcttattgtcactaatgatcagagaatttgcaaatcaaaaccatgatgagatacaatctcacactattcagaatggctgtttttaaaaaggcaagtaacagatgttgttgaagttgcagagaaaagggaatgcttatacactgctgttgggagtgtaaattagttcagccactgtggaaagcagtttcaagatttctcaaagaacttaaaacagaactaccattttacctagcaaccccattactgggtatatatccaaaagaaaataaatcattcaacc

SEQ ID NO: 380787 - DNA, 573 bp, Homo sapiens
gtgcctgtagtcacagctacttggggggctaaggtaggccagtcacttttgcccaggaggtcaaggctgcagtgagccgagactgcaccactgcactccaccctgggtaacaaagtgacaccctgtctcaaaaaaaaaaaaaaaaaaaaaaaaaaaaaagaagaagaaagaaagaaaaagaaaaagaaaaaaaatctgtgaaatagctgaaaagaaatttgaaataatgatcttaaagaaactcagtgaggtacaaaagactacagatatacaattcccaaaattaggaaagccattctgatctgaataagaaagttaacaagaaagatataataaaaaagagcctaaaagaaatcttaaataaayaattcaagaaatgcaatataaaatacaatagagtttcaacaatggacaaaatcaaatataagaaagaatttctgaacatgaaaacaggtcttttgaaataacctagtaagacaaacaaagaacgtgaaaaaaaaatgaataaagcctatgggacatatgggacatcattaagcaaaaatatatttacattacggaattccaaaaaat

SEQ ID NO: 380788 - DNA, 550 bp, Homo sapiens
tagggattttatggctataaacatattatttaataaattgtatcgctttccctctggtaaaaatgaccactgtagactggtatgaggctagaaagaaaaagttgtcatttaagaattctatatttgcaggaatcatttttctacctacctagtggaaacttttgaaagtatttgataagaactaaaaaattcataagaatattaatttattaaatgtcaagatatagatgtaagaggaggcagttaatatgtctagaggaaatacaatcttgaataactgtcagggctgctatagctgaatttgaataatctggaacaaagcatgtatgtacttgccaaaaatactaaaayttaataaatctgttaacactggtctagatgaaagatattttgaggccttccacttatgagaacagccttacatcccactatgtagacaatattttcctttgatctgcattcttagttaagtgcattcctctagtatttaaaatatataagcatgataacctgctggatagaatgaaaaaccacaggtaaatgcagccag

SEQ ID NO: 380789 - DNA, 576 bp, Homo sapiens
atttacaaacataacatgccatcaaacgttgccctaattccattttgttctgttttactcatgcaaactgtgcttcccagaaaacatgatactgttaacagttcacttctacttcccttcacaatttttctagatttgaactgtatttccagaaggaattctcagggcctaaacatttgtatgaaaataaactacatgtatattctaactaaactccaacaaaaatttagcatttccttcaattataaatgtaagttttaaatacagaacagtagtagcataactgtgacattgtcatcaatagaaaacagatrtattccttaacattacaaatattgcagatatttcaaaacaaaacttaccgtgaacacaatatagtaggcaatagacttgctgccaataattttatttattgtatttttaacaaagtacatcattacatatgacaaaattttccttaacattttaataaaaacatttaaatgcaattggtttcctctgaagtcctcaatatgatattttattttaaaaatttaaaaattattaccttgagacatatataggcttctttagatg

SEQ ID NO: 380790 - DNA, 576 bp, Homo sapiens
atttacaaacataacatgccatcaaacgttgccctaattccattttgttctgttttactcatgcaaactgtgcttcccagaaaacatgatactgttaacagttcacttctacttcccttcacaatttttctagatttgaactgtatttccagaaggaattctcagggcctaaacatttgtatgaaaataaactacatgtatattctaactaaactccaacaaaaatttagcatttccttcaattataaatgtaagttttaaatacagaacagtagtagcataactgtgacattgtcatcaatagaaaacagatgtattccttaacattacaaatrttgcagatatttcaaaacaaaacttaccgtgaacacaatatagtaggcaatagacttgctgccaataattttatttattgtatttttaacaaagtacatcattacatatgacaaaattttccttaacattttaataaaaacatttaaatgcaattggtttcctctgaagtcctcaatatgatattttattttaaaaatttaaaaattattaccttgagacatatataggcttctttagatg

SEQ ID NO: 380791 - DNA, 576 bp, Homo sapiens
atttacaaacataacatgccatcaaacgttgccctaattccattttgttctgttttactcatgcaaactgtgcttcccagaaaacatgatactgttaacagttcacttctacttcccttcacaatttttctagatttgaactgtatttccagaaggaattctcagggcctaaacatttgtatgaaaataaactacatgtatattctaactaaactccaacaaaaatttagcatttccttcaattataaatgtaagttttaaatacagaacagtagtagcataactgtgacattgtcatcaatagaaaacagatgtattccttaacattacaaatattgcagatatttcaaaacaaaacttaccstgaacacaatatagtaggcaatagacttgctgccaataattttatttattgtatttttaacaaagtacatcattacatatgacaaaattttccttaacattttaataaaaacatttaaatgcaattggtttcctctgaagtcctcaatatgatattttattttaaaaatttaaaaattattaccttgagacatatataggcttctttagatg

SEQ ID NO: 380792 - DNA, 515 bp, Homo sapiens
atttcacacaaaacagactttatgccaacaaagaaaaaaaaagacaaagaaatgcattatatagtggtaagtggttcaattcaacaagaagacctaactgattcacaaagcaagtccttagaaacctgcaaagagacttagactcccacacaataatagtgggggacttcaaccacccaactgactgtattagacagatcattaagacagaaaattaacaaagatattcaggacatgaactaaacattggatcaaatggatctgataaacatctacagaattcttcacacaaaaacgacagaatatacattattctcatcagcacatggcacatactctaaaatcaaccacataattggacaaaaaacaatccttagcaaatgtgaagggactaaaatcayaccaaccattctctcagccatagtgtaacaaaattaaaaatcaagactaagaaaatcactcaaaaccatacagttacatgaaaatgaaataacctgcttctgaatgtttttgcg

SEQ ID NO: 380793 - DNA, 623 bp, Homo sapiens
aaatgatattccatgtaaccattccaaaatggatataccacatttcgtttatgcattgatggacaattgagttgttcttatcttttgactattataaatagtgctgctgtgaacattcttatataagtttttgttgaacacttcttttaaattcatttggatatatacttaggagggaaattgctgtcayatggtaattctatgtttaacttattgaagaactaataagctgtttttcacagtggcttcaccattttacattctcatcagcagatatgagggttctggtttctccacatttttacattttccagtttttcaattctagccatcctagtgattgtgaatgtggtatcttgttgtgattttgatttgaaaaatacattttaaacaatatattgatatatatggagagaaaaaagttataaaatgtatcttatcaagctcaaatttcttttattgcacataaaatttgactacaggtaaattagacatgagtctatggaggaaatagttttgtttaaaaatatggcaaatttagaaaagaatgtggtgattggaaccaaattcaatcctatgcataaactatatatgcatttttctctggtggttacctactgttg

SEQ ID NO: 380794 - DNA, 497 bp, Homo sapiens
aatatttataaaataaacaggaatttcagaacagttttagatttacagaaaaatcacaaagatagctacagagttcccatataccacacacatcttcccctatataccacacacatcttcccctattattagtatcttttttttagtgcacttgccacaattaatgaactaatattaatgcatcattgacaaaagtctataatttattgagatttccttaatgttgcctaatttccttatcctgttccaggattccatcagtatgtcatattacatttagtaatcatgtcttcttaggatcctttttgctgtgacagtytctcagactaacttagattttaatggctttgacaattttcagtagtactagtcagcttttttgcaggatgttcttctgttgggatgtgtctgatcattttttttttctcatcattattagcctggatttatgggtattggagaggaagtcctcagaagtaaagtgtcatttcatcata

SEQ ID NO: 380795 - DNA, 606 bp, Homo sapiens
ttggtatccattttgtttgaaagggagcatattgttgaagggggttttatttggtctgaaggagaaggtagaacatgaaggaggagagagtgaagagaataagtgacatagagccagagtccttagtgaatgacagaagatcattgccttagctgtagactctctcagttatgtgatgtaagataatccttttgtcattaaaacctgttatctatttcatgattgctgcaactaaaagtttcataacaatgtacacacacatttacaccttctgtacatttatgcttccaaagaaaatctatggtagttttcatttggcggcaagtaacagaaaacccaagctaaaagtagcttattacaatctaacaattaattgattctatacggatggtccctgacttacaaagtttcaatttaattatcatacaactatactgtttttcactttcagtacagtattcaataaattatttgagatattcaacacttygttataaaataggctttgagttagatggttttgcccagctctaggctactacaagtgttctgagaacatttaaacatttaaagtgggctaggttaagctatgatgttctaaattac

SEQ ID NO: 380796 - DNA, 447 bp, Homo sapiens
tatctgaaattagaatagcaaccctgatttttctctgttttccatttgcttggtagatttttctttatccctttactttgagcctatrggtatcattgcatgtgagatgggtcacttgaagacaaaataccactgagtattatgaggatccgggatccactgagcacgaggataaagttctaatttgacctgacattagggcatttcccattcactcttgagtctgttttctcattcagtaaaaagcaattaagcatctactgtgtattctgtttaagttcttgtctgataaaagatgagtcatggagtctccgcccttgagtagatagcaatgttgagtaaaaaaaaaaaaaatataggaacacataatttcaaagcaatgtaattagacttctagtcaaagtaagaacaaagtgtcattaaataataatgaaaaattgtgtaaca

SEQ ID NO: 380797 - DNA, 447 bp, Homo sapiens
tatctgaaattagaatagcaaccctgatttttctctgttttccatttgcttggtagatttttctttatccctttactttgagcctatgggtatcattgcatgtgagatgggtcacttgaagacaaaataccactgagtattatgaggatccgggatccactgagcacgaggataaagttctaatttgacctgacattagggcatttcccattcactcttgagtctgttttctcattcagtaaaaagcaattaagcatctactgtgtattctgtttaagttcttgtctgataaaagatgagtcatggagtctccgcccttgagtagatagcaaygttgagtaaaaaaaaaaaaaatataggaacacataatttcaaagcaatgtaattagacttctagtcaaagtaagaacaaagtgtcattaaataataatgaaaaattgtgtaaca

SEQ ID NO: 380798 - DNA, 573 bp, Homo sapiens
tacatatatatgcatatatacacacacacacacatacacatttctgattttatgttgaagtttgttaaatgctttatacatgagtgcttttcacttgctacttcaaatcactgccatagagactaagaactggatttttgaaatataatgaaatatgaacatggacctgtattctttattacattatgtttttgttttgagaatgaaacaactcaactaactgggaaccttacttcaaaaaagcaagccmcatgaactcttcacctatatacctcttctcgttcttgtctgcacttatgtttttttttttatttttttcagttaggaaaatgataagtggttattgagttcaaagaattcacactgagctactgggttttagcaatgtttttataaattatgtcgagaagtcttataacacctattaacctccacaagaatataaattatttgatttggcacaagaaagttgtacacataaaagagatgcttttttctcatgtaacaacttacagaactctatgttatgacaataatatataaacaagtgacatttgggtgccacagaaagat

SEQ ID NO: 380799 - DNA, 573 bp, Homo sapiens
tacatatatatgcatatatacacacacacacacatacacatttctgattttatgttgaagtttgttaaatgctttatacatgagtgcttttcacttgctacttcaaatcactgccatagagactaagaactggatttttgaaatataatgaaatatgaacatggacctgtattctttattacattatgtttttgttttgagaatgaaacaactcaactaactgggaaccttacttcaaaaaagcaagccacatgaactcttcacctatatacctcttctcgttcttgtctgcacttatgtttttttttttatttttttcagttaggaaaatgataagtggttattgagttcaaagaattcacactgagctactgggttttagcaatgtttttataaattatgtcgagaagtcttataacacctattaacctccacaagaatataaattatttgatttggcacaagaaagttgtacacataaaagagatgcttttttctcatgtaacracttacagaactctatgttatgacaataatatataaacaagtgacatttgggtgccacagaaagat

SEQ ID NO: 380800 - DNA, 494 bp, Homo sapiens
aatgtaagaaaaatattaatccacactataagaaaggtgaaactaactctctctctctcgcttcctctctctctctaatacagattggcctctcaccttgttgcccaggctcgtctcaaactcccaggctcaggccatcctcctgcctcagcctcccaaagtgctgggaatacaaggtgtgagccaccatgcctcgccctgaaacattctctaggacaactgccacaatcttcaacttatgagatcttcttcacaaaaagatgctgtttaagaaaaaactaaaggaacataacaaaaagatgaaatatgtggatcttagttcagacaggcatcaaaggacatattgaggggaactaagggaatttgatttagatgggtattagataatattaagaaaggttaatacattttattagatatgatcctgtttattttggctatgaaagaagatattcttttttawggaagcatcctgaaatatttagaagtgaact

SEQ ID NO: 380801 - DNA, 603 bp, Homo sapiens
tagcaatcaataccgtggtttgactggatggtacaaaacataaagggagaagaaagagataaggcttgaaaagcatcagatatgagcttcattacataaacaataattaaccatctctcaaaaggaacatgtcagtacaactatgctcacatacttcttttaatagaaagatgaattcctgaaaattggagaggtgaatcagagctccttagaggcattktagtgttgtctctatggtgatgcaatcctagcatctttcactggcagctgtttatatttttcttcaatcacctaaactcatgaccagctccaactacctttactatggctgttcaaatagtgcaggatcagagatatttctgatgctttttacagttataatgtttccagaaattcctgctgtctttatctccttgtccatttcctaaaacgtgcctccaaccacaataaaaggtctatttaacattctgcttgaaacattttctttggttcttttttacagtccagtcctatcacttaaacatcttaaggcaggtatcatgggtcaaaatagtttaccagaccacatcagattcaataccagatacagtgcaaaacatgcaa

SEQ ID NO: 380802 - DNA, 574 bp, Homo sapiens
cagaatatgggtacaacacttaatatttaatatattttggagataccttagaggttcatttaattgataatcatgaagataataaaacattaggatgattctaagttattgcaagatttaaaaggaaaatagaaacatctacatgtctccacttagctgacatttgctccttcatttattcaagagaaattaattgtgtgagcacatagtgaaataaacatagaaatgaataccaagatctctcaaaaccataaaactacatctaatactggatgacttttgggtaaagaataaaattaaggtggaaattttaaatcctttaaatctaaaatcctttaaaactaatgaaaacaaagaaaaaacataccaaaacctctgggacacagctaaggcagtgttaagacaaaagcttatagtgctaactgcctacattaagaagttaaaaagatcttaaattaacaatctaatgtcacacccagaggaagyagaaaacaaaagcaaacccacccaaaagctagcagaaaaaaaaataaacaaaatcagagttgagctgaataaaattgacgtaaaaatt

SEQ ID NO: 380803 - DNA, 553 bp, Homo sapiens
tttccaccgtgagtggaagaagactggccctctccaaatgcagatgcccaaccataaactttccagccatcagaactgtgagccaaatcatccagccttaggtatttctttatagcagcacaaaacagatgaagacattaggtgtatctcrgaaaattagagaggtatggtgactgtctatataagggtcctaggaggttacactattataaagagagttttcataccaacttcttactctgtcataatatttatgtttatatattatgtttaaatattatgtttatagctctaaacataatacttaccaattgtttactactggtctaataattgttaacagcttcacttataccatcttgattgttcttccaacacaagtattaaaattttttcagcatcagttcttctttttaatatcaaatgacttaaagttattaagtaattgcccttttcttaaaaagaggaatagaaggtagactatttacatgtctggcatttttgtaaatgcatataacatatcagcctagactttgttctattgcctgcacat

SEQ ID NO: 380804 - DNA, 615 bp, Homo sapiens
aacatttcagtcaaagtgtgtgtgtagctagggggaaggggtcaaaggatatcatgtaaaaattttttggggataacccaaaatcctagacaactggtacatagaaaagtgtcctaggttgtgtagatagtgctttaaatcactcttttgttttctttttgagatgaatgcttaactctcaatttttcagtaaactaaatacaccctaagcaattaagagacctggtgaatgccacacagctaattaataatggtggaataggagttcaaaaataggtcttctgactccaaagtcagtgagtaaattgtagacttaacagggagaacccttgaagaatgttctgcaatgatcttcaagtgataggtgagtaaattgaggcaaagatagttaaaatcacaacaatttaatagaaacaggatttgaatctcttgtcttccacacaagtgtgcttttctttttttcttttattattatattttaagttttagggtacatgtgcacattgtgcaggttagttacataygtatacatgtgccatgctggtgtgctgcacccactaactcgtcatctagcattaggtatatctcccaatgctatccctcccccctcccccc

SEQ ID NO: 380805 - DNA, 634 bp, Homo sapiens
tggttgtctcagccttcatactatgaagtctgtgcaagttacttcttcattaagaaaatttataaattcaacagattttcattatggttccacactcttccaagaactagaaatacagctgttaacaaaaaaacccttgtcctcctggagcttattttcaataaagggcagatagacaataaacaaataaataaataatgtcagatttagaaaaaataagataaaagaataacaaatgataatggtggtaagtaactgttatatataaagtgatcagagtggtatctctgacaaaatgatgttttagcggagacctgaaggaagttagaacatgaatcatttggtatctaggaggaagagtgytctaagcagaacataatttaatagagaccactgttcttagcctaggggagagtaagagcaaagaggggaatatcagaagataaaatcagataatttgcctatgagaaatggaaaggtttgaattttttcagagatagggcacaggtatgactgtctcatttacactttaacaggaccactctgcttaatcagtggaaaatagactggaaagcaagggtggaagcagaaaaaccactttaggaggccattgcagtagctctgcaaagagatg

SEQ ID NO: 380806 - DNA, 634 bp, Homo sapiens
tggttgtctcagccttcatactatgaagtctgtgcaagttacttcttcattaagaaaatttataaattcaacagattttcattatggttccacactcttccaagaactagaaatacagctgttaacaaaaaaacccttgtcctcctggagcttattttcaataaagggcagatagacaataaacaaataaataaataatgtcagatttagaaaaaataagataaaagaataacaaatgataatggtggtaagtaactgttatatataaagtgatcagagtggtatctctgacaaaatgatgttttagcggagacctgaaggaagttagaacatgaatcatttggtatctaggaggaagagtgctctaagcagaacataatttaatagagaccactgttcttagcctaggggagagtaagagcaaagaggggaatatcagaagataaartcagataatttgcctatgagaaatggaaaggtttgaattttttcagagatagggcacaggtatgactgtctcatttacactttaacaggaccactctgcttaatcagtggaaaatagactggaaagcaagggtggaagcagaaaaaccactttaggaggccattgcagtagctctgcaaagagatg

SEQ ID NO: 380807 - DNA, 607 bp, Homo sapiens
tagttgactcacagttccccaggctctacggaaagcagcctggccatctgttcagcttctggaaaggcctcaggagtcttacaaacatggaggaaggcgaaggggaagcagacttgtcttacatagtaagacaagtaggaggaagacggggaaggtgctacacaattttaaaacagcactgaggggakgatgctaacccattcatgagacttctgcccccgtgatccaatcacctcccaccaggccccacctccaacactggggatgaaaactcaacatgagatttggtaggaacacacatccaaaccatattcctatcctttcctagaaatctaaatgtctccttttgctggaaatcatgtgttgacatttccttagcacatttttgggtaccacattgtttagcttcatcccaggttaacattccactctaagcacttaaggtgtgtaaagtccttgctctaatttctccttggtacactgtcctgtattccctcacttggtcttccctagtacaatcgttcctgttatctggctgttctacagaacttgccctgaattgtaaaaacaaattctgtgtgtgagatgatactgaccaaatttgctt

SEQ ID NO: 380808 - DNA, 607 bp, Homo sapiens
tagttgactcacagttccccaggctctacggaaagcagcctggccatctgttcagcttctggaaaggcctcaggagtcttacaaacatggaggaaggcgaaggggaagcagacttgtcttacatagtaagacaagtaggaggaagacggggaaggtgctacacaattttaaaacagcactgaggggaggatgytaacccattcatgagacttctgcccccgtgatccaatcacctcccaccaggccccacctccaacactggggatgaaaactcaacatgagatttggtaggaacacacatccaaaccatattcctatcctttcctagaaatctaaatgtctccttttgctggaaatcatgtgttgacatttccttagcacatttttgggtaccacattgtttagcttcatcccaggttaacattccactctaagcacttaaggtgtgtaaagtccttgctctaatttctccttggtacactgtcctgtattccctcacttggtcttccctagtacaatcgttcctgttatctggctgttctacagaacttgccctgaattgtaaaaacaaattctgtgtgtgagatgatactgaccaaatttgctt

SEQ ID NO: 380809 - DNA, 607 bp, Homo sapiens
tagttgactcacagttccccaggctctacggaaagcagcctggccatctgttcagcttctggaaaggcctcaggagtcttacaaacatggaggaaggcgaaggggaagcagacttgtcttacatagtaagacaagtaggaggaagacggggaaggtgctacacaattttaaaacagcactgaggggaggatgctaacccattcatgagacttctgcccccgtgatccaatcacctcccaccaggccccacctccaacactggggatgaaaactcaacatgagatttggtaggaacacacatccaaaccatattcctatcctttcctagaaatctaaatgtctccttttgctggaaaycatgtgttgacatttccttagcacatttttgggtaccacattgtttagcttcatcccaggttaacattccactctaagcacttaaggtgtgtaaagtccttgctctaatttctccttggtacactgtcctgtattccctcacttggtcttccctagtacaatcgttcctgttatctggctgttctacagaacttgccctgaattgtaaaaacaaattctgtgtgtgagatgatactgaccaaatttgctt

SEQ ID NO: 380810 - DNA, 566 bp, Homo sapiens
aaacaaaacatagcagtatagaaaaaatgacactggctgaaaccatgcctttctgagacacttacttttatattaactcatttatgttcatttatgttaatagtgagttataaagaattagaagacatttctggggaatataatttcttccttattttctgacatatttttaaatcagcattaggccagattcagaataacttgttggaaaaatgagactgggagattggaagtaattatctccaatgtccctttttgactagtttkggaagtctggtcaaaataagaaattttatcatattgtttttaactaactctagaaacaatagcatttcctgacatagacattctgatattctttcaatctaaaattaataggtgaattcaattaacttagttttttgtgattacagtacaatgaagttcaaaattctgcatagatttggtgtgttaactatcactgtaatgattccgaatcgagatattttggggcagagtgagacacctgccaacagctcctatttctgcctcattgcatctcttgggttttatccacatatcatagt

SEQ ID NO: 380811 - DNA, 566 bp, Homo sapiens
aaacaaaacatagcagtatagaaaaaatgacactggctgaaaccatgcctttctgagacacttacttttatattaactcatttatgttcatttatgttaatagtgagttataaagaattagaagacatttctggggaatataatttcttccttattttctgacatatttttaaatcagcattaggccagattcagaataacttgttggaaaaatgagactgggagattggaagtaattatctccaatgtccctttttgactagttttggaagtctggtcaaaataagaaattytatcatattgtttttaactaactctagaaacaatagcatttcctgacatagacattctgatattctttcaatctaaaattaataggtgaattcaattaacttagttttttgtgattacagtacaatgaagttcaaaattctgcatagatttggtgtgttaactatcactgtaatgattccgaatcgagatattttggggcagagtgagacacctgccaacagctcctatttctgcctcattgcatctcttgggttttatccacatatcatagt

SEQ ID NO: 380812 - DNA, 561 bp, Homo sapiens
tctatctcccacagttccctctacagatgtctatgttgcattctttttcttatgggcaacttctgtgtgtttatctctatgttaaaacmcacatggtgtgcttattcaatgtttgtcaaatgaaatattgagtgaggagatgaatctgtgtgaggatgtaaagtgagtgaaaacaaagctgtgtgaacaaatgaatatatttctcttcattatttgctcccattaattatgtgtctattttatgaaggatgccctgtattgacattgcagatttggggtaaaagtagaattttaaaaatattcaaggacactttaaggaaacaccaggtacgaaaatgacataaaaatctccccactgtacttgaactaatagtggaactttttaatagtgaagcattaatgcaatgggattttaaatagagccaatccagaagtgcttaatctgaatgatgcaattagtttagaatgttggaaggtaaattatgaagaaaacattttattagtcataaataagttgccaatcatttctttgttgttaacttaagaagttttctaaaaaag

SEQ ID NO: 380813 - DNA, 561 bp, Homo sapiens
tctatctcccacagttccctctacagatgtctatgttgcattctttttcttatgggcaacttctgtgtgtttatctctatgttaaaacacacatggtgtgcttattcaatgtttgtcaaatgaaatattgagtgaggagatgaatctgtgtgaggatgtaaagtgagtgaaaacaaagctgtgtgaacaaatgaatatatttctcttcattatttgctcccattaattatgtgtctattttatgaaggatgccctgtattgacattgcagatttggggtaaaagtagaattttaaaaatattcaaggacactttaaggaaacaccaggtacgaaaatgacataaaaatctccccactgtacttgaactaatagtggaactttttaatagtgaagcattaatgcaatgggattttaaatagagccaatccaraagtgcttaatctgaatgatgcaattagtttagaatgttggaaggtaaattatgaagaaaacattttattagtcataaataagttgccaatcatttctttgttgttaacttaagaagttttctaaaaaag

SEQ ID NO: 380814 - DNA, 636 bp, Homo sapiens
tagcttgtgggagaaaatctgtcacccttgttaattatcttaaaatgtggcttcattaggtattgaaaacagtgcttgtagaaagcaggctctaatatagtggcattacatttcactgagtttaaaatataatagctatgaaggaatgcacggaaacttctagtttaactgcagaaacatggcttatatgtatatacacatttacacacatagttacataggcatatttattgtgttgttctatgggcatgcatgcatgtgcatctgcatgtgtgcagttatgtgaggtgcatgtatgtgtgtgtgctgttgagcaattaattacttgataactagggcaacagaaagaagatttcatatactataatygagaattaaatattgatttacctaaaatatactgacttagggaatgaaatgactctggctgctctgatatttcaccaagctaacatatacatttattaaaggtgttttcatgcattcctttatacaaaacactttcctaaataggaaatgagatagatccggaccataaggagtttatgttctaacatatagtaagcttcaaggtataaatgtcctaatttatagtatactgattaacttactattagcaaaatcagtacttgtgga

SEQ ID NO: 380815 - DNA, 601 bp, Homo sapiens
tcttgggtatatctttattagcagcataagaagagactaatacagtaaattggtaatgggagtgggatacttctgtaaagatacccaaaaatgtgtgtaagggagatgactgtgctttagtcaggtgtgggctgaggcagccttcaggtgctgcatgactcagcgggtttggagcgcrggcacacaactctgcatttgaggtttggaaacctccacctagatttcagaggatgtatggaaatgcctggatgtccagggagaggtgagctacaggagtggagtcctcatggagaacctctgctagggcagtgtagaagggaaatgtggggtgggagcccccacatagagtccccagtggatcactgcctaatggagctgtgagaagaggaccactgtcctccacacccagaatggcagatccaataacagcttgcatcatgagcacaaaaaatctgcagacactcaatgtcagcccatgaaatcagccaggttgggggctgtactctacaaagccacaggggcagagcttcccaagaccatgggaatctacttcttacatcagcatgacctgatgtgagacatggagtcaaaggagatcatt

SEQ ID NO: 380816 - DNA, 601 bp, Homo sapiens
tcttgggtatatctttattagcagcataagaagagactaatacagtaaattggtaatgggagtgggatacttctgtaaagatacccaaaaatgtgtgtaagggagatgactgtgctttagtcaggtgtgggctgaggcagccttcaggtgctgcatgactcagcgggtttggagcgcaggcacacaactctgcatttgaggtttggaaacctccacctagatttcagaggatgtatggaaatgcctggatgtccagggagaggtgagctacaggagtggagtcctcatggagaacctctgctagggcagtgtagaagggaaatgtggggtgggagcccccacatagagtccccagtggatcactgcctaatggagctgtgagaagaggaccactgtcctccacacccagaatggcagatccaataacagcttgcatcatgagcacaaaaaatctgcagacactcaatgtcagcccatgaaatcagccaggttgggggctgtactctacaaagccacaggggcagagctkcccaagaccatgggaatctacttcttacatcagcatgacctgatgtgagacatggagtcaaaggagatcatt

SEQ ID NO: 380817 - DNA, 577 bp, Homo sapiens
aatcacaggagtggtttcccccatactgttctcatgatagtgaataagtctcatgagatctgatggctttrtaaacgggagctcccctgcacaagatctcttgcctgctgccatgtaaaatgttcctttgcttctcctttgccttctgtcataattatgatgcctccccagccatgtggaactgtgagtctactaaaccattttattttattaattacccagtcttcagtatgtctttattagcattgtgaaaacaaatgaatagacagccccgaatgcttctttcttacacctcaactccaagtactttttaaatcacatacggactcctgtttccttgatgccatgatcttcttttagtagttcagtgttttttctcatctcactagaggtactctcaggatatgccttatggtccttgatcaataccattgtctatgttgtattcctccctttttctcatctttccaggaaaatttcaaccctgggttcgtactaccaaatttctggggctgagagaatttgaataaaacaggttagccctcaatattggtactacagccaaaataatattctc

SEQ ID NO: 380818 - DNA, 577 bp, Homo sapiens
aatcacaggagtggtttcccccatactgttctcatgatagtgaataagtctcatgagatctgatggctttataaacgggagctcccctgcacaagatctcttgcctgctgccatgtaaaatgttcctttgcttctcctttgccttctgtcataattatgatgcctccccagccatgtggaactgtgagtctactaaaccattttattttattaattacccagtcttcagtatgtctttattagcattgtgaaaacaaatgaatagacagccccgaatgcttctttcttacacctcaactccaagtactttttaaatcacatacggactcctgtttccttgatgccatratcttcttttagtagttcagtgttttttctcatctcactagaggtactctcaggatatgccttatggtccttgatcaataccattgtctatgttgtattcctccctttttctcatctttccaggaaaatttcaaccctgggttcgtactaccaaatttctggggctgagagaatttgaataaaacaggttagccctcaatattggtactacagccaaaataatattctc

SEQ ID NO: 380819 - DNA, 631 bp, Homo sapiens
tttggtttatttatttgaattaaacataatcttattggggaaatgattaagctgctatgtttttgttttgttttgcttacatttttcttttacaattacaagacagcctctgcaattggttgcacagaggtaaccattgagacatgttgtttttaccctttttgcttatggtgtgttttttgtctcatagtgtttctgcagtgctcsaacaatgttagtgtctattcagtgcttctctttacatacctactctagaagaaatgagaattaacattcagtctgagaaagcttttcatgttagtgggcttgtagggtgccatgtgctatatgattagcaccctctcagtatcttctagtttgtgtgctaccatctctgatgattaatagcactttcttatttattagaaacccactaacttattagactgcattgagttgacaggctgaggtttaccaaaaattttttaaaaattaaaaacgtagttaataaagataaaataatcaatgcattttgaatatgcctcctttaaaggacagaatttttaaattccctgacaaataaagaatttgagtaaacaaaaatcattatgttaatggaatgtataacaaggctggctaaagcaaaaatccc

SEQ ID NO: 380820 - DNA, 647 bp, Homo sapiens
atacaaaggaaaaagtcaaaatccatgcatctggcttcagagcaataggtacatataggaaaagtattatmattaagatacacctataacttggctctataagagctcctataaatataaggcagcttaaagataaatgaactttacttctctatacattgtggtagataatgaaaacagaattctcgagtagttccggtactagtaataatggctggggtcattttggaaatgatactggttatcgtatttccaaaggatatcaaatctttggcaggggtagcactagaagttgtcaggctaagaacagtgggtggctaataacaatgtcaggctaagctcttggtagctcatttagtacttttatcactagacattggtattcttggatgaacactgcagtgtgtgcgatttgcaacttctatggtaatccttggaattgctgcctccttttgctaagtttgcctataaatgtcctcttatctttctggaatttctctctttctacttcttttgtttcttttatttctacccttacttgaataggagacacaaggaaaaatgtcattcctgattttaagaacttagagctgaggatatgccagaagccaaattcaaagccatgattttagtcctatcagctaaac

SEQ ID NO: 380821 - DNA, 647 bp, Homo sapiens
atacaaaggaaaaagtcaaaatccatgcatctggcttcagagcaataggtacatataggaaaagtattatcattaagatacacctataacttggctctataagagctcctataaatataaggcagcttaaagataaatgaactttacttctctatacattgtggtagataatgaaaacagaattctcgagtagttccggtactagtaataatggctggggtcattttggaaatgatactggttatcgtatttccaaaggatatcaaatctttggcaggggtagcactagaagttgtcaggctaagaacagtgggtggctaayaacaatgtcaggctaagctcttggtagctcatttagtacttttatcactagacattggtattcttggatgaacactgcagtgtgtgcgatttgcaacttctatggtaatccttggaattgctgcctccttttgctaagtttgcctataaatgtcctcttatctttctggaatttctctctttctacttcttttgtttcttttatttctacccttacttgaataggagacacaaggaaaaatgtcattcctgattttaagaacttagagctgaggatatgccagaagccaaattcaaagccatgattttagtcctatcagctaaac

SEQ ID NO: 380822 - DNA, 647 bp, Homo sapiens
atacaaaggaaaaagtcaaaatccatgcatctggcttcagagcaataggtacatataggaaaagtattatcattaagatacacctataacttggctctataagagctcctataaatataaggcagcttaaagataaatgaactttacttctctatacattgtggtagataatgaaaacagaattctcgagtagttccggtactagtaataatggctggggtcattttggaaatgatactggttatcgtatttccaaaggatatcaaatctttggcaggggtagcactagaagttgtcaggctaagaacagtgggtggctaataacaatgtcaggctaagctcttggtagctcatttagtacttttatcactagacattggtattcttggatgaacactgcagtktgtgcgatttgcaacttctatggtaatccttggaattgctgcctccttttgctaagtttgcctataaatgtcctcttatctttctggaatttctctctttctacttcttttgtttcttttatttctacccttacttgaataggagacacaaggaaaaatgtcattcctgattttaagaacttagagctgaggatatgccagaagccaaattcaaagccatgattttagtcctatcagctaaac

SEQ ID NO: 380823 - DNA, 533 bp, Homo sapiens
ctcctataaatataaggcagcttaaagataaatgaactttacttctctatacattgtggtagataatgaaaacagaattctcgagtagttccggtactagtaataatggctggggtcattttggaaatgatactggttatcgtatttccaaaggatatcaaatctttggcaggggtagcactagaagttgtcaggctaagaacagtgggtggctaataacaatgtcaggctaagctcttggtagctcatttagtacttttatcactagacattggtattcttggatgaacactgcagtgtgtgcgatttgcaacttctatggtaatccttggaattgctgcctccttttgctaagtttgcctataaatgtcctcttatctttctkgaatttctctctttctacttcttttgtttcttttatttctacccttacttgaataggagacacaaggaaaaatgtcattcctgattttaagaacttagagctgaggatatgccagaagccaaattcaaagccatgattttagtcctat

SEQ ID NO: 380824 - DNA, 507 bp, Homo sapiens
ttcaacacttaaataacctgcaagtgtcatatgtgtacttctccatagttcctataacacctaaatagtactcataygtagtaggttttcattttatgtttattggttgattgacaagttggtttacaaaagcaacatgagcactatttttattgatctttaagactaattatactattgcattcttttttcctggatatttctcaagggatacagaaatattctcacatcatgactcatagggtgagccatggttaacacacagaatctttttcccccaaaatgaaagtgttgttctataatatccaccagagttctttctgcttttatactaagttctgtagacatgcagagaaataatatattaacctggagaagatgaggcttcttttaaggttttgaggaatttaaaaggtcacagaggaaaaaagaagggactctaggtggtgagatccccaaaataaatagctgagagtaattcatgaatagtctatatttagggtatta

SEQ ID NO: 380825 - DNA, 566 bp, Homo sapiens
gtaagtacgaacatacagtatttggttttctgttcctgtgttagcttgcttaagatgattgcctccagctccatccaagttgctggaaaggaaatgatctcattcttttttatggctacatagtattctgtggtgtatacataccacattttctttatccagtctaccattgatgggcatttacgttaattctatatcatcatgaytttgaatagtgctgtgatgaatatatgcatgtgtgtgtctttatggaaggacaatttacattcctttgggtgtatactcaatgacaggattactgggttgaattgtaatcctgttttaagttctttcagaaatgaaattgccaaacagctttccacaatggctgaactaatttacattcccaccaacagtgtgtaagtactcccttttctttacaaccttgacagcttatgttattttttaaactttttataatagccattctgaatggcgtgagattgcatctcattgtggttttgatttgcatttacctaatgatcagtgatactgagttctctttcatatgcttgttggacatatgt

SEQ ID NO: 380826 - DNA, 566 bp, Homo sapiens
gtaagtacgaacatacagtatttggttttctgttcctgtgttagcttgcttaagatgattgcctccagctccatccaagttgctggaaaggaaatgatctcattcttttttatggctacatagtattctgtggtgtatacataccacattttctttatccagtctaccattgatgggcatttacgttaattctatatcatcatgacttkgaatagtgctgtgatgaatatatgcatgtgtgtgtctttatggaaggacaatttacattcctttgggtgtatactcaatgacaggattactgggttgaattgtaatcctgttttaagttctttcagaaatgaaattgccaaacagctttccacaatggctgaactaatttacattcccaccaacagtgtgtaagtactcccttttctttacaaccttgacagcttatgttattttttaaactttttataatagccattctgaatggcgtgagattgcatctcattgtggttttgatttgcatttacctaatgatcagtgatactgagttctctttcatatgcttgttggacatatgt

SEQ ID NO: 380827 - DNA, 507 bp, Homo sapiens
ttcaacacttaaataacctgcaagtgtcatatgtgtacttctccatagttcctataacacctaaatagtactcatatgtagtaggttttcattttatgtttattggttgattgacaagttggtttacaaaagcaacatgagcactatttttattgatctttaagactaattatactattgcattcttttttcctggatatttctcaagggatacagaaatattctcacatcatgactcatagggtgagccatggttaacacacagaatctttttcccccaaaatgaaagtgttgttctataatatccaccagagttctttctgcttttatactaagttctgtagacatgcagagaaataatatattaacctggagaagatgaggcttcttttaaggttttgaggaatttaaaaggtcacagaggaaraaagaagggactctaggtggtgagatccccaaaataaatagctgagagtaattcatgaatagtctatatttagggtatta

SEQ ID NO: 380828 - DNA, 507 bp, Homo sapiens
ttcaacacttaaataacctgcaagtgtcatatgtgtacttctccatagttcctataacacctaaatagtactcatatgtagtaggttttcattttatgtttattggttgattgacaagttggtttacaaaagcaacatgagcactatttttattgatctttaagactaattatactattgcattcttttttcctggatatttctcaagggatacagaaatattctcacatcatgactcatagggtgagccatggttaacacacagaatctttttcccccaaaatgaaagtgttgttctataatatccaccagagttctttctgcttttatactaagttctgtagacatgcagagaaataatatattaacctggagaagatgaggcttcttttaaggttttgaggaatttaaaaggtcacagaggaaaaaagaagggaytctaggtggtgagatccccaaaataaatagctgagagtaattcatgaatagtctatatttagggtatta

SEQ ID NO: 380829 - DNA, 517 bp, Homo sapiens
agtttttttttttttttttgacagtcattactgtctttcctttccccctaaatagttcactaaataagaaatgagttgcaatagtatgaacttaatgtgaagaattttcaactattttcatggtcatttgtaaaggttatctacaaatatttggttagcaatttcagtgtgctcagcaccatcycaggtgcttgagggatatataatcaaattatttgttaagtcacttggtcaagctataggaagcaaacaatgaaagtggttttctttttcctttaggacagtttcctgtatgcagctctggctgcatgttgtaatcgccttagggagctttaaaaacatactgatgcctgcacccaaaccccagaaattctgagttaattgatctgggatgcagcttggagactgagagttttaaaagcagccaagactaaggaacattgccttagaaattaataatgtctacacataatttttgcatattgactcaatttttaatcactatttattttcaaga

SEQ ID NO: 380830 - DNA, 597 bp, Homo sapiens
ttgtatacagaaaagtgggtctctgagaggttgagtaacttgctctgcaacacactgctggtaaaggcagaaataatctttgaactcrtggatcctggttccactatttcttccaccactttgtaactgcctcaattcagtctatcattgaaaaaccattcattggaccataatacatcctactctagattgtgtgaactttaaaaaaattctctgatttctgtactggcagatttaagtaatattcataagaaaagaagggcagtgataatgagaagatgggtccttcctggtttggtgacacttgacaaatacagtgttatgtgtcaacaaacattcagtgcatgatgctacttattaaagaagttgatgtatcctggccaaaggctggatactcaaagctcatctctaagagccataaatcatctcagaaaacagaccacatccttctgtgatgaaagacattctgagttctctgaaaggctgagcagatccttgcttgaagacagaatcatctgttgattctcataaatagagagattagatagaaggatgacgtatttctcaagctggtgtgatagtacactgatgtgaagc

SEQ ID NO: 380831 - DNA, 597 bp, Homo sapiens
ttgtatacagaaaagtgggtctctgagaggttgagtaacttgctctgcaacacactgctggtaaaggcagaaataatctttgaactcgtggatcctggttccactatttcttccaccactttgtaactgcctcaattcagtctatcattgaaaaaccattcattggaccataatacatcctactctagattgtgtgaactttaaaaaaattctctgatttctgtactggcagatttaagtaatattcataagaaaagaagggcagtgataatgagaagatgggtccttcctggtttggtgacacttgacaaatacagtgttatgtgtcaacaracattcagtgcatgatgctacttattaaagaagttgatgtatcctggccaaaggctggatactcaaagctcatctctaagagccataaatcatctcagaaaacagaccacatccttctgtgatgaaagacattctgagttctctgaaaggctgagcagatccttgcttgaagacagaatcatctgttgattctcataaatagagagattagatagaaggatgacgtatttctcaagctggtgtgatagtacactgatgtgaagc

SEQ ID NO: 380832 - DNA, 571 bp, Homo sapiens
ttaagtaatattcataagaaaagaagggcagtgataatgagaagatgggtccttcctggtttggtgacacttgacaaatacagtgttatgtgtcaacaaacattcagtgcatgatgctacttattaaagaagttgatgtatcctggccaaaggctggatactcaaagctcatctctaagagccataaatcatctcagaaaacagaccacatccttctgtgatgaaagacattctgagttctctgaaaggctgagcagatccttgcttgaagacagaatcatctgttgattctcataaatagagagattagatagaaggatgacgtatttctcaagctggtgtgatagtacactgatgtgaagcctccatccctgaggtatttttcaygtcacaggaaaaatacaaattttttaaaaactatattaactcttgaggacatgaagttaccatattatctacaacttcttttatatattattaacctcaccagatggaatggggaaagattggctgataaaatggattctcagcaatctctttgaaccttatgaaggagcctagagttcaggtg

SEQ ID NO: 380833 - DNA, 644 bp, Homo sapiens
ttggctgataaaatggattctcagcaatctctttgaaccttatgaaggagcctagagttcaggtgtcatggttctgactcaaggctgattccacagcaaacgggaaggtgatggtcaaagggtacctactgatccatgagtgagcatgggacagcacattaattagcatagtgttgctcatggggttggtccagttaggcttccacaatcatttgtactgcataaagacaccatccaatcaaaccactgatcattctgaaaacagttgtttgaattaattccaamatacagtttgcaaccattctcgtattctagcatttttatatgtgtgggcaccaccataaatgaagaagagtgtgtgcacattaacctcacaaatgggattataagaattactcttatcatcctgaaagcccaagagttttgaacttgaaaaaaaaagaccctaaagggtatcccttaaccaatcctatcaaaattatccattaatggtatccttaaatgcaattgaaatgtgatttgtctttacagtttctcagtctcagaaactctgcagatgggtcttcaagtacagagtttgcaaatctgttgaaatgatgacctttaggcaggaccaactagataatttatgagacacagtgcaa

SEQ ID NO: 380834 - DNA, 492 bp, Homo sapiens
ttttaaaccacacttaaaacccattccttaatctaggttaaagaacttaagagcaaaaaaattatgaacttattcccttccatttttattttactctctttttttatgtgcaaattttatctctgcatcaataatcaaggactcagaaatgtgcttagagtattatcctccctgcctctgccattaattcactagctccctttccttagggactgtgttctacaatctcatcataaacaacattattctcttgctaactcctactcatcrtgcgtctgcgatattatgcagatccaggcctttagtagaacctgcaatagtgaaaaaaccccaaacacattgtttgaaagccataccaacaatacaataggaagggtattacagtgaagtgctggtttaaggccaagggagtggctgggtccccccagcaacaggtgcattcacttccagacccgctttggtctgtcctaattagcatatcatttcaattgt

SEQ ID NO: 380835 - DNA, 479 bp, Homo sapiens
aggctgattcttgtactaggaaacatcactgaagagccctgtcccaatgtcatgatgatgagttgtgcatcagtttccttgtctgagaaatgagtatactcactaacagattatgatgctatgactttatacccgctttttgctgatgaaaagacctaccttaactatatytgctgaaaatgtgagtttagtaagtaatcatagataaacaattatggaacacttacaatatgtaaacacaatttaattcacttaattatataagtcctgcacagtagatattatttgaagcttaagtacaataaacaaacttcccaagattatgcagacagaattaaaagccaggtgcgtcagattctaaagtctgctctgtgcactgcattctgtctatagccttacctctaaaattgttatttttgtgatggacaagaaatcgtatgacaggtgtgggaacagtggctacatagatgaatcaatga

SEQ ID NO: 380836 - DNA, 547 bp, Homo sapiens
actactcttgaattatttttgggtaagtaatgaaattaaggcagaaaccaattagttcttcgaaattagtgagaacaaagatacaacataccagaatctctgggacacagctaaggcagtattaagagggaattttagagcactacacacccatatcgaaaagttagaaagatctcaaatgaataagataatatcacaactacaggwactaaagaagcaagagcaaaccaacctgaatgctagcagaagacaagaaataactaaaatccgagctgaactaaaggaaattaaaaccaaaaaatacaaaagatcaattagtccacaagtttgttattcacaaaaattaatttttaataagtctaatttttaagtcttcccaagtctggaccaaaaattaattgaatccctgaatgaataatgaattctgtaattgaatcagtaataaaaagcctactaaccaaaaaaagcccaggacgagacagacttacagccaaattctaccagatgtataaaagctggcaccattcttactgatactatcccaaaa

SEQ ID NO: 380837 - DNA, 547 bp, Homo sapiens
actactcttgaattatttttgggtaagtaatgaaattaaggcagaaaccaattagttcttcgaaattagtgagaacaaagatacaacataccagaatctctgggacacagctaaggcagtattaagagggaattttagagcactacacacccatatcgaaaagttagaaagatctcaaatgaataagataatatcacaactacaggaactaaagaagcaagagcaaaccaacctgaatgctagcagaagacaagaaataactaaaatccgagctgaactaaaggaaattaaaaccaaaaaatacaaaagatcaattagtccacaagtttgttattcacaaaaattaatttttaataagtctaatttttaagtcttcccaagtctggaccaaaaattaaytgaatccctgaatgaataatgaattctgtaattgaatcagtaataaaaagcctactaaccaaaaaaagcccaggacgagacagacttacagccaaattctaccagatgtataaaagctggcaccattcttactgatactatcccaaaa

SEQ ID NO: 380838 - DNA, 547 bp, Homo sapiens
actactcttgaattatttttgggtaagtaatgaaattaaggcagaaaccaattagttcttcgaaattagtgagaacaaagatacaacataccagaatctctgggacacagctaaggcagtattaagagggaattttagagcactacacacccatatcgaaaagttagaaagatctcaaatgaataagataatatcacaactacaggaactaaagaagcaagagcaaaccaacctgaatgctagcagaagacaagaaataactaaaatccgagctgaactaaaggaaattaaaaccaaaaaatacaaaagatcaattagtccacaagtttgttattcacaaaaattaatttttaataagtctaatttttaagtcttcccaagtctggaccaaaaattaattgaatccctgaatgaataatgaattctgtaattgaatcagtaataaaaagcctactaaccaaaaaaagcccaggacgagacagacttacagycaaattctaccagatgtataaaagctggcaccattcttactgatactatcccaaaa

SEQ ID NO: 380839 - DNA, 569 bp, Homo sapiens
gcccacctgggggcagcacggagccaagggagcctcccccgyccaaggaagtggtgagcgaacgtgcaaccccagggatccatgattctcccatgtatctttgcaacccttgggtcaggagatcccctcgtggacccactccacgagggccttcagtatgacacacagagctacctggagtcttggcacggcagccgctcaggcacgcatggagaccaggaagacttagaaactccggctttctgagctttctggcaaaagtagctctgactctggcaaagtgggaggttggatccccatacatacccctaaaaaggaggctgaatccacggggctgagcagcgaccatctgcagaccccacttccctggcacctcacgggataagacccactggcttggaattccagccagccgctgggagcagtgttacatctttctgagatggtgcccctggaggtgggggagtaggggacaccatctttgctgtttgggtgacttagccgttccagccttcgggctttgaagtgtctgagctgactgagcacggaggcagtgcctcagcacagcg

SEQ ID NO: 380840 - DNA, 597 bp, Homo sapiens
aaacgaatagaaaacccagaaataagaccacacacctacaactatctgatcttcaacaaacttgacaaaaacaagcaatggggaaaggattccctactcaataaatgatgctgggataactggctagccatgtgcagaagactgaaaatggacctctttcttactccatatacaaaaattaactcaagatggattaaagacttacttaaatgtaaaagccaaaactataaaagctctggaaaacatcttagacaataccattctggccataggcacaggcaaagatttcatgatgaggacaccaaaaacaattgcatcaaaagcaaaatttgacaaatgggacctaattaaagagcttctgtgcagcaaaactgtcatcagattaaacagacaacctacagaatgggagaaatttttttgtaaactatrtatctaacaaaggtctaatattcagcatccataaagaactttaacgaatttacaagaaaaaaaagtcctattaaaaagtgggcaaaggacatgataaaactcttttcaaaggaagacatgcatgtagccaacaagcatatgaaagaaagcccaacatcactgatcatt

SEQ ID NO: 380841 - DNA, 645 bp, Homo sapiens
aggcatacatatgttcactgcagcactattcactatagcaaagacacggaatgaccatcaataatagactgaataaggaaatgtggtacatatacaccatggaatactatgcagccataaaaaaagaatgagaccatgtcctttgcagggacatggatggagctggaggccattatccttagcagaccaacgtaggaacagaaaaccaaataccacatgttttcwcttaaaagtgggagttgaattatgagagaaatggacacatagagagaaacaacatacactggggcctgtcagagggagaagggaaaagatcaggaaaaataaataatgggtactaggcttaatacctgggtaatgaaataatctatacaacaaaccccatgacacaggttcacccatgtaacaaacctgcatatgtatctcagagcttaaaataaaattaaaaaaagaagattcactacaaaaaaaagaaaataaagctgcaatgtgcacccttgtagacatacctttacacacatttaaatgttcttataaattccagggttttaatatttaagacagaagataaggcatttgtttgtttgtttgtttgtttggagacagagtctctctctattgcccaggctggagtgcagtggcgca

SEQ ID NO: 380842 - DNA, 594 bp, Homo sapiens
gttttaggttctttgatttttcatattaatggtaaaccagcttgtcaatttctacagaaaattctgctgggaatttgattgtgattgcactgaactttaagatcaatttggggagaagtgacaccttaatattatcaagtctgctaatttataaacacaatattcacaatatttttctctgtgtagatattccttattttctcttatcaatgatttatagtttgcaaattatgtacatattttctcagatttatctacagtttatatttacaatgctattgcaaataacacttatactttaaaattgtaattcctaattgtttactgctagtaaatagacttataattcaatttcatatkgacttcatactctgtggatttgctaaaaactcatccattagttgtgatagcttatctgaaattttctgtgtagatggttatgttgtctacatgtatacacgttacaaaaataacagttttgttgcttccttttcaatatgtgtatcttctatttcattttcttgccttattggcctgactagaacctccagtgaaatgattaacagtgatggtgggagcaaatatccttgtctg

SEQ ID NO: 380843 - DNA, 594 bp, Homo sapiens
gttttaggttctttgatttttcatattaatggtaaaccagcttgtcaatttctacagaaaattctgctgggaatttgattgtgattgcactgaactttaagatcaatttggggagaagtgacaccttaatattatcaagtctgctaatttataaacacaatattcacaatatttttctctgtgtagatattccttattttctcttatcaatgatttatagtttgcaaattatgtacatattttctcagatttatctacagtttatatttacaatgctattgcaaataacacttatactttaaaattgtaattcctaattgtttactgctagtaaatagacttataattcaatttcatattgacttcatactctgtggatttgctaaaaactcatccattagttgtgatagcttatctgaaattttctgtgtagatggttatgttgtctacatgtatacacgttacaaaaataacagttttgttgcttccttttcaatatgtgtatcttctatttcattttcttgccttattgrcctgactagaacctccagtgaaatgattaacagtgatggtgggagcaaatatccttgtctg

SEQ ID NO: 380844 - DNA, 619 bp, Homo sapiens
taaatctgaacaattattatgtatcaattaaaaacaaaatgaaaacattcttagcaaaaaaaaaagcctgtacttttttaactctaaaatcaagttatttcaggaaattgaacagcaactggaattattagttaaaaacaaaataaaagaagactactaaataagccgaagagagttgcttattggaaaaaatgatattttagttggcagactagacaagtatttccttttatatctgacaaacaataccagtcagatatagaaggaagaagaattgaactaggcctaacagctctaaggagayagaagaaaaggagagatatttgtttagttgttgctaagacagaaataatgacagcaggactgaataactgtgctggaaggaaccaggatccaaaaatgactatggaggttatctttgaaagctgaaaatagaagatcccttgtaagaataattgagtaaatatacctagaagattaggatgtctgtgacatttggttacaagaaaacttggacatgttcaagggaaaaaattaggatgatcattgcaaaatattcaaatcattagtgagtttcaaaatgatagttactatagggggaagtcatatattaccattg

SEQ ID NO: 380845 - DNA, 586 bp, Homo sapiens
tgataaatgcaaatcattatacttataaaaatgtttaaatgtaacataagagtaacaatgccggttgggctctttggctcacacctgtaatcccagcactttgggaggccgaggcggacggatcacgaggtcaggagatcgagacggtgaaaccctgtctctactaaaagtacagaaaaaaaaaaaaaaaaagcctggcatagtagcaggcgtagtagtagtagtcccagctagtaggaaggctgaggcaggagaatgtcgtgaacttgggaggtggaggttgcagtgagccgagatcacgccactgcactccagcctgggcgacagagcgagactctgtctcaaaraaaaaaaaaaaaaaaagagagaaaaaaagaaaaaagattaacaatgccattttacatttatattgtgctataggaaagtattttaaagaataagaatctgctacttaataaaatcactgactttttaaatattacactgctagtatacagtggacaatgaatcacaaactgatttttctctcctaaacaagggcactttccactacacagcactacatccttgaaaaacatggttctag

SEQ ID NO: 380846 - DNA, 562 bp, Homo sapiens
tcatttaaatgaataaactttagttttcttaaaaatactattttctataaactgggctgtcaattaaatagctgctagccacatgtagctatcaaatagttgaaatgtcaatagtatgagaaaataaaactttaataaaattaaaaatttttatacatastttaagtaccaggatacacatgcagggtgtgcaggtttgttacataggtaaacatgtgccatggtgctttgctgcacctatcaacccatcaccctccccccaacatctagaggccccagtgtgtgttattcccctccctgtgtccatgtgttctcagtgttcagctgccactcatgagtgagaatacgcagtgtttgattttctgttcctgcattagtttgctgaggataatggcttccagctccatccatgtccctgcaaaggatatgatcttgttcttttttatggctacatagcattccatggtgtatatatatgacatcttctttatccattctatcgttgatgggcatttggattgatttcatgtgtttcatggtgaaaccctgtctctactaaaaa

SEQ ID NO: 380847 - DNA, 616 bp, Homo sapiens
caaacacccaattgccatgtaattgtctggtattcttctcataagcaacatttccctgataatagtcagatattggattaacttcatgatccaatggcatagtttaagtggtatacctgtttcttatttcattgtgtgcactttgtcaagaataaactctagctttcaatatttataaacaagagctcagtaccacttaatatgataacaacacagaatgagggcaagggttgtcaaactgttacttaaaatatctgagaggcaatgtttggttaaagtgtggtgagatagtgttggtaacgttataaactggagaacagctttagagagtaaaaatgacattgatcctgaattccactggtrctactttaccacagatgaggtctgggggagaatgatttatgcatgtgatattatcttatataattctcacagaatcccaaaaggcatcgcttacaagtcacattttatgtgggatcatttaggcttagaaaatttacgtggtttgttcgaaaataaactagaagaagcagaattggaatttttgcccatatctgactccaagccccatgtttttatcatttaacaaaaatttaattcattgcatcagtgcata

SEQ ID NO: 380848 - DNA, 616 bp, Homo sapiens
caaacacccaattgccatgtaattgtctggtattcttctcataagcaacatttccctgataatagtcagatattggattaacttcatgatccaatggcatagtttaagtggtatacctgtttcttatttcattgtgtgcactttgtcaagaataaactctagctttcaatatttataaacaagagctcagtaccacttaatatgataacaacacagaatgagggcaagggttgtcaaactgttacttaaaatatctgagaggcaatgtttggttaaagtgtggtgagatagtgttggtaacgttataaactggagaacagctttagagagtaaaaatgacattgatcctgaattccactggtgctactttaccacagatgaggtctgggggagaatgatttatgcwtgtgatattatcttatataattctcacagaatcccaaaaggcatcgcttacaagtcacattttatgtgggatcatttaggcttagaaaatttacgtggtttgttcgaaaataaactagaagaagcagaattggaatttttgcccatatctgactccaagccccatgtttttatcatttaacaaaaatttaattcattgcatcagtgcata

SEQ ID NO: 380849 - DNA, 594 bp, Homo sapiens
acattgaacacagaagatttttagagtggtaaaactactctgtgkgatattataatggtcaatacacattattacacatttatccaaattcttagaatgtacaataacaagaacaaacccaactacaggctttggaagacaatgaagtgtcagcatagtctcatcaattgcaataaatgtcccactctgaggggttgttgataatggaagaggctatgcatgtggaggggctgagtatatacggataatccgtttgctttccattctgttttgctgtgattctaaaaccacttttttaagtctatttttaaaaaatgaaagatattccattctttctttgaaatttagtaagattttatttccttggattttgtctctagacttaccagaagaagtaacatactttagaaagggtaagctgtcctatttaaagcctattgtaagctctttatagagaagataactgagttaaataatttaaataaacatatacaatattagctccttggaagaagaattagtatctttaattaaatcataaacatttgtaaaaatatgacatatgcatttcaagttatcattcacaaacataaa

SEQ ID NO: 380850 - DNA, 594 bp, Homo sapiens
acattgaacacagaagatttttagagtggtaaaactactctgtgtgatattataatggtcaatacacattattacacatttatccaaattcttagaatgtacaataacaagaacaaacccaactacaggctttggaagacaatgaagtgtcagcatagtctcatcaattgcaataaatgtcccactctgaggggttgttgataatgsaagaggctatgcatgtggaggggctgagtatatacggataatccgtttgctttccattctgttttgctgtgattctaaaaccacttttttaagtctatttttaaaaaatgaaagatattccattctttctttgaaatttagtaagattttatttccttggattttgtctctagacttaccagaagaagtaacatactttagaaagggtaagctgtcctatttaaagcctattgtaagctctttatagagaagataactgagttaaataatttaaataaacatatacaatattagctccttggaagaagaattagtatctttaattaaatcataaacatttgtaaaaatatgacatatgcatttcaagttatcattcacaaacataaa

SEQ ID NO: 380851 - DNA, 558 bp, Homo sapiens
attccaatcaatacatttacattaaagtactactaacaatggttcaatattttactcacagtaaagttttagttaaacaaaaggcaatgagagagggagtgttttaatccaaagaaacaattctcaaatgctaaaattttagacatttttgccactatacacatatagaaacatggacctctacaattaacatcacgaagtgtatcacctattttgtctgcatgtgggctcatacttttaagaaaatgatactcaaattttagcacacacttgaagcatctgggcaacaaaatacagatagcttagttttactcccagagtttctgattcaatagatataagatgagtccaagaatttgaatttccaattatctccaatgctgctggttggtggccacactttcagaaacattaatctaactcagtgattttcatagttgtctgaaatcacctgaggagctctaaaaaagaaaaaaaaaaaacagatgccacccagagatttggaygtcatgtgcctgccatatgacctagaatcagtctttaaaaaaaaattctagg

SEQ ID NO: 380852 - DNA, 552 bp, Homo sapiens
actttaagtccccagaatagatcagtcaatcctattcyttaaaaaattatacagaggaatttacagtcacagggcagatgaagcaagtaaaggctgaagcaagaggtatggccagatgactagaaggtttaggtagccatataatttaatgcccaaacctgacactttgagaaataaaatgaagactatgaatacattcagacaacagatgtaaaccagaactgttctgcataaattggatgcctgattaccctatgtgaccaaaataacagttcattcctgactggtagtagaaggcaacaatgaaattggtctctgaagaaaaacagaggtttgcttcaaagagaacagtgcatttctgactggtagtagaaaccaacaaagaaattgatctctgaagcaaaatggaggtttgcttcaaagagaatgctagtgagagtaaactatggatcagcatggggacatggaagccattttatttgtaattaatgatgacagtacttccattttcaacgtttattctggatgaaagatgggacactttacaggcca

SEQ ID NO: 380853 - DNA, 533 bp, Homo sapiens
agtctcttttcaatagatacaaaatgtttcacatggtatatgatccatatatatatttgcaatttaggaaggtagatwtctgcagagagggaaatagtttatatatgaacaagtcttctagaaaatatgggcataaatttcataatttttcagatattgtctgtcttcacaacaaaattatgtaaaatgaacagatcaaatttcatttatgctattgagtcattataagattttgtataaacaagtcagtcctcagatattagtatgaaaaatcccagtttttatttaataaagcaattctgctttggggtctctttagctctcatttttttcctctctcctcaaataataattatactgtattgacaactttattcttattatgtgtagttatacaatacagaataaatgccttgcattttaattttaagcacttgaaatgtcccacttcaacagatagtttaataggaaaacaaaaactattttaaaaagcatttgagtgaataaaacaaagcaaaataagtatcattaca

SEQ ID NO: 380854 - DNA, 533 bp, Homo sapiens
agtctcttttcaatagatacaaaatgtttcacatggtatatgatccatatatatatttgcaatttaggaaggtagatttctgcagagagggaaatagtttatatatgaacaagtcttctagaaaatatgggcatamatttcataatttttcagatattgtctgtcttcacaacaaaattatgtaaaatgaacagatcaaatttcatttatgctattgagtcattataagattttgtataaacaagtcagtcctcagatattagtatgaaaaatcccagtttttatttaataaagcaattctgctttggggtctctttagctctcatttttttcctctctcctcaaataataattatactgtattgacaactttattcttattatgtgtagttatacaatacagaataaatgccttgcattttaattttaagcacttgaaatgtcccacttcaacagatagtttaataggaaaacaaaaactattttaaaaagcatttgagtgaataaaacaaagcaaaataagtatcattaca

SEQ ID NO: 380855 - DNA, 533 bp, Homo sapiens
agtctcttttcaatagatacaaaatgtttcacatggtatatgatccatatatatatttgcaatttaggaaggtagatttctgcagagagggaaatagtttatatatgaacaagtcttctagaaaatatgggcataaatttcataatttttcagatattgtctgtcttcacaacaaaattatgtaaaatgaacagatcaaatttcatttatgctattgagtcattatawgattttgtataaacaagtcagtcctcagatattagtatgaaaaatcccagtttttatttaataaagcaattctgctttggggtctctttagctctcatttttttcctctctcctcaaataataattatactgtattgacaactttattcttattatgtgtagttatacaatacagaataaatgccttgcattttaattttaagcacttgaaatgtcccacttcaacagatagtttaataggaaaacaaaaactattttaaaaagcatttgagtgaataaaacaaagcaaaataagtatcattaca

SEQ ID NO: 380856 - DNA, 566 bp, Homo sapiens
ttatataagtaaaaatgcttctgagagaaagaagcatcaattgtctgagtattttaacaggtgggccatgaattttcaaaataattctataaaatatattatggtatatgcatatgttatgttccatatggaaaatctgcctgtttgcatatcarccctattcaattttctcttataaatgaaaggccattccaaaccaactgaaatgtcaacactctttgacattttggcgacatacttagcagaggtacaaagacgccaaaacacatctataaaatccagtagaaggtttatttatgaaacattcagattttaagagttaggaagacaaagataaacagcagaaccaaattcccttgtgttcaagtacttgccattttgttcatccacattaaagactataatcctagtatatgttaaatctttcaaatttccagccttccattcctttgggttttgtaatgaaaagagcactgaactaaagacaaaacattagctagttgtgtgacactgagtataaaccataaaactacagcaatttctcctgatctatcaaatgcacattg

SEQ ID NO: 380857 - DNA, 566 bp, Homo sapiens
ttatataagtaaaaatgcttctgagagaaagaagcatcaattgtctgagtattttaacaggtgggccatgaattttcaaaataattctataaaatatattatggtatatgcatatgttatgttccatatggaaaatctgcctgtttgcatatcaaccctattcaattttctcttataaatgaaaggccattccaaaccaactgaaatgtcaacactctttgacattttggcgacatacttagcagaggtacaaagacgccaaaacacatctataaaatccagtagaaggtttatttatgaaacattcagattttaagagttaggaagacaaagataaacagcagaaccaaattcccttgtgttcaagtacttgccattttgttcatccacattaaagactataatcctagtatatgttaaatctttcaaatttccagccttccattcctttgggttttgtaatgaaaagagcactgaactaaagacaaaacattagctagttgtgtgacactgagyataaaccataaaactacagcaatttctcctgatctatcaaatgcacattg

SEQ ID NO: 380858 - DNA, 579 bp, Homo sapiens
gtcatctcctgctttttgttatagtattcatagccttcagatgtattcattgatcggggcctggaagttcrgaatggggtcttacacctcttcatattctcccacggtatgaaggacaatataaactacaaaatgagcaatctacacagttattgaattgaattgagacagtttttcatgcaaatgctaaaatataataatctcttttctgctaaagggcttacttgaagacactaaaaatgaatcaataatttcagttttgtaatagtcttattttagggattcctgccagttttttgtttttcaagggatgtctacagtctgctcttctaagggctttattcatcaagagggtgaacctgcagaaaatagtggaaccatttgacctcaacagtaaggtaccagatttttggatgcctatgcttgataagtgcgtgcttttgtttcaggaggtttttgaggccacacccttcctgttattaaaattttctacaacaggcttaattttaaggcaaattttcccttgagtatagtcttattgagaaatctctcatttatattaacttattaaaaagaccc

SEQ ID NO: 380859 - DNA, 579 bp, Homo sapiens
gtcatctcctgctttttgttatagtattcatagccttcagatgtattcattgatcggggcctggaagttcagaatggggtcttacacctcttcatattctcccayggtatgaaggacaatataaactacaaaatgagcaatctacacagttattgaattgaattgagacagtttttcatgcaaatgctaaaatataataatctcttttctgctaaagggcttacttgaagacactaaaaatgaatcaataatttcagttttgtaatagtcttattttagggattcctgccagttttttgtttttcaagggatgtctacagtctgctcttctaagggctttattcatcaagagggtgaacctgcagaaaatagtggaaccatttgacctcaacagtaaggtaccagatttttggatgcctatgcttgataagtgcgtgcttttgtttcaggaggtttttgaggccacacccttcctgttattaaaattttctacaacaggcttaattttaaggcaaattttcccttgagtatagtcttattgagaaatctctcatttatattaacttattaaaaagaccc

SEQ ID NO: 380860 - DNA, 581 bp, Homo sapiens
ggtaaaggagaaagccctagagtagaaatcaagaagaagacttttagttctggctctgacacaaattagctacatggtcttcagtatgtcttaaattttttttgtttcttcatctgcaagatgggattaagaaaagatctgttcaattggtggagttattttgcattttattgaagttaatacatatggaaatctttagaaatatataaaatgttctaaaattttgtggtctaacattaaatcaattctacttaaatttacttatatattgatcttctactatgttttaatttctgtgccactttcagttataattagatttataataatttccaccaatgaatgtggggtcaaggcaagattatgaccatgtgamtaacaaaaattctgatgttttagaaaaatctagttttcttccatcctgctccacagaatcagcctgtgcgcgtgtgcatgtatatatatgtgcatgtggtttttatgttgggaggtgtacactgagaaattacagcataaggatctacttaacttctattactgacaatgctggagcatgcccccagaaagaggtactagattca

SEQ ID NO: 380861 - DNA, 634 bp, Homo sapiens
ctgtcctgcttacctccattctctgtgggtggagttgtttccttgattaatcccaatgtgtccacctggatgtttcagatgatctagtatttactcacactttttctccctgtgaaatcagcacacactagttgcttctagtcagccagattgagaagcaacccaagttcttccacttattaagcaastcatttttttttcctggctttcagtttacatattgataaaacatatttatttaaatgttgttgaaagaatatactaagataatttaagaggcctagtatatttttcttcctttttctcaactgttagatattattaaagaaataaactgaagttgtttatacaacaaagaatgaaatgtgtataactagacagtctacattaataaaccacctcaaaaattcctaaacatattcttttcagctgtctttaaatccccatctgttagcagtggtgaatccatatgggtctgcagcaaacttgattctggcctcctagaaggaaagaattcagccaaggggcataaggtagaggagaaactgaagcaagttttagagcaggagtgaaagtttatccaaatgttttagtgcaggaacgaaagaaggtacacttggaagaggtccaagcc

SEQ ID NO: 380862 - DNA, 537 bp, Homo sapiens
caataactacagaaaacttctacaaccagtaagtgatttttacaagattgagatgcaaagagagtatccaaaagttaaatgtgtttaagtaygctagcaacaaatagttgccaaataaaatgaaaaccaaagttaacaaaagcatccaaaattttaaaacttactagaaaattcaataatgtttacatattagttctcccttatctacagattcagggcagttccagtcaaattatccaaatgatcagtgaaatgatttaaactttcatatcaaaatgaaagaatttaagccttcagtttgttctacataactcaaagtcaatgatctccagaattgatattcaaagagagaaaattttaaatgcacaataaaaagggcagacagagaacagcttaactgatgcctcattatcttttatctaaaatgaaggtaagttgtacaattatcaaattatttttatacacatggcctttgccctagcgcagaagaatcaaagattaatagaacactgtccctatcaacaaggaactcacagt

SEQ ID NO: 380863 - DNA, 588 bp, Homo sapiens
tactaattatgccatgatacagttgttttctgggatttctatgtatcacccttctgaggttgagttatgaaagagatattgaaatgaacatagataataaaagaaaaaatataaactaagcaatccttttagtagagaaytaatagaaagtggatggtattttatgtttagtgttgaaggtaggaacatttattctccactccccatgtttctaaaggaaagaagatgaagtccccccttttttttcttccttaggacaggtgtgaatgagaaaaacagttccagcctcttgcagctccttcttctactgcattccagaaagggggaagtaatatttttggctgatgagttaacagaaggaactgagatgctgagatccataggcagatggatataacattaatacaatgattactagaagtgtggccactactagtcaactttgcattcatctgcctattgagaatgtactatggtcagtactctgccttgagataaaatgccttttttttggaaacaggtcttgctttgtcactcaggctgagtgcagtagcatgatcacagctcactgcagccttgccccccggg

SEQ ID NO: 380864 - DNA, 588 bp, Homo sapiens
tactaattatgccatgatacagttgttttctgggatttctatgtatcacccttctgaggttgagttatgaaagagatattgaaatgaacatagataataaaagaaaaaatataaactaagcaatccttttagtagagaattaatagaaagtggatggtattttatgtttagtgttgaaggtaggaacatttattctccactccccatgtttctaaaggaaagaagatgaagtccccccttttttttcttccttargacaggtgtgaatgagaaaaacagttccagcctcttgcagctccttcttctactgcattccagaaagggggaagtaatatttttggctgatgagttaacagaaggaactgagatgctgagatccataggcagatggatataacattaatacaatgattactagaagtgtggccactactagtcaactttgcattcatctgcctattgagaatgtactatggtcagtactctgccttgagataaaatgccttttttttggaaacaggtcttgctttgtcactcaggctgagtgcagtagcatgatcacagctcactgcagccttgccccccggg

SEQ ID NO: 380865 - DNA, 588 bp, Homo sapiens
tactaattatgccatgatacagttgttttctgggatttctatgtatcacccttctgaggttgagttatgaaagagatattgaaatgaacatagataataaaagaaaaaatataaactaagcaatccttttagtagagaattaatagaaagtggatggtattttatgtttagtgttgaaggtaggaacatttattctccactccccatgtttctaaaggaaagaagatgaagtccccccttttttttcttccttaggacaggtgtgaatgagaaaaacagttccagcctcttgcagctccttcttctactgcattccagaaagggggaagtaatatttttggctgatgagttaacagaaggaactgagatgctgagatccataggcagatggatataacattaatacaatgattactagaagtgtggccactactagtcaactttgcattcatctgcctattgagaatgtactatggtcagtactctgccttgagataaaatgccttttttytggaaacaggtcttgctttgtcactcaggctgagtgcagtagcatgatcacagctcactgcagccttgccccccggg

SEQ ID NO: 380866 - DNA, 561 bp, Homo sapiens
tcacattcatatcatatctaaataattgactgtgggaccttgaattttcttgtttccacagtttccagctgggatattaggtcacaaaataacagatctcataacattattaaatattaattgtgcatgttaaattatctaaaatacatattttagtctaatagctaatgtttacttgtaaattaactcatcattttttatagttgtgattttaacatttacctttctctggtgcagatttctttttcaagcaacttataaataaagagyttgttatacagcatggctttgaatcaaatagtatgcagtacattgtaattattttccaggcaaatgtacatttcatagggtatgttggaaaatgttagagttagtgatatggcagttgtgagtgtgaggttgacctaacacaatagttaaggccatccttacagagtatcatagtcatggatggatgaagatatgctgaaactggattcaagaattttggcatgcattaatttcaatattaattaaaaggaaaaagactcaatgcaagtttcttatttcatagaatgatta

SEQ ID NO: 380867 - DNA, 541 bp, Homo sapiens
agactttacgtagtgaattaagcattagaaaactggatttcttgaaatacctgaagagatgtcagcaagacagttgactagagttacttggtgatcatccctcccacgccaaggaaagagatccaaacaatgaataaacaactccctgtgcagaayagaatccatggatagcaccatagagatggaagtgaggcattctgcctctgccacactgtctccccagtgagaatgagttcagagtcaggggtacttctcacgggggaaaacgtaagctgaagttcctcagtagtacctgttgctgcaacaaacaccagcaatccctgctacaagagagttacccaagtcctcacaggctccaagccagtttgttgattagctgggagttcatgcagctgcactgccccagagtaggagctcaccttgagcacttccccttcccatgacctaagaagctatggcttggcaccatcctgcaactggatttattactagagtgcatctaatcctgagggatagtagcaacagattctctcaatccgga

SEQ ID NO: 380868 - DNA, 631 bp, Homo sapiens
aaacaatgaataaacaactccctgtgcagaatagaatccatggatagcaccatagagatggaagtgaggcattctgcctctgccacactgtctccccagtgagaatgagttcagagtcaggggtacttctcacgggggaaaacgtaagctgaagttcctcagtagtacctgttgctgcaacaaacaccagcaatccctgctacaagagagttacccaagtcctcacaggctccaagccagtttgttgattagctgggagttcatgcagctgcactgccccagagtaggagctcaccttgagcacttccccttcccatgacctaagaagctatggcttggcaccatcctgcaactggatttattactagagtgcatctaatcctgagggatagtagcaacagattctctcaatccgkaagacccatgatcaatttaccacattcacattagtgtctgcagcactataaccccagtcacctgaagtctatgccataccaaacaattgaaatcccaatgtccaaacccatgcagcagcccccaacccaggaaatagatagatctgcatagcagcaaagccactaaccagctggccacctgccttacctgtgtgtacacatgctgcacagccaaa

SEQ ID NO: 380869 - DNA, 594 bp, Homo sapiens
ctgcaaataccacagcaactataaatagtaataattttttccagttttcctcaaaggaaacaatagtctgctattcgggcaattactcacatggaaaaagggaatacctagacattttaaggactgttgtacattggagtctatgttaataatgatatccagagagctaaagcaatatcaccaccctcctgttaagagtgagggcaaatggcgatrgggcaatgaatgaagaaaagttctggcttaaaatggatccagttttcaactaggctatccagttgcaatcccatcagtcctcaaatatgtaattgggatcgacatgctttacagtgggtagtgtaactcccacattaggtctttagcctttgaggtagtagctatcattgtgggagagaccaagtggaaacctttgaaattcttcccttacccaggctttgaagtaaataaaaatcaatattgtatcttgggggatagatctgggggttggaaattagtgattttaaggatctaagcatacaatggtgattttcctcattatatctatgcttaattcaccagaatatccccttcaggaacaggtggatcctggaaaca

SEQ ID NO: 380870 - DNA, 635 bp, Homo sapiens
agggagggaagagattcaaatagatgaagcgacaggggatgtttttagggatgttttaactgttctgtatgatactgtaacagtgacatgacactatgtatttgtcaaaacttgtagatccttacagcacaaagagcaaatcttaatgtatgcaaacaaaggaatcatttaggaagttggaaattccagaatgaaacttagactgtgttgctcagagttattcagagaaatagaccactaggagatatacatataggtaaagacaaaaagagagagatttatttaaggaattatttgctcacatgattatggaggctgagaagtcccaagatctgcagtcagaaaactggaaacccaagaaggccagtggtataatttctgtcygaatttgaaggcccaagaaacaagagagccagtggcctaagttccagtaaaaatgctggcagtctcaagacctaacaagagccaatatttcaggccaaaaaaaaaaaaaagaccaatgtcctagctcaaataatcaagcaggaggaattccctcctgctcatactttttcttctaatgaggtcttcagtgaggtctatgtcccttagaaagggaagtctgctttgttcaatctaccaattcaaatattaat

SEQ ID NO: 380871 - DNA, 560 bp, Homo sapiens
gatctggttcttttttatggctgcatagtattccatggtgtatatgcaccacattatctttatccaatmtgtcattaatcagcatttaggttgatttcatgtatttgctattgtgaatagcgctgcaatgaacatttgtgtgcatgtgtctttatggcagaatgatttatattcctctgagtatatacccagtaatgagattgctgggtcaaatgttagttctgcttttagctctttgaagaatcgctataccgctttccacagtggcttgccggatctgttattttttgagttattattatagtaatagcccttctgactggtgtgagatggtatctcattgtggttttgatttgcatttctgtagtgatctgtgatatttagcttttttaatatgttttttggccacatgcatgtcttcttttgaaaagtgtcctttgcccacttttaaaggggctatttgcttttctcttgtaaatttgtttaagttccttatagacactagatattagacctttgtcagatgcacagcttgcaaaagttttctcacattccgtaca

SEQ ID NO: 380872 - DNA, 628 bp, Homo sapiens
tgcctatttttgtaccagtaccacatagttttggttactgtacccctgtagtatagtttgaagatgggtaacgtgatgcctccagcttttatgaacaagcaatactggtagagattaaaaaaaaaaagcagatactggccagagaaacaatgacagcacattgtgaagcacatgatggaaatgcttatattttgtctaagcctttagttaatgrtatttattgatgtctcataatattccaggcactgtccttcatgtttttctcatgctcccctcactataattctacaaggtgctgtattgtttcctgaggctgctgtaacaaattaccactaacttagtggtttcaaacaataagaactcactctcttgcagttctagaagacagaagtctgaaatcaaaatgttggcaggatcatcctctctctgaaggctggaggtaagagtccttcactaacttttcaagtgtctagtggctccaggcattctgtgccttgcggctgcataactccagtctctgccccatcttcatgtaaccttctcctcttttgtgtctgtgtcttttctatctctttcagggacagtgttattggatttagagtcatttatataatactgaattatctca

SEQ ID NO: 380873 - DNA, 626 bp, Homo sapiens
tgggctatgttttttccagtttttcagtgttgttgttcatggcattcatcatcacctgatattagattatagattgattttgttttcttacgtattttatctatcttctatcctctactaagctcaatgataggaaatttattcaccaatggtaggcacacaataaatgtttggttaaataaataaatgggtgactacattagagtaatgtagagaaacattatactaaaccttcctaaagtcatacaggattcttgaggctgaaactgcttttccataagggatttttaggattagccttaatgaagaactgtgtaatttcaaaatttattcycactgtagaatcctttgttatcagtataagtcagagaaaaataaaatttcttttctatgccaggtgaaaaaaaattgactaagtaaattagtagaacaaagaaaatttctaaaaggagatattgtgagagatatcattttgaaggaatgatttgcatttacatatatatcaggatacctgacgtattagacacaaatcatttttttgttaaggtatgaactctagatatatctgacatatactttgtgagcctggttttgttattgcatttattagaaaataataaagtttt

SEQ ID NO: 380874 - DNA, 626 bp, Homo sapiens
tgggctatgttttttccagtttttcagtgttgttgttcatggcattcatcatcacctgatattagattatagattgattttgttttcttacgtattttatctatcttctatcctctactaagctcaatgataggaaatttattcaccaatggtaggcacacaataaatgtttggttaaataaataaatgggtgactacattagagtaatgtagagaaacattatactaaaccttcctaaagtcatacaggattcttgaggctgaaactgcttttccataagggatttttaggattagccttaatgaagaactgtgtaatttcaaaatttattctcactgtagaatcctttgttatcagtataagtcagagaaaaataaaatttcttttctatgccaggtgaaaaaaaawtgactaagtaaattagtagaacaaagaaaatttctaaaaggagatattgtgagagatatcattttgaaggaatgatttgcatttacatatatatcaggatacctgacgtattagacacaaatcatttttttgttaaggtatgaactctagatatatctgacatatactttgtgagcctggttttgttattgcatttattagaaaataataaagtttt

SEQ ID NO: 380875 - DNA, 626 bp, Homo sapiens
tgggctatgttttttccagtttttcagtgttgttgttcatggcattcatcatcacctgatattagattatagattgattttgttttcttacgtattttatctatcttctatcctctactaagctcaatgataggaaatttattcaccaatggtaggcacacaataaatgtttggttaaataaataaatgggtgactacattagagtaatgtagagaaacattatactaaaccttcctaaagtcatacaggattcttgaggctgaaactgcttttccataagggatttttaggattagccttaatgaagaactgtgtaatttcaaaatttattctcactgtagaatcctttgttatcagtataagtcagagaaaaataaaatttcttttctatgccaggtgaaaaaaaattgactaagtaaattagtagracaaagaaaatttctaaaaggagatattgtgagagatatcattttgaaggaatgatttgcatttacatatatatcaggatacctgacgtattagacacaaatcatttttttgttaaggtatgaactctagatatatctgacatatactttgtgagcctggttttgttattgcatttattagaaaataataaagtttt

SEQ ID NO: 380876 - DNA, 245 bp, Homo sapiens
gtattaaggttttaggtcacacacacaaacacactgggtggcttaaaaaaaccaaaatatactgtaaccattctggaggctagaagtccgaaatcaaagagtcagcagagccgagctctctctggagattctagaggagaatctacccttgcctcttcctggcttcatgaggttgtacaggaacatgtttgatgttctttggcttatagytgcataagtacaatatctacctccatcttcacatg

SEQ ID NO: 380877 - DNA, 523 bp, Homo sapiens
taaataaatgatttataaattaacatcaatttaaattaaatgtctaaaactcattaacataaacaagcaatttcagtaccattcagccttcactatctgaagcagcttttatgattatctttccccaggtccgtgacacctcctgcaatttctccctaaacatttgacctatggtccaggaatgtagtctcttgtgtgttacattttcacctgatcaattttaggcctataatgatttaattaaattattgattattcagtggtctcttcattcaatagcttgttctatttatatgtgctggagtactacttctgcagtgagcattctaagataattgagaaagaagaaaagatgcaatctaaagyagaaagactttttgtctttctgacatgtatttaaattcactggtaattttctttcagaatgagtgatcaatgtgtatagctcttagtatcctttaaacttggccactcaatatgcaccccccaattttgtatttatagccaatgcccaagtagtcag

SEQ ID NO: 380878 - DNA, 480 bp, Homo sapiens
actgtccataattttataatcaggatattgagatttggatcttrtaccaaagctacttgtctccaaagatcatgcttttcccatgatgctttactgctcctatgctatagttaactggactacttatgttggttcattgaagcaactttattcctaaacaatgtttgaggcccactttagtatgcttactctccagtcgtttttgttaaagctgttcccacttctacatgaaattttctaaatcagagttagatgatttttaaggaaaggtacaacaaaatcaagaacatagggaagttctatctgatagtctgcttgcttcttcatttagtttttaaaatccttaaagtcatgtactagtttttaatgtctaaatctttactaaaatttagaataatctctggcacagatgcatacaaagcatttatttagtggatgctatgtgccaggcataccattaggacctttcttgcacatttt

SEQ ID NO: 380879 - DNA, 655 bp, Homo sapiens
actgactaaagtgttacttctgatacaaattattttatattttgttaaagaaatatgataaattcattataaaatcacttcctaaagtaacgacattttcattgtaattctcatagccatattcaaaatagatgtgaacaaatttgtatatttaatagaaaattaaacaagcttaagtattttgaaccaatgaatgaacagagtatctgtgccttataaagatacagttaatttacctacacacatttggaaaaatgcgttttgagagaagggggtcatcttaattttaaatatttcttgttgccacaatgaaacatattgaagctatacaaagtgaaaagcaattaacttttcataaaaatactcaaaaatggtaggatctaaaaataaatgaatataaatttgtgattataaagtatcatagataatacccttttctcttattctttgattatcactatgaygtattgtttgggatttttagaaatgcaataattagtgtgatgcatgaatcaagagaacaaaaacactatgcatttttattgactatttaaagtaaaacagaaattatggatgtattagaagagattagtgacctacagaatatcaggtgccatagcaaattaactaacagacttggtttgtattacaaaac

SEQ ID NO: 380880 - DNA, 551 bp, Homo sapiens
tttaaaaagaaaattttatatacaaagactgtttgatataaggaagtaggacacactcaaaaactgatttttaaaaaccaccaaaaccacaacaaaaagccttatagtggagcggagtactgaaggaggatamtacaaggtgggctgaaaccctagtcaagaccagttagacaagacttgtaggccatgttaaaaactatataataacaacagtgaacaccattgagaggttttaaatggaattctactgctctaagaaaataatttggcacaatcctgacatgaaagtaagaatgcaagtggcatattcagagaaggggaactaggtgaatataactagaggaagttggagatttggagatgaccaagacatccttgacattcctctcccagcaagttgagaaaacttttagacaagcttcttactgattttaggcccctggccaatttttttagagcacttatttaaaaaacctgtcattgtaagttctttctctgccccttggacatgtgaatatttttaaaagctccttgtcaatttttttcaatgc

SEQ ID NO: 380881 - DNA, 544 bp, Homo sapiens
gagtggatccacatgggcacacattatatccaaaaaggtgctactataatagtgtgggtttatgtcaatctgaacacactcctacctaaaacctaaaattttagccatgacaaatggccattgaatatggtagcagagaatacaatggggaaaggaaaatattaagtaacaaagcagtactgctgcaatccctgcatcataaggtctaatttggtaatcagaatttccctctactgcaaagtacatgcyttctgttatttctggcatcacctctgcaggaagtgtttatacacctactgggttaaaccaaaacttcattcttgtaatgcctgagtccttggtgatcctgtctttattggcctgcttaaattttctattgatcaggatggttgggcaagaaagtactaggaagcgcctcaatgaatcctatagatcctaggcatggttctaattgtcccattgatggcagtggcaggccctctggagtggctgctgctatcacgccagctacagcagagaggcatagccagaactgcatgctcca

SEQ ID NO: 380882 - DNA, 610 bp, Homo sapiens
gatgaaaccccgtctatattaaaattcaaaaattagccaggtatggtggcatgcacctgtaatcccagctactcgggaggctgagacaggagaatcgcttgaatctgggaggcagaggttgcagtgagccaagatcacaccattgcattccagcctgggcaacaagagtgaaactctgactcaaaaaaacaaaaacaaaaaagaaaacaaaaaaaacagcaacaaaaaaccaccaaccacctacagtattagttggggagacaaattatgcaccttataaaatagctaaaagactatttttagaaaattagatattcattaaaatatcataatatgcactttatttctgaacgcttaaattgaagtagcaaaaatattagagaaccaatcaaaggttttcagcaataaagtggcattattaagcttaggaagatcaatctgctgagaactttttgaagaacttggaggcragactaggaaacagcaggtagaagaattatgaagtatgatgtcatatacggaaaatgcccatctttccttcctgagagatgacaaggaatgaaaaagagaacagaagacaatatgcaggtaaaatacacaagatttggcc

SEQ ID NO: 380883 - DNA, 521 bp, Homo sapiens
actttaactgccaatcaaaaatacctcatatttttcaagtttagtttctacttataaatttgtctctcttggtgtaatgtacaattagttaaattacctctcgctcctcctcaagtgggcctctggctacatggttaaggatggagttgtttatgtgttatgatgtctgtgctttttcctctggatgcttgccatcctgtgctatgaaatgtatgtttgggccccttggctcccttcactgaggtttgctgaggtatagcttgtaaccttagaatttattcggcccaggtagggctttttgcccttcttttgctaaatggttttacctcagctcttgctagtagtacrctcccacctaataccaaaatgtcttgcattcagtccttggccaaggctttcttttccaaattaagggcaatctctccatttgccatgctccctcatggtcccaattttgattgttaactaatgtgattccttttcctatgtgatatcatcccccacatcatcccccaaggagt

SEQ ID NO: 380884 - DNA, 578 bp, Homo sapiens
taagtgcatatagcaccttcaactgaaatattgaggttcttgcataaagagtgattagggaaacaactcaacccacagaaaacgaagaaaagcaaggtggggcgaaggcccacacaggagcaaggtggagccaagggaacccccacctccagccaagggaagtggtaagtaattgtgggaccgtgggaggaatccacgcttcttccacrgatctttgcaacccatggataaggagatccccttgtgatcccatgccaccaggactatggggcagacacatagagcagtgtgaagtcttggcagaacagatgctcaggcaggtacaaagacccaggaactttacatacttcagccctgggatccccaaaaaacatgtctgcaactcaggcaatgggaggtctacacatactcctaggaaggtggacagaatccagggagctgggcagcatcattctgcaggccccacttccactgcaattcaccagataaaaccccctggcttggaattccaaccagccaccagcaacagggtgtagcctgcctgaaattggatggagcccccatggggaggggcaggc

SEQ ID NO: 380885 - DNA, 465 bp, Homo sapiens
gggtcaattctccaaaaagaaataacaatctttaatgtgtatgcacctaacaacagcattaaactatgtaaggcagggccaggtgcagtggctcatgccactttgggaggctgaggcaggtggatcacttgagggcaggagttcaagaccagcctggtcaacatggcgaaaccctgtctctaccaaaaaaaaaatacaaaaattagctgggcatagtggtgcatgcctataatcccagctacttgggatgctgagtcatgagaattacttgagcctgagaggcagaggttgcagtgagctgagattgtgcagctgcactgtccaacctgagtgacagaatgagactctgtctcaaaatgaaacaaaacaaaaacaaaactctgtgaggcaaaaactaacagaactgcagtagaaatccactcttatagttgaagacttcaasccccctcaacccaggaggcagag

SEQ ID NO: 380886 - DNA, 587 bp, Homo sapiens
cattctaaatcctttgtggtcatttcaacaatgtttatagcattttcagtaggagtagattccatctcaagaaacacttcctttgttcatccataagaagcaactcctcatttgttcaagttttataatgagattgcaataattcagtcacatcctcaggctccgcttctaattctagttgttttgctatttccactacattttcagtaattttctccactgaagtcttgaacccctcaaagtcatccatgaatgttgtactcaacgtctcttctaaactcctgataatgttgatagtttaacatcctcccatgaatcatgaatgytcctaatggcatctagaatagtgaatcctttccagaaggctttcaatttagtttgcccagatccgtcagaggaatcatatctatggcagctataaccttacaagatatatttcttgtcagaatacaaccacaacagttatcaattgagcttgcatatggaggcacttcctgctgccgcaagacaattacaatagtaacatcaaagattagtaatcacagatcaccataacagttataataataatgaaatgtttgaaatat

SEQ ID NO: 380887 - DNA, 534 bp, Homo sapiens
aatccccttgtacgtcttcatcagagctcttgagtaaccaggtacattgtcagtgagcagtaatatttgaaaggaatcattttttctgaaaagtaggtctcaacagtagacttaaaatatttagtaaaccatgctataaacaaatgtgctgtcatccaggctttgttgttccatttctagggtacaggcagggtaggtttagcataaatcttatggatgccctagggtttttggaatrgtaaattagcattggcttcaacccaaagttactagctgcattagaccccaacaacgtagcctgttctttgaagcttttgaaaccaggcattgacttctttctagctaggaaagtcctagatagcatcatcttacaatagaaggttgtttcatctacattgaaaatctgttgtttggtgtagccaccttcaccaatgacttagctggatcttctgaataacctgctgcagtttatacatcagcacttgctgcttctcgttgcacttttatgttatagagatggcttctttccttaaa

SEQ ID NO: 380888 - DNA, 534 bp, Homo sapiens
aatccccttgtacgtcttcatcagagctcttgagtaaccaggtacattgtcagtgagcagtaatatttgaaaggaatcattttttctgaaaagtaggtctcaacagtagacttaaaatatttagtaaaccatgctataaacaaatgtgctgtcatccaggctttgttgttccatttctagggtacaggcagggtaggtttagcataaatcttatggatgccctagggtttttggaatagtaaattagcattggcttcaacccaaagttacyagctgcattagaccccaacaacgtagcctgttctttgaagcttttgaaaccaggcattgacttctttctagctaggaaagtcctagatagcatcatcttacaatagaaggttgtttcatctacattgaaaatctgttgtttggtgtagccaccttcaccaatgacttagctggatcttctgaataacctgctgcagtttatacatcagcacttgctgcttctcgttgcacttttatgttatagagatggcttctttccttaaa

SEQ ID NO: 380889 - DNA, 580 bp, Homo sapiens
ttcatgtttttttgaatctttgcaaagcaagctttacaaacaatgtcccattaccactaaacactccagtctatattttcaaacaacaaagatattctcctaaaaattggcatacagccctccaaatcaggaagccaatatcaatataacattgctacccaatccacaaaccccattcagtgtcaccagctgtcccartggtacctcttctttctttctggcccagtgtcctatccacgaacatgtgatgcgtttagtagttatgtttcttcagactcattcaatctgaagcagtcctttagtctttctcttgacagtgttaaagagtacagaccttgattatacaggatttccctcagccttgatgtgcctgatgtttacttgtgaccagacttatgtcacacattcttggcaacatcaccacctcccatcactggtgatgttaactttgatcttctgatcatattggtgcccgccagacttctccacattaaagtcattattaatgaccttttgtaagtgattagtattttgtggagaactttccaagaatacatcagtatattcttatctaacagtc

SEQ ID NO: 380890 - DNA, 545 bp, Homo sapiens
ttgttcctctgcccctctgtatttctagttatttgaagttaactataagaaaatgattagatttaggtttaatatttgttggcaagaacatctctcaggtcatgccatgtgaaatgtagcatggttttcactgttttatgaagttcaaagaaaagttcactttatctcaaaatcagaagtattgtcctttgacaatatgacattgaacaaggaagtcctaccatactgactgttctgtcataaacaattttcataggattatgttaaggtaactacttttactggttttcaacttttagaatcaatgtatgagacaaggctgcattgtgaatttgctacagaatatggttatcaagtttgtcatatagaatttggagaagttggctagggaaagtggaaaagaccttagtatctttaacagcaaatcagggacatcaggtttactagttttagtgcagtatattgagatttaawttatgaatgtttttgtcctaaatttgttaaatgcacaaaactgcccccaaattgttttgatataatgaaat

SEQ ID NO: 380891 - DNA, 368 bp, Homo sapiens
tacctcataccttttagaagggccattataaaaaagatgaaaggcaacaagtgttggagagggagggcatggagaaaagggaatccttgcatgctgttggtgggaatgtaaattagtacaaccattatggagaacagtatggaggttcctaaaaaaattaaaaatagaactagctcagtatgtcaaagagatgtttgcactctcatgttccctgcagcattattcacaatagtcaagacagagaatcaacctaattgtccaaaaatggataaagaaaatgtggatatgtacaatgtggtatatttatacaatataaaatacaattccaytttatatacaatggaatactattcagccttaaaaaaaga

SEQ ID NO: 380892 - DNA, 617 bp, Homo sapiens
gctgggtgttgtggctcatgcctgcagtcccacctacttgggaggctgaggcaggaggactgcttgagcccaggatgttgagcctgcagtgagccatgatcacaccactccactccagcctaggcaacatagcaagaccctgtctcaaaaaaaaatcttatgtgtgtatatcagagattaagatgactatttcctcttttttagtttcaytgtacatattaaattaatatacagttaatgacctaaaataattcaaagctagctgttagagataccaagatgaatataagaggacagaggaaaagatacttctgcccccattctctcagaattcactacaaaacactaaagaaaaacaagaaatggaaacactaactctatctgtggagaacctaagagctaaaggtacctgactgagcagtcttcacacaggccatgcaccccacagaaccctgaggagactcaggagctggaggtgccagagtggcagaggcaagcctattctgtggggtagttataccttcaggtccctgtctcttcttccacaactgtaggagatgagagagttagtctttagagaaattaaaccaaagaggccctggactgggaatgccaaa

SEQ ID NO: 380893 - DNA, 617 bp, Homo sapiens
gctgggtgttgtggctcatgcctgcagtcccacctacttgggaggctgaggcaggaggactgcttgagcccaggatgttgagcctgcagtgagccatgatcacaccactccactccagcctaggcaacatagcaagaccctgtctcaaaaaaaaatcttatgtgtgtatatcagagattaagatgactatttcctcttttttagtttcactgtacatattaaattaatatacagttaatgacctaaaataattcaaagctagctgttagagataccaagatgaatataagaggacagaggaaaagatacttctgcccccattctctcagaattcactacaaaacactaaagaaaaacaagaaatggaaacactaactctatctgtggagaacctaagagctaaaggtacctgactgagcagtcttcacacaggccatgcaccccacagaaccctgaggagactcaggagctggaggtgccagagtggcagaggcaagcctatyctgtggggtagttataccttcaggtccctgtctcttcttccacaactgtaggagatgagagagttagtctttagagaaattaaaccaaagaggccctggactgggaatgccaaa

SEQ ID NO: 380894 - DNA, 579 bp, Homo sapiens
atcttgtatagacatgtaacgtcatgattttcttgtgtcttgctttgcagatttaagcagctccagggtgagatamatacggctctcgtgccctcccctctctgaacctagcttgcaccttgctcaaagcagcactcaggaaacgtttgttggcgtggtttttggctttatctgaacagcaccttcacggagtgattccactaaaactctcgacatggtggcggggacaagacctcagggctggccatcactgccatcagtgtggttttctgggtcatcatttgaaacaggatgttcttgcatttatgtaatgatgtacccattaaaactccttgtgagtagaaaagttttaatgacttctgggagggagggtggttttctaagttcaggtttgatgggagcgagaggcagctcaggaaagcgtctgcggacgcgccagccagcggctgggccaaatctggaatggcagatgctaaacaccgccaccgtcgctaatggtgacagttttctcttagtgttaccactagggggcacattgacttaagctgagttcttgacattaagctgagctcttgacac

SEQ ID NO: 380895 - DNA, 579 bp, Homo sapiens
atcttgtatagacatgtaacgtcatgattttcttgtgtcttgctttgcagatttaagcagctccagggtgagatacatacggctctcgtgccctcccctctctgaacctagcttgcaccttgctcaaagcagcactcaggaaacgtttgttggcgtggtttttggctttatctgaacagcaccttcacggagtgattccactaaaactctcgacatggtggcggggacaagacctcagggctggccatcactgccatcagtgtggttttctgggtcatcatttgaaacaggatgttcttgcatttatgtaatgatgtacccattaaaactccttgtgagtagaaaagttttaatgacttctgggagggagggtggttttctaagttcaggtttgatgggagcgagaggcagctcaggaaagcgtctgcggacgcgccagccrgcggctgggccaaatctggaatggcagatgctaaacaccgccaccgtcgctaatggtgacagttttctcttagtgttaccactagggggcacattgacttaagctgagttcttgacattaagctgagctcttgacac

SEQ ID NO: 380896 - DNA, 579 bp, Homo sapiens
atcttgtatagacatgtaacgtcatgattttcttgtgtcttgctttgcagatttaagcagctccagggtgagatacatacggctctcgtgccctcccctctctgaacctagcttgcaccttgctcaaagcagcactcaggaaacgtttgttggcgtggtttttggctttatctgaacagcaccttcacggagtgattccactaaaactctcgacatggtggcggggacaagacctcagggctggccatcactgccatcagtgtggttttctgggtcatcatttgaaacaggatgttcttgcatttatgtaatgatgtacccattaaaactccttgtgagtagaaaagttttaatgacttctgggagggagggtggttttctaagttcaggtttgatgggagcgagaggcagctcaggaaagcgtctgcggacgcgccagccagcggctgggccaaatctggaatggcagatgctaaacaccgccaccgtcgctaatggtgacagttttctcttagtgttaccactagggggcacattgacttaagctgagytcttgacattaagctgagctcttgacac

SEQ ID NO: 380897 - DNA, 516 bp, Homo sapiens
ggaggccccttggaccccacgctcccctaagcatsaggtgtgcgggtggttccccttctccacaccccagcctttcctgatgcctttggctctgccctcaccactgcctccatttccacagcaggacactctggagaggtgaggtgggaggagggagccccttcccgcgcagagctcagcccgtcctatgagcatagccggtcctcttcagatccggggactcagggtccagcacatcttgccccacagcctgggacagggtcagggctgaagttgctgcacccggggacctagggcctcatttaactcaccccattcccaaagggagaagccttgttccagtgcccccagccctgggagcctcgtgttctgtgagctcaggagggccagcgttctgactgggaggcaggactggactcttaggctgagcaggactaagttctgtggccaaggagcccgggcgttccgggccaggccagcctgcacagaggctggggcgggacacggggcggcagt

SEQ ID NO: 380898 - DNA, 632 bp, Homo sapiens
ctgaaacacatctgctcctcctgcctctaggacagttctcctcaaatcttctcttctccagaggcccatgcccagccccgaccactgtggcttagagcacgcgattactccctgggtcagctgggagggcaggggctgctgtggattgtgaagcctcacacaccccagcccacctctccccaatcggccccatcaggggcacaaagtctctatckgtccagctagtctggcacacagagtggcccagggcagagaaactggcccagagtgcactgctaggccccgactcttcagtttgcctcaagccagatgaacttatctatcgccatgttatctgaaggccaaatttctatttctgccatttaagattaacatttatggttactatttttataattccacctcgaacatttttacatgaatcctttcaccagataacggcggcagagtggattttctggtggtttcggccccagtcacctggaaaatccttccgtctccacttcacctctgccccccagactgactccgtgtcatttcagaaagagaacatcagaggacgaggacctaaaaataagctcaaagtcttggcaaatgcttttctctcacaagcttccccttcagcttcaaaa

SEQ ID NO: 380899 - DNA, 632 bp, Homo sapiens
ctgaaacacatctgctcctcctgcctctaggacagttctcctcaaatcttctcttctccagaggcccatgcccagccccgaccactgtggcttagagcacgcgattactccctgggtcagctgggagggcaggggctgctgtggattgtgaagcctcacacaccccagcccacctctccccaatcggccccatcaggggcacaaagtctctatctgtccagctagtctggcacacagagtggcccagggcagagaaactggcccagagtgcactgctaggccccgactcttcagtttgcctcaagccagatgaacttatctatcgccatgttatctgaaggccaaatttctatttctgccatttaagattaacatttatggttactatttttataattccacctcgaacatttttacatgaatcctttcaccagataacggcggcagagtggattttctggtggtttcggccccagtcacctggaaaatccttccgtctccacttcacctctgcccccsagactgactccgtgtcatttcagaaagagaacatcagaggacgaggacctaaaaataagctcaaagtcttggcaaatgcttttctctcacaagcttccccttcagcttcaaaa

SEQ ID NO: 380900 - DNA, 616 bp, Homo sapiens
atcacaaaacagcactaggggggatgttgcaaaatcattagaaaccacccccatgatccaatcacctcccaccaggccccacctccaacactggggattccaacagttcaacatgagatttgagtggagatacagagccaaactatctgacttggtaaaagtcagaagtgaggtttgtgggtgaggggaaagggattgtttggctgagtcatttatttttgcatttgggtgtctttcataccccagtttggtcgcccaactcacattgaagcytaagacccagctgatttctcttcatttctgcaaagttactgtaccatggcaggccaacgaacatgtcaaaggaggagcagcagagctggccccggggtaaggaagcttccacagctttatgttcacttacaaaggttatatttctcttggaatttcaggtaatcagggctcccaggtagagctggctttgtcactgaaacaccaagggtttggtctaggtcttaatgctcgctgcacagatggccaatcactgagatgagtattgccaaggaagaaagctttaatagggtgctgcagccgaggagatgggagatcagtctcaaatccatctccctgactgact

SEQ ID NO: 380901 - DNA, 525 bp, Homo sapiens
ctgatcctcaaacttttttttggcaatttttttattactgtttcaatctcactacttgttattgctccattcagagtttctatttcttcctgatataacctaggacagttgtatatttcctggaatttatccatctcctgtagattttgtaatttgtgtgcataaaggtgttcatagtagccctaaatgatcttttgtatttctgtggtatcggttgtaatgtytcccattttgtttctaattgagcttacttggatcttctattttcttgcttaatcttgctaatggtgtgtcaaatttgttaatcttttcaaagaatcaactttttgttttgtttgtcttttatagttttttgtttcaatttcatttagttctgctctgatctttgttgttgattttcttcagctgggtttgggattggtttgttcttgtttctctagttccttgagatgtgaccttagattgtctatttgtgcttttttaggctttttgatatagacatttaatgctatgaactttcctctt

SEQ ID NO: 380902 - DNA, 429 bp, Homo sapiens
caaaagtatttcaacatacttagatacaccatgtgactgaagtaaacttttatgactaagaatgttttcatctgagcgcaatcctttcccaaaacattgaaagtaaaaaaaaaaaaaaaaaaaacttgtctaaccaaatwtaaaaccagaagatagatttttaaaagtagatatttctgaaactacattgttagcagtttaatcatagcaaatactatttacatttaagcataaataaatgtaaattatttatattccaatccactcaaaatacaaacatatctaattaaaaagccaccttttttctgttttctatactgacatctttcttctggcccttacttgacattcctcaatgcaaaacaaatatgaccttcacacttgcagatgcatggatccaagggaagacttagcaagtccaataacccc

SEQ ID NO: 380903 - DNA, 586 bp, Homo sapiens
ggcatttagcccatttacattcaaggttattatcgatatatgcagatttaatgcagtcattgtgtttttagctggttattaygcagacttctttatgtgattgctttataatgttgttggtttagtggccagtaaaaatctttcctttccatatttagcactctcttcgggacctcttataaagcagatttgttggtagtgaattcccttaacatttgcttatctgaaaaggagcttatttctctttcacttatgaagtttagtttggctggatattaattcttgtttggaaattcctttaagaatgctgaatataggctgccagtctcttctgggttgtagggcttttgctggaaggtctgctggtaaattggtgaggtttcctttgtaggtgactgcctcttctctctagctgccattaatgtttttctttcatgtcaaccttggagaatctgatgactatgtgacttggatatggtcttcttgtatagtattttgcagttcttcacagttcctgaatttgaatgttggcctctctagtgagggtgggtaatttttcacaaacaatattctgaaatgttttcca

SEQ ID NO: 380904 - DNA, 586 bp, Homo sapiens
ggcatttagcccatttacattcaaggttattatcgatatatgcagatttaatgcagtcattgtgtttttagctggttattatgcagacttctttatgtgattgctttataatgttgttggtttagtggccagtaaaaatctttcctttccatatttagcactctcttcgggacctcttataaagcagatttgttggtagtgaattcmcttaacatttgcttatctgaaaaggagcttatttctctttcacttatgaagtttagtttggctggatattaattcttgtttggaaattcctttaagaatgctgaatataggctgccagtctcttctgggttgtagggcttttgctggaaggtctgctggtaaattggtgaggtttcctttgtaggtgactgcctcttctctctagctgccattaatgtttttctttcatgtcaaccttggagaatctgatgactatgtgacttggatatggtcttcttgtatagtattttgcagttcttcacagttcctgaatttgaatgttggcctctctagtgagggtgggtaatttttcacaaacaatattctgaaatgttttcca

SEQ ID NO: 380905 - DNA, 586 bp, Homo sapiens
ggcatttagcccatttacattcaaggttattatcgatatatgcagatttaatgcagtcattgtgtttttagctggttattatgcagacttctttatgtgattgctttataatgttgttggtttagtggccagtaaaaatctttcctttccatatttagcactctcttcgggacctcttataaagcagatttgttggtagtgaattcccttaacatttgcttatctgaaaaggagcttatttctctttcacttatgaagtttagtttrgctggatattaattcttgtttggaaattcctttaagaatgctgaatataggctgccagtctcttctgggttgtagggcttttgctggaaggtctgctggtaaattggtgaggtttcctttgtaggtgactgcctcttctctctagctgccattaatgtttttctttcatgtcaaccttggagaatctgatgactatgtgacttggatatggtcttcttgtatagtattttgcagttcttcacagttcctgaatttgaatgttggcctctctagtgagggtgggtaatttttcacaaacaatattctgaaatgttttcca

SEQ ID NO: 380906 - DNA, 583 bp, Homo sapiens
tgaagcccacatggggccctacaggccttgaatccctgagtagtccagtgccatctgctgtagccccaacagaggctgcagccatggtgctaagaagcagccagactgccccactgctcctcagtaggcaaggcttgccagcatgggtttccagcacagtggccccaccccaacctgaacctgggtggtcatggctctgagtttctccaggaagcacccaggctgcagactatgtgacctcctatccccactgctcctcayccggcagggcttgctgacttgggctcctaatgcctaatgccccaactttgcctgaatactgtgggtggtcacagctctgcatttctccagaaagcacccagactaaagaccgtgtgacccctacccacactgctccttgcaaggcagggcttgccaacctgggctcctagtgcagcagccctggatccacctaaacacctgttgtcagtcacagctctgcatttctctgggacaaaactccaaaaggtaacaaacaaggcttggcacctttgcattgttctgacagtgaagtctagcactgcttgggtaaaagtgaagtgca

SEQ ID NO: 380907 - DNA, 621 bp, Homo sapiens
tcatttattagattattaccttagatcacccaatactgattttgtgattacaaataaattttagtaagtaggcaaagttacaaatacagaatccatgaaagaagactgtgtgygtgtgtgcatgtgcgtgtgtgtatgtgggtatgtgtgtataatgtgatattcaggctctgtgccaagcactttatgtgtattgccctatttaatcctttgagtaactccatgagataggtactagttttatgacagtgtgcaaattgaggttgagtaactttccccaaatttgaaaggagtagagccaaaacttctgtcttggggtctctgaatccaaagcctatgttcttagccattatgttgaattgcctccctaaatgtggtgcatcccatgagcttttcttgacttcaaaattgcttccttttctgggtagaggtcaagggatggtctgtatttccaaagcaacacttttttggtgagtataatctagagctgacttatactgtcaatcatagcattctctcttttcacttaacctgtatggcttaaaacactgactatccatgagttggcaagatgtttagcccagatatttaggtctgaattctttaataggaagggtgatc

SEQ ID NO: 380908 - DNA, 621 bp, Homo sapiens
tcatttattagattattaccttagatcacccaatactgattttgtgattacaaataaattttagtaagtaggcaaagttacaaatacagaatccatgaaagaagactgtgtgtgtgtgtgcatgtgcgtgtgtgtatgtgggtatgtgtgtataatgtgatattcaggctctgtgccaagcactttatgtgtattgccctatttaatccttkgagtaactccatgagataggtactagttttatgacagtgtgcaaattgaggttgagtaactttccccaaatttgaaaggagtagagccaaaacttctgtcttggggtctctgaatccaaagcctatgttcttagccattatgttgaattgcctccctaaatgtggtgcatcccatgagcttttcttgacttcaaaattgcttccttttctgggtagaggtcaagggatggtctgtatttccaaagcaacacttttttggtgagtataatctagagctgacttatactgtcaatcatagcattctctcttttcacttaacctgtatggcttaaaacactgactatccatgagttggcaagatgtttagcccagatatttaggtctgaattctttaataggaagggtgatc

SEQ ID NO: 380909 - DNA, 620 bp, Homo sapiens
ggctcaaatgactactgataaagctacaaatagtgtttactagggggaaaactgtgatcttcaactatttaccacttagtcaagaaatatttgttaaacaaagaacttctcactaaagaagattcacaaggtaaaaaatgaggagcacatgatgagaatgaattactcagagagaaaaagggaaaatatgaacacacacraacatgagagaaaacacctgcttgtctatgaacatttgacttaatacagttcccagaaatgttacaatgaaatagctgttaacaaaaaaatcagattaaattaaatgacattacaatttcaaaggtcaggagataaaaatgcctttcttctctttttacttctgagatttctcttttccagaattccctggtgatgaaaccaacagatggagttatttctttttaagcttaaagaaaggtcaccaatagcttttaacagattacaaatgacttgacacatgatttcagaagtggggaaaattctatggaggcaagaacacttcaagaatcgatgaaaaaagatttcataacagcgcaggccaaaattaacattgctaaagtggttctattttaattaactaggtgcagaccatcttatag

SEQ ID NO: 380910 - DNA, 420 bp, Homo sapiens
aaaaaattttgaaatcaatgaagcagacacataatataccaaaacatctaagatatggtaaaatctgtgctgagagtaaagtttacagtgttaaatgccaacatcaaaaatatcgagatctcaaattaacaacctaacatttaccccaaggaactagaaaaacaagaacaaactaaacccaaagctacaagaagaaaataaataacaaagataagagcagaagtgaatgtaattgagattaagaaagtgatacaaaacattaatgaaatgaaaagttggttatttgaaaggagaaacaagattgatagaccaytaggtagatttgccaagcaaaaaagaaagaagattcaaataagcacagtcagaaatggtaaaactgacttaccactgatatcagagaaatacaaaggatcatcagag

SEQ ID NO: 380911 - DNA, 579 bp, Homo sapiens
actattttgaacatctctatgtgtacaaactagaaaacctagaagaaatggataaattttgtggaatatacaacctcccatgattgaaccaggaagaaatagaaattctgaacagatcaagtaggagtaataaaattgaatcaattaaaaaaacaacaaaaaagtccaggaccagacaaattcacagtcaaatgttaccagatgttcaaagaagagctagtttcaatcttattgaaactactccaaaacatcaaggaggagggaatctcatctaactgattctacaaaaccagtatcacccagtaccaaaatcaggtaaggacaccrtaaaaaagaaaactacagttcaatatttctgatgaacacggatgtaaaaattttcaaaaaaacaaccagcaaactgattccaacagcacatccaaaaagataatgcatcacggtcaagtgggttttattccagggatgtaaggatggctcaagatatgaaaatcaataatgtgatatattatataaacagaattaaaaacaaaaaccatccaatcatctcaatatatgcagaataagcattcaacaaaatcc

SEQ ID NO: 380912 - DNA, 537 bp, Homo sapiens
taagaactgaaactataaaataattccagaaaaaaaaactaggaagaattcttcttgacattgtcttgggcaaagaatttatgactaagacttcaaaggcaaatgtaatgraaacaaaacagaccagtgagacgtaacctaaaaaccgtctgcacagcaaaagaaataataaacagagtaaacagacaatctacagaatgagaaaaagtatttgcaaattgtgcctctgacaaaggactaattttcacaatctacaaacaacaagagaaaaacactccattaaaaagtgggcaaaggatatgaacagacatttctcaaaagaaaatataaaagcaaccaacaaacataagaaaaaatgctcaacatcactgattatcagagaagcacattaaaaccacaatgagataccatctcaaaccaatcagaatggctattatcaaaaagtcaaaaataacagatactggtgaggatgtggagaaaaggtaacttacacaccatttatgggaatgtataatacagtaactcctatgggaaaaa

SEQ ID NO: 380913 - DNA, 537 bp, Homo sapiens
taagaactgaaactataaaataattccagaaaaaaaaactaggaagaattcttcttgacattgtcttgggcaaagaatttatgactaagacttcaaaggcaaatgtaatggaaacaaaacagaccagtgagacgtaacctaaaaaccgtctgcacagcaaaagaaataataaacagagtaaacagacaatctacagaatgagaaaaagtatttgcaaattgtgcctctgacaaaggactaattttcacaatctacaaacaacaagagaaaaacactccattaaaaagtgggcaaaggayatgaacagacatttctcaaaagaaaatataaaagcaaccaacaaacataagaaaaaatgctcaacatcactgattatcagagaagcacattaaaaccacaatgagataccatctcaaaccaatcagaatggctattatcaaaaagtcaaaaataacagatactggtgaggatgtggagaaaaggtaacttacacaccatttatgggaatgtataatacagtaactcctatgggaaaaa

SEQ ID NO: 380914 - DNA, 637 bp, Homo sapiens
tctcatatatatttaacttcttcctttccactcagtattccccctcaggctgtacacatggttggtcctttgcctgaaaaaaaaagttcacagtcaggaatgagggatgagatcgaagaaggagatggggagtcagatcactcaaggcattctatatgatatttgggagcttatactgtttggggggatgaaaaccactgcaaggattcaagcaggggtggacatggccatatttcacattagcattctagatgattactctagcttttctgtgggtgatggattgtaaagktgtaactagtataccaaaagcttattttgcaatagactaggtgttgctgaatgttactaggttttcctaaaaaccattgcttatggacaagcaaatattcatctttggcttaaataagcttttaagtctcaatctttcatcaactcagcctctttagtcagaatattctttatttccaaacagttgtaagcaggtggctcatttagctttctatttgttcatcaggtgataagttcatgtttatgttctggtatagtacctgggtggtaagaagatgtttctgcacaagtatctgcttctcattcctgccccaggagttccagtacactgtccagtctagtgcta

SEQ ID NO: 380915 - DNA, 369 bp, Homo sapiens
atttactattgttatatcctctttatgaattgactgctttattattatatgaataacctctttgtctcyttttttaagtttttgttttaatgtccattttatctgatagaagtagagcttttctcactctcttttattatcatttgcatggattatctgttttcctcttgtcactttctaagtgcaacctcaaagctgaaataagtctcttgtaggcagcatatagttgggtgttgttttttaatccattcagcccctctctatcttttgattggagattgtaatccatttaaattcaatgtaattgaaacgtaaggacttactcctaccattttgtttttcgttttctggttgttttgtagatccttt

SEQ ID NO: 380916 - DNA, 591 bp, Homo sapiens
gatgcccactttcaccactattattctaactttcactgctattattcaaccatagtactggaagtcctaggtagagcaatcagacaaaagaaagaaataaatggcatctaagttggaaaggaaaaagtcaaattctccttgtttgcagatgatacgatcttatatttggaaaaacctaaagacttcatcaaaaaaccctctagaactggtaaaaaaattcagtaagcttgcaggatacaaaacaacatacaaaaatcagcatttctatatgccaagagagaaaaatctgaaaaagaaattaaaaagtaatcccatgtatagtagccaaaaataaatgaaatacctaaggaatcaagttaaccaaagaagtgaaatatctctgcaatgaaaactatcatgaaggaaatttaagaggwcaccaaaacatggaaagatagtccatgtttatggattggaataatcaatattgttaaaatgtccaaactacccaaagcaatttacagatgtaatgcaatccctatcaaaataccagcgacattcttcacagaaatagaaaagaaaatcctaaaatttatatgaaaccgcaaaaga

SEQ ID NO: 380917 - DNA, 591 bp, Homo sapiens
gatgcccactttcaccactattattctaactttcactgctattattcaaccatagtactggaagtcctaggtagagcaatcagacaaaagaaagaaataaatggcatctaagttggaaaggaaaaagtcaaattctccttgtttgcagatgatacgatcttatatttggaaaaacctaaagacttcatcaaaaaaccctctagaactggtaaaaaaattcagtaagcttgcaggatacaaaacaacatacaaaaatcagcatttctatatgccaagagagaaaaatctgaaaaagaaattaaaaagtaatcccatgtatagtagccaaaaataaatgaaatacctaaggaatcaagttaaccaaagaagtgaaatatctctgcaatgaaaactatcatgaaggaaatttaagaggtcaccaaaacatggaaagataktccatgtttatggattggaataatcaatattgttaaaatgtccaaactacccaaagcaatttacagatgtaatgcaatccctatcaaaataccagcgacattcttcacagaaatagaaaagaaaatcctaaaatttatatgaaaccgcaaaaga

SEQ ID NO: 380918 - DNA, 373 bp, Homo sapiens
gtcttttcaacaaatggtgctgggacaactgggtatccatatgcaaaaaataaataaattaggaccaaatatctttttaaaaaattaactcaaaataaaacagttaactgtaacagctaaaactataaaactctcagaagaaaacccaggcataaatctttgtgactgcatttggcagtgttttcttagctatgactccaaaggaaaaayggactcaatggacttcaaaattgaaaactgctgtgcctaagaagacagcatcaagaagtgaaaaggcaagacactaagtagaagaaagtatttgaaaagcatatacctgataagcgacttacatacatagaatatgtaaagaacctttgcaattcatgagtaa

SEQ ID NO: 380919 - DNA, 222 bp, Homo sapiens
acatggtgccaatccaaaccttaaggatatctayggcaacactgctctccattatgctgtgtatagtgagagcacctcactggcagaaaaactgcttttccatggtgaaaatattgaagcactggacaaggtatagatcaatcaactttctttccaaaatctttgttttaacattgacataggtaagggtcaattttttatatttggaagctcaaccattcc

SEQ ID NO: 380920 - DNA, 222 bp, Homo sapiens
acatggtgccaatccaaaccttaaggatatctacggcaacactgctctccattatgctgtgtatagtgagarcacctcactggcagaaaaactgcttttccatggtgaaaatattgaagcactggacaaggtatagatcaatcaactttctttccaaaatctttgttttaacattgacataggtaagggtcaattttttatatttggaagctcaaccattcc

SEQ ID NO: 380921 - DNA, 452 bp, Homo sapiens
tttttttaaaaaaatggaatgtgtctttgaagtcctgaacacagctacttttctatttatttactgagcacttaarttggttttctgattctaatctacatttttctgtcattgtctttctctacatggttttgtatctctttcattttgttgacattatgtcagcaaagatctctagatctcttcttcaaagtccttaaattgtcacacatctctctgccccattcttggtcttctctttttctacattgaataatgtccttgatgctttttgtgtgtacttttttttcttcttatagactgtgaatgggtatcaaaatgtaattttttgtctttttcaaatgtatgtgttttacttttttatcttggttactcatttctaggttatggcttatatttagtaataggttattttatcttagcataccaacatgggtatgaatagtttattt

SEQ ID NO: 380922 - DNA, 452 bp, Homo sapiens
tttttttaaaaaaatggaatgtgtctttgaagtcctgaacacagctacttttctatttatttactgagcacttaagttggttttctgattctaatctacatttttctgtcattgyctttctctacatggttttgtatctctttcattttgttgacattatgtcagcaaagatctctagatctcttcttcaaagtccttaaattgtcacacatctctctgccccattcttggtcttctctttttctacattgaataatgtccttgatgctttttgtgtgtacttttttttcttcttatagactgtgaatgggtatcaaaatgtaattttttgtctttttcaaatgtatgtgttttacttttttatcttggttactcatttctaggttatggcttatatttagtaataggttattttatcttagcataccaacatgggtatgaatagtttattt

SEQ ID NO: 380923 - DNA, 633 bp, Homo sapiens
aggggcctcatctgtcctgttcctcctgtggcctgggtcctagcaccatgtctggtacagtgtagatgctcaagggaagtttactttgtagaactgtttatctgggagatrttactgttggtctaacctgtaccatattgtaaacctccagccattttgcagactttgatcacagtgaaacgttccatgggaacttgggccatgagaaacatccttcctaaccacgtgactgcagaaacatccttatcacatcctcctgggcaaaggcccaacagcctgactgcagggacatccttgccatatcctgctgggcagcaagctctaccacccagatccctccctcccagtcccatgattaccccagcctgtgagtggcagttggttctggcactaagctggtttcctcctccccagggttttgctggcaataaagatgttgctgttgaagccaccaactgtccctctgtctttctttaaccctcgccttgccttccaaacctaacaataactctacctctccattttaccaatgaggatgtgggactcaaggagagcaagagacttacccagtgagtcacagagcctgaacttgaactcagttcagctgaatccagaacttgtttctccctgaga

SEQ ID NO: 380924 - DNA, 633 bp, Homo sapiens
aggggcctcatctgtcctgttcctcctgtggcctgggtcctagcaccatgtctggtacagtgtagatgctcaagggaagtttactttgtagaactgtttatctgggagatattactgttggtctaacctgtaccatattgtaaacctccagccattttgcagactttgatcacagtgaaacgttccaygggaacttgggccatgagaaacatccttcctaaccacgtgactgcagaaacatccttatcacatcctcctgggcaaaggcccaacagcctgactgcagggacatccttgccatatcctgctgggcagcaagctctaccacccagatccctccctcccagtcccatgattaccccagcctgtgagtggcagttggttctggcactaagctggtttcctcctccccagggttttgctggcaataaagatgttgctgttgaagccaccaactgtccctctgtctttctttaaccctcgccttgccttccaaacctaacaataactctacctctccattttaccaatgaggatgtgggactcaaggagagcaagagacttacccagtgagtcacagagcctgaacttgaactcagttcagctgaatccagaacttgtttctccctgaga

SEQ ID NO: 380925 - DNA, 575 bp, Homo sapiens
tctgaggcaacactgaggcttttttcatgttccttgctttcatagcttctcaccagtgtgagaacaaatagctactcaagatgaatgaagatgaatgaaaggctttccatagagtttaccttcacagggtttcttttcacactactgtaagatatgagagtccaggaaagatgttctcatgcatgttaactcattgagctcccttccagtgtgtcctcctcagtatggtgaaaaattaatgaygattttccacctttcactcacagggcttctcactattgtatctcttaaggtggcttttaattctaatgactttgcaaagtcttttccacatttgtcacatttatagggtttctttccagcatgactccttatatatgcatgttttgaggcttgctgaaggttttcccacattccttacattcatagggcttgtccagaatgttcattcttaaatgtttattaaggtgtagggaatatctaaagcctttgccacttttgtcatattcataagatttctttctagtgtgaattttcatatgtctcacaagaaatcactggtaggtaaaggcttt

SEQ ID NO: 380926 - DNA, 543 bp, Homo sapiens
catgtgtaacaagaggggtaagtgtttaaagaggtcttttctacattttttacttccataagcagtctctgcagtgtgagttcttgtatgaactacaagtctgaggcaacactgaggcttttttcatgttccttgctttcatagcttctcaccagtgtgagaacaaatagctactcaagatgaatgaagatgaatgaaaggctttccatagagtttaccttcacagggtttcttttcacactactgtaagatatgagagtccaggaaagatgttctcatgcatgttaactcattgagctcccttccagtgtgtcctcctcagtatggtgaaaaattaatgatgattttccacctttcactcacagggcttctcactattgtatctcttaaggtggcttttaattctratgactttgcaaagtcttttccacatttgtcacatttatagggtttctttccagcatgactccttatatatgcatgttttgaggcttgctgaaggttttcccacattccttacattcatagggcttgtccagaatg

SEQ ID NO: 380927 - DNA, 543 bp, Homo sapiens
catgtgtaacaagaggggtaagtgtttaaagaggtcttttctacattttttacttccataagcagtctctgcagtgtgagttcttgtatgaactacaagtctgaggcaacactgaggcttttttcatgttccttgctttcatagcttctcaccagtgtgagaacaaatagctactcaagatgaatgaagatgaatgaaaggctttccatagagtttaccttcacagggtttcttttcacactactgtaagatatgagagtccaggaaagatgttctcatgcatgttaactcattgagctcccttccagtgtgtcctcctcagtatggtgaaaaattaatgatgattttccacctttcactcacagggcttctcactattgtatctcttaaggtggcttttaattctaatgactttgcaaagtcttttccacatttgtcacatttatagggttyctttccagcatgactccttatatatgcatgttttgaggcttgctgaaggttttcccacattccttacattcatagggcttgtccagaatg

SEQ ID NO: 380928 - DNA, 593 bp, Homo sapiens
agtgagtctcaagtctcttattgtcttcatgctgatctctggatctctgctttctctgtggcagagggtctctctggtctgatcgctgaggccattgcattgcttttctctgagatgaagcttgtactcttgaatcagagtaccgtggaattccctgcctcctgttggcttggataagatcttcagatctctctgagtttcagcatccttcttcttccacagtgtgtctggaattgtcacatgtggcctttttggcyggctcattttgccccttggtgcagtggccccatgttatgtatgttagttttcaactcagttaagttgcttcctatttacctctatgacacttccacattgcatagattcataggtctagcaagaggtttctttatataaaccaagctgccagaaacagaagaatgctcacacagtaggtcagataaaccaaatttattactcacagaggagccggaagaatcagcaaaagcctaagttctatggcaagcctgacccttgaggtcagaaaagttgcccagggttgacagagtctcctctgcacatgctccactgtgtactgcagctgaggaacccct

SEQ ID NO: 380929 - DNA, 601 bp, Homo sapiens
tggggatgaagctgtgacctgctgcaactactggggaacataaatctagtaataactattacaaattttaaatgcaaatgttcgtgacacagaaaccccagatttgggattctagtctatagaattaagagcatcagttaagaagaatgtatgaacaagatatttattaagacttagctatggtgtcaaaaaactgaaaacatctgaatatccacccattcagtgaaatggtcgagtaaatgaggctcattagtgtaacagaatgttacctaatattgaaaggtatgtgttagatctctatcaactattttaaggaacagctaaaatattttyttaaataaagcaagatgcaaagtaatgagcataaaataatttcattttaaaatacaaccaccaccatcctatgtatgtatgtgtattttgcatttgaatgtacgagtaagtaaatgtgagtggaaggatacacatcagccaatagcactaattagctcagagggaatgtgagtagaaaagggtgagaatactattttattttattattttattttttgttttttgagatggactctcgctctgtcgcccaggctggagtgcagtggca

SEQ ID NO: 380930 - DNA, 317 bp, Homo sapiens
gttctctctaaagcaagttttaggtttctttctgttttcacattttcactgtgtttacttatatagcagcagccagtctagactgataagattcaatttcagcttccagttttttcttgctttctttttccttcaacagttcagaattgagccttgtattctcagctttgagatcattaagctcttgttgataccrgaatgctgtttttgttatcatttcctcattgagttttatacacttttcaagggcagcatttgtttctttagcaattttaatgtccttaagatatttattttctttttccaggttgtcattt

SEQ ID NO: 380931 - DNA, 472 bp, Homo sapiens
agtagaccccatattagctgcagttaatcagtagaccaggtgttctagcagaattaaatttgatgctcctgtgttatctttaaatgacacagctcttctgaaaacccgtactcacagtgcatgattatccattaagacaaggtgatggaatgtgtgaatacagctgaggagacaccacaaggcaaatgctcaatggttcccattartattgggtaaatcaacactataaaacagaaagccataggcattatttaatatttggttttggaaggtatttttagtgacactgcatacagttgtactgaatacttgcaaaattagagatgtaaaaataaaacaaaggcacattgtgtttgagtagggaatctgtagatgtgtagctggttttcccatccagtcccaaaattctaaatataatcatggtacccacactcaaatttatgttaaataacaacctcaatgaaattactct

SEQ ID NO: 380932 - DNA, 657 bp, Homo sapiens
cataggatggaataatatgtgaccattgaaggtggcaatagatacagaagtatattgatgtgcgaagatgtattttgttatagctagtgaggaaaaaaaatcaattaaattatacwtacacacaaacatactatggtcttgttttagcaaaaaatatgtacaaaatataaaatttgtaatttctgagcatttgtattttaagtaaagttcctttttcttacctgtgattgctgcagtgaacatgtacaaaacttctagtaaagtttattaataaaggaataatcctcgggaagagaggaatatgaatcttacagtattaaaaataatttctcactttctattttttatcattattgtgtgtattgttatcttctttgaacttttagcctcttcagaagtaaaaagggaatgtttttatctgtttccagattttattatctatatattttatatgtacatatgtttttcttatatattcattcaatttatgcaaacaatgatagattatttcattttaattgtattctttaaaaataaaaataacataaataattactattgcaaaaatattgctttataggagttatttaaaaatattgaactccccaactgtatttatccattctttcattccatttattcatcaaacataacctg

SEQ ID NO: 380933 - DNA, 494 bp, Homo sapiens
attgtgcttgtttctaaaacaaatgaatatacttttaaaacaattataacctaattattatatgtttgttgtctttcattttgagccagtgattcaaagagcaattttgaatctgttaaaaaaagaggctgaagcttaaaatgtttatcagtagtatcaaaactaataactgaattcagaattaagtctgattcataaaaatttgaaatcataattatgttagtattaatgtaatctggtcataaaaaaagcaatagaatccattcataattttaaaaagtgatcaacgaacaatgtagcttaagaccaattcaaaagtatcacataatttctaaatcacaactttttcttatgccaactggtmttaatcatcaaatgactccatagtaagaatcattactctgaaaggttgattttgttataataataatggaaatttaaatatttaaaagaaaaaacagatgccttttttttctaaaactctacaaagtaaa

SEQ ID NO: 380934 - DNA, 630 bp, Homo sapiens
aagaaaaaacagatgccttttttttctaaaactctacaaagtaaattgctacaagagaggcagaggaaacacaatatacacatatccaaaatataatttgcagtgaaataaaggaaaccacattacagataaacttaactgatttaaaaaactaacctgtaaatggatttcttctaatttttctactgcctgcattgccctttcatctagctccaatttatattcttgtagtttactaagttctaccatattgttttccatgtgtcttaagatttaatatttcttcttccaacatctttttatcctcctcaagtttttcacattcctgttgtactttwttcatagataataactcctgttgaagaacttgattgtctttagccaaattgacatattttgaagatacagcttccttctctgctgtaagatcatcaaactgcatgaataaaatagtatagcttgataatgaagtaggctgagaataatctaatacaaaatcaatagcaaattttgaaatgcatttacttggaataaactgttatgtgtagtgcagtagattcttcaaatgtgaacccttaaattactcagaattttaagaacaaagttaaagctaccatgagtcacaaaaat

SEQ ID NO: 380935 - DNA, 571 bp, Homo sapiens
ggtaggttacatgtttcaaggaacttatccatttttttaggtaattcatttgttggtgtataatttgttcatgatagtctcataatcatttctattcctttggtatcaattgtaatgtattattttcttctgttattttatttattagagttttctctgtttttctttagctaaaagtttattaattttgtttatctttttaaatactaactcttcattttgttgatattttgtatcatatttctagcccattttctttctttctttctgaytcttaccatttcctttcttctattaatttgaggtatagtttgttcttgttttttcagttctctgagatgcaatgcttgtttattcaagatcttttttttctttttggttgctggaatttattgctatgaatttccctcttaggactgtttttgccatattccgtaggttttgatatgttgtatttacattttgtttccaaacattttttgaattttccttttaatttcttcagtaatatagtggttattcaggattacatcatttcatttctatatatttgtgaagtttctgaaattcc

SEQ ID NO: 380936 - DNA, 265 bp, Homo sapiens
gtgtgtgtgcgcgcacatatgtgtgtgtttgtcttgcttctctggacaggcctagcttctccactcatgggtgcacccaggtcctcatcactgtcaccttagagcattagagcctctataggtgctccccaatctctgmcctccccacccatggtggtcctggggatgcagacagaggaggggcactgcataatgctgagagggctggcaccctctctaggtggaacacaggtcatttgtaaagttgtaggtctgccaagcagta

SEQ ID NO: 380937 - DNA, 265 bp, Homo sapiens
gtgtgtgtgcgcgcacatatgtgtgtgtttgtcttgcttctctggacaggcctagcttctccactcatgggtgcacccaggtcctcatcactgtcaccttagagcattagagcctctataggtgctccccaatctctgacctccccacccatggtggtcctggggatgcagacagaggaggggcactgcatamtgctgagagggctggcaccctctctaggtggaacacaggtcatttgtaaagttgtaggtctgccaagcagta

SEQ ID NO: 380938 - DNA, 452 bp, Homo sapiens
ggcttccaatgactaggtcaccaggtccccactgatgaggcctttactgaggagcccaccactaaccaggcacctgctgatgaggtcccaaatgactaggtcctgatgaccaggtcacctctgaccatggkccactgaccaggcccctgagcagtcatgctcaaagtcttattacaatgtccccctcagctcacagaccctccctccctgcatgtgtgctcagaggtcaggccctgcggtttgttttgggaaatggcctttcctccaagacacagggagagacagtcagcctcaggctccaggttcccagctccacactcaccctaaaggccctctgggcccatctcaaaggagacagtgaggtggcctggcactgcctggacacgccatctaccctattcctgagtgtcagagtgttaggaagggagggacatttggcagatgagacaccc

SEQ ID NO: 380939 - DNA, 452 bp, Homo sapiens
ggcttccaatgactaggtcaccaggtccccactgatgaggcctttactgaggagcccaccactaaccaggcacctgctgatgaggtcccaaatgactaggtcctgatgaccaggtcacctctgaccatgggccactgaccaggcccctgagcagtcatgctcaaagtcttattacaatgtccccctcagctcacagaccctccctccctgcatgtgtgctcagaggtcaggccctgcggtttkttttgggaaatggcctttcctccaagacacagggagagacagtcagcctcaggctccaggttcccagctccacactcaccctaaaggccctctgggcccatctcaaaggagacagtgaggtggcctggcactgcctggacacgccatctaccctattcctgagtgtcagagtgttaggaagggagggacatttggcagatgagacaccc

SEQ ID NO: 380940 - DNA, 604 bp, Homo sapiens
tatagtttgttcttgttttttcagttctctgagatgcaatgcttgtttattcaagatcttttttttctttttggttgctggaatttattgctatgaatttccctcttaggactgtttttgccatattccgtaggttttgatatgttgtatttacattttgtttccaaacattttttgaattttccttttaatttcttcagtaatatagtggttattcaggattacatcatttcatttctatatatttgtgaagtttctgaaattcccctcattattgatttctagttttttaaactcctttaaatttaagacagagtgagactccatctcaaaaaggaaaaaaraaagacaaaagaaaaaagcaaagagaagaaaaacttcagccaaattaaatttaaaggagtttaattgagcaatgaaccattcgcaaatcaggcagaacaagtttgtagactaaaaaaggaagtgacatacagaaatcagaagtgaggcacagaaacagctagatggttatatgttggcatttgccttgtttgaacacagtttgaacactcaacagtctatgatcagttgaagtatggctgctggcattggctaagactct

SEQ ID NO: 380941 - DNA, 278 bp, Homo sapiens
cataaattttgttacctaaactggaagaaaactgatgacctaaaacaaggtagaaagatccactgtctcttttccatgatctatctctggttaaaagactaatctgyatcactttgaaatggcagtcttgattcctcaacatggaacccacttaggaatgtcctattgctttcctttgccctaaatcggtacaggaaatcccatgcaatatttgaaaggtatgaaagctacatgtacaaaaatcaaataacaaaggtgtatgttcttattgagaatac

SEQ ID NO: 380942 - DNA, 295 bp, Homo sapiens
ctacccaactgaactccatgactgatttgccagccaatcatgcccctgacccagcctacatggacatgggaakgacatcagtgaatcaggaacagaggcagaggtgaagaggccacctgtcctgggccacacatctatgtagtccagcaatctccagccccttagtactccaagggctctaagccacccctctgaaagtcaggatggaagtagatgacaccacatttctatctgctgtagacactcctcccactgtctcaaaatgttttagcatctttcagtaaaattcttcagg

SEQ ID NO: 380943 - DNA, 295 bp, Homo sapiens
ctacccaactgaactccatgactgatttgccagccaatcatgcccctgacccagcctacatggacatgggaatgacatcagtgaatcaggaacagaggcagaggtgaagaggccacctgtcctgggccacacatctatgtagtccagcaatctccagccccttmgtactccaagggctctaagccacccctctgaaagtcaggatggaagtagatgacaccacatttctatctgctgtagacactcctcccactgtctcaaaatgttttagcatctttcagtaaaattcttcagg

SEQ ID NO: 380944 - DNA, 295 bp, Homo sapiens
ctacccaactgaactccatgactgatttgccagccaatcatgcccctgacccagcctacatggacatgggaatgacatcagtgaatcaggaacagaggcagaggtgaagaggccacctgtcctgggccacacatctatgtagtccagcaatctccagccccttagtactccaagggctctaagccacccctctgaaagtcaggatggaagtagatgacacyacatttctatctgctgtagacactcctcccactgtctcaaaatgttttagcatctttcagtaaaattcttcagg

SEQ ID NO: 380945 - DNA, 373 bp, Homo sapiens
gtcttttcaacaaatggtgctgggacaactgggtatccatatgcaaaaaataaataaattaggaccaaatatctttttwaaaaattaactcaaaataaaacagttaactgtaacagctaaaactataaaactctcagaagaaaacccaggcataaatctttgtgactgcatttggcagtgttttcttagctatgactccaaaggaaaaatggactcaatggacttcaaaattgaaaactgctgtgcctaagaagacagcatcaagaagtgaaaaggcaagacactaagtagaagaaagtatttgaaaagcatatacctgataagcgacttacatacatagaatatgtaaagaacctttgcaattcatgagtaa

SEQ ID NO: 380946 - DNA, 373 bp, Homo sapiens
gtcttttcaacaaatggtgctgggacaactgggtatccatatgcaaaaaataaataaattaggaccaaatatctttttaaaaaattaactcaaaataaaacagttaactgtaacagctaaaactataaaactctcagaagaaaacccwggcataaatctttgtgactgcatttggcagtgttttcttagctatgactccaaaggaaaaatggactcaatggacttcaaaattgaaaactgctgtgcctaagaagacagcatcaagaagtgaaaaggcaagacactaagtagaagaaagtatttgaaaagcatatacctgataagcgacttacatacatagaatatgtaaagaacctttgcaattcatgagtaa

SEQ ID NO: 380947 - DNA, 470 bp, Homo sapiens
cttgcttctgtgccaagccccactatttctcgggaatgtttcctgctttcaggtctatttccatgctcattcagcgtggaagtttgcataccttcacctcaaaaataaaaacacacttattaaagacctactgtgccccagacctactgtgtgctgaatgatggtgttctaagcacgaacgagcaacmctcccttctctcggtcgctcaccgtctaggggctgcaacacatgagacaggctccagtttaaaacagaattaaatgcaagctaggtcagagatgccaagaaatctgggggcacagatgggaagttcgttctgaagaaataagccccgccccaagcattcgaagtaacaagaatccaatacactgcagtgcctcccatgcctagaggccttctccgagtccccagtctaaatcccatccccattataacctctctttgagttcctaaagatacgctgaactta

SEQ ID NO: 380948 - DNA, 542 bp, Homo sapiens
ttggggtcaggactccggaatggagtgatgcccagggctccctggaggagtgataagacggggtaggcaccggcaggcctaggccaagcaccctggaaattcggctgtgtccccagagtcctacccatgctccaggtctccacataaatttcagccttctcattacatagtggtgggaccggccatcctcaattcctcttccctgaactcaccagccctggcctttgatctctcctgggacctgttgatggaaacaggaagtcrccttaggcttgaagcaaattcaaacagggtgtacacaggcaagcaccgcaccttcaggcttcttctagggctggggctggggcagactccgagatggagacagtagtgccaggacagggggagagcatccttctctctgagaaggctggggaatacataacccccaagcctgggggttctcggagaagcccagcagggctacagaggggccttcctagaggaatacgattcctaaaaaagagcctcccccagaaggagagctcagcctatcacccact

SEQ ID NO: 380949 - DNA, 622 bp, Homo sapiens
ccttctggaaaactggcagcctaaatatgacagctagacagtccagccctaaaatacgtagcttctcaaatgctcaggagctccagagtccttggactcagtaggaaatcagaagggatgaacccctcaatgatttcccaagtctcccttcaaacaggcacttcaagctcaatttgtrtgcaaactcagctcttgtttccagcctctggattcttttgttgttgttgttgttgctgtttgatggagtcttgctctgttgccccggctagagtacagtagtgtgatctcagctcactgcaacctccgcctcccggggccaagcaattctgtctcagcctctcaagtagctgggactacaggcacacaccaccacgcccagctaatttttgtatttatagtagagacagggtttcaccatattggtcaggctggtcttgaactcctgatctcaggtgatccacctgcctcggcctcccaaagttctgggattacaggcgtgagccactgcacccggcctccagcctctgggtacatgggcagagaaggggaagggagaggctgaggtagggaaggggcctttggaggagaggtagagtgagggcaggacagatggggaaccagc

SEQ ID NO: 380950 - DNA, 523 bp, Homo sapiens
ggcctggggccaatgactccatctcagttatcccatctctaaaatgggaatataattttagcaaccacacagtgggtgttctgaaggtgtatctgttaattggagatgggtgctaggtggtcggcaccctgggagagcaggccagcctggttgctgtcatcatacctcataccccaagccrtgcaatctcagattgaatgagacgtaccaccaagccacctgcccccagccccactgccctcaaccccaaattgggacatcctgccaacatgctaggtattatcttgaaaagaaggctgagaatctatgaataataataaggcatcaggctaaaatcaggtaaggactaaataagatcaaataggaaatcaggcaacagacctcaaaacaactggtttctcttgtctccctttgcctggaccctggggcttgtattttggtaaggtgaccagctgtcccagttagcctaggactgtcctggctttagcattgagagtcccacatccccagaaacccttcagtc

SEQ ID NO: 380951 - DNA, 619 bp, Homo sapiens
aaaccaaacaaaacaaacaaacaaacaaaaacaatctaatggatagagtgaaagatcataaatatgtgaagagataaaagtaacgttttcagaatcaaataaatatacaggtcctcagactgaaagtgcactcctagaaccaaacagagtactgataatcctctacatctagacatttcagagtaaatctgcagaacatcaaggatgaagataaaaatctttaatattgttaaagagatagccaaaaatacagactacatatgaagaaacaacaattttcttgaagcagacttctcagtaacaacagatgtcagaagataaaggaataatattgaataataaactactgattaagactaatggcaaaataggaatggtttcatcttttctttagtagaacaaaaggttagagggaaagaataagaaacaaataattttaagtgcattgtcagagtctgcactcctggatcctaaaggcataaaatgccaggacaccaggagcatagctaagctaccaagggttctataaccaaatcttccatatccccagtatcacagtgaggcagtaarctaataattataggaccaggaatagaccaggggattaggggcatgcatt

SEQ ID NO: 380952 - DNA, 507 bp, Homo sapiens
ctgtctctggtccttcagagtttttcccacaatggattccccatcactgcactcgacctcctgttgtttcagcagcaacttcagtaccatctttctgcccaacactcagtagttctccaacactgagattgtggacgtggcttgacaaccactgttagccaagagggtcactcagtgtctgtttgccctgtccaagtgggtgaacccattgccaggttgtggtgtcatttcctacctgtatttwtcttactgtgaataaatgactagctttgcctatgagttacaagccataagtaagtgcaaaataataaataaataaataaataagattaaaaatccaacaagaagaaaaatactgcttgaatatgaagaagaaaagtgcctgcaaggaaacccagagactgagcatggaccctctcctcagagagtgtggacagagctggcagaagagagtaatagagaggaatatgggtgtttgtagccccctgagcaagatgaaagaagtgg

SEQ ID NO: 380953 - DNA, 550 bp, Homo sapiens
tttaactatcacatatcatagtaatctgctttccaagtctaataactatttctgagttcctacactgacttttaggaggtcaaaaattagtctccttattgtccagctgggctttttggacattagatatttattctagactgtaactcacgttgtaaaatactactgtgttcatggattagttacttttgactttttttctccatactgtcttcagaataagataaatgtcactacatcaccagagttctcaggtggctggcagaatgatgacaaatttaattatcgcaagaaacacygctgtattggtgctgtacattgttcttgagaaggtgtatcggtctctccagacccaaatccagatttgataacaggaaatcatcaactgcattatgttaccctattaactctaaataaaatatcatgatattttaaaataaaatcatgattttaaatcatgattttttaaaaaaacattatattttaaaataaaatatataaatattttatttatattaaaataaaactaaataaaaatattatgatattt

SEQ ID NO: 380954 - DNA, 550 bp, Homo sapiens
tttaactatcacatatcatagtaatctgctttccaagtctaataactatttctgagttcctacactgacttttaggaggtcaaaaattagtctccttattgtccagctgggctttttggacattagatatttattctagactgtaactcacgttgtaaaatactactgtgttcatggattagttacttttgactttttttctccatactgtcttcagaataagataaatgtcactacatcaccagagttctcaggtggctggcagaatgatgacaaatttaattatcgcaagaaacaccgctgtattggtgctgtacattgttcttgagaaggtgtatcggtctctccagacccaaatccrgatttgataacaggaaatcatcaactgcattatgttaccctattaactctaaataaaatatcatgatattttaaaataaaatcatgattttaaatcatgattttttaaaaaaacattatattttaaaataaaatatataaatattttatttatattaaaataaaactaaataaaaatattatgatattt

SEQ ID NO: 380955 - DNA, 534 bp, Homo sapiens
gctgggcactgtgctatgtgttttaaatatgctgaatgacttaattctccccaatcataaagtgagctttttttttttttatcattcctattgtacagatgagaaaatagacatggagaagttaagtgatttgccttaaaaccacatatgggttggaattttgaactcaggaagtttgattcaagagcacaaaagcttaaacaccatgttacacttcttattttaatgaattcatttctgtattttataaatttatttccatgagcctttgaagatcactagaaggtagttgaagttgggaaagaaaattgaagtacaaaaagtggcaaagaaatagtgattaaaaacattttattttataataatttcaaagttagagaaaggttgtaagatgagtaaaaagaatttcagtatgccttgtcagggttcccaattgttaacatttgacacaatttctttgccattctctctccycactccaccctgcctttatccacacacacacattttccccccaaaccagttgaaaataag

SEQ ID NO: 380956 - DNA, 609 bp, Homo sapiens
ggtcatggtgtataattctttttacatattgctgaattgtatttgctaatattttaaggactttttcacttatattcatgagggttattgttctttaacttctttttcaatatactgtcttgttttgatatcatggtaatattacttcataaaataaattgggaaacgatccctcatcttctattttttggaagcacttatgtagaatttatgttaattattcttctaatgtttggtaaaattctctggagaaaccayctgagtctgtagatatattttgggggagtttttaaaattcaattttattgttatagaattagattatctcttttatattgggtgaattgtggtactttgtgttttttgaggaactagctcatttcatccaagttggcacatttatggtttcagtaatgttgatactatttccttacaatcctttttatgtctgcagggtctatagtgatatcctctgtttcattccatatattggtaattcgtattctctttccctctttcttaatatcaattttgttaaaggtttgccaatttcattatctccccaccttcgtccgaatgatttttctctttttttctgttttcagtttt

SEQ ID NO: 380957 - DNA, 592 bp, Homo sapiens
gagctacttagttgtataaaaagattattttttatcctgatgacattgactcattgaggaatacttgtaggagtttaatcatgcgaacacatgtttctttaggccatttcacrtgatggttgcaattgtgtgtcatattacttgattctaccagatgacaagatccatcagattcactaagatgaaatctgatagattgggaagttaaaaagacaacttcttacatagctgtattcattatttgtgattctgccacaggtttgtgccttacaaatataataactcaataaattttatttcatgcagttctaatttataaaaaataaataaacgtgactgcgaaaggcctagttgctgacagcagaagacaaaagcaggtagcccagcagggactgcaataagaaaaccccagtcagactttttcccaagggtgggaggagtggtgtctgaaaagtcccatgagagcaagtctcagcttcagacacctgctacatctctaagcactcacatcaactgtaactttgctggtcaagttaagagttttaagctttatctgttcccactcctctctttctcctcaatactctctgga

SEQ ID NO: 380958 - DNA, 656 bp, Homo sapiens
gtcttgctggggtcacacacccatgatgccagaaaatcaggacgctttcattagtcaaatccaccaaggctgcttcttatgggaatgtggaragaagtaagtccccaaaaggaaattaaaatgctagtactaaaagaaagtaggatgagtgccacataggccaaaagacaacaaatatccactatgcatattcaacttcaagtagccacaggtaggaaaggaaataaaagaatggtctgtcattatgggaagacatattgaaattataaaatgcctattgttgacaaaactatttacatttgtatgtgtgacatgtatgtgcgtgtacaacacttgacctgtgagtgaatgtttttgtgattattaaaaataataagatagtatctgaggttaagctggtgacagctctcatcacaggcttcatataaattaatctaaaattctccagtttactctaaggcattaatttcccttgtgtcaggcagccttgtaattgggttgtgatgtatttttaatgatatttattatcattcaagtgtttctagaaaactaaatgagacatgtaatttagtttgatttagatcttcttggatattttctacttctttacaaatacagagaagcagccacttttaaattttatttttatttgctat

SEQ ID NO: 380959 - DNA, 551 bp, Homo sapiens
tggcactgggttcctggttgcaggtactcagagtagctatgaagcctgagtgctgggatcaggatctcctaaacctwctcttgaatctgggacttggggtgcaggtttactctttgaggcatgggtagatgcagattgcccacaaagctaaattctgtgatactaaggacacctcaagagcttgggcccaggaggtttggttgtagctaggaccttaaccctgggggcagggcacagcattagcctgacttctgagagggaggagtgctctttaggtttgggccctgaggaataaggcacaactgtaatttggaagctgaagccaatagggcatagcagcaactcaggccctgggggatgaagtaacatacagtggtcattccggaccctgggataatcctaggcttctgtgaagctgggtgtagcagtagcaaaggctcattaatggtggagcactgctgtggcttggactgcggaggccagggagcagcacagcaatgaacccactctctggaaaggcaagctgccttagcacctcaggctctgggggc

SEQ ID NO: 380960 - DNA, 582 bp, Homo sapiens
ggccaaggtacagctcaggccaagctttgttagcttccatttggtattgggcctgcaggtgtgcagaagacaagagttgagctttgggaacctctgcctagatttcatttcagaggatgtataaaaatgccaggatgtccaggcagaagtctgctgcagaggcagagccttcatggagaacctctactagggctacgcagaggggaaatatggggttgaagcccctacacagagtccccactgaggcacttcctattggagctgtgagaagatggccaccatcctccagaccccagaatgttagatccaccaacagcttgcaccatgagcaaagaaaagccacaggcactcaacaccagcctgtgaaagcagcaacgggggctgtaccctgcagagccacagaagcttagctgccsaagaccgtgggagtctaccttgtgcatcctcatgccctggatgtgagacatggagtcaaaggagataatttcagagctttaagatttaatgactgtcctgccaggttttagacttgtgtggggcctttgacccctttgcttttgggcaatttcttctatttgggat

SEQ ID NO: 380961 - DNA, 582 bp, Homo sapiens
ggccaaggtacagctcaggccaagctttgttagcttccatttggtattgggcctgcaggtgtgcagaagacaagagttgagctttgggaacctctgcctagatttcatttcagaggatgtataaaaatgccaggatgtccaggcagaagtctgctgcagaggcagagccttcatggagaacctctactagggctacgcagaggggaaatatggggttgaagcccctacacagagtccccactgaggcacttcctattggagctgtgagaagatggccaccatcctccagaccccagaatgttagatccaccaacagcttgcaccatgagcaaagaaaagccacaggcactcaacaccagcctgtgaaagcagcaacgggggctgtaccctgcagagccacagaagcttagctgcccaagaccgtgggagtctaccttgtgcatcctcatgccctggatgtgagacatggagtcaaaggagataatttcagagctttaagatttaatgactgycctgccaggttttagacttgtgtggggcctttgacccctttgcttttgggcaatttcttctatttgggat

SEQ ID NO: 380962 - DNA, 579 bp, Homo sapiens
tttaaatatgcattttcttatacccagcaattctatatcatggtacaaccaatggatgcatttgcacatgtgagaaggagccatgtgtagaacattcattgaagtattatttgttaatagcacacacacaaaaacaaatgaaattagcttaaagtttcattaaaaggagtttggctaaataagagayagacacacataaatttaattagaatcaggaaatattttcactggatggagaacaggttgagtgccataacaatgagctgcaaaacatgtggagtgttataagcatgaggcctagaataatcatttctgggttcgaatttattcgctttctttttttccccatgatattctctacttttcctttgtcatggtaaccaatgtctaggtaatttttgatatttgtttttctgtttagactgtaatctccaaatagcagaaatcctgtctttcactgttgcatccctaccacctagacctgtaccaggcacattatatttagtcagtatatgttaactattaaatatatgtaaatgcttgcataaatgaacaaatttatgaatgaataaataatct

SEQ ID NO: 380963 - DNA, 650 bp, Homo sapiens
tgtcgtgggagggaacagatggagataattgaatcatggaggcagtttccyccatgctgattcttgtgacagtgagtgctttctccagcaatctgatggtttaataagggtcttccccctttgctgggcactcattctctctcctgccaccttgtgaagaagaaagtgtttgcttccccttctaccgtgattgtaagtttcctgaggccttcctagccatgcagaactgtgagtcaattaaacctctttcctttataaattatctagtctcatgtctttctttataacagtgtgagaagggactggtacatatgacttgctatgtttaatgcaatgtgagtggatgtgacatgtgccagctccaagcagaattattcattgtcattgaattgttggccacattcccttttccttcttctgctaatctatcctcaaaactagagagaaaaagaagtagagtgtagcctgaaatcaaaatgtaaggtgagaaaaaaaaaaacttgtgtttataaatcacagaggttctggtgttatttcttaggtagctttgtgtcacagaagataactaatacagtgtgtaaatggaacaaattatatgaatcaatacattagtaaatgttgtgttatggaagtaaaatttgtaattgaag

SEQ ID NO: 380964 - DNA, 650 bp, Homo sapiens
tgtcgtgggagggaacagatggagataattgaatcatggaggcagtttcccccatgctgattcttgtgacagtgagtgckttctccagcaatctgatggtttaataagggtcttccccctttgctgggcactcattctctctcctgccaccttgtgaagaagaaagtgtttgcttccccttctaccgtgattgtaagtttcctgaggccttcctagccatgcagaactgtgagtcaattaaacctctttcctttataaattatctagtctcatgtctttctttataacagtgtgagaagggactggtacatatgacttgctatgtttaatgcaatgtgagtggatgtgacatgtgccagctccaagcagaattattcattgtcattgaattgttggccacattcccttttccttcttctgctaatctatcctcaaaactagagagaaaaagaagtagagtgtagcctgaaatcaaaatgtaaggtgagaaaaaaaaaaacttgtgtttataaatcacagaggttctggtgttatttcttaggtagctttgtgtcacagaagataactaatacagtgtgtaaatggaacaaattatatgaatcaatacattagtaaatgttgtgttatggaagtaaaatttgtaattgaag

SEQ ID NO: 380965 - DNA, 589 bp, Homo sapiens
ttgagattgccggtgcctgtggccagaaagggagtttcatttacaacttctctctccaatccctattctttcaccagccgctcaaattttatcctttctttctcagtcactttgaatgtgttttcwttcttccttgaatgcactgcccatattttcatcccacatccactttccatacagattcttcacctctcaagtcaaaatccacttcctcaggaaagcccttcttgatcctctgggttagggtttttccctgttacatttcatcctgtcacgtatattttcttaaaactaaacccaatttatatttttatgttttctgttatgcaattatttgaaaaacactggtctctccaactacactgtaaactatgtaagagtaggaattatgtcttatactcagtcagcatctgaaacagtgtttggtaactagaagaagttcaataaatatttatctgaacaaatacatgttaacaagttatataaataaatttaagcctcacattctatgtaactacttatgtctggatattgttcttgaggatataactaatttgtttccattcattgtgtaaacttgaaattagaa

SEQ ID NO: 380966 - DNA, 589 bp, Homo sapiens
ttgagattgccggtgcctgtggccagaaagggagtttcatttacaacttctctctccaatccctattctttcaccagccgctcaaattttatcctttctttctcagtcactttgaatgtgttttctttcttccttgaatgcactgcccatattttcatcccacatccactttccatacagattcttcacctctcaagtcaaaatccacttcctcaggaaagcccttcttgatcctctgggttagggtttttccctgttacatttcatcctgtcacktatattttcttaaaactaaacccaatttatatttttatgttttctgttatgcaattatttgaaaaacactggtctctccaactacactgtaaactatgtaagagtaggaattatgtcttatactcagtcagcatctgaaacagtgtttggtaactagaagaagttcaataaatatttatctgaacaaatacatgttaacaagttatataaataaatttaagcctcacattctatgtaactacttatgtctggatattgttcttgaggatataactaatttgtttccattcattgtgtaaacttgaaattagaa

SEQ ID NO: 380967 - DNA, 589 bp, Homo sapiens
ttgagattgccggtgcctgtggccagaaagggagtttcatttacaacttctctctccaatccctattctttcaccagccgctcaaattttatcctttctttctcagtcactttgaatgtgttttctttcttccttgaatgcactgcccatattttcatcccacatccactttccatacagattcttcacctctcaagtcaaaatccacttcctcaggaaagcccttcttgatcctctgggttagggtttttccctgttacatttcatcctgtcacgtatattttcttaaaactaaacccartttatatttttatgttttctgttatgcaattatttgaaaaacactggtctctccaactacactgtaaactatgtaagagtaggaattatgtcttatactcagtcagcatctgaaacagtgtttggtaactagaagaagttcaataaatatttatctgaacaaatacatgttaacaagttatataaataaatttaagcctcacattctatgtaactacttatgtctggatattgttcttgaggatataactaatttgtttccattcattgtgtaaacttgaaattagaa

SEQ ID NO: 380968 - DNA, 589 bp, Homo sapiens
ttgagattgccggtgcctgtggccagaaagggagtttcatttacaacttctctctccaatccctattctttcaccagccgctcaaattttatcctttctttctcagtcactttgaatgtgttttctttcttccttgaatgcactgcccatattttcatcccacatccactttccatacagattcttcacctctcaagtcaaaatccacttcctcaggaaagcccttcttgatcctctgggttagggtttttccctgttacatttcatcctgtcacgtatattttcttaaaactaaacccaatttatatttttatgttttcwgttatgcaattatttgaaaaacactggtctctccaactacactgtaaactatgtaagagtaggaattatgtcttatactcagtcagcatctgaaacagtgtttggtaactagaagaagttcaataaatatttatctgaacaaatacatgttaacaagttatataaataaatttaagcctcacattctatgtaactacttatgtctggatattgttcttgaggatataactaatttgtttccattcattgtgtaaacttgaaattagaa

SEQ ID NO: 380969 - DNA, 246 bp, Homo sapiens
cccagggaagtttctaaatagaagataagaaagcagtagtcactttactctgaaaggcatgttccagagatttgtaaaatttctctcctcctcttttactgtgacacaccataactaaattgtttatcttttatgagcttcgattttctcttkgacaatatggtggtaaggggcttaaacgtatgcttcgttatcagagagctataaggttttttattggtttcatacaagtcaccattattagtt

SEQ ID NO: 380970 - DNA, 246 bp, Homo sapiens
cccagggaagtttctaaatagaagataagaaagcagtagtcactttactctgaaaggcatgttccagagatttgtaaaatttctctcctcctcttttactgtgacacaccataactaaattgtttatcttttatgagcttcgattttctcttggacaatatggtggtaaggggcttaaacrtatgcttcgttatcagagagctataaggttttttattggtttcatacaagtcaccattattagtt

SEQ ID NO: 380971 - DNA, 246 bp, Homo sapiens
cccagggaagtttctaaatagaagataagaaagcagtagtcactttactctgaaaggcatgttccagagatttgtaaaatttctctcctcctcttttactgtgacacaccataactaaattgtttatcttttatgagcttcgattttctcttggacaatatggtggtaaggggcttaaacgtatgcttmgttatcagagagctataaggttttttattggtttcatacaagtcaccattattagtt

SEQ ID NO: 380972 - DNA, 514 bp, Homo sapiens
ttgataattatcaaataacctgtaaataagtaaagtaagatttgtaaacaaagcaatcaatacccatacactatacattcaccagagagtcaacagagaaataaatatgtgttggtggccaatttgtaccaagactgcgaaaaatactggagatatctagatgaaargtctttccccaagaaacatgtaactaagtggaggtaacatgttaattattacagtggagctacagtactgcaatggaaagagtgagcggaaagcagctatctctggagaggttaggagctacctagagctacctggagaatgcagagagtattttatttactcattttcatattgttctttctcttttattctcaagtcatattccattcattgtcatattattctaatggttaacatttaagctaattatcttattgataatagtaattaaataattttaataaggatcacctttgacacaggttgataaatctttatcctacctcttatattagtcctaattaag

SEQ ID NO: 380973 - DNA, 514 bp, Homo sapiens
ttgataattatcaaataacctgtaaataagtaaagtaagatttgtaaacaaagcaatcaatacccatacactatacattcaccagagagtcaacagagaaataaatatgtgttggtggccaatttgtaccaagactgcgaaaaatactggagatatctagatgaaaggtctttccccaagaaacatgtaactaagtggaggtaacatgttaattattacagtggagctacagtactgcaatggaaagagtgagsggaaagcagctatctctggagaggttaggagctacctagagctacctggagaatgcagagagtattttatttactcattttcatattgttctttctcttttattctcaagtcatattccattcattgtcatattattctaatggttaacatttaagctaattatcttattgataatagtaattaaataattttaataaggatcacctttgacacaggttgataaatctttatcctacctcttatattagtcctaattaag

SEQ ID NO: 380974 - DNA, 652 bp, Homo sapiens
caaagcactatataccttaaatttcagtggaagaggatttttttaaaagtacaaaaattgcaaaacacagtaataagcttggtgaaaagtataaaacaaggtgatgcaatagaaaaagaaagtggctattttaagtagaggaaataaggaaggtcctgaggaagtggcaactgataccaggcacgaacagctagttgcatgaaaatcttgagaaagagccgtgcgagttaaaagaagagcctatttaaaggctcttaagttgggaataaacttggcaatttggaagcayagaaagaaggtaagtatgtatgaaaaagagtaagaatagaagaatattatctaatataatgtgtgaaaagttgaatatgggtagattatggtagggttttgtaggctcagataaagagtgtgaagtttattttgaattcaatacagtgtctttgctgcaatggttctcagccaggtaacaattttgcctcccagggtaaatttggcagtgtggacacatttttagttgatacaactaggagggaaaggtgctactggcatctagtgaatggaagccaggaatgctgctaaatattttacaagatataggatcgttcttcacaacaaataattatctggcctaaaaagtcaatagtattgcagt

SEQ ID NO: 380975 - DNA, 581 bp, Homo sapiens
ttccacatacattgaatgtagaatgcctttttacttaattgcataattacgtgttcttggtatcaaagttagagttcagagaagtttatgaactttcaacactccctcctccaattcttccatgtgtctaatataatcatttttttcctcttctttacctacacattaagctctgggaaataaatgtgaaaaaccaaagccctataatccgagcagagataaggagaaattgcacacttgctgacacgtgaaaatttcaaggtttggttggcattgcttattgatcatggaaatcatagcttcaaatagagatataatttgtttctagggcctgcagtagctgacagtatagaaaggcaatgatgctcactttttgcaaatattcctttccatgtttaccactaccaagactatcaaaattttggggttcttgtctgagctaataagaatcaaggggaagctatagacasttaactttagctctcacatgtatatattttaacctttaaccaagtaacactaattctcaaattcgtgatttggtttagttgtcctacattgtatccattagtccaacttcc

SEQ ID NO: 380976 - DNA, 548 bp, Homo sapiens
gaatgcttatattcccttctcatttttctcattgtactcctttaacttccttttttactcatatatccttttaatagttctgattcatcccttttattccatatcatccttcttaatagtagcgtatcaggtgagtccttcaaagattttaccaggagttctcacctctaatgtatcagctttctaatgttcagatcaattaaagttattcccttgtttaacacctttaatgttttgtcattactgattgaaaaattccaaaccccttagctttcaccattccctccatgtttttatccctatgcaatttttcaaccccaatttcctcagttttctcctgccatatgtcatgctccagacaactttacagtggtttcagactttgatgctttagtatacactgctgcctgtctttraaaagccatcctgccattcagcttttcctctttgtcttagaaattaggcatcatggtgtgatgggatgggggctgagaaaccttggctttggagagaatcctgatttcaaactccagctttttaaaaggtca

SEQ ID NO: 380977 - DNA, 548 bp, Homo sapiens
gaatgcttatattcccttctcatttttctcattgtactcctttaacttccttttttactcatatatccttttaatagttctgattcatcccttttattccatatcatccttcttaatagtagcgtatcaggtgagtccttcaaagattttaccaggagttctcacctctaatgtatcagctttctaatgttcagatcaattaaagttattcccttgtttaacacctttaatgttttgtcattactgattgaaaaattccaaaccccttagctttcaccattccctccatgtttttatccctatgcaatttttcaaccccaatttcctcagttttctcctgccatatgtcatgctccagacaactttacagtggtttcagactttgatgctttagtatacactgctgcctgtctttgaaaagccatcctgccattcagcttttcctctttgtcttagaaaytaggcatcatggtgtgatgggatgggggctgagaaaccttggctttggagagaatcctgatttcaaactccagctttttaaaaggtca

SEQ ID NO: 380978 - DNA, 558 bp, Homo sapiens
ccatcactttgctcaagtgctccttaatttttgaagctgtgtcccacctgtattaatccttttcttctagtacctaccaccattttacacttatctcaaattaattactgcaatttcttgctaaacttttatttgtcctgttatattgacagaggatgtttgccttattcatcattgtatttcctgagtttaccagagaggctagcatattttagtgactcaataaatagctaatgaaatgaaaaaatattgtcctattaaaatacttagtttaaaactacagagaagtgcaaatagatacaaaataacaaatgcatgtcatttgaaatgtaacaaaaatataaacataatttatcattatttaatttatcaatattttcttcaayggcaaatgcaagtttaaaatatctgagaagttcttagcattataatcttggtaatggtagttaactctcattcaagtcaataccattcccacattcaagaaactgtcttctgaattaggtgaaattgctaatgggaaagacattatttcaagaccattttctcagcacaagg

SEQ ID NO: 380979 - DNA, 558 bp, Homo sapiens
ccatcactttgctcaagtgctccttaatttttgaagctgtgtcccacctgtattaatccttttcttctagtacctaccaccattttacacttatctcaaattaattactgcaatttcttgctaaacttttatttgtcctgttatattgacagaggatgtttgccttattcatcattgtatttcctgagtttaccagagaggctagcatattttagtgactcaataaatagctaatgaaatgaaaaaatattgtcctattaaaatacttagtttaaaactacagagaagtgcaaatagatacaaaataacaaatgcatgtcatttgaaatgtaacaaaaatataaacataatttatcattatttaatttatcaatattttcttcaacggcaaatgcaagtttaaaatatctgagaagttcttrgcattataatcttggtaatggtagttaactctcattcaagtcaataccattcccacattcaagaaactgtcttctgaattaggtgaaattgctaatgggaaagacattatttcaagaccattttctcagcacaagg

SEQ ID NO: 380980 - DNA, 533 bp, Homo sapiens
caggtacccttgaaagttagctgaggtcttcttgtaactgactatggccaatgcaacataagtagtagtaatatatagcactttgggccaaagcttattatagccaatatgcttatcaatgtatatcttcccattgtttcagtgattgggaaaaaatgagttgaaataaaacccacagccatgttccctttgtgacaatgatatgtagatgctcacaacygtcttccactgactcaaactagatatgtagcatgagcaagaaaataaacacttccgttaccttaatctacttagacttgggtgtttgtcttctattgctacaacatattctatttcaagggactgaatatcatacaaagcattttttctaattattttaaatgtcctcttcttctatggttacttctaattacggagtattctaaaatttcactgaagcattcacatttatgtatattaatgtatgaactagcagtttctagtataaaactaatattaattgtataaagattgatttaaagccaaaaagaaag

SEQ ID NO: 380981 - DNA, 543 bp, Homo sapiens
aaccaatcctgctgacaccttgatctcagatttctaacctccagaactgtaaggaaatgaagttctgttgataagtccacagtctgtggtacttttttatggcagtcttagcaaataaacacaattgcctatttgaaaaaattatcaagaggaaacagagagtgaaggagacaccatgacataaaacctaacactaagctaggagagaaggaccatatttaaagccatgttctttgtaaactgacactagtggcagtgtctagagggagagaagggaggagaaagcaaagggtagaaaggcaagaaagggaagggaacatgaaagaacttacrcaggaagttgatgcacgctgaacaaaatgttgggtggccagtaagatgatgagattagtgctaaccctagtaaactgtgcagttcatgtacaaaaaggtagtcatgatttcatattaaatgtaaagtgaatgctaacaacgcactggcattattttctcaagttataacgacaacacagacatttcaaagcaagagaggctgttttaaag

SEQ ID NO: 380982 - DNA, 563 bp, Homo sapiens
aaatctgtaaccagatgtgagattattggcctttgtttcaaccacaatgatgatggaaaggaagaaattaattgcaattttgatgaatggaatgcctgacaaataatagtttttaccagatcattgttttcactttttaatttctatccagcaaagctttatttcaatggtacatcatcgtaattgccrtttttgtaaacatcaaactgtgcaggtgcattagaaaactcacgctctgctgtagatacaatgaactaaagaaatgtagaacagataataaaattgcaaaatttctttgagcatatggtgatatgcagaatgtctgctctaaaaaagcctgaagtgtgtctgggccttccagtctggtaaccagccttatgcaaaagagcctttatgtttcaatatttgaccatttaataattcacctccacgccattccccagacttcagttcatcccaccatatgtgctttactttaatattagctttaatgtacttacatccttcaaataagcacttaattagatatagtcacttagatttctcatgattaatggttaaat

SEQ ID NO: 380983 - DNA, 589 bp, Homo sapiens
gtgaaagaagaaagtgttctctttctaaatctgtaaccagatgtgagattattggcctttgtttcaaccacaatgatgatggaaaggaagaaattaattgcaattttgatgaatggaatgcctgacaaataatagtttttaccagatcattgttttcactttttaatttctatccagcaaagctttatttcaatggtacatcatcgtaattgccgtttttgtaaacatcaaactgtgcaggtgcattagaaaactcacgctctgctgtagatacaatgaactaaagaaatgtagaacagataataaaattgcaaaatttctttgagcatatggtgatatgcagaatgtctgctctaaaaaagcctgaagtgtgtctgggccttccagtctggtaaccagccttatgcaaaagagcctttatgtttcaatatttgaccatttaataattcacctccacgccattccccagacttcagttcatcccaccatatgtgctttactttaatattagstttaatgtacttacatccttcaaataagcacttaattagatatagtcacttagatttctcatgattaatggttaaat

SEQ ID NO: 380984 - DNA, 594 bp, Homo sapiens
tttctttgctatctagaatgtttgtttgcaagtcttatcatgtggagtttgtcttgtctatcagattagaaactcataaaaggaasggaatactggtgtttatttatttatatgttctgctgcagcacttagtactaacgtatatacaaaataaacttaatcctctcgattgacaagaaatctatattcctaaaaagtaaatgctgacaagagcattctggtttttctaatatttgcattccactgtatatatggtgagctatcaagatataatttatggctggacatgatggcttatccctataatctcagcacttgagaggccaaggcaggaggatcccttgagcctgggagtttgagcttacagtaagcaagaccctgtctccaaaaaaaaaaaaaaaaaaaaaaaaaaggatgtaatttgttatcttctacgtacttcactggttgttaaaaaatactgatccaggtgaacaatatcatgtcaatctcacatatacaattttcacagccattaataatagggttacatttgtacttgctatcaatgattttgaaaaataaagttttcctcaaaaaataaaataattttct

SEQ ID NO: 380985 - DNA, 631 bp, Homo sapiens
gacttagtggaaggagcctatgttcctcaaagacttggcagaatagagccccatgctgattaatttatttgggccatgatgtgattaaaacaaacattcattatgttatgatgttgagacttgaaatttgtttcagaagcgagacttaaaaattaataaaagatttttcagatactgtaacaacataggcaagttaattttakgtaacttacactacataaaattatgttaatttacactacatacatttatgttaattttatgtaattttatactataattttacctacattacattccttgatcacttatcctcactttacattttaatttcaaaattatgtgttacaccactgacctctctgtgaagcgtttggcagattgaacggaatcaggaaacctctccagcagcatagatacaatattgttttataagtctttgttctaatttatgctttaaaatgagacagggaggcaaaaggatgcttgtagatcacttattaatagcagtgttacatttcttgctcctttggggtagagaaattatattaaacaaagaaaaacaaatatactattttagcttcttacctacaaaatatctacctgctgtactgcaaaagaatcacaatgt

SEQ ID NO: 380986 - DNA, 631 bp, Homo sapiens
gacttagtggaaggagcctatgttcctcaaagacttggcagaatagagccccatgctgattaatttatttgggccatgatgtgattaaaacaaacattcattatgttatgatgttgagacttgaaatttgtttcagaagcgagacttaaaaattaataaaagatttttcagatactgtaacaacataggcaagttaattttaggtaacttacactacataaaattatgttaatttacactacatacatttatgttaattttatgtaattttatactataattttacctacattacattccttgatcacttatcctcactttacattttaatttcaaaattatgtgttacaccactgacctctctgtgaagcgtttggcagattgaacggaatcaggaaacctctccagcagcatagatacaatattgttttataagtctttgttctaatttatgctttaaaatgagacagggaggcaaaaggatgcttgtagatcacttattaatagcagtgttacatttcttgctcctttggggtagagaaattayattaaacaaagaaaaacaaatatactattttagcttcttacctacaaaatatctacctgctgtactgcaaaagaatcacaatgt

SEQ ID NO: 380987 - DNA, 549 bp, Homo sapiens
agattgccaggcagaactagttgctaagagaaagaacaaaaatagacagaggccatttaccacctgtattattagtggcctagttcaagacattgatctagctctcctctgtatggaagaaaaagtcatagttttttcttacccattgcaaggtttatggttgggactgctataataaaagacagattaacaagagaaaagcaagaaaaattgtttaacataaattgtgtgtgacacaagtgccttcagaactgaagacctaaataaacagggaaaactgtgtatttttgtgattaagtttgatgaagagtggacaatcgtatagaagtgtaattgaacaagagagggtataatgtaatagtaataaacttggggaattagcaaggcctgtttgtttgctaaattcttttttgtgtgtgtctgtgtctttatctctttcctctctgaaatgagggtcttatracttacttaagaggaaagttaaataattattttattatctgcttcaggggagaatgacaggacaaagtcaaagagactttcctgctt

SEQ ID NO: 380988 - DNA, 481 bp, Homo sapiens
aacttggggaattagcaaggcctgtttgtttgctaaattcttttttgtgtgtgtctgtgtctttatctctttcctctctgaaatgagggtcttataacttacttaagaggaaagttaaataattattttattatctgcttcaggggagaatgacaggacaaagtcaaagagactttcctgcttctgctgtttttcaaatgtcaagctgatatattttggggtagtgtgtcctgaacctcgtcacctctattatttcaagagtctcctaactggttttcctactcctactctagttttctacattctattttakaagcaaatgggtagaaaaaatgtcatacctttcctcactcatcataaaggtcactcatagccaacacttgtagaaaaaaagacagattaacagaagaaaagcataacaaatttatttagtcaaagttttatgtgatatgggaagcttcagaaatgaagatccaaaaaa

SEQ ID NO: 380989 - DNA, 596 bp, Homo sapiens
atttcataacatattaatttagggatggcttttttcccagttacatttagtgaaaataattttattcaaactcatatatctattaatgctatcattatcattagagaacatttctaaatcacccaacagcatttttcagaggggcttcaagattgtttcttcaagattgttttaacaacactttttttcattttattggtccatatacatgagtctttggtctatctttcactggtgtctaatcttcttctgtattttttatttttctccataatgcattcttggtgaatcagtgctacaacagctttattatttttctctgaaatagcatctgaggtttattcctttaatttaaaaaattttttgtggttatgytttttaactccaaaaaattttcacctacatttttcttgaatcatttatgcctgttttgatttcataattgcttagtctttttgcttttccagttgcgtgtaagtaaatagtcatgtagcaaaaatgaaatagtaaaacaggtctttaattgatttttaatgaggagataagtcttctggctggttgtaatatggaatgaaatactcatttggcaaatacac

SEQ ID NO: 380990 - DNA, 596 bp, Homo sapiens
atttcataacatattaatttagggatggcttttttcccagttacatttagtgaaaataattttattcaaactcatatatctattaatgctatcattatcattagagaacatttctaaatcacccaacagcatttttcagaggggcttcaagattgtttcttcaagattgttttaacaacactttttttcattttattggtccatatacatgagtctttggtctatctttcactggtgtctaatcttcttctgtattttttatttttctccataatgcattcttggtgaatcagtgctacaacagctttattatttttctctgaaatagcatctgaggtttattcctttaatttaaaaaattttttgtggttatgttttttaactccaaaaaattttcacctacatttttcttgaatcatttatgcctgttttgatttcataattgcttagtctttttgcttttccagttgcgtgtaagtaaatagkcatgtagcaaaaatgaaatagtaaaacaggtctttaattgatttttaatgaggagataagtcttctggctggttgtaatatggaatgaaatactcatttggcaaatacac

SEQ ID NO: 380991 - DNA, 596 bp, Homo sapiens
atttcataacatattaatttagggatggcttttttcccagttacatttagtgaaaataattttattcaaactcatatatctattaatgctatcattatcattagagaacatttctaaatcacccaacagcatttttcagaggggcttcaagattgtttcttcaagattgttttaacaacactttttttcattttattggtccatatacatgagtctttggtctatctttcactggtgtctaatcttcttctgtattttttatttttctccataatgcattcttggtgaatcagtgctacaacagctttattatttttctctgaaatagcatctgaggtttattcctttaatttaaaaaattttttgtggttatgttttttaactccaaaaaattttcacctacatttttcttgaatcatttatgcctgttttgatttcataattgcttagtctttttgcttttccagttgcgtgtaagtaaatagtcatgtagcaaaaatgaaatagtaaaacaggtctttaattgattyttaatgaggagataagtcttctggctggttgtaatatggaatgaaatactcatttggcaaatacac

SEQ ID NO: 380992 - DNA, 586 bp, Homo sapiens
tatgcaacagctatttggttaagtttagagttttaaaaaacktatttctggccaggcgcggtgcctcaagcctgttaatcccagcactttaggaggctggcacagggggatcacctgaggtcaggagttccagaccagcctggccaacatggtgaaacaccatttctactaaaagtacaaaatttagccagggatggtggcaggcgtctgtcgtcccacttacatgggaggctgaggcggaagaatcgcttgaacctgggaggccgaggttgcagtgagccgagatcccgccattgcactccagcctgggcgacaagagtgagacttcatctcaaaaacaaaacaaaagaaaacaaaatgtatttctatcatgattttattttaagtataccaggaagaggttgaagagttttttatagatagaagttactgtataaaaattcaaggtaattgataaagtctgtcagtgtgataaaaacaccaaatgatttcaaattcaagatttcaggataaaaattctgcctttacttgaatgactaagtcacgcaaatgtgatattacttattttctttattttgaaagtggt

SEQ ID NO: 380993 - DNA, 586 bp, Homo sapiens
tatgcaacagctatttggttaagtttagagttttaaaaaacttatttctggccaggcgcggtgcctcaagcctgttaatcccagcactttaggaggcyggcacagggggatcacctgaggtcaggagttccagaccagcctggccaacatggtgaaacaccatttctactaaaagtacaaaatttagccagggatggtggcaggcgtctgtcgtcccacttacatgggaggctgaggcggaagaatcgcttgaacctgggaggccgaggttgcagtgagccgagatcccgccattgcactccagcctgggcgacaagagtgagacttcatctcaaaaacaaaacaaaagaaaacaaaatgtatttctatcatgattttattttaagtataccaggaagaggttgaagagttttttatagatagaagttactgtataaaaattcaaggtaattgataaagtctgtcagtgtgataaaaacaccaaatgatttcaaattcaagatttcaggataaaaattctgcctttacttgaatgactaagtcacgcaaatgtgatattacttattttctttattttgaaagtggt

SEQ ID NO: 380994 - DNA, 586 bp, Homo sapiens
tatgcaacagctatttggttaagtttagagttttaaaaaacttatttctggccaggcgcggtgcctcaagcctgttaatcccagcactttaggaggctggcrcagggggatcacctgaggtcaggagttccagaccagcctggccaacatggtgaaacaccatttctactaaaagtacaaaatttagccagggatggtggcaggcgtctgtcgtcccacttacatgggaggctgaggcggaagaatcgcttgaacctgggaggccgaggttgcagtgagccgagatcccgccattgcactccagcctgggcgacaagagtgagacttcatctcaaaaacaaaacaaaagaaaacaaaatgtatttctatcatgattttattttaagtataccaggaagaggttgaagagttttttatagatagaagttactgtataaaaattcaaggtaattgataaagtctgtcagtgtgataaaaacaccaaatgatttcaaattcaagatttcaggataaaaattctgcctttacttgaatgactaagtcacgcaaatgtgatattacttattttctttattttgaaagtggt

SEQ ID NO: 380995 - DNA, 569 bp, Homo sapiens
ttgagagaaggtgatggatttctagcaaaactacaaacgtatttaccttataagaattgcaattatgagaacttataagaacaatatgttgcacttctaagaaattattatgaagctacacttccaaaaatatgaaacaacatatacacaagcctatttcttgtggaattatttggaaaagcaaactattggaaaacacaagcatgccatttgtaagagactgagatgaaaaagatatagtgcattctgaaaaaggggtccagtgaaacttaatctaaataaagatcactacaaactgacattagtgtttttcagtgtatattgttaaataagaaaggaaacatatggaagaatgcatatagcaggccactttttagtgaactagaagaggaaataaaatatgtatattcttttttttattattatacttgaagttctagggtacatgtgcacaacgtgmaggtttgttacatatgtatacatgtgccatgttggtgtgctgcacccactaactcttcatttacattaggtatatctcctaatgctatccctccccccttcccccaccc

SEQ ID NO: 380996 - DNA, 380 bp, Homo sapiens
tgaactgtagctccaataattcccacatgttgtgggagagacccagtgagagataattgaatcatggggggtggtttcccccatactattctcatggtagtgaataagtctcatgagatctgatggttttataaggggaaatacccttcacttgactctcattctctctcttgcctgctgccacataagacgtgcctttcaccttctgccgtgattgtaatgcctccccagccatgtggaactgtgaatccattaaacmtctttttctttgtcaattacccagtctcagatatgtcgttattagcagcctaagaacagactaatacaatatcacagacctaaaatgaataatatcttgcccattgtcaaaagatcagaaa

SEQ ID NO: 380997 - DNA, 304 bp, Homo sapiens
tggtaaaatttcctacagcagtgctttgccatagaaaagatgtttaaaaaacactcagtgaatgaataaagrgaaaaaataaaatgtttaaaaggtttgtgttgttttcatggcacccttgttcttctcaagtgttggcagtcagctcccttcgtttagcatttagttttaacaattagggcacaggtagatgcatgtaacagaatgtccaaatagtaatggctaaagtcatgaagatgtaagttttaggtaagcactcaaaaatgtgttcaaatgcccgcagtctttgtttaccctctgccat

SEQ ID NO: 380998 - DNA, 304 bp, Homo sapiens
tggtaaaatttcctacagcagtgctttgccatagaaaagatgtttaaaaaacactcagtgaatgaataaagggaaaaaataaaatgtttaaaagktttgtgttgttttcatggcacccttgttcttctcaagtgttggcagtcagctcccttcgtttagcatttagttttaacaattagggcacaggtagatgcatgtaacagaatgtccaaatagtaatggctaaagtcatgaagatgtaagttttaggtaagcactcaaaaatgtgttcaaatgcccgcagtctttgtttaccctctgccat

SEQ ID NO: 380999 - DNA, 577 bp, Homo sapiens
ggtaatttataaaggaaaagggtttaattgactcacagttctgcatggctgggtaggcctctggaaacttacaatcatggtrgaaggcaaagggaaagcaaagcaccttcttcgcaaggtggcaggaaggagaagtgccgagcaaagggtgaagagtcaccttataaaaccaccagatctcatgaaaattgactcaatgtcatgagaacagcatggcggaaactgcccccccacttgattcaattacttcccatcagatttctttccataaaacatgtggggattatggggattacagttcaacatgagttttgggtggggacacagccaaaccatatcagtgggtgttagctgtaacattcttttcactactctataggttcaaatttttttaaaataaaaaattggtgtaaaataaataaactaagctgagattaggaccatcctcaactacttggtaggagcaaataaactatgcctgaatgaagagataaatatatgaagtacgaaattacttcatctgtatctcagctgtcactcacaatagtatttgatcacatgcatactgacagcattc

SEQ ID NO: 381000 - DNA, 596 bp, Homo sapiens
tataaactcaatatataatgtttaacataacacctatgtttaatatagccaattacgctccttataatgaatgtaaagatgaatttgacagcagctaaagcattatcgggccacagagaccaatttgtttattttgttattttccatatttctgaagctcacaagaacaaagaacaagaaacaaagatggccagggagactcaggaatacaggtagacagagaaacagagacaacaargcctaatgacattgtttggcctttttttcctccattccattggccagtgccattccctgattgtatagttttctgaaaattcttttcttggcaaaaactagttggattgagtttcaattatgtacaactaaaaaaatcataatatacaattgaaagcagtgaatatcattcatgtagtttcattacctcatccaacatgctaaatgttcatctgatgaactgaaaaactctttattaaaatagggaagtaataatataatttcattaattcagatcccattaaattgattttttttattttcactaaagctaagtaacactatctattattggagactccaaacatagacaacacaaa

SEQ ID NO: 381001 - DNA, 521 bp, Homo sapiens
ttcttgttgtgatctcatgaaatgtggaacaccaggaaaagaaacaatttgctttatgtgtctagatgatgctttagctgctgtcaaatttatctttgcatttcttaaaatgaatgaggtgagggaatgtcaagtaaattaaacatcatatatagattttataaaaaagtaaatttcatacttcttagaattaccatctacatgtacaataagaaaatagaatataagcagaagccctctgattttaaactgcttctttcacgtatttatgacaaatgcttctaatctgttcctcactgataaatccttacatcatgtcgtactttaggtaccctgaagtgaatttaaatacttggtaattcattggtgaagtcgatcagcacttatttagtgcgtattgtgatccatgtagtatgttgtcaactggaaaattaaaaaatgaacaagartctcactcacactaaactagtggtataaactggtaagcataagtaaatataaactggagaattataaacaag

SEQ ID NO: 381002 - DNA, 623 bp, Homo sapiens
caggctttctggagtggactgagccttgtggtcaagaaataggcaggcttggaggctgtcgggcttcccaccatgcagccaccatgcctcaccttcattagctgacaaagcagttctctgtcctcactggccacaaggggaggaggacacagcttttggaaacctccaggctgctatcctggaacctggagccacggccagggacagcttgagcgtcccctcccctctcatcttgtcctctgaggggtaggctgtgccccagctgaacggggcasctgtggctttgccagctgatggctgccatgtgggaatttggacctgggttgccagatcttcagattttccagcaaagctggaaatccagatgtttgtatgaaacttccccaatttaaaaaatgtttaaaaacactatgcaggacgacctatacacatctgcaggccagactcggtccctaggcagccagttagtgacctctactctctgccttcagacacccagggccacctaaacaaagggcccccatgacagtgatgggttgggggtggagaaaatgctctaggagagaccctggagtccacaggcaagaagggcatgggatcatcctttccctgctcctcctaaa

SEQ ID NO: 381003 - DNA, 600 bp, Homo sapiens
cctattctaaaaaatgccagagaaaaaaattccctcctgagagaaaaagcctcattgaaaggaagaaaaatgaccgctgtttattggataccaaatgtttttacatgttgtcttatttaaacctcatcacaactacgattctataagtgacgcagacttagaaagttgccccaagtcacttcttttgcatggaccgaaytgggacttgattccccatctgtctgagtccataacctgtgtgtcaatcaatactcaacaatgccagaaagaaaaagacgctctcactttgggctgcatttctttcttctcattaggagtggggtgacgatgacacacagaatcaagagggaagcatgataaggccgaggacagccctcgggtgggggtagaagacacaagttactcagccacaaacttgctgtgtgtgacttgcctaagtgtccctgtgtgatgggatgacgtctaaattttcttccagctctaaaattctgggattgttcctccttagaacattacccagtgttaaatatttaaactgtgacatagcttgagatgatagatgtagatagatggatagatagatatagatagatggataga

SEQ ID NO: 381004 - DNA, 600 bp, Homo sapiens
cctattctaaaaaatgccagagaaaaaaattccctcctgagagaaaaagcctcattgaaaggaagaaaaatgaccgctgtttattggataccaaatgtttttacatgttgtcttatttaaacctcatcacaactacgattctataagtgacgcagacttagaaagttgccccaagtcacttcttttgcatggaccgaattgggacttgattccccatctgtctgagtccrtaacctgtgtgtcaatcaatactcaacaatgccagaaagaaaaagacgctctcactttgggctgcatttctttcttctcattaggagtggggtgacgatgacacacagaatcaagagggaagcatgataaggccgaggacagccctcgggtgggggtagaagacacaagttactcagccacaaacttgctgtgtgtgacttgcctaagtgtccctgtgtgatgggatgacgtctaaattttcttccagctctaaaattctgggattgttcctccttagaacattacccagtgttaaatatttaaactgtgacatagcttgagatgatagatgtagatagatggatagatagatatagatagatggataga

SEQ ID NO: 381005 - DNA, 600 bp, Homo sapiens
cctattctaaaaaatgccagagaaaaaaattccctcctgagagaaaaagcctcattgaaaggaagaaaaatgaccgctgtttattggataccaaatgtttttacatgttgtcttatttaaacctcatcacaactacgattctataagtgacgcagacttagaaagttgccccaagtcacttcttttgcatggaccgaattgggacttgattccccatctgtctgagtccataacctgtgtgtcaatcaatactcaacaatgccagaaagaaaaagacgctctcactttgggctgcatttctttcttctcattaggagtggggtgacgatgrcacacagaatcaagagggaagcatgataaggccgaggacagccctcgggtgggggtagaagacacaagttactcagccacaaacttgctgtgtgtgacttgcctaagtgtccctgtgtgatgggatgacgtctaaattttcttccagctctaaaattctgggattgttcctccttagaacattacccagtgttaaatatttaaactgtgacatagcttgagatgatagatgtagatagatggatagatagatatagatagatggataga

SEQ ID NO: 381006 - DNA, 527 bp, Homo sapiens
cccagtttgtctcaaacttgtttgacctcagaatatctagtaacagctcaaggaagcgatgctcccaagaaatgcactttaggaagggctcatctaagcttcatttccaaaaccgtaattagtgataaattattctgatcttgtgggtaaccctacctgtgggaaacccagctgtgataaccagagttccaccattcaatggtaaccactccccttcactttgggtaagagaaaaacacccaccmcagaagacttaacctcgtgttgataatgtgtgtagttatgcataatgacaagtaaataaggaactttgagggcgttggtctaacacacccaaattaattatgtgcctctcaacatcttccagtttcagagagcagaagggggaaagacgtcctgaatgaaagcaaataattggacaggttacacagccaagctaggcaaggagtttgtgcccttcaaatttcactattgcaccaacctgctgccacccatgtcaatctcaaaacctgcagctccaacgctta

SEQ ID NO: 381007 - DNA, 547 bp, Homo sapiens
agtagacgggtggaggacaaggagaaaagggaagcaggatgtagttagggtagtgtgtgagtgggctgtgggcctcaaggtttccagcagacccacaaaaaattaaaactgaattgggcatctccacccttggagaagcagctcacgaataatgagcatacttaagtcccaccaacaggggtcgcccttagacactgggcctgaagctggcatcagaaaagggaaattcccaggcctggatcyggaggccagatttccagctctcagagctgttgattcctgtcttgttggacacagaagaggctgcccagctgaagagagacatgtcctcagcttttctggtgagtgaaggcctgtgctggaacttatgacagcaaatcccagctctgaaagtggatttctatatcttcctcttcaaactcaccgtcactctagagaaagaactcttctttcctgtgttttatttatgtctaaaacataggtaaacggtgtatgtatgatgtcttcttcttatttatttccttttgttctaattgcaaaaaatcac

SEQ ID NO: 381008 - DNA, 583 bp, Homo sapiens
ttaaaacaaaataggctgaaagcaatctagcccatcatttaaaatgattaaagtccccaatttctgtttatgaatkctgtagagggtaaagggggaatactcagggtgtgctgtcattggtcttggtgaacataaatttgaggaattgtaccaatgttcccattccaggtcacatcctgtcatgatcaagacattaatggatatgacaaagatcccagatgaaaagcaacttctgaaccacaccactggcatcctgattaaagcaaacataagcaagccgaacccagcaagacatctggaaccatccctaagagtgaccatccactagacaggacccaaccctgccatgagtggaatcaacttcctgtctcatgagactgcagatttcaaatcctgtgcctctccatggcttcctgagctcctaaccacactctgacaggcatggcatctatgcaaaaagggaaatgagtgaggccagttgaagaattatataatcctccattttaaaaataggactgggtatttttggaaagaactagctgggtgagttatttaacagcctttctggctagcctgtggaaac

SEQ ID NO: 381009 - DNA, 482 bp, Homo sapiens
tcttgttattattatttataaagaataagtcctttctgtctggaaagttataaaattttctcttcttcttagagatcagaattattatgtgggaatgtctaagcatatgtcttttgtcatcaatcctacaatgagctcagtgttattcttataatcacagtccatgtctctttggaggttagggaaattattacctctttatttcattttacacacacacacacacacacacacaatgtgaaaatgttggtgaaaaatactggctgttttactgaactctaattcaactctcagcagaaactattcttttttcaattcctctagttagtgtaacttttaaaagtacactttttaaccttcagtctttgtgatayatctgaatttcccctcttttgtgatatatttgaatttcccctcttttctttatctatgaaaagagtcaaactctgtaaaatatttgaagagatttattctgagccaaa

SEQ ID NO: 381010 - DNA, 544 bp, Homo sapiens
tgtttctaattatatcttattatacgatgtcttgaaaagttgtcatatttattatttttgattggttcatcatttaatctttccacttaagattagagtagtttacagaccacagctatagtgttgtaatagtctgtgtttttctgtatacttactattaccagtgtactttcaggtgattacttactgctcattaatgtctttttctttctaactgaaatactacctttagcatttcttgtaggacaggtcgggtgttaatgaaatccctcagcttttgtttgtcctggaaagtctatatttccctttcatgttttgaggatattttcaccagatatattattctagggtaaacatttcttccttcaacactttaaaggagaacattatcctactctctcctatcctgtaaggyttccactgagaagtctgctgccagacgtattggagctccattgtatgttatttgtgtctgctctcttgctgcttttaaggacttttctttatctttgatctttgggagtttgattattagaatgcctta

SEQ ID NO: 381011 - DNA, 582 bp, Homo sapiens
atggcatcctccaaaacagtggagattgttcatttattttgcagttagcactatagcyaggccctgaaaattaaaattgaataaacaatttcaattttccagaagactaacttatgatgatgatattttaaaattgtaaaatgtaatgatatgcccagcacagttctaacaacttttcatacgtcaatttatttaaaccccacagcaaccccaagtatagcatcatagtcatattcttttgtaggtgaggaaaacaaggcacagagaggtgaaaccagtttctcagagtacagtttataagattagcttataaggctgacttagagttaagtaatagcttataaggttgaagatttgaatgcaaataattatctccagaaagcaggctcctagccactactctttttccctctttaaggacacctagggcttccaagaacactagtccatcaccttctctgaatgttatgtggaatcttaaatgtgatgtggaaaaggagaagtatggttactctaataagatagcacttaatttgtgaatagacgtttcatataaaaagtcattgtgggtccaaaatggca

SEQ ID NO: 381012 - DNA, 564 bp, Homo sapiens
ttagtgtgaccctacgcactgacaagaaaaaaatatcaaaactttctagatcaaaataatttcattctaggtcacaaaatgtaaaacagaaataggtaacatacaataaaaagtaactatgtccacaaggaaataaaaaacgccatgcaagaaaaccaacagaaacaaaagaaaaggaatgttgaaccataagtatttcaaatacggctctgttaaatgtgcacacggaaaaaaaaaatgtgtgcttcaaagtatatgaaacaagaaactacaaagaagaagttgattggaaaaataatcaacatgattaccagaaattaactaagagcataattacaactaatactccataaattggtagattttgagaatgttaggttagccttcccaaatataataattataaaatctaagyaaacatttttaaagccctatttgatagaactggagattaactaagacagtagtagacttttgaaaggagaaatcaggcaggtgcgatttacaactttgtgttttttgccttagtacacaggctatagaaaactactgtggccgggcgcg

SEQ ID NO: 381013 - DNA, 545 bp, Homo sapiens
ctttaataacaatcagatctatcaggcaaaagatacattctccggaagggtgttcagacatgcaatttcatgtatgattgaaggtagggtagcatactgaaatgagattgattagatatacatgtgggtaatgcacggtgaaacctacagtattctccttcacttagcaccaaaattctgataatcacacttttatttgtccgcaagaagctgtaaaaacttaaacatagataacatagattattaaacatagaaaacaatctgatgaaagcacataatttaaaagaaagaaacgaaagtaagtgcaacttctactgtcccagaaatagttctttaaawactacaccatgaatatttgtaaatatatttttaaaagatatgacaacttaaaaagtgaactgtgtgctaaaaatatgtagtaactggaaaagtttttagaaattaaaaatatggtagaataaacgaaaaacagaattggataattggaagctgaagttccccgaaaatgagagcaacaaaattttgaaagatggataatgggagga

SEQ ID NO: 381014 - DNA, 568 bp, Homo sapiens
aaaaactggtttcatgggccagacccagggccctcaagtctgtgcagcctagggacttgttgccctgtatcccagccactccagccatggctaaaagggcccaaggtacaactcaggctgttgcttcaaaggtgcaaaccccaagccttggccacttgcatgtggtgttgagcctgctgaggcacagaagtcaagaattaaggtttgggaacctctgaccagatttcagaagatgtatggaaatgcctggatgccctggcagaagtttgctgcagaagygggaccctcatggagaacatctgctagggcagtggagaagggaaatgtgaagttggagcccccacacagagtccctactgtggcactacctagtggagctgtgagaagagggtcaccatcctccagaccccagaatggtagatccactgacagcttgcactatgtgcctggaaaagccacagacaatgccatcctgtgagagcagccagaaggggggctaaaccctgcaaagccacaggggtggagctgcccaaggtcatgggagccgatctatcattttgtagcttta

SEQ ID NO: 381015 - DNA, 573 bp, Homo sapiens
ttttttctatataagccaaatacttatgtctagtgctactaattctgacttgagtcataataatagaraataatggatgctcctcttgtagttgcattatctgggtacattcagagtcctagaatccttgataagaagaggaggctgattctcttcacaaaagatacagcaaaaggatcacaaatgcaaacttaaacagttccagtggcctttctcaaaggatccagagagtttttgtttatttgtttgtttgtcttgaggaaagaaaacagaaatggtgttttgagaaaaaggtggctgccaagacatttaggggttttaagactcttgatgggtcacctctcaggatttatggagttttaactgagaatgtctcagagtaggtctgaaaacccattctgtggttattccttaatttctgaatatagagttggaataaatatgttagcatctggcagaatcctcactttgactcttaaactcatgggatgaaagtatttaaattcataaggatcaaatttacacccactgaactctggcagtctgacaagatattaaacaaaagcaaagtca

SEQ ID NO: 381016 - DNA, 567 bp, Homo sapiens
tcacttggtgctttttatatatctcagttacacaatttatcacttgagttgttgaggaaatgatcgttatttttattgtgctgttagcgttagcacacagtccagtatagtgcaggcaatggatgtttcttaaatattaaggtattactattagttataaagtcagcctatatttttattcaggcataccttattgtattgtacttcactttattgtgtttcacaaatattgcacttttttacaaattgaagatttgtagtacctgtgagttgagcaagtccactgacaccagttttttcaacgcaagtgctcccaacgtgtctctgtcacatttgggtaatacttgcaacattacaaactttttcattattattatataggttagtgtgatctgtgaatagtaatctttgattttactaagctaattgttttggagtgtcaccaactgtgcccttataagacagcgaacttgataaatatgtgtgttctgactgctccactccctgttcccctacttctctccctctcgtygggcctccttattccctgagacacaacaatattga

SEQ ID NO: 381017 - DNA, 348 bp, Homo sapiens
ctgtgtggctggtgtgaaattagcccataagctacagtgtgtacattgcaaacgacttctcagagcaggtcctcattaaattatttacagattcagtggtaaaaaacgcagcacaagtttaagatgtttatatgattaataataatattaataccaagaaagcatttatcagtgactttttaaattcctagtttctctttctctttctgttctagccaagctctgtcaaataaatgttcraagtctctctactaaagaactcagctggcctcagtttctgagcatagtagctccaacaaacaagttttatcagaaattatcaatcctctatgcattcattcagaattt

SEQ ID NO: 381018 - DNA, 522 bp, Homo sapiens
ataatatgcaaaattcttatcccttaacagtttcatctccattccttttagttgttttacattacaaaattactgtgtgtgcctgaaaatgactattaatgattattttacatgtgttattccttaaattttgtcagaagcaaaatgtatatttgcaaaccaaagtcacaataatattagctattatactaatawttgtatttaaaaaatttttggtctcttaaatcacatagaaaactaaaagtgtagttacaaaccattgttacaatagtactagattttaaaattttccaggtatttacctttgtgttctttattcatttggcttcaagttactgtctagtatcctttcaattctacctgtaggattcccttaagcatttattgcaggataggtgtagtggaaataaagtttatctgtagtgaaaagcttttgtttatctgagaatgtcttaatttctcctttacttttgtggggtagttttgccagctataggtttcttggttgacagttttaggatg

SEQ ID NO: 381019 - DNA, 621 bp, Homo sapiens
atattcaatcaatatttgccrttgttaatgagtctggcatacttggcttgagtctttgttctacttaattcaatttcaattttttgactacaaagaaatgactgttaatcctcaaaaagtgtccattttttcctaaattaaatatttcatttttatggtatcatctgctaatccccacagtaattgttttaattaaaggaaaactatcctctttatttcagtatgacttatccaaaatattttgtgggtctcttcataattcttacatcactgaattactcttaatttatttccacaaaaatattccctcttatcttctattcctcaagatgtctattatgaacacgtggataccaaaattaaaaatataaggccatttacaagaggatctcttatagaataataacccagttagagaaaatatttctaaaaaattattaataattgttttataatatatttatacttattttcatatttacctcatatattatataaaactatagtactttgttataacattttattaatatcattacattttgtaacatttacaccatctgaatgagtttatagaaagcgcttggtattggaggagttttggcaaaagtctgaatgggt

SEQ ID NO: 381020 - DNA, 621 bp, Homo sapiens
atattcaatcaatatttgccattgttaatgagtctggcatacttggcttgagtctttgttctacttaattcaatttcaattttttgactacaaagaaatgactgttaatcctcaaaaagtgtccattttttcctaaattaaatatttcatttttatggtatcatctgctaatccccacagtaattgktttaattaaaggaaaactatcctctttatttcagtatgacttatccaaaatattttgtgggtctcttcataattcttacatcactgaattactcttaatttatttccacaaaaatattccctcttatcttctattcctcaagatgtctattatgaacacgtggataccaaaattaaaaatataaggccatttacaagaggatctcttatagaataataacccagttagagaaaatatttctaaaaaattattaataattgttttataatatatttatacttattttcatatttacctcatatattatataaaactatagtactttgttataacattttattaatatcattacattttgtaacatttacaccatctgaatgagtttatagaaagcgcttggtattggaggagttttggcaaaagtctgaatgggt

SEQ ID NO: 381021 - DNA, 621 bp, Homo sapiens
atattcaatcaatatttgccattgttaatgagtctggcatacttggcttgagtctttgttctacttaattcaatttcaattttttgactacaaagaaatgactgttaatcctcaaaaagtgtccattttttcctaaattaaatatttcatttttatggtatcatctgctaatccccacagtaattgttttaattaaaggaaaactatcctctttatttcagtatgacttatccaaaatattttgtgggtctcttcataattcttacatcactgaattactcttaatttatttccacaaaaatattccctcttatcttctattcctcaagatgtctattatgaacacgtggataccaaaattaaaaatataaggccatttacaagaggatctcttatagaataataacccagttagagaaaatatttctaaaaaattattaataattgttttataatatatttatacttattttcatatttacytcatatattatataaaactatagtactttgttataacattttattaatatcattacattttgtaacatttacaccatctgaatgagtttatagaaagcgcttggtattggaggagttttggcaaaagtctgaatgggt

SEQ ID NO: 381022 - DNA, 565 bp, Homo sapiens
aaaactttatggttacagagcagactatagtgacatccttatattatgaaaatgcagcccacaaaagtcaacaggtagtagtagagaacgaatgggctttagataatttaagatattaatatatgccaatgtgtaaaagaagttgagacataaaattgatggaataagaaatataggcttaagtatatatgtgtccaatctccatgaataggtgtgtgttatgttatgaaggtagctaaaagaaaaacaaggtagagatataagtatacatttgcaaactgaggaaaaggagacaacattttagcaagttatattttcgaatttcatttaaaaatctgtataattattgaagttcatgaagaaaaaaatgaaggtacaaattatattatttgcagttgatgagaagtgtmtgcttccattgcccgtgaatccctaacagaatggtgccaggctccaccaggagaccttcctgagtcccatctgaaagcctccacctgaatgcgtccctcattttaatgacccagccaggctacctctgaagagaagggcagttctcagcagcctg

SEQ ID NO: 381023 - DNA, 566 bp, Homo sapiens
gagaacgaatgggctttagataatttaagatattaatatatgccaatgtgtaaaagaagttgagacataaaattgatggaataagaaatataggcttaagtatatatgtgtccaatctccatgaataggtgtgtgttatgttatgaaggtagctaaaagaaaaacaaggtagagatataagtatacatttgcaaactgaggaaaaggagacaacattttagcaagttatattttcgaatttcatttaaaaatctgtataattattgaagttcatgaagaaaaaaatgaaggtacaaattatattatttgcagttgatgagaagtgtatgcttccattgcccgtgaatccctaacagaatggtgccaggctccaccaggagaccttcctgagtcccatctgaaagcctccacctgaatgcgtccctcattttaatgacccagccaggctacctctgaagagaagggcagttctcagcagcctgaggggtgctggtagagayataccaaaaggtaagaggaattagaagaaagtggtccccagctgtgtttgtgtctcataacctata

SEQ ID NO: 381024 - DNA, 608 bp, Homo sapiens
tcacactactgacctggatcccatgcctgccaagggcgagtaaggtatggagcagtgaggggtatgtgagcaaatgtggggtctggctactgtacagtcagacacactggctggctgttgcagtggcgtggacagctccagataccagcatgggagccaggtctgtacaaagctatggctggatcaggagcactgcaagccacttccacagctggcacttgggaacccggaagcacctggaagtttggagatgccaggaaccacagggccacaaagagggagtcatagccctacctcagggagctcccagctctgggctccccaaagggccacagctcttctcttctctttgcccacaaygtggtaagcaaggggcatatttcagcactgtttgtgttacagcatttttagccctgccatttgatgaatcctgagttcttgtcctgtgatcaggaagaataagatatgcagacaagtggaggatgatcaaaatgaagaagagctttattgagcaatagaataactcagaggaaaccctcagtgtgtagctccttcctgcagccagggtgtccaaacaagtgttcagctcctagaaaagaggagaccct

SEQ ID NO: 381025 - DNA, 608 bp, Homo sapiens
tcacactactgacctggatcccatgcctgccaagggcgagtaaggtatggagcagtgaggggtatgtgagcaaatgtggggtctggctactgtacagtcagacacactggctggctgttgcagtggcgtggacagctccagataccagcatgggagccaggtctgtacaaagctatggctggatcaggagcactgcaagccacttccacagctggcacttgggaacccggaagcacctggaagtttggagatgccaggaaccacagggccacaaagagggagtcatagccctacctcagggagctcccagctctgggctccccaaagggccacagctcttctcttctctttgcccacaatgtggtaagcaaggggcatatttcagcactgtttgtgttacagcatttttagccctgccatttgatgaatcctgagttcttgtcctgtgatcaggaagaataagatatgcagacaagtggaggatgakcaaaatgaagaagagctttattgagcaatagaataactcagaggaaaccctcagtgtgtagctccttcctgcagccagggtgtccaaacaagtgttcagctcctagaaaagaggagaccct

SEQ ID NO: 381026 - DNA, 607 bp, Homo sapiens
atgtcagtaggccgtgaacaggcctggaaaaggcactgcaagttcccactctagtctgagggactggcagcccgatctccagacttcaggccctccctgacctaaaggtgggacctcaccagggacctatcccttccactcaggagcctgtctgctttctgcctgcagtccatggcaaccaggctgcttacaccaaggggcacctgtaggccagtgctgagctgccgttgaaccccctcagcctcctccagcccccacacttgtgggcacccaaagtccagggggagctgaggcagcagggggctggcattgtcagcactgccttgagcgtgtgcacccctgactgggctgtgagagcacccaggcttggccccaggttgctctgagatcgcagtgggtgctgacagcaaagagaagctggaggtggaagcatgcacttccaagcctgcaagggcagtgaagggtgcttcctgggcccccaagagcacagagatgcccragtccagagccccaacttgaatacgtgcagctgagcccaagtggggtgggggaccctgcctgctcccagtccccaaaagcacatggagacctgggtccatagccccaa

SEQ ID NO: 381027 - DNA, 604 bp, Homo sapiens
gggcctgggctcacgtctgggacaggggctacatctccacgagctccccctgttgggagagtcaggctcagaggtcaccccaatgcaggatggcctggagcagagcctccttcctaagcaaaggaatcctgtgctcttggagttggcacagtggctgcactgctggccaggtccccaaaacaggcgctgctcccacttcccatcctgggtccccaaagtgtggccccagctccacaccctgggcccagcccccatgctttgtgtgtaagtgcagcactgccccgggcccagctgtgccttggggcccctttttgtgggacagcactgctcctccaccggtgggtgacccagcctgrccccatcacagcagcccccactgtggcctgaaaagcctgaaatatttaccatctggccctttacaaaaaaaggacttaccaatgcctggcttaaaatgcccattaaaatttgcctgatgtagagaactttgtggttccttcctcaatatttttactactcacaaataatttgtctaaactaatcatggcagtctggtttcttgtgagagtgattggtttatgttccaatacagacaggagataaatct

SEQ ID NO: 381028 - DNA, 604 bp, Homo sapiens
gggcctgggctcacgtctgggacaggggctacatctccacgagctccccctgttgggagagtcaggctcagaggtcaccccaatgcaggatggcctggagcagagcctccttcctaagcaaaggaatcctgtgctcttggagttggcacagtggctgcactgctggccaggtccccaaaacaggcgctgctcccacttcccatcctgggtccccaaagtgtggccccagctccacaccctgggcccagcccccatgctttgtgtgtaagtgcagcactgccccgggcccagctgtgccttggggcccctttttgtgggacagcactgctcctccaccggtgggtgacccagcctgaccccatcacagcagcccccactgtggcctgaaaagcctgaaatatttaccatctggccctttacaaaaaaaggacttacmaatgcctggcttaaaatgcccattaaaatttgcctgatgtagagaactttgtggttccttcctcaatatttttactactcacaaataatttgtctaaactaatcatggcagtctggtttcttgtgagagtgattggtttatgttccaatacagacaggagataaatct

SEQ ID NO: 381029 - DNA, 597 bp, Homo sapiens
accatctggcttagcagcaagattagaggttggcacaattacagctggaatttaaacattatttattcatttgccattgaggcctcatggatgacttaggtctgatgagaaaaaaacacagtgataacaacaattaagggtattgacataaaaaatgaagaaacactgtctttccatakgtttccacgtatgtattcttattttagtattactttaaaaattgtttaatagacatttgttatataaggaaatttacaactattgtgctctctgtttcaccttattacaatggagccagccaagtaatttcattttaatttcaacgtaaatttcaagtgtgcagtacaacttgttatgattttaaaaatatttatatatttgagttcccattgattgctaccttgtaatactcaatgtttctactacggcacaataatttgtgttgtaaaactgctttaaaactgttaaaaactgttttaacgcaaaaattgtgttaaaacaattttgtacaattcattatataaagtggattatttcagatatatatttttatgtgtgtttaatggaaaaaatctcatcatgtttggttggattata

SEQ ID NO: 381030 - DNA, 629 bp, Homo sapiens
gtgtagcctctatatgatttgttcarctgtcattaacatccgtgttgtctgtgagttgctcaatggataggatgcagtgctagtggaggctgtggcaaggtttttgctgggtacagtgacacagtttaggtcattccatgggcaccagttgtagtgatggtaggccaggtaggtgaatctctgttcccctgggtagcatgcatggccttagcagtgttagtcgtggcagcaggctcagccttgggcccctgtgcagcatgtacaagtgccagcttggcagcagcagaatgggaagactgattatcatgtctggatggcaccaataggcatcagtgacagtcagggtgagactgtccttatcctcctaggtttgctcatgtgtcagtggtaatgggcaaggcaggcttatctccagaccctcagacaatacacatggacaacaactgcaggtgaaataagcttttccgtaggtccctggaaggtgtgcatgtgtaatggaagtggtagacaaagtgactcgatttccaggccccagtatgatgtatgtaagcactgatgactgtggtgtcaagtggcatggacttgtcctcaggtcttcatatggtgtgcacaggtgcttgcagtagtag

SEQ ID NO: 381031 - DNA, 629 bp, Homo sapiens
gtgtagcctctatatgatttgttcaactgtcattaacatccgtgttgtctgtgagttgctcaatggataggatgcagtgctagtggaggctgtggcaaggtttttgctgggtacagtgacacagtttaggtcattccatgggcaccagttgtagtgatggtaggccaggtaggtgaatctctgttcccctgggtagcatgcatggccttagcagtgttagtcrtggcagcaggctcagccttgggcccctgtgcagcatgtacaagtgccagcttggcagcagcagaatgggaagactgattatcatgtctggatggcaccaataggcatcagtgacagtcagggtgagactgtccttatcctcctaggtttgctcatgtgtcagtggtaatgggcaaggcaggcttatctccagaccctcagacaatacacatggacaacaactgcaggtgaaataagcttttccgtaggtccctggaaggtgtgcatgtgtaatggaagtggtagacaaagtgactcgatttccaggccccagtatgatgtatgtaagcactgatgactgtggtgtcaagtggcatggacttgtcctcaggtcttcatatggtgtgcacaggtgcttgcagtagtag

SEQ ID NO: 381032 - DNA, 629 bp, Homo sapiens
gtgtagcctctatatgatttgttcaactgtcattaacatccgtgttgtctgtgagttgctcaatggataggatgcagtgctagtggaggctgtggcaaggtttttgctgggtacagtgacacagtttaggtcattccatgggcaccagttgtagtgatggtaggccaggtaggtgaatctctgttcccctgggtagcatgcatggccttagcagtgttagtcgtggcagcaggctcagccttgggcccctgtgcagcatgtacaagtgccagcttggcagcagcagaatgggaagactgattatcatgtctggatggcaccwataggcatcagtgacagtcagggtgagactgtccttatcctcctaggtttgctcatgtgtcagtggtaatgggcaaggcaggcttatctccagaccctcagacaatacacatggacaacaactgcaggtgaaataagcttttccgtaggtccctggaaggtgtgcatgtgtaatggaagtggtagacaaagtgactcgatttccaggccccagtatgatgtatgtaagcactgatgactgtggtgtcaagtggcatggacttgtcctcaggtcttcatatggtgtgcacaggtgcttgcagtagtag

SEQ ID NO: 381033 - DNA, 629 bp, Homo sapiens
gtgtagcctctatatgatttgttcaactgtcattaacatccgtgttgtctgtgagttgctcaatggataggatgcagtgctagtggaggctgtggcaaggtttttgctgggtacagtgacacagtttaggtcattccatgggcaccagttgtagtgatggtaggccaggtaggtgaatctctgttcccctgggtagcatgcatggccttagcagtgttagtcgtggcagcaggctcagccttgggcccctgtgcagcatgtacaagtgccagcttggcagcagcagaatgggaagactgattatcatgtctggatggcaccaataggcatcagtgacagtcagggtgagactgtccttatcctcctaggtttgctcatgtgtcagtggtaatgggcaaggcaggcttatctccagaccctcagacaatacacatggacaacaactgcaggtgaaataagcttttccgtaggtccctggaaggtgtgcatgtgtaatggaagtggtagacaaagtgactcgatttccaggccccagtatgatgtatgtaagcactgrtgactgtggtgtcaagtggcatggacttgtcctcaggtcttcatatggtgtgcacaggtgcttgcagtagtag

SEQ ID NO: 381034 - DNA, 597 bp, Homo sapiens
accatctggcttagcagcaagattagaggttggcacaattacagctggaatttaaacattatttattcatttgccattgaggcctcatggatgacttaggtctgatgagaaaaaaacacagtgataacaacaattaagggtattgacataaaaaatgaagaaacactgtctttccataggtttccacgtatgtattcttattttagtattactttaaaaattgtttaatagacatttgttatataaggaaatttacaactattgtgctctctgtttcaccttattacaatggagccagccaagtaatttcattttaatttcaacgtaaatttcaagtgtgcagtacaacttgttatgattttaaaaatatttatatatttgagttcccattgattgctacyttgtaatactcaatgtttctactacggcacaataatttgtgttgtaaaactgctttaaaactgttaaaaactgttttaacgcaaaaattgtgttaaaacaattttgtacaattcattatataaagtggattatttcagatatatatttttatgtgtgtttaatggaaaaaatctcatcatgtttggttggattata

SEQ ID NO: 381035 - DNA, 488 bp, Homo sapiens
gggctcttacctttccctttcgttacgtacaaaaattacctcaagtaggttaaagtttaaatgaaagccctcaaactattacaawcttagaaggaaatgtagaaaacacaattctgggcatcaaacttgggaaataatttatgattaagttctcaaaagcaattgcaacaaaaacaaaaactatcaagtagaatttaattaaactaaagagcttctgtacataaaagaagtataaacagagtaaacagacaacccacattacgggtgaaaatattcaccaactatgcatagacaaatgtctaatatccaggatctataaagaacttaaagaaatcaacaagaaaaaaaacatataatcttattaaaatgtgggcaaaatacatgaacaggcacttctcaaaagaagacatacaattggccaaaaaaacatgaaaaaatactccatatcaccaatcatcagagaaatgcaaatcaaaactacaatgaga

SEQ ID NO: 381036 - DNA, 488 bp, Homo sapiens
gggctcttacctttccctttcgttacgtacaaaaattacctcaagtaggttaaagtttaaatgaaagccctcaaactattacaatcttagaaggaaatgtagaaaacacaattctgggcatcaaacttgggaaataatttatgattaagttctcaaaagcaattgcaacaaaaacaaaaactatcaagtagaatttaattaaactaaagagcttctgtacataaaagaagtataaacagagtaaacagacaacccacattacgggtgaaaatattcaccaactatgcatagacaaatgtctaatatccaggatctataaagaacttaaagaaatcaacaagaaaaaaaacatataatcttattaraatgtgggcaaaatacatgaacaggcacttctcaaaagaagacatacaattggccaaaaaaacatgaaaaaatactccatatcaccaatcatcagagaaatgcaaatcaaaactacaatgaga

SEQ ID NO: 381037 - DNA, 494 bp, Homo sapiens
aacacctttcttatgcacagttgcccactttaattggattatattgtgaagcaatttatrcccccagagcattgtcataaaataaataaataaataaacaaacaaacaaacaaacaagcaatcagctggcaaagaacagaggctgttagctggatacaatactaaaagaggaagcccagctaaaagcttaagggactcttcagtaagatacacttaaaaagaggctggctaagaccacagccatctctgatggtcagacagaatgtgcacaaaatgcccaagtggggccctctaaggagtgacatcagaaaccacacactgccagaggaaaatagctcatggaactaattcagccagatcactaaccaaataataacaagcccttgacagagagatgggctgctggtgggtcaacctgatttccagattggctacaatctgttatctaatatgtccaatttttaacagaaaagaggcatacaaagaaacaggaa

SEQ ID NO: 381038 - DNA, 494 bp, Homo sapiens
aacacctttcttatgcacagttgcccactttaattggattatattgtgaagcaatttatacccccagagcattgtcataaaataaataaataaataaacaaacaaacaaacaaacaagcaatcagctggcaaagaacagaggctgttagctggatacaatactaaaagaggaagcccagctaaaagcttaagggactcttcagtaagatacacttaaaaagwggctggctaagaccacagccatctctgatggtcagacagaatgtgcacaaaatgcccaagtggggccctctaaggagtgacatcagaaaccacacactgccagaggaaaatagctcatggaactaattcagccagatcactaaccaaataataacaagcccttgacagagagatgggctgctggtgggtcaacctgatttccagattggctacaatctgttatctaatatgtccaatttttaacagaaaagaggcatacaaagaaacaggaa

SEQ ID NO: 381039 - DNA, 494 bp, Homo sapiens
aacacctttcttatgcacagttgcccactttaattggattatattgtgaagcaatttatacccccagagcattgtcataaaataaataaataaataaacaaacaaacaaacaaacaagcaatcagctggcaaagaacagaggctgttagctggatacaatactaaaagaggaagcccagctaaaagcttaagggactcttcagtaagatacacttaaaaagaggctggctaagaccacagccatctctgatggtcagacagaatgtgcacaaaatgcccaagtggggccctctaaggagtgacatcagaaaccacacactgccagaggaaaatagctcatggaastaattcagccagatcactaaccaaataataacaagcccttgacagagagatgggctgctggtgggtcaacctgatttccagattggctacaatctgttatctaatatgtccaatttttaacagaaaagaggcatacaaagaaacaggaa

SEQ ID NO: 381040 - DNA, 494 bp, Homo sapiens
aacacctttcttatgcacagttgcccactttaattggattatattgtgaagcaatttatacccccagagcattgtcataaaataaataaataaataaacaaacaaacaaacaaacaagcaatcagctggcaaagaacagaggctgttagctggatacaatactaaaagaggaagcccagctaaaagcttaagggactcttcagtaagatacacttaaaaagaggctggctaagaccacagccatctctgatggtcagacagaatgtgcacaaaatgcccaagtggggccctctaaggagtgacatcagaaaccacacactgccagaggaaaatagctcatggaactaattcagccagatcactaaccaaataataacaagccctygacagagagatgggctgctggtgggtcaacctgatttccagattggctacaatctgttatctaatatgtccaatttttaacagaaaagaggcatacaaagaaacaggaa

SEQ ID NO: 381041 - DNA, 569 bp, Homo sapiens
tgggagaaatgttcttacacagccttagagtgatttcgtctctattctgagcttgttagggtcaggaaaaggcccttttatggaccagagttctactggcttcttgttatatatttttttctttcttttttattttggtacatagatttttttccatttttattttcaatgttggaaaagttgcaaaaagcctgggactgatggtgatggaaattttgtgccaagaattcaatgatgagagcaatataaggttgccactcgctattttatctcacataaaaagaaacatcaaattctggatctcaaaaaatattgggatgtttcacaaatatagcagatttttcttttaaaaaatttttctctcaattttttttaaacttttaagttcaggagtatatgtgcaggtttgttatataggtaaacttgtgtcatgagaatttgttttatagattattttgccacccatgtattaagcctagtaccygttaagttatttttcctaatcctctctctcctcccaccctccaccttccaaaaggccccagagtgtgttgttcccctctatgtgt

SEQ ID NO: 381042 - DNA, 395 bp, Homo sapiens
tctcatcttttaactcccacttatagtgagaacatgtggtatttgwttttttgttgctgcattagttttctaaagataatggcctccagatccatccatgtccctgcacaggacatgatcttgcttttgttttttatgtctgcatagtattccatggtgtatatgcatcgtatttttttaattcagtctaccattgatgggcatttaggttgattccatgtccttgctattgtgaatagtgctgcaatgaacatgtgtgtgcacgtgtttttatgattaaaaaaactaatacccagtaatgggattactgggttgaacagtatttctgtttttaggtatttgaggaattatcacactgttttccacaatggttgaaataatttacactttcaccc

SEQ ID NO: 381043 - DNA, 581 bp, Homo sapiens
tgagtaggatcttgaaaaatgagtagacgtgtaaatgccrcaagtaaaggcaaagatatatacatcattgtcggaataggaaagagtgtggcacatctgggaatgatgaggggccttatgcagctgggggagtctattggtcagacatgaggctggaaatggtgcaagggctagatagggaagggcttcatatgcgatgccaagaggcacagactatgctgtgattccctggcagtatagctggtgggacaaagagaaatcaaactcaaaaagttcccctcttgtctaccatgtgtatactcaagtaggtgatgagattgtaggaagaaggtaggatataatagcagataattgggtagccatatagaaaaatcaaataaaatttgacctttaccttataaaacatatttttaaaaacccagtctgggtgtggtggctcatgcttgtaatcccagcactttgggtggccgaggtgggagaatcgctcgagcccaggagtttgagaccaacctgggtaacatagtgagacctcatctgtataagaaatgaacagcagaggggcgaagatggccaattagaag

SEQ ID NO: 381044 - DNA, 593 bp, Homo sapiens
tgataattgaacctttataagtgttgacattttgtgggacaagtcctctcactttgtcaytttcatgggtgtcttggctattcttagctgtttgcatttccgtgaaaatgttagaaacatctaatgaaattaaaatacacacacacatgcacctgcacacacacacacacacacacacacatacacacacacaagtattataaccctgttcagattttccctgggattacattgaatccataggttgattgggggagaaatgacatctttgcaagacagttttccaatccattcctttccatttacctgagtcttctttcagtttctctcaataaagttttatatttctgttcatgtgagtttatacatctcttcttgtctggattcctacatacctgatacttcttgatgctattataagtagaattttttaaattttcattttctgtttgttgctggcatatagaagtaaaattgattttgttttctgacaattttgctaatctttcttaattattaaaaatattaaaattaacttttaatgattcacctacggtacttctgggcagtctgtgagcacaatcataatatct

SEQ ID NO: 381045 - DNA, 619 bp, Homo sapiens
cactattacacaactcacctgaaccttttttaccaagcctttccttttcaatctactgtctttgaaattttctggcaggatctatggaagagtaagttgataatacaagttagtaaatagtaaacatgtaacaaataatcctcagtgaaaatgacatgagagcacataagaaacacccacagtacacaaaacaggtcacaggtcaccaatgtaaatgtgatatccattttcaggaaccctttccctgggtctgtatcctgtatggcctttccatggctcttgtccctataaaagctccctgtgttctcaatgtctgggccataggaactgatctktaacacagactttgttcttttattgtttcctatgtatggatactctgccctggccacaccatgggctcattgtgacaggaaaagtgcctgctgctgcttctttacacccaccctggccaacagaagtacacagtgcagttcaccttcaagaatgaagcatcaggctagagatatcattactatcatctgcaaaagagttaatgattttcaatggcctcacatgacctgggtctggctgaatcatctataagtaatgagccctgcagaattatcagtcacatatt

SEQ ID NO: 381046 - DNA, 611 bp, Homo sapiens
tgaatctgggatctttctccaaaccacactgccccttccttcagtccttcctgtccttggagctgtcctgggttcccagcaagcacagattctcagaaagggacagcagaagaccctaaggctggacatatcaggatatcacatatcctggtgagagtccaaagacttcttttcaaatctgggagggaagaggagagacggcaggagactccatgcccataccccattcaccataaagggagggggaggttggccttgagggccagacaggagaggttctgcaaagggagcagtgtaccctctgaacaatgccgaggacagcacaggtactatgtgaatgttggtgaggagggtgcaggttgctggggtcggtggtgggatgagtagcagtattttggaccccgtgtctaaattcagcctggtcatagatactgccagtggctgtgtctgggaagatgccaagctggggtcacatgggtcctgcctgctgaacctataagtgccrtggggcatgtgtggcagctcctcccaccttctgcctggaccccctggaatgactgccttttggagagggtctatattcagggacctctagaccttagctgggccca

SEQ ID NO: 381047 - DNA, 616 bp, Homo sapiens
gatattaaaaccaagatatttgtgccagtactagaaaaagcaccgtgttcatgatctttccagatgaaaactgctcataataaatgagctgagcccccgttttctcatctataagtaaaataataaatatctttttctcatagaggtagtgtaaggatcaaataaggaaatgctcatgaaatgcttaacaaattagtacataatatcaatcagctaagtcatctattattgctatttatattattcctaatatgtcctcatagtcttggcttgcaaaattctgttatatctgtgtttgtcttcctcagtattccatggcacactctctcattttagcctaatgattattctayttccttgcctttgttcatactgttccatgatctaaaatgttcttcatcctgcgcattcccattatctcatttgtctaaattccagctcttttcatctgtattagtgatcaagtgttgcacaatgaattaataacccaagactttgaaaaacaaacacttattacctcagtttctgttggtccagaatttgggcatggtttaagtgaatactctgcctcagggtctctcatagtgctacaatcaagatgttgccagggttgtag

SEQ ID NO: 381048 - DNA, 522 bp, Homo sapiens
gagagatattcaaatgtcaaagataaaaacatgtctttgtgtataaaaatgctacatttaattttattagtgcagaaacaaactgccctatattctcttcctttgtgacacaatataatgttttcttttaaaagattatgtgactttagctaaaagtcactgtatttaattataagaacaaggaagcaaaggagaaattacttctaaaaatttttaagttattttatgattataaggatttagttctttatattttttcttcactcccgcgtgtgtatttaccgaaaataatatttaaaccaatcacctttaaacagcataaaaaaatcacatctagtgyatgtcacttactgtatctcccaaatgctggaaaagattaaaatgaattaccacagagattttccctctaaaatattaatctcctataaacatagctttacataggcctatacaccaacagaaattggtctttaactgggactaatattctgaatagcctaatgacttattttttcttttaat

SEQ ID NO: 381049 - DNA, 522 bp, Homo sapiens
gagagatattcaaatgtcaaagataaaaacatgtctttgtgtataaaaatgctacatttaattttattagtgcagaaacaaactgccctatattctcttcctttgtgacacaatataatgttttcttttaaaagattatgtgactttagctaaaagtcactgtatttaattataagaacaaggaagcaaaggagaaattacttctaaaaatttttaagttattttatgattataaggatttagttctttatattttttcttcactcccgcgtgtgtatttaccgaaaataatatttaaaccaatcacctttaaacagcataaaaaaatcacatctagtgcatgtcacttactrtatctcccaaatgctggaaaagattaaaatgaattaccacagagattttccctctaaaatattaatctcctataaacatagctttacataggcctatacaccaacagaaattggtctttaactgggactaatattctgaatagcctaatgacttattttttcttttaat

SEQ ID NO: 381050 - DNA, 584 bp, Homo sapiens
agaaagccacaaaagaaacttgtccctaggctaacattaagaacaggcttgataactgtaaattcatatatatatatatatatatatatatatatakagagagagagagagagagagagagagagagagagacagagccagatctagcaagtaacacacacacacacacacacacacatatatatatatattttttttttttttgagacagagtctctctctgtcacccaggctggagtgcaatggtgtgatctcagctcactgcaacctccgcctcccaggttcaagcaattctccagcttcagcctcctgagtagctgggagtacaggcatctgccatcatgcccagctgtggagtttcaccatgttagccaggctggtcttgaactcctgacctcgtgatccacccaccttggcctcccatagtgctggcattacgggtgtgagtcactgtgtctggcctatgagatcatattttaaactcattgaattgcttacaatacaaacacatttctaaaatttacttatatttactaaagatggaggacagagaaaatatgatggaaaagcttagaagcaactcc

SEQ ID NO: 381051 - DNA, 584 bp, Homo sapiens
agaaagccacaaaagaaacttgtccctaggctaacattaagaacaggcttgataactgtaaattcatatatatatatatatatatatatatatatagagagagagagagagagagagagagagagagagagacagagccagatctagcaagtarcacacacacacacacacacacacatatatatatatattttttttttttttgagacagagtctctctctgtcacccaggctggagtgcaatggtgtgatctcagctcactgcaacctccgcctcccaggttcaagcaattctccagcttcagcctcctgagtagctgggagtacaggcatctgccatcatgcccagctgtggagtttcaccatgttagccaggctggtcttgaactcctgacctcgtgatccacccaccttggcctcccatagtgctggcattacgggtgtgagtcactgtgtctggcctatgagatcatattttaaactcattgaattgcttacaatacaaacacatttctaaaatttacttatatttactaaagatggaggacagagaaaatatgatggaaaagcttagaagcaactcc

SEQ ID NO: 381052 - DNA, 584 bp, Homo sapiens
agaaagccacaaaagaaacttgtccctaggctaacattaagaacaggcttgataactgtaaattcatatatatatatatatatatatatatatatagagagagagagagagagagagagagagagagagagacagagccagatctagcaagtaacacacacacacacacacacacacatatatatatatatwttttttttttttgagacagagtctctctctgtcacccaggctggagtgcaatggtgtgatctcagctcactgcaacctccgcctcccaggttcaagcaattctccagcttcagcctcctgagtagctgggagtacaggcatctgccatcatgcccagctgtggagtttcaccatgttagccaggctggtcttgaactcctgacctcgtgatccacccaccttggcctcccatagtgctggcattacgggtgtgagtcactgtgtctggcctatgagatcatattttaaactcattgaattgcttacaatacaaacacatttctaaaatttacttatatttactaaagatggaggacagagaaaatatgatggaaaagcttagaagcaactcc

SEQ ID NO: 381053 - DNA, 456 bp, Homo sapiens
tgtaagcagccatcaacatcaaggcaagatcctccaccagcaaaaagattatgactccctgaaggctcagacaattgttagcattctttaggaaaaatatatttttaattaaggtatgtacattgttttttagacataatagcattatgtcttaataaactacaatatagtatgacataacttttatatgcactggraaaacaaaaaaaaaaatgtgtgtgtgacttgctttaatgcaatggtcactttactgtagtggtttagaaccaaacctgcaatatttcttaggtatgccaacatcctattaataatagtttgcttatatgctacactcctctcagggctcacatgcactacacgtatttccctggctaaaaagggtcttgggggacagaagagtgtggaggctgaaattcaggccatgctttttgacaagcccaatgccctattagaagt

SEQ ID NO: 381054 - DNA, 456 bp, Homo sapiens
tgtaagcagccatcaacatcaaggcaagatcctccaccagcaaaaagattatgactccctgaaggctcagacaattgttagcattctttaggaaaaatatatttttaattaaggtatgtacattgttttttagacataatagcattatgtcttaataaactacaatatagtatgacataacttttatatgcactgggaaaacaaaaaaaaaaatgtgtgtgtgacttgctttaatgcaatggtcactttactgtagtggtttagaaccaaacctgcaatatttcttaggtatgccaacatcctattaataatagtttgcttatatgctacactcctctcagggctcacatgcactacacrtatttccctggctaaaaagggtcttgggggacagaagagtgtggaggctgaaattcaggccatgctttttgacaagcccaatgccctattagaagt

SEQ ID NO: 381055 - DNA, 565 bp, Homo sapiens
ttgtcttttcagaagtggagactgacatcttattgacaggactgctccttattttcttaataaagtgaattgyctctatcagaaactaatgtgaagtcatttttgcattccatttcaattttattttttcttatatacaaccagtcattccaacagagtacactgaataatctattattattagaaaattgtctttacctttaatgaattttacccacatatagtttgattgaatattaccagtaaggtattttattatctgttaatgcaaatctcatatcatgtttcttcttttaaaaatgtcttagctatttttacctattatttctagcagccgattttggagtagttcagctggaatttttattgcaattgtattgtatttatatttatacttagttttagaaggaataaaatttttattatattcagtttgccttttaggaaaaaatacttctccttactaaatttcttttatgtatcttagtgatagcatatagctttcctcatacaagtcctgtacatttcttgttaaggtatttataggttgtttaaactattttct

SEQ ID NO: 381056 - DNA, 572 bp, Homo sapiens
tctattattattagaaaattgtctttacctttaatgaattttacccacatatagtttgattgaatattaccagtawggtattttattatctgttaatgcaaatctcatatcatgtttcttcttttaaaaatgtcttagctatttttacctattatttctagcagccgattttggagtagttcagctggaatttttattgcaattgtattgtatttatatttatacttagttttagaaggaataaaatttttattatattcagtttgccttttaggaaaaaatacttctccttactaaatttcttttatgtatcttagtgatagcatatagctttcctcatacaagtcctgtacatttcttgttaaggtatttataggttgtttaaactattttctatgtttattactaagaatcttttttaatacattttctaaggggttattgctggcagataggaaagctattgatttttaaataattttcaactgagttactcacatttttgtgactgttaatttttcacacacttgcttcagattttctaggcatacaagtatattcctcaaaaatag

SEQ ID NO: 381057 - DNA, 572 bp, Homo sapiens
aaaacagtctaggtacgtagattcaacagggaaaaaatgattttattccctgttttctactttacccacatttactttgggatataagaaatgaaaaaaaggcagttctgtggggtgatattaagcagtaaatgtagctgcaagcttttgaacaatttatcctatagatcaacttgtatattttcagtgaatagcacaagagcacataaatayctcaaggggcccaatgacatgttgaggtcttaaaatatgttctaatataaagaattttgtaatgctgttgtagttgagcatacacgtttttgagctttttaagagagccaatttctctcagatatgttgctcactaaaccagtagaaacttatgggaattttaggctcttgagttgtcttacaactcatatcacagatatccacatctgactatggaattaagaaaaaactgaggaaacaattttggaagacctggaaatcatatcacctgaggttataaacaaattcactctcagattcattttatagaaattaccacagatatgttgcagacaagatcagtcttttgcccatgctta

SEQ ID NO: 381058 - DNA, 582 bp, Homo sapiens
gtccagggaccacactttgagaaccatggctgttaatgaccatatctttatcctaagttatttccccaagaaaaaaaaattgcaaggatattgaggatcatatgataaaggaaaaacaagcacacaagaacacaggtatcatgagcaaaaatgtcaaacacagagctgcaacgatttcagatactggaatcatcagtcacagatgataaaaccattatgctgattttaaccactacagttaaagaaattaaagacaagyttaaaaaaactttagaaaatagaaattgtaaaaaaaatgacaacagatttgaaaaaaatagcaaatagacatctagaaattaaaaatatactatttaaaccaatgggattcacaacagattagatgaagctgaagagagaattaataaactgttatgtaggtcggtaaaggaattcaggtcagacatcagcgatctagagtctgcagtcaaaaatctggcccactgcttggttttgcaagtaaagctttattggaacacagcaatgctcattcatctacgtcttgcttatggcttccatatcctgaactggggtcaggagagt

SEQ ID NO: 381059 - DNA, 582 bp, Homo sapiens
gtccagggaccacactttgagaaccatggctgttaatgaccatatctttatcctaagttatttccccaagaaaaaaaaattgcaaggatattgaggatcatatgataaaggaaaaacaagcacacaagaacacaggtatcatgagcaaaaatgtcaaacacagagctgcaacgatttcagatactggaatcatcagtcacagatgataaaaccattatgctgattttaaccactacagttaaagaaattaaagacaagtttaaaaaaactttagaaaatagaaattgtaaaaaaaatgacaacagatttgaaaaaaatagcaaatagacatctagaaattaaaawtatactatttaaaccaatgggattcacaacagattagatgaagctgaagagagaattaataaactgttatgtaggtcggtaaaggaattcaggtcagacatcagcgatctagagtctgcagtcaaaaatctggcccactgcttggttttgcaagtaaagctttattggaacacagcaatgctcattcatctacgtcttgcttatggcttccatatcctgaactggggtcaggagagt

SEQ ID NO: 381060 - DNA, 582 bp, Homo sapiens
gtccagggaccacactttgagaaccatggctgttaatgaccatatctttatcctaagttatttccccaagaaaaaaaaattgcaaggatattgaggatcatatgataaaggaaaaacaagcacacaagaacacaggtatcatgagcaaaaatgtcaaacacagagctgcaacgatttcagatactggaatcatcagtcacagatgataaaaccattatgctgattttaaccactacagttaaagaaattaaagacaagtttaaaaaaactttagaaaatagaaattgtaaaaaaaatgacaacagatttgaaaaaaatagcaaatagacatctagaaattaaaaatatactawttaaaccaatgggattcacaacagattagatgaagctgaagagagaattaataaactgttatgtaggtcggtaaaggaattcaggtcagacatcagcgatctagagtctgcagtcaaaaatctggcccactgcttggttttgcaagtaaagctttattggaacacagcaatgctcattcatctacgtcttgcttatggcttccatatcctgaactggggtcaggagagt

SEQ ID NO: 381061 - DNA, 579 bp, Homo sapiens
attgtattatagggtataaaaccttcagaaaattgggcctgtatgttccaagtcacatgcacaagaatgtctatagcaacaaaatttacgttatataactataaaaatgattgaattacagataaatatgtgagtgaatctcaaaaaaaaaataatgtgtacaaaagaaacaaggtgaagggcttgatcttggagttcccagacttcataattgtgaacgataatgtctgttgcgtataagccacctaatckatggaattttgttatactagcccaagcctattaagataataatataacaaaagctcatgtaccactcactcaggtgcaacatctatcaatatttttcatgtctaggcttactcactctcctctaattcttttcctggagattttaaaataaagcccatatatcttgtcattttacctgtgaatacatctacattctactttagaaaataaaagcaaatttttaacataaccatcatgctactattttcataccaaataaaagtagtactaattttttaatatcgtcattatatgcccaactgttcttgattctgtcaacaatcatta

SEQ ID NO: 381062 - DNA, 579 bp, Homo sapiens
attgtattatagggtataaaaccttcagaaaattgggcctgtatgttccaagtcacatgcacaagaatgtctatagcaacaaaatttacgttatataactataaaaatgattgaattacagataaatatgtgagtgaatctcaaaaaaaaaataatgtgtacaaaagaaacaaggtgaagggcttgatcttggagttcccagacttcataattgtgaacgataatgtctgttgcgtataagccacctaatctatggaattttgttatactagcccaagcctattaagataataatataacaaaagctcatgtaccactcactcaggtgcaacatctatcaatatttttcatgtctaggcttactcactctcctctaattcttttcctggagattttaaaataaagcccatatatcttgtcattttacctgtgaatacakctacattctactttagaaaataaaagcaaatttttaacataaccatcatgctactattttcataccaaataaaagtagtactaattttttaatatcgtcattatatgcccaactgttcttgattctgtcaacaatcatta

SEQ ID NO: 381063 - DNA, 572 bp, Homo sapiens
ttccataatgtacacttttaatacttacctgattttagctccttccactgtcttctacacaagatgttccagtcggatcttctttctcttgcccagaaaggcctagcttttgctttccaaagagacctttcatgaacttgtcccactatcttcacatgaatagaggcagctgtcctgtttccctcagtcacttccttcttgttagccagatgtcaattaaaagtctctcctcagtgagatctgtcttctcaatcgatatgaccacacccctggtcactcactgtcacatgcagaaggggtattaaaaaccgtttaataatctgtaaagcagaagcatcaatcagaagggacacaggctatacaaacaggtatggctgtcctgttacataattgctgagcatcttccctgatgatatcaagctcttctattctctttagagcattatcactatctgaaattaatcttgacttggctgttgtttgcctcttcctgataagaggwtacagccaggcatggtggcccacacttgtaatctcagcaatttgggaggctgaggtaggtggattacttc

SEQ ID NO: 381064 - DNA, 567 bp, Homo sapiens
ttttagggcaatttcagggtctacagagctttccaatgagattagtgcattgagtacagaaatggcaaaaactcgataagaatctgtaaagagactcagattgtcctgtggctggccatgaacaccagctagaggagtttaaacttaattcagcaagttgaggggacactgctggctctttctcaggagaattgctttctataaaatgtggtttgggaagaatgatctktaaaagctatgaggaatgttttgtatcacggagaaactagaactgggtagatgattttattttgcggtaacatagggcatactttagcatttgacaaccaccatggaaagaagaggctagaaacaaaagataaagacacagtagagttgattacatttagcaacatactgaatttaggattaagagagtagaaagagtcaaaagaaaaggtagagtctttaacagaagtagataacaccaatagcaggaaaaaaacagtttggggagaaaagatgacttgtttaattcttggccttaagtctgatgtattgacaatgtagtttattcattcaagtgga

SEQ ID NO: 381065 - DNA, 563 bp, Homo sapiens
acagaaatggagtacacctgtatgaaaatgaattaaagccaggaggcaataaaacctggccaatagctgcttaaatagctgccctggaagtcggccaaaaacagattagattaattttgcaaaagggagtcaataacaattgcaagattatttcaaggcagagctcaaacctagtccattggaaatgaaaactgaataataaaagatacaacatggaagggcatcaaaactgtttaagatgttaaatgactggcaaaacagatagaaaacaagtagcaataatttcatcttcatgaaaaaatacacgttctattaactaaaagaaacaaagaaatgagtcgattttggaattgtaagaacagaagcacaaagaagattcatagatcttgaaataatatttagactcacaagcgtcctgtatacyataagtaagttgcaagtgaggtgatcttttttatttcattttaaattctgggatatatgtgcaggatgtataggtttgttacataggtaaatgtgtgtgatagtggtttgctgcacctatcaatccatcacctatgtat

SEQ ID NO: 381066 - DNA, 619 bp, Homo sapiens
cagttcaaacccatgttgtttaaagatcaactgtataaagaaactagtaatgtgcttaaaacccacttatgcctagtgttccattattggaacgttaagcttaagggagttatttatatcctactgtacaaggtcatcaacaaggtctgattttccacaaaaaattgcgatttctggcataaatggtttaaatayggtaagtgttcagcagattatcaaatattgtgtgtagtttccaagcactgaaatatttgaagtacaggctcactaatattactatctaatgggtttctgggtagtaaagatcgcacagaagcttaattatgtgagtgaaatgaatcacaactaaatagaaggaaaggaaaaatatatttagaaaactcaaaagtgaactagactgaagtgagattgaatattaggcatcaatatcacagtagagaagaatactaaatgtaccagttaagacaaaaaacccacaaagctacaaggttattacatatataagtataatatttcagaacagtcttatatgatcttaaggagaagattttcttcttaccctcaaaattatactttttccaaaataaatcccattgtacagcgcagtgaaatacaaaat

SEQ ID NO: 381067 - DNA, 522 bp, Homo sapiens
atgagatttgggtggggacacaaatccaaaccatatcatttctccatttccactagtagtggatgaaaactctgtatcagcacataccttctaacacttgacatcatccaagctgtctaaaaagcagtcacttggtatctcacagtcattttaatctgcattgtttgattactaattaayttttaagattctttttctgaaaattacatgttcatgtcatctacccattttttcactgtggttcctgtttgttgtttggtgaagtttggaagcaagacaaagcaacttgcgtacagaaaaatgaaaagagggataggataaagccagggtatttctaagaattccatggcttatatgctatagagtgttcagaggtagtagtccttcatgtatcaatacattgtttctcttcactgagagaaaaccatgaatagcttaaagtcaaatgctctgtgttgttgcatagagactctggagagatatattaaggaagggaaagaaagacataaagataaagttgct

SEQ ID NO: 381068 - DNA, 522 bp, Homo sapiens
atgagatttgggtggggacacaaatccaaaccatatcatttctccatttccactagtagtggatgaaaactctgtatcagcacataccttctaacacttgacatcatccaagctgtctaaaaagcagtcacttggtatctcacagtcattttaatctgcattgtttgattactaattaacttttaagattctttttctgaaaattacatgttcatgtcatctacccattttttcactgtggttcctgtttgttgtttggtgaagtttggaagcaagacaaagcaacttgcgtacagaaaaatgaaaagagggataggataaagccagggtatttctaagaattccatggcttatatgctatagagtgttcagaggtagtagtccttcatgtatcaatacattgtttctcttcactgagagaaaaccatgaatagcttaaagtcaaatgctctgtgttgttgcatagagactctggagagatatattaaggaagggraagaaagacataaagataaagttgct

SEQ ID NO: 381069 - DNA, 518 bp, Homo sapiens
ctctcttgtctcttcatacccacaattcttgttaaatccagcttcctgccttctccttgcacgtctgcacctgtgtaactgaatgtggatgaatgcacacaaacacacacccacaccataagtattcagacttgtctcgctttaaattaatgcccacaaattttaagcaggccctaagtaggaatcctattacatttcttaatacacttcccaagtcccttcactctcattcaatcagataacaattttgcagcctcctctctctctctgaaaatcttcaatacctcctctccatcttcgcgcttcttcagatctttgatcaaatgtcaatttcccagtgacgattctytaatgctaatggacgttattgcttctacccaagcccctttgccttgctcagtatttctctggcactagtctccttctgactcatcatattaatgggcttacttagtaggtgtattgtttgtcttccctagtagaatatgaactcctcaattacaggaaatttgtccact

SEQ ID NO: 381070 - DNA, 518 bp, Homo sapiens
ctctcttgtctcttcatacccacaattcttgttaaatccagcttcctgccttctccttgcacgtctgcacctgtgtaactgaatgtggatgaatgcacacaaacacacacccacaccataagtattcagacttgtctcgctttaaattaatgcccacaaattttaagcaggccctaagtaggaatcctattacatttcttaatacacttcccaagtcccttcactctcattcaatcagataacaattttgcagcctcctctctctctctgaaaatcttcaatacctcctctccatcttcgcgcttcttcagatctttgatcaaatgtcaatttcccagtgacgattctctaatgctaatggacrttattgcttctacccaagcccctttgccttgctcagtatttctctggcactagtctccttctgactcatcatattaatgggcttacttagtaggtgtattgtttgtcttccctagtagaatatgaactcctcaattacaggaaatttgtccact

SEQ ID NO: 381071 - DNA, 549 bp, Homo sapiens
ggaataacagctctagaagttttcagattcatctttgacagtccttaacaatgtaacaaacactgcttactttggccttaacttttttatttataaaataaaagagtttatgaatttaggaacatttgttctcaattttttttcctttctacattctcattttggaaataatttgcaaatgtctggcctttgctttttgcccaaagactatcaagataaacttgatagaccctcccaaatcccacctataaaacctgtattacgctcgctttacaaaaatgaagacttgtttctcacatattctatttaatctatttcatctatgagttaattttcaatatatacttctacggaaaggatgatatggggacaaagaaccacaatagcttcttccaatgagaagagtaygatgtaggtggataaactagaaaaaaaatgctattatatcactcaggattcttagttgtaaaagacaaaatctagtctcttgagttgatacagaagaaaaatttactaaatgaagtcacttggttcatagtgccagtgatc

SEQ ID NO: 381072 - DNA, 563 bp, Homo sapiens
gaaggatgtagaaaagaatctggatcactggctttccagttcagtctccaagaaacatggagtaacttcattatctgtcctgaagcagccacgtattttgaaaaaataaccaagaacaccaagttgggatatgcttcatactggaggccctagatttcattctggcaatttagaaaccatccatcccaaacaatcccacagccatttgttccactttgaaaatctcaytggtctcttttagagaccaagaagagttgctaaaaatgttagtgctgtatcactttatatattcatttatttattcatttattcactgatttcattctattttatattttgttccagataaaatcccctttccctattgacccattttctatttatttgtacttctaggggagcccttttcaagtttttcacacttccagtaaatccccaagctaaattggaatacctagtaaaatgaatacattctgcctcttgcaaaatgtcttctgttgggtttcttttttttctaattagagttctttctgatatgtaattttcggaaggcttgctggtag

SEQ ID NO: 381073 - DNA, 563 bp, Homo sapiens
gaaggatgtagaaaagaatctggatcactggctttccagttcagtctccaagaaacatggagtaacttcattatctgtcctgaagcagccacgtattttgaaaaaataaccaagaacaccaagttgggatatgcttcatactggaggccctagatttcattctggcaatttagaaaccatccatcccaaacaatcccacagccatttgttccactttgaaaatctcactggtctcttttagagaccaagaagagttgctaaaaatgttagtgytgtatcactttatatattcatttatttattcatttattcactgatttcattctattttatattttgttccagataaaatcccctttccctattgacccattttctatttatttgtacttctaggggagcccttttcaagtttttcacacttccagtaaatccccaagctaaattggaatacctagtaaaatgaatacattctgcctcttgcaaaatgtcttctgttgggtttcttttttttctaattagagttctttctgatatgtaattttcggaaggcttgctggtag

SEQ ID NO: 381074 - DNA, 563 bp, Homo sapiens
gaaggatgtagaaaagaatctggatcactggctttccagttcagtctccaagaaacatggagtaacttcattatctgtcctgaagcagccacgtattttgaaaaaataaccaagaacaccaagttgggatatgcttcatactggaggccctagatttcattctggcaatttagaaaccatccatcccaaacaatcccacagccatttgttccactttgaaaatctcactggtctcttttagagaccaagaagagttgctaaaaatgttagtgctgtatcactttatatattcatttatttattcatttattcactgatttcattctattttatattttgttccagataaaatcccctttccctattgacccattttctatttatttgtacttctaggggagcccttttcaagtttttcacacttccagtaaatccccaagctaaattggaatacctagtaaaatgaatayattctgcctcttgcaaaatgtcttctgttgggtttcttttttttctaattagagttctttctgatatgtaattttcggaaggcttgctggtag

SEQ ID NO: 381075 - DNA, 545 bp, Homo sapiens
actggctttccagttcagtctccaagaaacatggagtaacttcattatctgtcctgaagcagccacgtattttgaaaaaataaccaagaacaccaagttgggatatgcttcatactggaggccctagatttcattctggcaatttagaaaccatccatcccaaacaatcccacagccatttgttccactttgaaaatctcactggtctcttttagagaccaagaagagttgctaaaaatgttagtgctgtatcactttatatattcatttatttattcatttattcactgatttcattctattttatattttgttccagataaaatcccctttccctattgacccattttctatttatttgtacttctaggggagcccttttcaagtttttcacacttccagtaaatccccaagctaaattggaatacctagtaaaatgaatacattctgcctcttgcaaaatgtcttctgttgggtttcttttttttctaattagagttctttctgatatrtaattttcggaaggcttgctggtaggagaggga

SEQ ID NO: 381076 - DNA, 545 bp, Homo sapiens
actggctttccagttcagtctccaagaaacatggagtaacttcattatctgtcctgaagcagccacgtattttgaaaaaataaccaagaacaccaagttgggatatgcttcatactggaggccctagatttcattctggcaatttagaaaccatccatcccaaacaatcccacagccatttgttccactttgaaaatctcactggtctcttttagagaccaagaagagttgctaaaaatgttagtgctgtatcactttatatattcatttatttattcatttattcactgatttcattctattttatattttgttccagataaaatcccctttccctattgacccattttctatttatttgtacttctaggggagcccttttcaagtttttcacacttccagtaaatccccaagctaaattggaatacctagtaaaatgaatacattctgcctcttgcaaaatgtcttctgttgggtttcttttttttctaattagagttctttctgatatgtaattttyggaaggcttgctggtaggagaggga

SEQ ID NO: 381077 - DNA, 582 bp, Homo sapiens
ttcagataaacattctgtgagataaaacctttagcctcaataaggtggaatcacattactttttatactttgttccttatcttctagagcaatcactctcctatgaaagaaagccagttgaagttgactgaatttgtcagcttggatgaattattactgtaatatgkaatatgttgccaagtttaaaaggctacttttcctttagtccagcctcctttttcctcaagaggattctgcatttgctcttcttcagtctttaggagttactctttttgttagtaaactctcagaagtaatggagaaaactcttcagtgactacatttgctggattttgctaagacatcatcacatgtgtggtgggatacatttaatttgtgaatgcagccttcagacaaccctacctatttcactatggccacctggtctcctatgccaggcatcacccacctcagctggcagattatagggaaccttccaagtgaagccaagtgtttattatctttgcttacctacaataaatctgtttgccatgggcaaatattacatgctactaaatatatattttcaccttgtgtgttagc

SEQ ID NO: 381078 - DNA, 538 bp, Homo sapiens
aaaaataaactggaactgtatttcaaattcctaatctgaccacrctaaagagcagtacacaggggaagagagagaagtatttctgacatcttttgaacatagtatttaagctatgtatcctcaagataggaaagcaatataattctaaagaaattttaaactcaagttagaaggctaatttttcataaaagaatgactagtggattttcaaattactagtccattcttctatgaaggcaatttgaaaattaacactccattcttctatgttttgtgtatttcagttttggaaaattaagtaaatatatactgcataatgggaggtagtttctcagtattggagaagttgcaaatatggatatagagaaggaaactgtgtggtgttgatgtgaaataaacagtatcagtataaattcatgtcttttaaatacagatgagtagatccagaaatatgtataaatgtgcatggatgtacataaacatatcctatttttgaaggctgagaaggcctagaagcaatgacactctagtagcctat

SEQ ID NO: 381079 - DNA, 533 bp, Homo sapiens
gcactttgatttattgcactttgcagatactatattttttacatattagagttttgtggcaatcctgtatcaagcaagattattggcaccacttttccaacagcatgtgctcattttgtgtttctgagtcacattttggtaattctcacaatatttcaaactttttcattatgttttatctagaatggtgatctgtgatgttactaacataactgttttggtgcactaygaacgacactcatataagacagcgaactaatcgataaatgttgtgtgttttctgactgctctaccaactgcccgtttccccatctctttctttctccttgatcctccctattccctgagatacaacaatatcgtaagcaggccagttaataaccctacagtggcttctaggttttcaaataaaaggaagagttacagatctctcacttgaaatcaaaagctagaaatgattaagttaaatgaggaagatatttcaaaagcaaaataggccgaaagctaagctcttgcagcaaatacttagccaa

SEQ ID NO: 381080 - DNA, 533 bp, Homo sapiens
gcactttgatttattgcactttgcagatactatattttttacatattagagttttgtggcaatcctgtatcaagcaagattattggcaccacttttccaacagcatgtgctcattttgtgtttctgagtcacattttggtaattctcacaatatttcaaactttttcattatgttttatctagaatggtgatctgtgatgttactaacataactgttttggtgcactatgaacgacactcatataagacagcgaactaatcgataaatgttgtgtgtkttctgactgctctaccaactgcccgtttccccatctctttctttctccttgatcctccctattccctgagatacaacaatatcgtaagcaggccagttaataaccctacagtggcttctaggttttcaaataaaaggaagagttacagatctctcacttgaaatcaaaagctagaaatgattaagttaaatgaggaagatatttcaaaagcaaaataggccgaaagctaagctcttgcagcaaatacttagccaa

SEQ ID NO: 381081 - DNA, 552 bp, Homo sapiens
aagtgaaatagcctttttgctgagttggagaaagttttagtagtctggataaaagatcaaaacaacagcagtattcccttaagccaaaacctaatccagagtaaggccctaactctattccattctatgaaggccgagagaggtgaagaagctgaaaaggaaaagttgagagttagcagagatcagtgcatgagatttaagaaaagaagctgactccataacaaaaaagtgtaaggtaaagcaccaagtgctgatagagaagctgcagcaagtgatccagaagatctagctaagatcattgatgaaggtggccacactaaacaacagattttcawtatagatgaaataccctttattgaaagaatgtggtactccatggaatactatgcagccataaaaaagaacaagatcatgtctttacaggaatatggatggagctagaggccattatccttagcatactaatgtagcatcagaaaatcaaatactgcctgttctcacttataagtgggagctaaatgatgagaacacatggacacatagagtggaaca

SEQ ID NO: 381082 - DNA, 575 bp, Homo sapiens
ccatttataattatctccttctaattgttatagttcaaaaaccaaaaatggaaaatctatatatgacaaatgaaaactatcctataggcatgagtgtatctaataatttatgtgttcatttttcaatcatctttgctgcctctttacaaaaaaaattcatacctccataatgaatatttcatcttgaatatttatcatggaatgtgttcttttaagtttttaacattacactttttattggagctcttaaatgtagacgtagtgtatcaagtactccagcaaagcaatgtaktgttttctgtccttaattttcatacattattacctgaaagactgaattatttcattagttttgaataatttgaaaaaaatagttcatagacttctaaaatttaaactttttaatttttcataaatagttttctccaggcaagcatgtctgatcagaaaccttaatctgtaggaaacctgaggaatgtttcttcctcaagagaagcatcatatcttttggtcatcaaaatataacagttttgcaaagaaatttatgtaggggcaacagaaagagagcaaaaccc

SEQ ID NO: 381083 - DNA, 575 bp, Homo sapiens
ccatttataattatctccttctaattgttatagttcaaaaaccaaaaatggaaaatctatatatgacaaatgaaaactatcctataggcatgagtgtatctaataatttatgtgttcatttttcaatcatctttgctgcctctttacaaaaaaaattcatacctccataatgaatatttcatcttgaatatttatcatggaatgtgttcttttaagtttttaacattacactttttattggagctcttaaatgtagacgtagtgtatcaagtactccagcaaagcaatgtattgttttctgtccttaattttcatacattattacctgaaagactgaattatttcattagttttgaataatttgaaaaaaatagttcatagacktctaaaatttaaactttttaatttttcataaatagttttctccaggcaagcatgtctgatcagaaaccttaatctgtaggaaacctgaggaatgtttcttcctcaagagaagcatcatatcttttggtcatcaaaatataacagttttgcaaagaaatttatgtaggggcaacagaaagagagcaaaaccc

SEQ ID NO: 381084 - DNA, 582 bp, Homo sapiens
agatagcactagttattttacagggaagattttttgaacagcttgagtattctggtagatattgtttagatattcttagaaattcagccatgaaagttattgctctatattttacctttctctgtgttacataggagcatatatataaaagaaggattcaatactatatagaaaggttccccatattcctgtctggagctatagaatagcgcatctttaggattctctgtgcaaaccagctagttaaaaaacaaaacaaagcaaaacacaatgctcctaaatatagccacaaatttatgacccgctctgtgccagacacaatactatttgatccttacaataatactatgagggaagatattatccctatcttgaggatgaagataagatatcagaaattcagagatatgwgtcaaaactgtaactgttggatctacctctcaagcatgttctttttctatcactttgtaccacctcttacaaaattctccctcagcatagaaaaaagaacgtatctcgatcttctctatgttttctcactgatgctgtctgtatggtcactgaataatattggagtaaatg

SEQ ID NO: 381085 - DNA, 544 bp, Homo sapiens
tttcttttaaaaaaattacaactacttttaagctcatgctgtcagttcatatcactaacttgtcagtcactctcccctcccacttatactcattgaagactttcatactgacttcttttccaacagcattttggtaatttcaaaattcatattgataattcattaaacacttkagtcattcatattcttgagccctttatcgataataatcttgcacctcaacaactgtctcttacaattgtatcctataactatatcatattctaaaatctcaaatttgagcatactattttctcccacattttattttttattactttttagacttttatttagggttcaagggtacatttgcaggtttgttacacaggtaaacttgtgtcataggggtttgttgtacagattattttgtcacccaggtattaagcctagtacccatagttatttttcctgattctctccctccttccaccctccaccttccaataggccccagtgtgtgttgttcacctctatgtgtccatgtgttctcatcatttagctc

SEQ ID NO: 381086 - DNA, 594 bp, Homo sapiens
gtggaataccacatagccaaaccaagaatgaaatcatgccttttgcagcaatgtggatgcaactggaggccattatcctaagagaattaaacagaaacagaaaaccaaagactgcatgttctcagtttaagtggcagctaaacattgcaggctcatggacagaaagatgacaacaatagacaccagggactactagatgggggaagatgggagggccaaaggttggaaaactgttgggtactatgctcaggacctgggtgatacaatcattcgtaccccaaatctcagcatcatgcaatatatccaggtaagaatcctgcatatgtgctccctgaatctaaaatgytgcaaaaaatacattagtctttttggggtcttgcattaattttattatttatattataaagtttctttatttaattttagtttttctattagctcaaagtaagtttgtgctttttaagtcccgtataagaaatctttgcctaccccaagattacaaagattttcttctatgtattttttggggaaattttagcttttacaattagtactataattctcatgttaaattttatgtgcagtgttaggtaa

SEQ ID NO: 381087 - DNA, 525 bp, Homo sapiens
catgtggtgtggggtgtgcgtatgtggggtgtgtgtatatttatgggtgtgcacatgcatgtatgtgtgcattttaaatggtccttccacaagcgtagatgagcaacaatttttccaaaatatgctcaactttgttgtgtagttactatcacaaatcaaaatttcatccccttaagcatgattcaagtgatataartctaggggactctccatttaaattaaatcaccattaggagtaatacagttttctttaggaatatgtaggacacacaattaagacattctaatcagatgattacatattagatatcttttcttattttgttaaagaaacgtctccaattatacatattcctgtttgaactgtcctagcaagtgaaataattcaacctaatctaatcctgcatcagagtttctcaaaattgattagcataagaatacctcaggtgtaactgttaacatgtggatacctaggctcagccccagagggcattatttaataaatctgggttaggcctgcatttt

SEQ ID NO: 381088 - DNA, 525 bp, Homo sapiens
catgtggtgtggggtgtgcgtatgtggggtgtgtgtatatttatgggtgtgcacatgcatgtatgtgtgcattttaaatggtccttccacaagcgtagatgagcaacaatttttccaaaatatgctcaactttgttgtgtagttactatcacaaatcaaaatttcatccccttaagcatgattcaagtgatataagtctaggggactctccatttaaattaaatcaccattaggagtaatacagttttctttaggaatatgtaggacacacaattaagacattctaatcagatgattacatattagatatcttttcttattttgttaaagaaacgtctccaattatacatattcctgtttgaactgtcctagcaagtgaaataattcaacctaatctaatcctgcatcagwgtttctcaaaattgattagcataagaatacctcaggtgtaactgttaacatgtggatacctaggctcagccccagagggcattatttaataaatctgggttaggcctgcatttt

SEQ ID NO: 381089 - DNA, 618 bp, Homo sapiens
ggagaatgtccatgcccaaggaccaaatgggatagaatacctgctagagcctgtgagaagactaaaggagagcccctcttcctcatggcttccctaagttttctggcgtctgactaaatgagagtttgtgatgacataaaaaacaaagaaattaggttttgtttctatattgaagatttatggattgagaaatatgaacctactacaaaataaaaatgtttacgctgtcccagtctttctacattgagacattttctacatagagatgtttctatatayagtaaaccactgaaagggatttctcttttccgcatttttattttattggcaaagaaaggaattgtcccattatcagtgggctgaaacaacagcaatgtgtggtatgtatgcatcagcattgtttgcgtctaactgcaggggctcaatgtactgcttgtgatgttcctttgccactaggaaaaggaagaggggaggcccccaaaatgcagaattcaattctagtcttacatagttcacatcatgtgattttgagtgagtcctataaattacctggtaattttctcatctttaaaaaaaagactatatctaccccagagtttttgttgtcttttagaggat

SEQ ID NO: 381090 - DNA, 533 bp, Homo sapiens
atattatttagccaatgaattaatgatgccttcatctattctactttaaaactttctgtttgtagattatgttacttrttatctgtgccatttggagttgattttgtttgtttgcttgtttcctaaagtcgaaagcatcctaaatgataggctgtcttcaagtacagacattcttgccaaatgcctcaagtagaactttcatggtatactaatagttaaagcaataaaaaggagtgaaacctgaagcaagataacaaaatcaaagtaaataaattgtgtaagtcagaacagataatccaatgtactggaagactgtgtgaagtctgcacaagacataagacgccaggctgaaaatatcaaaaagactcatttgaatgatagttgcctagtcaataaagctagttggtttgcatatgtgattatccgtaaatggccttattctttcttataacattaatctttaatgttgttgctgactaaagtgccagatgctttgatggtgggtggatatcattgcaggaattaatttggga

SEQ ID NO: 381091 - DNA, 649 bp, Homo sapiens
ttggctttggtttgttttgtttgttcacttgtttgcatttcctgctctcaaccaagtttttctgtgggractgcaagctgcctactactaggccagaacaaggccatttggtttgataagtcacagaatctggggaaatgtgttttttaacaccttaatatcaaatgtagttaaaactccccctgatgaaaggtagaaaatgtcattctctgtaagttttcacacttacaccatttttattggaaataatttgcattccctttcacagtgttttccgcctggaggaaaggtgtctgggaatttaatcttaaaataccaaatattacttaaaaagaaaactatggaagagaagaaaatgaatgactgcaaagaaaataaagatgaaaagaactttagttacagaaagacaggggactgatgggagttagtttgactcatgcaagcacactcttggctaaattataaaaaccaaggtcaaaagactcaaaaaggcactttaaatgtttacttcagtctaaattttttgtttcttcccatttaattcttatactcaatactgcatagggtcatcagagaagctagctctgggctctaaatttccctttataaaagaactcgttgaagtacacacatgcatgaaaacactcaa

SEQ ID NO: 381092 - DNA, 649 bp, Homo sapiens
ttggctttggtttgttttgtttgttcacttgtttgcatttcctgctctcaaccaagtttttctgtggggactgcaagctgcctactactaggccagaacaaggccatttggtttgataagtcacagaatctggggaaatgtgttttttaacaccttaatatcaaatgtagttaaaactccccctgatgaaaggtagaaaatgtcattctctgtaagttttcacacttacaccatttttattggaaataatttgcattccctttcacagtgttttccgcctggaggaaaggtgtctgggaatttaatcttaaaataccaaatattacttaaaaagaaaactatggaagagaagaaaatgaatgactgcaaagaaaataaagatgaaaagaactttagttacagaaagacaggggactgatgggagttagtttgactcatgcaagcacactcttggctaaattataaaaaycaaggtcaaaagactcaaaaaggcactttaaatgtttacttcagtctaaattttttgtttcttcccatttaattcttatactcaatactgcatagggtcatcagagaagctagctctgggctctaaatttccctttataaaagaactcgttgaagtacacacatgcatgaaaacactcaa

SEQ ID NO: 381093 - DNA, 518 bp, Homo sapiens
aatgatgcttgtaaattttaactcggattgtatcacttgcctactcaaaatcccacaaccattctccaatttacttagaatccaaaattctgcattagccaaccaggctctttctcatctgrctcttcttactgttctgattgcctctgcaactggtctttggctctttcactctactctccttctccactggcttctttcctgttccttatccattccagccatactctctccttagggtcatggctctggttgttacttctgcccaaacattcttcctcctgagatccacttgctcaatccaatcagtatttgctcaaatataatttctcaaggaggcttaccttgaccatcccattactatttaaatcatgtctctcttaagcagcataaagtaggattttggtgttgtattcagtctggaaattttggacttttacatgtggattttacagcatttgcattttatataatcactgatatatttctggtaacatatactatattgttatttgttt

SEQ ID NO: 381094 - DNA, 584 bp, Homo sapiens
atattataggaaaaataccacatatgctgagatgtgttgacagtactttgattgccctcacagactatccaaactttccaaaatacaacattttagcacccaaagttattttcctagcatgattataactcagaagtggcaaaaacaaaaacattcttagatgattaaccaaatattgagttgaggaatatgcttaccatattaattaatatctaatgggtaatttcattamattttagtacattacaataattcataaggctgcaaaaacactcttggcaaatttgtggagacatttaagtagtcatatctatttaagtaagctttgtttaaaagtcagcctcattttctcactcaagtgctttcacccatttcaagctacaaaacaagtagtgtggactaaaaataagcaagtagggaaatctcaaaatcactggagcatctgtgatagttgcttgcactttcttaagtatgttgccttcctatagaagtccattgtttcagtctctggataacaagagaaccgaccaataatcaagagaccagtcctaaggtttaaaaatcattttcccaataatttggcc

SEQ ID NO: 381095 - DNA, 564 bp, Homo sapiens
ctaaggttttatatcaagcaagatttcaagttagaatatttaaattcaaaacaagcatgtgatattcttatttgagagctaagagctcagatttctttgttctttcactttattttctctttaaaaacactgcaatgagtttaattggcatacaatacaccaaacatatttaaagtatacaatttaataagtttcaccatatgtgcatacccataaaactatcagcattatcaagataaagaacatattaatcaycccaaatgtttgctcttgctgctttgtgatcctccctcttgttcctccacccttgtctccagaaaactactgaatctcttccatcactttagaggctaagcaactggatattgaccacaggcaaaggaatagatatttaggttgttactgatatttagctatcacaattagagctcttatgaacatttgcacaaaacagctttgtatcaatgtgtgccttaacttctcttgggtactatgactggttgcatcatatgataggttcatattacactattttaaagtgtacaattcagcgggctttattat

SEQ ID NO: 381096 - DNA, 539 bp, Homo sapiens
aagcatgtgatattcttatttgagagctaagagctcagatttctttgttctttcactttattttctctttaaaaacactgcaatgagtttaattggcatacaatacaccaaacatatttaaagtatacaatttaataagtttcaccatatgtgcatacccataaaactatcagcattatcaagataaagaacatattaatcaccccaaatgtttgctcttgctgctttgtgatcctccctcttgttcctccacccttgtctccagaaaactactgaatctcttccatcactttagaggctaagcaactggatattgaccacaggcaaaggaatagatatttaggttgttactgatatttagctrtcacaattagagctcttatgaacatttgcacaaaacagctttgtatcaatgtgtgccttaacttctcttgggtactatgactggttgcatcatatgataggttcatattacactattttaaagtgtacaattcagcgggctttattatattcagaatgttgtataactatcacca

SEQ ID NO: 381097 - DNA, 593 bp, Homo sapiens
tgtttacttagaaagatgattaagttttattgcgatcagtmagttgatcaacttgcttttagcaatgtttactgtaagcaaatgatagagtttaaaaatattacacagttaaaaaattaaatattagtatagttttaaaatatttctttatgatacctggttagataaggttgaaaatgaaaaatatagtgacatagtataccaataaaattttaatagcaacataaaaatgatacttaggaaaatgtaatataaaacattaggatataattacactgattagagaagactgaaatattatttaaatgaatggtcacaaggacactttaatatcaagagtacaaaattaaaatgaagtaaaaaagtttaaaatgacctgaaaagggtctttcattattctagaaaatatagactcaaaatccttctatttcctcatttagctacataaatcaagaaaatgaaagtattaggagctgaggtgttctgaaaatgtaaatgttcagtgaatttttcaatgattaaggaaaagaaaaaacttatcttctcatttctacctctaacatatataaaataatatatactgaccaagaaaa

SEQ ID NO: 381098 - DNA, 493 bp, Homo sapiens
gtgttttataagtaagcagtcatttagaggtaagttcygttgaaccaatgttactctttaatatttggactgaggaattaagtttaaaacatagtttaattagcatattcacattacatcttccaaccagatgtccatcatctgggatcattttgaattctaagagaaatcttatttcctctcatccctgaccctacattcaaatttcttcattaagaatatttgactttggattattaagaacttatctcaattaaaatgtaaacatttctggtaattatttgcttcagttaagcctttacagctcctagcgtggaattatgaatagctctatcagacactttctaagcttgaagctagtttgggcaacacccatatgaagaaataaatcatgtgttgaaacgaagaaatcggaggacgggtacatgatgaggacatttcaataagtgatctgagtatgcaaaaactaaactagttaaaagttaaaaatcag

SEQ ID NO: 381099 - DNA, 493 bp, Homo sapiens
gtgttttataagtaagcagtcatttagaggtaagttccgttgaaccaatgttactctttaatatttggactgaggaattaagtttaaaacatagtttawttagcatattcacattacatcttccaaccagatgtccatcatctgggatcattttgaattctaagagaaatcttatttcctctcatccctgaccctacattcaaatttcttcattaagaatatttgactttggattattaagaacttatctcaattaaaatgtaaacatttctggtaattatttgcttcagttaagcctttacagctcctagcgtggaattatgaatagctctatcagacactttctaagcttgaagctagtttgggcaacacccatatgaagaaataaatcatgtgttgaaacgaagaaatcggaggacgggtacatgatgaggacatttcaataagtgatctgagtatgcaaaaactaaactagttaaaagttaaaaatcag

SEQ ID NO: 381100 - DNA, 493 bp, Homo sapiens
gtgttttataagtaagcagtcatttagaggtaagttccgttgaaccaatgttactctttaatatttggactgaggaattaagtttaaaacatagtttaattagcatattcacattacatcttccaaccagatgtccatcatctgggatcattttgaattctaagrgaaatcttatttcctctcatccctgaccctacattcaaatttcttcattaagaatatttgactttggattattaagaacttatctcaattaaaatgtaaacatttctggtaattatttgcttcagttaagcctttacagctcctagcgtggaattatgaatagctctatcagacactttctaagcttgaagctagtttgggcaacacccatatgaagaaataaatcatgtgttgaaacgaagaaatcggaggacgggtacatgatgaggacatttcaataagtgatctgagtatgcaaaaactaaactagttaaaagttaaaaatcag

SEQ ID NO: 381101 - DNA, 493 bp, Homo sapiens
gtgttttataagtaagcagtcatttagaggtaagttccgttgaaccaatgttactctttaatatttggactgaggaattaagtttaaaacatagtttaattagcatattcacattacatcttccaaccagatgtccatcatctgggatcattttgaattctaagagaaatcttatttcctctcatccctgaccctacattcaaatttcttcattaagaatatttgactttggattattaagaacttatctcaattaaaatgtaaacatttctggtaattatttgcttcagttaagcctttacagctccyagcgtggaattatgaatagctctatcagacactttctaagcttgaagctagtttgggcaacacccatatgaagaaataaatcatgtgttgaaacgaagaaatcggaggacgggtacatgatgaggacatttcaataagtgatctgagtatgcaaaaactaaactagttaaaagttaaaaatcag

SEQ ID NO: 381102 - DNA, 570 bp, Homo sapiens
ataatatttgggaagcaataacttaaaaaaaattgcacacttcttttaggaaaagcaccataatgagtcaatggactttctccattcattcagttaacaaataaatgtttactgagttccaattgcattccagatttcaagttcactgctaggcactggagattcattggaaatatagttctcatccttaatgagtctatctatgtacctcaaatttttcccacttatcctcaaattttcatttttttcattgtccaattggcatttgttctatgttacagcagattttgtacaacagaatcttaaggagyagtaataaaagtgctgtaagaaaatatgaactggtgaaatgatgggcccattgagaattatgttgttgactaaaggagaaattatgtttgatcagtttagaacaatgcttttcaaagtttaatgtgcttaccaattccatgtgctctctattgaaatttagattctagttcagtctatggtaggacagagattgcacatctaatgagcttggtgatatggaaactgctggtccctgagccttgcttctggttggaaagc

SEQ ID NO: 381103 - DNA, 501 bp, Homo sapiens
ttaacaaaattaaagaaaacaagtttaataacacatatatcatatatatgtatgggagataattggaaaatgaataaatctgaaagtaatggctttgaattcaggcctaaataccatcttcaactgaagcaaagaaaaaaaggatgttgagatgaccagaaaaaggacaaacaaaggtaaggtttgttatgcagatttaagtcygtgccttctccattaataagatgttccagtgatttagaatcttattttcttcctggtacagaaagagagagagagagacatttacaagtggtgatttcctttatagatgtaaatttcccttaccaaatggtaacttctactgttgttcttctcaaacttctcctgggattgcagtctctcaaaatagctcaaaataatccttatgccaaaaagatgtaactgagtacccccatttttgtaagatatatttttttcactcttgttttttctgcctttttccctgttccccactttctg

SEQ ID NO: 381104 - DNA, 599 bp, Homo sapiens
tattttggacctgaccatgtttacctcagctttactccagccacacaattaaacagttgaaattggtacttttcctcagctcaggttttcgcaatagctcttccttcctctttatattcagtttttatttactatccttttataattgttaggtgcagtcatatctctttagcctgtttaaaatgcattttatagacataaatgtattcatttttgaatccttccttacaaaaatagttattctgatttttgaataaattttacagtcattttcagcatcattcaccaatttgtaacaccttaattacactcaatatttagaaccaaatacagtattgcttatgaagatttgtaaaacagatgcatgattttccttgattcagaacaaagttcatgaagaaatascttgatttcattctataaatttttgcccttccaaatctccaggctgtgaccataaggaaacaaaacaaccattaaaaaacaagaacattttgttcagccagcatgtattcaattaccgtagcaatgagggttgggcagttcatgacactcacatagacaagtaacctcatctttgttaatacaaaactgtatca

SEQ ID NO: 381105 - DNA, 557 bp, Homo sapiens
atcatgtagaggaaaatagttgtaacaaaactcatacaagctctgtcaattcctaactatgtgccaccaaagttctgttttctctctaagcctgtttctagatcattgctatgcctgtcttctcaaactttagtgtgcttagatagaaatcatgactgggcatggtggttcacgcctatcatcccagmacttttgtagctgggcatggtggcaggcacctgtagtcccagctactcgggaggctgaggcatgagaatggcgtgaacccaggaggtgaagcttgcagggagccaagatcatgacactgcactccagcctgggtgacagagcgagattccatctcaaaaaataataataaaaaataaaaaataaaaataaaaataaaaataaaaataaaatcatctggaaatcatgttggatccatattctatttcaatgaccacggaaaccagtattctgtattttagcaaactttcaagtggtaaatggtaccagtgctgctggtctgaagccacactctgagtaacaaagtacaaaagactcgttgtgaacaatct

SEQ ID NO: 381106 - DNA, 611 bp, Homo sapiens
tgaaaaaatccccaggcttcgggttttcagttgcagagcacaacccattaaacaacagagacataaatgctaatcaaacactacataaagtccacctgcctctgactcagttctatcattaccactgagctgctcctttagcctgaaactccaaattcagattatgattttgttttgaggaccttcttgtttactcatggctgtttccccatgtttctctgaatctcaaactactatctagaagtcakcagcagattgctgaactgtaagcctattgctaaattagtgatataaatcttatttaaactattcctgaattctgagcccctgggaaccctgcttgtcaactctgccctaaagaattattgtctgtgtattattaccttctctagtttgccagttactcatctattttagcaatcttatgctaatgccaatatattgggacttattcacaagctttttgaaagacgctttatcaaaagcattgcaaaaatcaagataaattatgccttttcataaattagttacttcatcaaaaaatttagattagcctgacataatttatttttagagaatacaggctaaacacctgctcaacaacccagata

SEQ ID NO: 381107 - DNA, 534 bp, Homo sapiens
gataaaatgctgaccagtacatagtgagactattctaaaacacagtacattctaaaagaaaagaaaatatggagggagtcaagtacaggagcaaaggatgcaggtgctcttaagtggtttgctcttaggtggttgttgaaggatgctttaagtgtgtcataggagaggtctctgaccaaataatttttataagtgtagattatgtgttttatatataaagtggatgcataagaaatccaattttggctggaaatagtcttggcttacacttgtaatctcagcactttgggaggcaacggcaggagtatcacctgaggccaggagttcaaggcaggcctactacatagaatatatacagccagaaatatagcaagaccctgtttataaccccccaaaagataaaaatmtaactttaaaaaattttccaaactaggtgaaaaactgcaagataggaaggatttttttaaaaatcagcaacatgaccaatatgttcttatattacaatgattcccatcttgaatggctcacatcatt

SEQ ID NO: 381108 - DNA, 538 bp, Homo sapiens
acttagttccttatggtaattaagacagtgagatattggcatagggatggacaatttgaccaaaggagcagaataaagaaaccagaagccagcctgtgcgtatttggaaacttcatttttgacaatggtggcattgtagtcagtggggaaatgttgaattatctaatgaatgaccctgagacaagttattattcaaatgcagaaagygagcggctggggaagagaactggatattctacatcacatcacacacaaaaatccattccaaatgaattaaagacatatgtgaaagggccatctttaaaacctaaagaaaaaagtaaggagaaaaccactataatgttgagaggcaggcaaggaaaaacacgacccaaaagggaaaaaggttaacagatttaacaaaaaaaaaaattgcattatggggaacagataaactgtgctatggaacactgtgtaggggtgggagacatcttttttcccaagaagaagaaagcaatgagaaaccgcagggaaaaacaacaactgtacaagaaaatca

SEQ ID NO: 381109 - DNA, 621 bp, Homo sapiens
caagccagatggtttacgttcagagagccatttaggacacagagttctaataatatgatggggaaagggtaaatcactccaaaactatactttgtaactattactatcttatcttcctatagaaacaacaggaactatgatctaacgtcatgctgttggctttttttatatagagtaaatatccttaagtgttttcctgaaagtgcagccrtgaaagatagtagacagtacactcgaatgactgagcacacacactcagagccacactgcctcggttcaaatcctcttgctcccacgatttggctctgtgacctcaaaaacattacttttctccatgcctcagttttttttttttccatctgtaaaataaagataatggtatctacttcattggcttggtgtaaggttaaatgagtgaatccatggaaaatgttcaaacttagtctgccgtataggaagcactcaataaatattgctattattagtaaagacactctccactctgctgattctattcctaagtcatagatggtagaagaaaaaaaataacagaccaagcagtagacattaatagagttaagtagaaaagaatataccactgttcccagtgaaggggaaaaa

SEQ ID NO: 381110 - DNA, 489 bp, Homo sapiens
agaccctgttttttttttttgttttttktttttgttttttttaaaaagagagagatatgggggtatcttgatatgttgcccaggctggtctcgaactcgtggccttgaggcatccttccacctcagcctcccaaggagctgagatttacaggcatgagccactgcacccagccctgaactggtcccctatttgtgactggcattgggtttatttccatgttcttttttcaccataaagagtgttgtgataaatacctttcccattcacttccaccttctctcaacagagccctgccccttcatcccaccactctgcttccaaagaaatatgatggaatgaaataacagaagagtcaggaattcgagtcagggatacctgggaaattctgtttcaccattggaatgaattcttttattgtttttcaatattaacatattaaatttataaaaattatttttaaaacctcttcctataaggctataagatac

SEQ ID NO: 381111 - DNA, 526 bp, Homo sapiens
tcccagctactcaggaggctgaggcaaaaaaaggagaagaaatgctatgtgaagcctttttataagcacattaatttcattcasgagggcagagcactcatgacctaatcaccaccttgaaagcctcacttcttaacatcatcacattaggtcttaggttataacatgaattttggaggactccagaaaaaaaaagtgaaagacaacccacagaatgggagaaaatacttgcaaattatgtacaaagtaggctcactttatttgtggaaaatatgtagccagacacagtggctcatgcctgtaatcccagaactttggaaagctgaggtgggaggatcacttgagcccaggagctcaagactaacctgggcaacatagggataccctatctctacaataaataaataaaattacccagatgtggtgacatgtgcctgtggtcccagctacttgggaggttgaggtgggagaatcacgtgaccccaggaggttgaggctgcagtgagccaagataacattaatgtat

SEQ ID NO: 381112 - DNA, 602 bp, Homo sapiens
  misc_feature (1)...(602): n = A,T,C or G
ngacatctcctggcttgggatccacaggagagcatcattgatgctggggacaatttaaacatatagaaacccacagggctaccttagacagggcacagggcacagcacccggggatgcagagtggaaagttcaccactayagcctggaattgcctctgtgatgccttcttcatgacacttggctgccttcgtggctggaaggctgaggcccagatcccaacatggccacaggctagcagcttgcttcaccttcctgaactgcaatttctccatctgagcctttctcctaagaggagtgtgcagggtcacttagcccatatgggccagaaaccccacacggtgccaggcacacagtagggcctcggcagatgctgcccccttctgtctccaccaccctcctggggctccctcctgaaacagcctccctcagcgccttgagtcttgcaccctaacagcctcttgcacgcagtgagagggaggcccccaggccagctgtctctgttcagaaagacctgggggtctccttgaccatgggctcagggctcagaccccaacacaaacaagccccgtgtgctgaagagaagcaagtcctttagctgagg

SEQ ID NO: 381113 - DNA, 602 bp, Homo sapiens
  misc_feature (1)...(602): n = A,T,C or G
ngacatctcctggcttgggatccacaggagagcatcattgatgctggggacaatttaaacatatagaaacccacagggctaccttagacagggcacagggcacagcacccggggatgcagagtggaaagttcaccactatagcctggaattgcctctgtgatgccttcttcatgacacttggctgccttcgtggctggaaggctgaggcccagatcccaacatggccacaggctagcagcttgcttcaccttcctgaactgcaatttctccatctgagcctytctcctaagaggagtgtgcagggtcacttagcccatatgggccagaaaccccacacggtgccaggcacacagtagggcctcggcagatgctgcccccttctgtctccaccaccctcctggggctccctcctgaaacagcctccctcagcgccttgagtcttgcaccctaacagcctcttgcacgcagtgagagggaggcccccaggccagctgtctctgttcagaaagacctgggggtctccttgaccatgggctcagggctcagaccccaacacaaacaagccccgtgtgctgaagagaagcaagtcctttagctgagg

SEQ ID NO: 381114 - DNA, 603 bp, Homo sapiens
tgccagggagatgagggtagggtacaccacaagagtgggagaaattaaagagaacacgcaacaaagccttgggacactgggagggggatggaccacccagttttgtgctatgggagaagagagcaagaaaaggaatctgtgttaaatcccgacagcctgcakgagaagcaaatgcccttcattttcttcatcagcggcgagactggcatccctgcagctttgggagaccatgctagtgtagatgccagctcacgccagcgggcctgactgggagaccttgggctggggttctggtctggggctcctaggcctgatgggaggagagttcagccccaggtttcctgtacttcagctcatatccacacaatggtaattattgaaatgagagactcaaaagaagatggaacgtgaacttttttgttgtcccatgtggacacctgtgttcggtttccagttctacctttgctgtctgtgtgttcttaagtaactcacttaaacctttctgagtctcattttcttcatttataaaataaaagacgtaacatttatgtcagatattgtcctgaggattaaatgggagaatgaacaagcctcttctgcatt

SEQ ID NO: 381115 - DNA, 603 bp, Homo sapiens
tgccagggagatgagggtagggtacaccacaagagtgggagaaattaaagagaacacgcaacaaagccttgggacactgggagggggatggaccacccagttttgtgctatgggagaagagagcaagaaaaggaatctgtgttaaatcccgacagcctgcatgagaagcaaatgcccttcattttcttcatcagcggcgagactggcatccctgcagctttgggaraccatgctagtgtagatgccagctcacgccagcgggcctgactgggagaccttgggctggggttctggtctggggctcctaggcctgatgggaggagagttcagccccaggtttcctgtacttcagctcatatccacacaatggtaattattgaaatgagagactcaaaagaagatggaacgtgaacttttttgttgtcccatgtggacacctgtgttcggtttccagttctacctttgctgtctgtgtgttcttaagtaactcacttaaacctttctgagtctcattttcttcatttataaaataaaagacgtaacatttatgtcagatattgtcctgaggattaaatgggagaatgaacaagcctcttctgcatt

SEQ ID NO: 381116 - DNA, 602 bp, Homo sapiens
agatatacaaatggccagccagcatatgaaaaggtgctcaacaccactaatcatcagagaaatgcaaatcaaaaccacartgagatattgcctcataggataggatggctcttataaaaaaacgacaagagataacaagtgttggcgaaagcatagaggaaagagaacccttgtacactgttggttggaatgtaaagtggtataacctttacagaaaacagtatggaggttcctcaaaaaattagaagcagaactaccatacgattcagcaatcaggttagaaccttgaagagagatctgcgccccatgtttattacaacactattcacaatacccaagatatggaaacagcctaagtgtccagcaacagatgaatggataaataaaatacatataaacaatggactattagccattcaaaagaagaaactcctgtcctggataaacctggaggacattacgctaagtgaaataagccagacaccgaaagacaagttttgtatgatctcacttatatgtgggatctaagagagtcaaactcataaaaacagatagtagaatggtggttgccaagggctggaggtggggaaaatgggaagcta

SEQ ID NO: 381117 - DNA, 602 bp, Homo sapiens
agatatacaaatggccagccagcatatgaaaaggtgctcaacaccactaatcatcagagaaatgcaaatcaaaaccacagtgagatattgcctcataggataggayggctcttataaaaaaacgacaagagataacaagtgttggcgaaagcatagaggaaagagaacccttgtacactgttggttggaatgtaaagtggtataacctttacagaaaacagtatggaggttcctcaaaaaattagaagcagaactaccatacgattcagcaatcaggttagaaccttgaagagagatctgcgccccatgtttattacaacactattcacaatacccaagatatggaaacagcctaagtgtccagcaacagatgaatggataaataaaatacatataaacaatggactattagccattcaaaagaagaaactcctgtcctggataaacctggaggacattacgctaagtgaaataagccagacaccgaaagacaagttttgtatgatctcacttatatgtgggatctaagagagtcaaactcataaaaacagatagtagaatggtggttgccaagggctggaggtggggaaaatgggaagcta

SEQ ID NO: 381118 - DNA, 602 bp, Homo sapiens
agatatacaaatggccagccagcatatgaaaaggtgctcaacaccactaatcatcagagaaatgcaaatcaaaaccacagtgagatattgcctcataggataggatggctcttataaamaaacgacaagagataacaagtgttggcgaaagcatagaggaaagagaacccttgtacactgttggttggaatgtaaagtggtataacctttacagaaaacagtatggaggttcctcaaaaaattagaagcagaactaccatacgattcagcaatcaggttagaaccttgaagagagatctgcgccccatgtttattacaacactattcacaatacccaagatatggaaacagcctaagtgtccagcaacagatgaatggataaataaaatacatataaacaatggactattagccattcaaaagaagaaactcctgtcctggataaacctggaggacattacgctaagtgaaataagccagacaccgaaagacaagttttgtatgatctcacttatatgtgggatctaagagagtcaaactcataaaaacagatagtagaatggtggttgccaagggctggaggtggggaaaatgggaagcta

SEQ ID NO: 381119 - DNA, 602 bp, Homo sapiens
agatatacaaatggccagccagcatatgaaaaggtgctcaacaccactaatcatcagagaaatgcaaatcaaaaccacagtgagatattgcctcataggataggatggctcttataaaaaaacgacaagagataacaagtgttggcgaaagcatagaggaaagagaacccttgtacactgttggttggaatgtaaagtggtataacctttacagaaaacagtatggaggttcctcaaaaaattagaagcagaactaccatacgattcagcaatcaggttagaaccttgaagagagatctgcgccccatgtttattacaacactattcacaatacccaagatatggaaacagcctaagtgtccagcaacagatgaatggataaataaaatacatataaacaatggactattagccattcaaaagaagaaactcctgtcctggataaacctggaggacattacgctaagtgaaataagccagacacmgaaagacaagttttgtatgatctcacttatatgtgggatctaagagagtcaaactcataaaaacagatagtagaatggtggttgccaagggctggaggtggggaaaatgggaagcta

SEQ ID NO: 381120 - DNA, 625 bp, Homo sapiens
tgcagtgaatgctgggtgcatcttcatgttgggttctgagtccttttgacatgagcacattgtctggtgttgtacgagagagcaaaataaggaaactggtgttctatgcttatcttgtacattttccccacacttggaatcagccattcctccagggagtgcaggttcacagkctgggctctaagagaattataaggtcaatgtggtcatcatcttttagtattaagtcagatattctaaattattatttacttcttacatttggcccaagagtttaaccagatattttgggaaagagagaaggaattaaataaataaatctcatggttagaactgaagtgataactatactttcacaaggaaatataacttataacccatgcggaatagaaaattatttttgctcctttagatttctgaaggaatgaaatgagctgtgggaagaaactttaactggagcatcttaccagtattattcatgttttaactctgcttcagtagtttttcaggtttattacaaacctgcagtagccaactgaattaattatctctaaacagggatttagccagtggactaggcacactgaagctttgtgagaggggaaattgatattcacattttttc

SEQ ID NO: 381121 - DNA, 571 bp, Homo sapiens
aggaagtgtctgttgaataaagactgtccatatgcccttgttcaatgcagagattctgataagccctttcaaagtggaccttttaaaataatacttttctatcactcaattattttttggcacagtgttgcagccaaacttgaaatactatgtagccaaaataatgtggagtaggatgaagataaatatatttgagcacttaaaaatattaaataccatagtaacaagatttccaaaccattgatgggcragttcatgtcccacaaccagagcaacccactggcgggatgaagaacaggaattttttggatcaataagcaatgcagtctccctatgtttaaaaaaaaaaaaaaaagaaacaaatttaaacaataaaagtgggcatgcataagttgggaagattcagacagtaagtcagatggacaagttaggctttagagatattaggaaaatatttcctaatatggaaagaaaaagtttcacgaagattaaagactaccccaacagaattaatacaacagaatatcaaagatgtgacacaagtttaattatcagtttgttgatagaatag

SEQ ID NO: 381122 - DNA, 571 bp, Homo sapiens
aggaagtgtctgttgaataaagactgtccatatgcccttgttcaatgcagagattctgataagccctttcaaagtggaccttttaaaataatacttttctatcactcaattattttttggcacagtgttgcagccaaacttgaaatactatgtagccaaaataatgtggagtaggatgaagataaatatatttgagcacttaaaaatattaaataccatagtaacaagatttccaaaccattgatgggcaagttcatgtcccacaaccagagcaacccactggcgggatgaagaacaggaattttttggatcaataagcaatgcagtctccctrtgtttaaaaaaaaaaaaaaaagaaacaaatttaaacaataaaagtgggcatgcataagttgggaagattcagacagtaagtcagatggacaagttaggctttagagatattaggaaaatatttcctaatatggaaagaaaaagtttcacgaagattaaagactaccccaacagaattaatacaacagaatatcaaagatgtgacacaagtttaattatcagtttgttgatagaatag

SEQ ID NO: 381123 - DNA, 541 bp, Homo sapiens
taacaagatttccaaaccattgatgggcaagttcatgtcccacaaccagagcaacccactggcgggatgaagaacaggaattttttggatcaataagcaatgcagtctccctatgtttaaaaaaaaaaaaaaaagaaacaaatttaaacaataaaagtgggcatgcataagttgggaagattcagacagtaagtcagatggacaagttaggctttagagatattaggaaaatatttcctaatatggaaagaaaaagtttcacgaagattaaagactaccccaacagaattaatacaacagaatatcaaagatgtgacacaagtttaattatcagtttgttgatagaatagctgcctgaaattttgggaaaacattgtctaagggattagcgattactgtgctagatggagagagaagaaagtccttycattaaatgaggggagtggtggaggaagatgcattccatagtcccaaaaacagcactgagccggccgttcaacacttagctcatctaagaaggcaattgaaagtagaaggcaaa

SEQ ID NO: 381124 - DNA, 541 bp, Homo sapiens
taacaagatttccaaaccattgatgggcaagttcatgtcccacaaccagagcaacccactggcgggatgaagaacaggaattttttggatcaataagcaatgcagtctccctatgtttaaaaaaaaaaaaaaaagaaacaaatttaaacaataaaagtgggcatgcataagttgggaagattcagacagtaagtcagatggacaagttaggctttagagatattaggaaaatatttcctaatatggaaagaaaaagtttcacgaagattaaagactaccccaacagaattaatacaacagaatatcaaagatgtgacacaagtttaattatcagtttgttgatagaatagctgcctgaaattttgggaaaacattgtctaagggattagcgattactgtgctagatggagagagaagaaagtcctttcattaaatgaggggagtggtggaggaagatgcattccatagtcccaaaaacagcactgagccggcygttcaacacttagctcatctaagaaggcaattgaaagtagaaggcaaa

SEQ ID NO: 381125 - DNA, 541 bp, Homo sapiens
taacaagatttccaaaccattgatgggcaagttcatgtcccacaaccagagcaacccactggcgggatgaagaacaggaattttttggatcaataagcaatgcagtctccctatgtttaaaaaaaaaaaaaaaagaaacaaatttaaacaataaaagtgggcatgcataagttgggaagattcagacagtaagtcagatggacaagttaggctttagagatattaggaaaatatttcctaatatggaaagaaaaagtttcacgaagattaaagactaccccaacagaattaatacaacagaatatcaaagatgtgacacaagtttaattatcagtttgttgatagaatagctgcctgaaattttgggaaaacattgtctaagggattagcgattactgtgctagatggagagagaagaaagtcctttcattaaatgaggggagtggtggaggaagatgcattccatagtcccaaaaacagcactgagccggccgtycaacacttagctcatctaagaaggcaattgaaagtagaaggcaaa

SEQ ID NO: 381126 - DNA, 568 bp, Homo sapiens
ttgatagaatagctgcctgaaattttgggaaaacattgtctaagggattagcgattactgtgctagatggagagagaagaaagtcctttcattaaatgaggggagtggtggaggaagatgcattccatagtcccaaaaacagcactgagccggccgttcaacacttagctcatctaagaaggcaattgaaagtagaaggcaaaaacttgtttacagacagactctgcttttaaaagttattcaactcacatgtttatgttgtggtgacagacatgtaaaaacttggctagaagatatgaaattagggaaggttctccaagctggataaatagctrtgaaactactggcaggaaagaaaggcactgcaatgagaaacttagccaagaatatatctaaaaatgctactaccgccagatgctcactttaaaatcttacaccctcagacagtagcaccaaagggagaggtgtccatctgcattcttgaaatgtgcatggaagtgggggaaggtagaaaaatttacaccatatcgtaaagcagaagctactcaactgtgattaggagggaagc

SEQ ID NO: 381127 - DNA, 584 bp, Homo sapiens
ggaaaagcccttcgggcatcagtagccttaagaaaagaatatgaaatataaataccttagaattaacctaacaagttatttcataaagcagtcgccatttccctctgtcattcattcattcccttgttcaaatatttactttctcttcagtgccaggcaacaagctaggcattaactagaaagaaaagacaacacttgctaccactgccattccagcaaatatccaggaacagtgtctgctatggattttamcaatatattataattatttacaactaaatttttgtttacattttaacatttcaaatttaatgcaaatgccttcaaatcaataatgttaacacaacacagagcacagaacagtaaagagtatgctataagaattcaaagttgggaaaacatggtaagttgcctctctggcttttatttttgaattaaaaataaaaatattctcaatctttgatgtgctttgttctttatctggaatggcagcaatgggaataaagacagatgctctatcaattcaagacaggtcattcatttaatggcacttccatatgctacacataaaactgtcgccactt

SEQ ID NO: 381128 - DNA, 619 bp, Homo sapiens
tttttttttttgagacagaggctcactctgttgcccaggctggagtacagtggtgtgatctcggctcactgcagcctccgcctcctgggttcaagcaattgtgcctcagcctcctgagtagctgggactacaggcgggcaccaccacgcctggctaatttttgcatttttagtagagacaggggtttgccatgttggccagctggtcttaaactcctggcctcaagtgatccacccaccttggcctcccgaagtgcygggattacaggcatgagccactgtgcccagcccctctgacactcttttgaatgatctcaaagtcaaatcttcatcttataaaattgaatttgcttttggaaaggaccaaaagttatggggagtgcgagtctacagaataagtgaatgacaaactacaaactgtctctagcctgatgcctcaaactggttctgaaagtaatttaagtgaaaatttcagacctttagagcaaagtcaccactaatgaaagtgctatattcttaatcattctgagaaaaaaacaactcaactgaagcttaattgaatagacatttgtgatgtttattttttagaaatcagatatttgtaaatatctaaagaggac

SEQ ID NO: 381129 - DNA, 619 bp, Homo sapiens
agactccatctcaaaaaataataataataataattcaatattgtcacacctgcaagataatttttctgttctaatatttatatcagttgttatattagctcaaaattgttatattggccaaaaatatcaaaaattatgttaaatcatactatactaatggtcataaccttctctaacttgtttgttattatttgaaatagcttcaccatttagcatgtctgctgtaaacagaccttatcaagaatgatacatctcttatatactagtaataaatggcctccaatatttacagttaaggggaaaagaagaaaggtgcagaacattatgtatggcatggtgatttctgtgttcttaaaaagtatatatataaatgcttacaaaagcagggtatagttttgaaaggaaaatttcatttcattctgttgaggaatggagctgagaaagaagacagggtagactggcaaacaaaatttcattgcatagcatttgaatttcamattatgtaaatgtactatgtttttgaaatatttaatttgaaaaataaagatagcacaatgtggtggttaaaagtgcagacttttgagttaaactgcttgggtttaaatcccagctatgttac

SEQ ID NO: 381130 - DNA, 599 bp, Homo sapiens
ttagaaacttttcgcaaatgtctgttaaatgctaccccagtgactttgggcttggtcatgctacttgctttggtcaatgaaatgtgagtagacatcaagtataccaccatcacacagaaattttattttttattttattttttatagagacagggtctcactacattgcctaggctggtctcgaactcctgggctcaagcaatcctcctgcctcagcctccaaaaatgctgggattacaggtgtgagtcaccacgcctggccgtgcagaagttttaaatgtgtctttgtggtctagctttctccccatccctgagcctctgccctctgccatgcatgatacagagagtggctgctcgctgactactagtcctggaaagacagttgggagccaagtggagccagcagagttggtgatatggctgcatatgatcagcagtcctcatggcccatgtgtaaaaargaaagaaatctcagtggttataagccactgagatttgtgatcctatctgtgggttaaattatatacataaatttatatatacataggaatatttctagacagattcaccagacaatggaagtagaagaaatcagcgaa

SEQ ID NO: 381131 - DNA, 599 bp, Homo sapiens
ttagaaacttttcgcaaatgtctgttaaatgctaccccagtgactttgggcttggtcatgctacttgctttggtcaatgaaatgtgagtagacatcaagtataccaccatcacacagaaattttattttttattttattttttatagagacagggtctcactacattgcctaggctggtctcgaactcctgggctcaagcaatcctcctgcctcagcctccaaaaatgctgggattacaggtgtgagtcaccacgcctggccgtgcagaagttttaaatgtgtctttgtggtctagctttctccccatccctgagcctctgccctctgccatgcatgatacagagagtggctgctcgctgactactagtcctggaaagacagttgggagccaagtggagccagcagagttggtgatatggctgcatatgatcagcagtcctcatggcccatgtgtaaaaaggaaagaaatctcagtggttataagccactgagatttgtgatcctatctgtggsttaaattatatacataaatttatatatacataggaatatttctagacagattcaccagacaatggaagtagaagaaatcagcgaa

SEQ ID NO: 381132 - DNA, 600 bp, Homo sapiens
aggctattttgagcaaaagccactttgtgtcattgaagctgtagaactgagccacaagagggwactgttaaagtcccagggtcaaggaccaggtacctacgttatccccacagcacagaagcacagcctgagtctcttctttggctgagccaagggcgtgctggagaggcctgagagaaggagcggcccttgtgaccagtgcccttttggttcacaaggaacgtctcctcttgtttaagtgacttggctgagcttgctacttctgctttcagagcccaatatcaggatcaagacttcaattatccccaatttacagatgatgaaaccatattgggcaggaaagaaagtcaccccaggagagcgagttggacccgggcactggctgaggacaaaggggaatgataatttgggatgtagcttgttaaggggtctcacaagtgttcttgtgatccaggtggcgagaggatagagcagaaaggttgccagggagacgagggtagggtgcactgcgagagtgggagaaattaaagagaacacgcaacaaagccttgggacactgggagggggatggaccacccagttttgtgctatgggagaaga

SEQ ID NO: 381133 - DNA, 600 bp, Homo sapiens
aggctattttgagcaaaagccactttgtgtcattgaagctgtagaactgagccacaagagggtactgttaaagtcccagggtcaaggaccaggtacctacgttatccccacagcacagaagcacagcctgagtctcttctttggctgagccaagggcgtgctggagaggcctgagagaaggagcggcccttgtgaccagtgcccttttggttcacaaggaacgtctcctcttgttkaagtgacttggctgagcttgctacttctgctttcagagcccaatatcaggatcaagacttcaattatccccaatttacagatgatgaaaccatattgggcaggaaagaaagtcaccccaggagagcgagttggacccgggcactggctgaggacaaaggggaatgataatttgggatgtagcttgttaaggggtctcacaagtgttcttgtgatccaggtggcgagaggatagagcagaaaggttgccagggagacgagggtagggtgcactgcgagagtgggagaaattaaagagaacacgcaacaaagccttgggacactgggagggggatggaccacccagttttgtgctatgggagaaga

SEQ ID NO: 381134 - DNA, 449 bp, Homo sapiens
gaaactccattactactaaacatacaaaaattagccaggcgtggtggtgcacgcctgtaatcccwgctactcgggaggctgaggcaggagaatcgcttgaaacggggaggtggaggttgcagtgagctgagatcacgccactgcactccagcctggctgagagagcgagactccgtctcaaaaaaaaaaaaaaaaaaacaaacaacaaaaaaaaccatggcattataaaatgaccataagcaaaatcaaaagagaagtatatattggggaaaaaatgctccaactcatgatggaaggttaatttcactcaaatataaagaccacgttttaaaaaatcaataacaagaataagaataacactgaaatttaaaatggacaaatatgaataaattacagaaaaaggaaacacaaatggtttttaaaatataatgaagagattcttttttttt

SEQ ID NO: 381135 - DNA, 623 bp, Homo sapiens
ctctgctcttacaccacaatcatcaacacagtagacttctgtgaccaaatgtgtggggatttctccccaccaacaagaagcaatcagttctgcagaagataccaccagctgagcaccttctaatccaattcaattctcatgctatctacctggagatarcattagatcccacaggctgagagagggctcagtctcacaagactgcccccacttcagacactagttgtaaggccaggcctcatccagaacttctggccaaccagcttcaagtcagtgttcccatgacccccttcttaggtttgattaatttgctaaagctgtgcccagaactcaggaaaacacgtgtactggtttattataaagaatagcacaaagaatgcagatgaagaggtgcacagaacaaggcatgtgggaaggggtgcagagctctcataccctccctgggtgcaccaccctccaggaccctccacgtgttcagctatctggaagctctctgtacccggtccaggacttcactggaccgtcacgactgaagcatggacaaccgggtagaaatatgattggacaaagtaggacctaatgctaacagactgagtggggaaacctagcaaggcctctctgtt

SEQ ID NO: 381136 - DNA, 547 bp, Homo sapiens
tgggaacagcacccactctacgaagccaccatggagacgaaagagccaatcgtctacacgggcagtgtagaacgggcgcctggtgagtgctcagggatgaccctcctcggtagctgccccacagaggccaacaccgcccgcaccgtagccactgcccccaagtccgcctggagggaagagagcaggtcacgctcacctgattctgatgaatcagctggcctgggtcatgcctctcagggagaaaacctttgagtccacagagctgctcacagataccastgcctgtgtgtaactgctgtagaccactgaggcagaccagagagcagataggtgctaagcaccagtgacattctgaggtcatggcacgaatcacagtggggccttgcccgggtcagcagcgcccagagtcagggtcctccgctgcctgaggcgtcaacatgcctgcctgcaatgtgtttgtgcacgtgcgtgcacatgtgtatgtgggtaaacacatctgtgcacgtgtgtgctgcttctctggccaggcccggctgccccactcatg

SEQ ID NO: 381137 - DNA, 547 bp, Homo sapiens
tgggaacagcacccactctacgaagccaccatggagacgaaagagccaatcgtctacacgggcagtgtagaacgggcgcctggtgagtgctcagggatgaccctcctcggtagctgccccacagaggccaacaccgcccgcaccgtagccactgcccccaagtccgcctggagggaagagagcaggtcacgctcacctgattctgatgaatcagctggcctgggtcatgcctctcagggagaaaacctttgagtccacagagctgctcacagataccagtgcctgtgtgtaactgctgtagaccactgaggcagaccagagagcagataggtgctaagcaccagtgacattctgaggtcatggcacgaatcacagtggggccttgcccgggtcagcagygcccagagtcagggtcctccgctgcctgaggcgtcaacatgcctgcctgcaatgtgtttgtgcacgtgcgtgcacatgtgtatgtgggtaaacacatctgtgcacgtgtgtgctgcttctctggccaggcccggctgccccactcatg

SEQ ID NO: 381138 - DNA, 495 bp, Homo sapiens
gagaacctgcctccagaaataaagtctttaaaaagtttgggccaggcacgtggttcacgcctgtaatcccagcactttgggaggccaaggcaggaggatctcttgaggccaagagtttgagaacagcttgggcaacacagcaagacctcatctctgcaaaaaataataaaaataatttttaaaagtttaaaaatatagcatttcattttwaaaagtgcctagaaaagcagaagattttaaaacatataaatgtcacttgcatcactaaatacccccttaaccttcaaacagtctctactccaataacacacataacaaataaaccctaggcccttacagcaattgggttaagaaaggttaaatttcagaatgcataaagataggaggcatttctcattcttatggtagagactacatgctgtcgtctgtgtacatgcttacaataataaaggccaaccttttattaatgtttgctaataaatatcctcctgattt

SEQ ID NO: 381139 - DNA, 495 bp, Homo sapiens
gagaacctgcctccagaaataaagtctttaaaaagtttgggccaggcacgtggttcacgcctgtaatcccagcactttgggaggccaaggcaggaggatctcttgaggccaagagtttgagaacagcttgggcaacacagcaagacctcatctctgcaaaaaataataaaaataatttttaaaagtttaaaaatatagcatttcatttttaaaagtgcctagaaaagcagaagattttaaaacatataaatgtcacttgcatcactaaatacccccttaaccttcaaacagtctctactccaataacacacataacaaataaaccctaggcccttacagcaattgggttaagaaaggttaaatttcagaatkcataaagataggaggcatttctcattcttatggtagagactacatgctgtcgtctgtgtacatgcttacaataataaaggccaaccttttattaatgtttgctaataaatatcctcctgattt

SEQ ID NO: 381140 - DNA, 554 bp, Homo sapiens
aggaagaatgaatctattcgccttttcatcagatttcagactcttaatgcagctaaagagcttcttcccacttagagaagaattcgtttctgtctccacaatgaagtcatcctgggctgaggctgttctcctcccaagtcctttatagggggtctgaccttgccaaggacttctgagatgcaaacatcacagggtgtttcccccagagaagattctgcagacaccttgtgcccccacatacctgttcctcattctttgccacttcgcccagacctcccaaaatattgacacagctctagtttcatctgcagacagaatactacttgtgtgtaacttgctgtcaatcaaggatgtatttggcccccctgaccctcagccaacaaggaaagttgagttgctgtgcatggacacagttcatattaaattgcattggaagttatcctactagaagttaataacgcagtaaatcttggggcrggggtggggtgatgtgataacattggccaatcaatcccccaaggatcttttgtaagtttgaatttacgtagaacaat

SEQ ID NO: 381141 - DNA, 509 bp, Homo sapiens
atatctatttatatatctatgtatttaaatcaatgtattcagtatctgtattggcactttagtgcagaagaaagtgactgcatagagaacagttaagagcaaggccattgagcctatattctcaaatggggcttcatcactcaaaacaataaagttgttcattggcagaatttctaatcaagttagtatagattttatgccrttggatacaagatagcaacaatgaaattaattggtttcttatcttcagtatttgctttaagggaaaaaatctcaggctcatagggatttctgataccaggaaaccatgaaatgtgagactatattttggaatcagggtggcttagcttctggtaattggcatttgtatagttataatctgcatcacagttatagaaaccaatatattcttaatcaggttgatcatattgtaagtagaagaactctttccccaagaaataagatggagagagtttttggagaatggcctcactgaaatggtactgggt

SEQ ID NO: 381142 - DNA, 443 bp, Homo sapiens
tctgaggatctaaagttggatgttgcctcagtacctcaaaagcgtcttcaaatgcttgacccagcttatcttgttcaatccaagtcatgcttcatgaataaaytgatgattagtacaattagttgtggaggctgagaagtccaacgttgagagaccaaatctggtgagggccttcttcttggtggagactccctgcaaagtcctgaggctgtgcaggacatcaaacaaccagggggctgagtgtgctctgttctttactgtaaagatatttttatataccgacaagggaactggggcaggtagggatgagggcatttcagggaccacttgtagaaggtggagctgccttctctccaagggactctcagacatggacaggaaagagttactagggagacagagatggggagcaagtccagagagagatggaccaagctgaacaa

SEQ ID NO: 381143 - DNA, 443 bp, Homo sapiens
tctgaggatctaaagttggatgttgcctcagtacctcaaaagcgtcttcaaatgcttgacccagcttatcttgttcaatccaagtcatgcttcatgaataaactgatgattagtacaattagttgtggaggctgagaagtccaacrttgagagaccaaatctggtgagggccttcttcttggtggagactccctgcaaagtcctgaggctgtgcaggacatcaaacaaccagggggctgagtgtgctctgttctttactgtaaagatatttttatataccgacaagggaactggggcaggtagggatgagggcatttcagggaccacttgtagaaggtggagctgccttctctccaagggactctcagacatggacaggaaagagttactagggagacagagatggggagcaagtccagagagagatggaccaagctgaacaa

SEQ ID NO: 381144 - DNA, 619 bp, Homo sapiens
ttggaatcaacctcttctaaactccccttcatgttggtattttgacttcctctcatgaatcttaaatgttcataatagcatccagaatggtgaatcctttccagaggtttacaatgtactttgcccagatctagggtaataatacctctcagtagtataatttcatttgctccccaacactttgtcttttgttgtcatatattatatatatatatgattagaggatattggagagcccacattcttctcctcctccttcttttttttttttgagacagggtctcactctgtcacccaggctggagtgcagtggygcgatcatggctcactacagccttgacctcctgggctcaagcgatcctcccacctcagcttccaaactagctaggactacaggcgtgtgccaccacacctggctaattattttatttttaaaattttttgtagagatgggctttcagtatgtttcccaggctggtctcaaactcctgggcttaagtgatcctcctgcctcagcctcccaaaccactgggattacaggtgtgcgccaccatgcccagccttcttaagtgtacatgtagcttactaggattgaccattgtccgtaaagtgtcaacaa

SEQ ID NO: 381145 - DNA, 583 bp, Homo sapiens
ctgtcacagttctgtgtaactttttgacagaccaccagactcgctccatagcagctgcaccatttccattcccaccagcaagtgcacaggtgcaatttccccacatccgcaccaacacttgttcttttatattttttacattattattatggccatcctggtaggtctgaaccattatctcagtgtagttttaattttcattatatctatatatcttttgatccattatctattattattcagtttatctatattttcttttgttgctcatgctttcagtgacatatttaagaatccattgccacatgcaaaggcatgaaggtttaccccaatgttttcttctaagaattttatggttttaggtcttgtgtttaggttgctgatccatttttagttaacttttgtatgtggtgtggggtaggggtctaacttcattcttctgtatgtggttattcagttgtgtcagcattcattcgttgaatgaattattttttccccattttcagccagggtctttgaaccctgggtttgtttccagacctcaattytataccctcaatgtcaattttttttttgtcagtac

SEQ ID NO: 381146 - DNA, 500 bp, Homo sapiens
tttgttgaaaattggacatttgaatctaattatgtgacacctctgcaaagcagactttccccctcccttggggtttgctttttatgttgttgaagcggcactgttttctggggtaaatacccggggttcatcatctcacaccaagaagattaaggacatggacrcacatgaggagtgagtttaggagtggaggtttaataggcaaaagaaagagaaaggagaagaactcttactctcaagacagagaggggtgcccaaaagggaaatctggcctgcggcagagagcaccagattttataggcaggcttgaggaggtggtattccatttacatggggcccacagattggttggaccaggtgtgacatttacatagtgtgcgggtcggggaagctggccaccccaccctaatcttatgcaaatgttctttccacttggccagcgccatcttgcctgctccttactatacatgtggctggcaaaagaagggaagacggagctg

SEQ ID NO: 381147 - DNA, 523 bp, Homo sapiens
tgtgaggttaatccatataaagccctggaaaaagcctgtaggggagagactgttgtgaggttaatccatataaagccctggaaaaagcctgtaggggagagactgttgtgaggttaatccatataaagccctggaaaaagcctgtaggggagagactgttgtgaggttaatccatataaagccctggaaaaagcctgtaggggagagactgttgtgaggttaatccatataaagccctgggaaaagtctgtaggggagagactgttgtgaggtwaatccatataaagccctgggaaaagtctgtaggggagagactgttgtgaggttaatccatataaagccctggaaaaagtctgtaggggagagactgttgtgaggtaaatccatataaagccctggaaaaagtctgtaggggagagactgttgtgaggtaaatccatataaagccctggaaaaagtctgtaggggagagactgttgtgaggttaatccatataaagccctggaaaaagtctgtaggggag

SEQ ID NO: 381148 - DNA, 521 bp, Homo sapiens
tgaggtaaatccatataaagccctggaaaaaagcctgtaggggagagactgttgtgaggttaatccatataaagccctggaaaaagcctgtaggggagagactgttgtgaggttaatccatataaagccctggaaaaagcctgtaggggagagactgttgtgaggttaatccatataaagccctggaaaaagcctgtaggggagagactgttgtgaggttaatccatataaagccctggaaaaagcctgtaggggagagactgttgtgaggttaatccatataaagccctgggaaaagtctgtaggggagagactgttgtgaggtaaatccatataaagccctgggaaaagtctgtaggggagagactgttgtgaggttaatccatataaagccctggaaaaagtctgtaggggagagactgttgtgaggtwaatccatataaagccctggaaaaagtctgtaggggagagactgttgtgaggtaaatccatataaagccctggaaaaagtctgtagggga

SEQ ID NO: 381149 - DNA, 550 bp, Homo sapiens
gacacttctcaaaagaagacaaacatgtgggccacgcatggtggttcacgcctgtaatccaagcactttgggaggccaaggcaggtggatcacgaggacaggagatcgagaccatcctggctcacacagtgaaacccaatctctactaaaaatacaaaaaattagcgaggtgtggtggtgrgtgcctgtagttccagctacttgggaggctaaggcagaagaatggtgtgaacccgggaggcagagcttgcagtgagtggagatcgtgctgctgcactccagcctggatgacaaagcaagactctgtctcacaaaaaaaaaaaaaaaaaaagacaaatgtggcaaacaagcctatggaaaaaaagctctagatcattgatcactagagaaatgctcatcaaaaccacagtgaagcagcatctcacactagtcagaatggctattactaaaaagtaaaagactaacagatgttgcaaggttacagagaaaagtgaacacttatatactgttggtgggagtgtaagttagttcaaccatggtggaaaacagt

SEQ ID NO: 381150 - DNA, 550 bp, Homo sapiens
gacacttctcaaaagaagacaaacatgtgggccacgcatggtggttcacgcctgtaatccaagcactttgggaggccaaggcaggtggatcacgaggacaggagatcgagaccatcctggctcacacagtgaaacccaatctctactaaaaatacaaaaaattagcgaggtgtggtggtgggtgcctgtagttccagctacttgggaggctaaggcagaagaatggygtgaacccgggaggcagagcttgcagtgagtggagatcgtgctgctgcactccagcctggatgacaaagcaagactctgtctcacaaaaaaaaaaaaaaaaaaagacaaatgtggcaaacaagcctatggaaaaaaagctctagatcattgatcactagagaaatgctcatcaaaaccacagtgaagcagcatctcacactagtcagaatggctattactaaaaagtaaaagactaacagatgttgcaaggttacagagaaaagtgaacacttatatactgttggtgggagtgtaagttagttcaaccatggtggaaaacagt

SEQ ID NO: 381151 - DNA, 558 bp, Homo sapiens
tgcgcttgcatccgctcagcacacactttctgagtgccgagtgtctccagcatgagargggctgtagttcccagggtcccaccctccacaaaggacagcagcacctcgagggacagaggtgcaaagagcaaggtgggggcccttctgctggagaggcggctggggaggtccttagaggaagtgacagctgagctctgctctgaagggtgaagctgaattacttgaagcttagggtgaaggggtgtccagggaagtggagcctgtgagccaaaagcataatgacttgtccagagaagtgtaacaatttcatattgtttcagtgccaaatctgcacaggagtcaccaaaggaaagagcaggatcctggagccagggcctgcgatttcacccgctggcaatgggactgttcactgggaattttggggggcaaaacctgaaaatgtttcctcttagctccaattctctgtctctccgtctctttctgtcctctctctcccttatctttaatttttgtattatcataaaaaacacagatgtcccagatgtggggattagcagc

SEQ ID NO: 381152 - DNA, 533 bp, Homo sapiens
ctctcaccacagcatccgcatgattaagcattcgcttcttgacgtactcctagctctctctcacttttcctctctctgactctgacatcaattatttgtcttcatctctgagtcctctttcctctcccactttccaattaagatgagttcactacaggtttgcatttgggccctttgtgtccacacttgcatcctcctctctttagcaaggacctctctaaatgacctcagctctctatcacctgtcttccccctcttctcatataaacatgcattcctctctccctagagtctgcatcctgcttaatgcagtgggtcctaaactgtcacctttatttccccagacctgccagtgtcttcttctaactgttctgtttctggaagtatggagtggaaacatctataaattcattttattccaaaattttattagtcatcaactcatagtctgggaaastatttagtatttcttttcccactgcccataccctgcatctttccatctcattttttaaacagctttattgagatat

SEQ ID NO: 381153 - DNA, 596 bp, Homo sapiens
tactttgccttttcttgcaccatttgctttccatttgagggcacagaagcctgaaaacattttttagaatttgttcccctaccaatatgctattaatttccatattaaccatcttatagctctaatattctaagctctatgtcattttttagaattatacttgaatattttttagattttcccatatcctttttatccagtggggattagaactgccaaaagtgttccagatggcttcacaccaggctgtgtaaagcagggcttctgcttcctcattctcacatgtgagtggcccttgtcagaaacgcaagactggctctgactctccggaaggcaggccttctccagcatgtgagaayggaggagcagaggtctagaccagtggactctaaatcagtaacatctgcacgtctgctcactcaaactccttgatgcagagcaaagatggctttttttgatgccttcattgaagatcagaccagctttgcttttcctctatgttatccagtgtttagtagatgatctcctcagattgaagctattcactgaggcgttttataaccaaaattggaagccaattggtgacaaattctcta

SEQ ID NO: 381154 - DNA, 425 bp, Homo sapiens
ttactatacaccaggccagagtctagtcctcttaacaactctaaggaagtaggtggtattattttttttccattttgccaatgagaaaacatgttctagatcatacagctaacaaacagtacaggtaggtaggacttgaacacaggctctctgctcacacagacatgtgagaatgtcttgaggaaaaatgtgcctcagataaattaaaagaatayacagctatacagggactgtagaaaggcttgactggaggatctgacttcaggttctctgaggttttgtgaaactcccctataaaaggtatttccttaggtgttggtaaacacctaaagaaataaatttagaggaagttaattattgcagaaatattattattgcaagtaatattattgcagaaataaatttagaggaagttaattattgca

SEQ ID NO: 381155 - DNA, 553 bp, Homo sapiens
gtgcttaaatatcttaactaaattaaggaagtaattttttacktattctgaagcatcccagtgaatcttcagcatgaactttaccagaattcctttagagacagagagagcgtgtgtgtgtgtgtgtgtgtgtgtgtgtgtgtgtgtgtgtgtgtgtataggtatattctaaggtaatctgaagactagcattttttccaaaaaaagtatttaggatgatgtaagaagcaacaagacagttttctctattttcaaatggcttcttattcaagtgatttcttgatatgactttctaacttattaatattcaactttttgtgacttctcttttaaggaggacagagtagatagtgaaaagctatcattcacactccaacaaatggacaaatgtaaatgatcaagatcatatttcaaaacacaatggagagacatgaaaataaaataaaaaggactaagtaagtagatgcaaatatcagagaaggtcgagttcttcctatgtgagctgcggttggataccacttttcttctagggacatgtgctgattctatgcat

SEQ ID NO: 381156 - DNA, 611 bp, Homo sapiens
gtattcacactttttgccatgcagttgggtatctgaagaaatgtttgaatgaaatgattaaagaaatgcaatgaatttgaaagawtggaaagttttttaaaggaagtatataaaaatattttaatatggtggtgaggcactaggcatcatgtggtttctgtgtccagttcaccttgtctgagtattcatcagaaagagggctccctgtggagttattggaagaaacatccctggtgtcacagagagagctggcttgaacctggaggatataacaaatggctgttcctgaaaatacactcagctaaacatgtagaaataaaggcatgcttaagatagtagagctgataccacttgatgaaaagagtcaataaagtatgtgaagatgatggtacagcataaggaaaaaacaatatattgggcagtgtgagttttgacctgggaattcactaaaatgactgtggaggttgggggaagagatggtgaagggctcatagagcagtgacccatgcaagccagtcctggagcagtgttatagttaaggaaactcaccccaagctcaaattttttctcgtgttgtcttcaagtcttttgtggggtcaaattaagcagtc

SEQ ID NO: 381157 - DNA, 507 bp, Homo sapiens
ttgtctccaaacatggattgggcccatggccatgacttccaacaccacaaactaatgtcagtgctagatttcatctagcataaattatctgttgctgtccacagaccaactgttgggctcttcccagagagtttccgtgattaaccgtctttcctttagctttttgcctgtagctaattgccccgtatttcctagctttgtgctttctatatcgtcctaaacatacccctgttttctcttattgagaacctccttagttacttgccgtgcattggtagctgtgtctaggatctctgtgtcataggactcttgcttgtcttgttcttccttgaactcttagatttcctgctggtcacaaagcccagtggtggacactggccatccacattattsagacctctagtgtctctaccatgaaggatggctttcacagaggttatagacctgggctctggagtcagacagctcctccacttagagctgtgcactcttggttatgtaactagc

SEQ ID NO: 381158 - DNA, 439 bp, Homo sapiens
ctgcatctaatatggaaagagattccatccttgaccttggtaatgtatgccagcatttatcaatcctcactgccaggtttcccagccaattcctttgctctgcacccaggccaaatgggggttggttagatgccaccctgggagtggggcctacaatcctggagcagatccccactggaaagcatctccaccttcccttattttggcagtttcagtttggggacattgaggttrtgtgcagaggcattgttgttcaaacagaatccagaaatgaggcttccaggttttaggagtactacagagggaactggattcatttgattttcaaaatatgacagaagaaaatataggagaatgtgtttatggttctggggtatggaaagccttgtgaagaaaggcttcaaattcagaagacttcgagaaaaagagttaactacat

SEQ ID NO: 381159 - DNA, 439 bp, Homo sapiens
ctgcatctaatatggaaagagattccatccttgaccttggtaatgtatgccagcatttatcaatcctcactgccaggtttcccagccaattcctttgctctgcacccaggccaaatgggggttggttagatgccaccctgggagtggggcctacaatcctggagcagatccccactggaaagcatctccaccttcccttattttggcagtttcagtttggggacattgaggttatgtgcagaggcattgttgttcaaacagaatccagaaatgaggcttccaggttttaggagtactacagagggaactggattcatttgattttcaaaatatgacagaagaaaatataggagaatgtgtttatggttctgggstatggaaagccttgtgaagaaaggcttcaaattcagaagacttcgagaaaaagagttaactacat

SEQ ID NO: 381160 - DNA, 537 bp, Homo sapiens
gctcttacttaagtggaggaaggaaatttcctcaccccatttcctagtgttccaagctcaataggtctaccccttgctctacttttatcattatgtcacatatttcaaagttatgtagttcatctttgaatgcatgttttccatttttcttcttatattatgttcatcctgtttcttactgtaatgcaaagaaaaatgtatattcaggttaaattcatctaacttctggcaagtgtaagagactrtgtgagactcatattttgtatcattaaacctgcaaaattatgtgagatatgcattactagtctcacgatgggaaaattgagtctcataaagaggaactatatctccaagtccaatagcaagttcatgttggagaaggacatttaggtggttctgaatgggctgtgtcttacttatccctctgacctcatctcatactacttctctctttccccactaagctgtaggcataatggctttatttctctttatcaaatactccaagctctttctcatcctaagaactttgcatta

SEQ ID NO: 381161 - DNA, 537 bp, Homo sapiens
gctcttacttaagtggaggaaggaaatttcctcaccccatttcctagtgttccaagctcaataggtctaccccttgctctacttttatcattatgtcacatatttcaaagttatgtagttcatctttgaatgcatgttttccatttttcttcttatattatgttcatcctgtttcttactgtaatgcaaagaaaaatgtatattcaggttaaattcatctaacttctggcaagtgtaagagactatgtgagactcatattttgtatcattaaacctgcaaaattatrtgagatatgcattactagtctcacgatgggaaaattgagtctcataaagaggaactatatctccaagtccaatagcaagttcatgttggagaaggacatttaggtggttctgaatgggctgtgtcttacttatccctctgacctcatctcatactacttctctctttccccactaagctgtaggcataatggctttatttctctttatcaaatactccaagctctttctcatcctaagaactttgcatta

SEQ ID NO: 381162 - DNA, 537 bp, Homo sapiens
gctcttacttaagtggaggaaggaaatttcctcaccccatttcctagtgttccaagctcaataggtctaccccttgctctacttttatcattatgtcacatatttcaaagttatgtagttcatctttgaatgcatgttttccatttttcttcttatattatgttcatcctgtttcttactgtaatgcaaagaaaaatgtatattcaggttaaattcatctaacttctggcaagtgtaagagactatgtgagactcatattttgtatcattaaacctgcaaaattatgtgagatatgcattactagtctcamgatgggaaaattgagtctcataaagaggaactatatctccaagtccaatagcaagttcatgttggagaaggacatttaggtggttctgaatgggctgtgtcttacttatccctctgacctcatctcatactacttctctctttccccactaagctgtaggcataatggctttatttctctttatcaaatactccaagctctttctcatcctaagaactttgcatta

SEQ ID NO: 381163 - DNA, 521 bp, Homo sapiens
aactatatctccaagtccaatagcaagttcatgttggagaaggacatttrggtggttctgaatgggctgtgtcttacttatccctctgacctcatctcatactacttctctctttccccactaagctgtaggcataatggctttatttctctttatcaaatactccaagctctttctcatcctaagaactttgcattaactctcccctctgcccgataatcttttcatgatgatcaacatattggtggccccttcctttcattttgatttcactgtaaatatcacctcctccaataattctttctaatctagtgcagtcagccacacagtgcctttctcataccaatgtactttaactctcagcatagccctaagaaatatctactactacatttcctgcctatatttaaaaataaatctccttttataaaaatacaagctctacaaagcacaaacattctcttgtttctgtttccctcagcccctagaacatcacctagatggcacccagtagaggttgg

SEQ ID NO: 381164 - DNA, 537 bp, Homo sapiens
gctcttacttaagtggaggaaggaaatttcctcaccccatttcctagtgttccaagctcaataggtctaccccttgctctacttttatcattatgtcacatatttcaaagttatgtagttcatctttgaatgcatgttttccatttttcttcttatattatgttcatcctgtttcttactgtaatgcaaagaaaaatgtatattcaggttaaattcatctaacttctggcaagtgtaagagactatgtgagactcatattttgtatcattaaacctgcaaaattatgtgagatatgcattactagtctcacgatgggaaaattgagtctcataaagaggaactatatctccaagtccaatagcaagttcatgttggagaaggacatttaggtggttctgaatgggctgtgtcttacttatccctctgacctcatctcatrctacttctctctttccccactaagctgtaggcataatggctttatttctctttatcaaatactccaagctctttctcatcctaagaactttgcatta

SEQ ID NO: 381165 - DNA, 609 bp, Homo sapiens
attactggctaatttggttttaaaggtactaaaggtgaggaatagaggcataaattaaagaggcttgtgaaagatcacaaattagagtcagagactgaactagaccctaagtgaactggattccactctatctgtcctccttttgagcaaggtctcaatttgagtcatccattgctagtataaccctctcaggaaaggccttttgtttcatagatctttgtaagtgtactcagaatcaaacacagaacatmagacacaatgattgctcaaaccataatttgtgaaggaatttaattctatcatgagcatttcctgacctccagcatctcatactcctttgtttactcatgtacctgtgtctaggtaagaccttatgtctctgattcatccacaacaactttcttcacaatagaaactgtcaaggtcaactatgtgtcacttaggtgttttaatctttgcacagaaatgttattttttcttgccattctggaagaatttcacaagcatttcagagactgactaaatgattacagaatttgtgcatttctgccaaattgtgttgaataacaacaacaaaaataaatagcattagtcctgaagtcatgcagg

SEQ ID NO: 381166 - DNA, 602 bp, Homo sapiens
tcattgcagcagcaaatcaatgtatatgtgatagtctactcatataaggactattgatagtctataaaactgtagttggtatttatgtggtgtatcttttatacatattttagatatgtcttctataacagtatataactaaatttttaaaagtctagtctggaaatatttgcattatagtactctgttcctttatatttaatgtaattgccatattgcatttaataaaatgtttaaatatattattatgtcttgtatttttgtatcaacttcctattttttatgctttctctctattcttaacttttttgattaatttgtatccttttgtgctttctctttcttaatttggaagttatttcctttcctattacttgttaaccttagcaatatactgacttgtcaaaatctaaaattaattaatacttttaatctccaactagataacaacaagaaccttaaaacaatatacctccatgyatccccccggtttatatgttattttggctgtcatagtttctatctcttctaaaacaatttgggatatgatgatttttgcagttttatagtcagttattgttcagattcccccatgtgcttac

SEQ ID NO: 381167 - DNA, 523 bp, Homo sapiens
gggttacctaagtttctgtagcatgttaagttaaaataagacgatgcyaatattaatgtaagagcttttaataaaggctatttatatccactttgctagtaaagaaagtatgatgacaatttattaaaatcttcatgatttagaaacaatagcaataggcatactgaattgcagcacatcagcaaagagggtgaccattttaggagaaagaagaaatatcctaccttataatcatgtaaactatgtagtgtatgtggatcagtcacacagtcatttcctttggttatcataatgttacggggtggctagggcaagaatattatgaaagattctgaggctcagagaagtcaatttcaattctaaactctctgatgtagcagttaaaataagttagttttacttgcatcatcaagtatgcaatactaaaataataaaattgctatgaatgcaaacatacttcaggaatagtgactatatttggagagggtaggaggagaatgagatggagagttgttttatctat

SEQ ID NO: 381168 - DNA, 609 bp, Homo sapiens
aggcccttttttagatctggggccatgtgtgtacttttccagtttctactgcaaatctgctttattttcattgattctggaatttcacctattttgtagttcaaagttttagctgactcctagttttgtgggaggtagagttcatttcttttcttacctccttgtgactttcacatattttcctcaagggtacagggaaatgttgactttaccccatcattgtcaaagaggcattctaattacaattttttactgtcaaatgccattctgctgtgagttttaacaagtagacataaaagagaaaaaccacagaaatacttcatatttcttaattctgaattgaatatttctgaaatactacttaaaagagtctggggaagattgttattacagccatgctgtagaactgttttataaaattttttgtaattgtctgacttgcaactaatattattcccaggatgtgtacattcctatagcaactctgctcggtatggagtagtaaatccctggctgactgagtcctatgtgataaatatctttgctaacagattttttcatttccttgtaacacatayatatgcatgtatcaatatgtgcatatatagt

SEQ ID NO: 381169 - DNA, 555 bp, Homo sapiens
ttgtagttcaaagttttagctgactcctagttttgtgggaggtagagttcatttcttttcttacctccttgtgactttcacatattttcctcaagggtacagggaaatgttgactttaccccatcattgtcaaagaggcattctaattacaattttttactgtcaaatgccattctgctgtgagttttaacaagtagacataaaagagaaaaaccacagaaatacttcatatttcttaattctgaattgaatatttctgaaatactacttaaaagagtctggggaagattgttattacagccatgctgtagaactgttttataaaattttttgtaattgtctgacttgcaactaatattattcccaggatgtgtacattcctatagcaactctgctcggtatggagtagtaaatccctggctgactgagtcctatgtgataaatatctttgctaacagattttttcatttccttgtaacacatatatatgcatgtatcaatatgtgcatatatagttattaccacaacgtattyaatcttctcattttaaaaacc

SEQ ID NO: 381170 - DNA, 629 bp, Homo sapiens
tgaacctcagttggaaatgcagaaatcacccatcttctgcattgctcaygctgggagctgtagactgtagctgttcctattcagccatctttgaaagtgtgttattttataatcagaaaaaataatcaatactatttttaaagaatgtagtggatgagatcatttgcaaatgtatacctgaggaaattttgaggacatcaaggtcagtcaaggtgattgggagttaataccagagagaaaaatgctgtccttggaaatatgacacttctatcagggactgaattatgtccttccccacaaattcctatgttgaagccctaacctccaatgtgatgtatttggatttggggatttgagaaggcaattagatttggatgaggtcatgagggtagggccctcatgatgtgattagagtgcccttacaagaagggacaccagagagattgcttgctctctctctcagtgtcatgtgatgacacagtgagaagatggccactggcaagccaggaagacagactttgctagagcccaacaatgctggcatcctgatgttgaacttccaccctttaatagaaataagtttctgctgtgtaagccacccagtgtatggtattttgttagagcagccc

SEQ ID NO: 381171 - DNA, 629 bp, Homo sapiens
tgaacctcagttggaaatgcagaaatcacccatcttctgcattgctcacgctgggagctgtagactgtagctgttcctattcrgccatctttgaaagtgtgttattttataatcagaaaaaataatcaatactatttttaaagaatgtagtggatgagatcatttgcaaatgtatacctgaggaaattttgaggacatcaaggtcagtcaaggtgattgggagttaataccagagagaaaaatgctgtccttggaaatatgacacttctatcagggactgaattatgtccttccccacaaattcctatgttgaagccctaacctccaatgtgatgtatttggatttggggatttgagaaggcaattagatttggatgaggtcatgagggtagggccctcatgatgtgattagagtgcccttacaagaagggacaccagagagattgcttgctctctctctcagtgtcatgtgatgacacagtgagaagatggccactggcaagccaggaagacagactttgctagagcccaacaatgctggcatcctgatgttgaacttccaccctttaatagaaataagtttctgctgtgtaagccacccagtgtatggtattttgttagagcagccc

SEQ ID NO: 381172 - DNA, 629 bp, Homo sapiens
tgaacctcagttggaaatgcagaaatcacccatcttctgcattgctcacgctgggagctgtagactgtagctgttcctattcagccatctttgaaagtgtgttattttataatcagaaaaaataatcaatactatttttaaagaatgtagtggatgagatcatttgcaaatgtatacctgaggaaattttgaggacatcaaggtcagtcaaggtgattgggagttaataccagagagaaaaatgctgtccttggaaatatgacacttctatcagggactgaattatgtccttccccacaaattcctatgttgaagccctaacctccaatgtgatgtatttggatttggggatttgagaaggcaattagatttggatgaggtcatgagggtagggccctcatgatgtgattagagtgcccttacaagaagggacaccagagagattgcttgctctctctctcagtgtcatgtgatgacacagtgagaagrtggccactggcaagccaggaagacagactttgctagagcccaacaatgctggcatcctgatgttgaacttccaccctttaatagaaataagtttctgctgtgtaagccacccagtgtatggtattttgttagagcagccc

SEQ ID NO: 381173 - DNA, 577 bp, Homo sapiens
aatatcaatactacctattgtaattttcgtcctttacccataaataatttgctactgcatttaagccttaaaatttactaatttttaaattattattaatttatttattttgagactgggtcttgctctgtcaccctgaaagtggtacratcatagctcactgctacctcgaactcctgggctcaagtgattctcctgccttagccttctgagtagctgggactacaggcacacaccaccatatccatctaagcatttttaagtctttaggcatgtttttaaaccttctattgattttctgtttaattgcattatggttagatgtttcagttaaagtaaccttgattttttaaaaatgtgttgcagacttcctgagagatttcttgtatggccgtatggtcagtctttatttagaagccatgtaagagttctacttcatagatacaaggttcaaaatggatattttaaatcaagcacatgaattatatcttccaaattttttgtagacacatatataattaaaatatatcttaacacataatataattaatacaatatgcatatgttcaaaatatac

SEQ ID NO: 381174 - DNA, 577 bp, Homo sapiens
aatatcaatactacctattgtaattttcgtcctttacccataaataatttgctactgcatttaagccttaaaatttactaatttttaaattattattaatttatttattttgagactgggtcttgctctgtcaccctgaaagtggtacaatcatagytcactgctacctcgaactcctgggctcaagtgattctcctgccttagccttctgagtagctgggactacaggcacacaccaccatatccatctaagcatttttaagtctttaggcatgtttttaaaccttctattgattttctgtttaattgcattatggttagatgtttcagttaaagtaaccttgattttttaaaaatgtgttgcagacttcctgagagatttcttgtatggccgtatggtcagtctttatttagaagccatgtaagagttctacttcatagatacaaggttcaaaatggatattttaaatcaagcacatgaattatatcttccaaattttttgtagacacatatataattaaaatatatcttaacacataatataattaatacaatatgcatatgttcaaaatatac

SEQ ID NO: 381175 - DNA, 577 bp, Homo sapiens
aatatcaatactacctattgtaattttcgtcctttacccataaataatttgctactgcatttaagccttaaaatttactaatttttaaattattattaatttatttattttgagactgggtcttgctctgtcaccctgaaagtggtacaatcatagctcactgctacctcgaactcctgggctcaagtgattctcctgccttagccttctgagtagctgggactacaggcacacaccaccatatycatctaagcatttttaagtctttaggcatgtttttaaaccttctattgattttctgtttaattgcattatggttagatgtttcagttaaagtaaccttgattttttaaaaatgtgttgcagacttcctgagagatttcttgtatggccgtatggtcagtctttatttagaagccatgtaagagttctacttcatagatacaaggttcaaaatggatattttaaatcaagcacatgaattatatcttccaaattttttgtagacacatatataattaaaatatatcttaacacataatataattaatacaatatgcatatgttcaaaatatac

SEQ ID NO: 381176 - DNA, 538 bp, Homo sapiens
ccatcaaaaaacctcacgtcttccttcttccccgatagtttcccaatcacaggaaattgacttaattatttaacaataatcagacttcagtcttaattaattagccttagttaattaattagtctaaattattcagacaatttttaacataatcagtctgatttttttcttcaaaatctgtcacacctgttgcttcttttttcctgctaacatcatcctacttctcctctttacaccaaaacatatttccataggcttttggctggcctctgcttctgatctttctctaggacatgagctaagctttaakacagagttgggttcatatggcaccatttcccttacatgacttctctcaaaaatataagtgtaacaccatggtctctctataagttttcactctttaatatgaactaagactttccacaactgatatagacttgattctaatgtaaaaagcactcattcattgaacaaatacatgtgccaggcaccatgctaggtgcttgaatgtaagaggaaaataataaagagaaaa

SEQ ID NO: 381177 - DNA, 595 bp, Homo sapiens
gagagatcaactgtctgtgaactaagaagcatgtcctcaccagaccccaaatttgccagtgccagtgccttgatcttgttctttctgaaaccgctatttcaaaattataactgagacagtgaaagagatctgacttaaccaactccatcttrcttctaacctccaagctgtccttgttcatttcggggcataggctgaactaactttggaggaacttagtttatagtttaaaacaaagatgataacagccctttcccaaagcaaacctccttcttgctggagactagactgcccttgtaggactaacaaattaggcacaagattagaaattatggtttaagagtcgtgcagctggaggttacaagattctcaccctccctaaactgctcctaagatcagtgcttgaaatattttgctgaccctgcacttgatggatcagctggcaccacccaggtagataaactggctcatctgatctgtggcccccacccaggaactaagcacaaaaagacagctttaattccctattatttcatctctgacccaaccaatcagccctcttgacacactgtcattcccccacccacaaaattgt

SEQ ID NO: 381178 - DNA, 549 bp, Homo sapiens
ttgtgtcacccttataacctgctggtatttttaaaaatctatttttattgaccttaacattgcacaagacagaaaagggacatgtattagcatagcaaatccattttacatatgcaattctggtgctctgagtttaaatgacttgcaattataatctaaatttattaacatttgaagtacaaatattatgttcaagacacttggtagatactccacactctatcatatttgaaattttgagtgggagagttaaaagtgggaatgaaaaaattaacatacattatctattctataatttacaactacagatagtattgcatgatttttatccaattacaagcttaatgcttttaagcttaatatttgaatatcttactctctctctctatttttttmtttattcctttaaaagatggggtttcactctgtactctgtcatgcaggctggagtacagtggcatgatcatagcttactgcagcctcaaactcttgggctcaagtgatcctcctgcttctgcctcctgagtatctgggactacagttgtgcac

SEQ ID NO: 381179 - DNA, 684 bp, Homo sapiens
tatatatgtgtataaaatgtaactttcagaatatattgttttatttattccttgaagaaaacactcacacagatttgttctaagattctatttgtaacatggaattgttagttatgtacagacacttttaaacaagactttcctagtacattaccttaaggattcttagattcaagtatcaagagcgatttggggcttttattctcggctacatagcttcattatatctaataatcttcattatatgtctctggtttttcatctatgcacttttttctttattcttaccaataatttcgggccaatgttagaattgtatgtgaaaacaatatgtattgartatgcatttaacttttttgatatgtttattaagttctatataacactgtttttacatttcctgttttcaaaaatcagggcatggtttgccattactatttttaaaatatattttagatttacttgattcaataaagcacaaaaggaagcattccacatttctctgacatctagtaagttgcatttctaggtcagttttctcatctttgcctttaaataatgattataattgaaatcttatgatgtaatagtcaaattgaccttttcctttgtctacgcctactaccaaataatttggaacagaaattatttgaagtatgtattagtctgcttgggctcctatta

SEQ ID NO: 381180 - DNA, 650 bp, Homo sapiens
ggtttgccattactatttttaaaatatattttagatttacttgattcaataaagcacaaaaggaagcattccacatttctctgacatctagtaagttgcatttctaggtcagttttctcatctttgcctttaaataatgattataattgaaatcttatgatgtaatagtcaaattgaccttttcctttgtctacgcctactaccaaataatttggaacagaaattatttgaagtatgtattagtctgcttgggctcctattacaaaatgcygtagactcagtgacataaaaaacagaaatttgtttctcacaattatggaggtggggaggtccaagatcaaggtgctgagagggttggtttcattctaaggcctcttctcctggctcaggctgctgctacttcactgtctcactgtgtccctcacatgatctcttcttggtgggtacttgcagagagtggggagggagagaggaagggcaaaagggagaaaggagggggagagagagagaagaagaaagagaaccctcttatgtctcttctttttataatgacaccaatctcatcagattaaggccccactcttaagacctcatctccaaaactccatctgcaattaccatcacactgggggttagagcttcaacatgtg

SEQ ID NO: 381181 - DNA, 539 bp, Homo sapiens
gctgcactcccatgtttattgctgcgctactcacagtggccaaaatatggaatcaacctaattgcctatcaatggatgaatagatatagaaaatgtgaaacctagacatgaccacaagatgactatccatacttaagttatagtacaatagtcctttaaaacaaagacraacattgaagacataattttctattgttttttactactttgataatctcaacatgtttcatttttatatattttacaaatgtgatgtaaataatttttgtcaactagatggtgactttgtttttccatattaaaaaaagcaacaaattttatgtaaatttgaagctcaagccaaagttccttttgtagtgaaaaagctagtagatgccctatattgtggtattaagctatgttaagctatctgtgctaatgtagttattgtggcaaaaagatttacagaatctgagtcagtgagtccaattagttctttcctgaataatggttaggatggtacaaatttactatttacctccacattcaagtcatgcaat

SEQ ID NO: 381182 - DNA, 539 bp, Homo sapiens
gctgcactcccatgtttattgctgcgctactcacagtggccaaaatatggaatcaacctaattgcctatcaatggatgaatagatatagaaaatgtgaaacctagacatgaccacaagatgactatccatacttaagttatagtacaatagtcctttaaaacaaagacaaacattgaagacataattttctatygttttttactactttgataatctcaacatgtttcatttttatatattttacaaatgtgatgtaaataatttttgtcaactagatggtgactttgtttttccatattaaaaaaagcaacaaattttatgtaaatttgaagctcaagccaaagttccttttgtagtgaaaaagctagtagatgccctatattgtggtattaagctatgttaagctatctgtgctaatgtagttattgtggcaaaaagatttacagaatctgagtcagtgagtccaattagttctttcctgaataatggttaggatggtacaaatttactatttacctccacattcaagtcatgcaat

SEQ ID NO: 381183 - DNA, 638 bp, Homo sapiens
tccagtaacaacctttatcattgttgttaatattgatatatttcagtgtccttctaattttgggtttttcttctaccagctctacccaattcaaactattcttttccatgtccaagattcaataagctctttatgaaactctaaatacgtcattcaaaagcatttgatggcacctagagaatatattttaagctctccagcaggatatttaaggtcctccgtggtcttcttcctaaaattttcttacctccaacacactcctccatatacccagtgttccaatgttgtttgctttctctggcatatttctgagaaagaaggctgttagctgcagtgtacaaaactgccatttattgtgaaatatctgattgtgtcaaactatttaattaaaaaagacgtccttttgaatgataacccaaggaaaagaaattaatccttctccgtctgttcatctagtcatgcagattgctttatttgctttagaataatgttttgttatatgctttagaataatatgtgttttttagaatcagtgacattaaataagttcrgttatatatttttgtaaatcatgttaatgcaactgtctggccaaagaaagtggacacaaaaatgaataaatacataaaaataaacac

SEQ ID NO: 381184 - DNA, 468 bp, Homo sapiens
acccgagatcatacgaataaacattggagaactaaaattacatttactagcaatatacagctttaaagactaagctggattgtgacagtttttaaaaagtccagaaaggaaatgggtaaggtattttgaccaagaatagccccgttctttgattgagctttataggaattctcacaggatggaaaaaatgaactctcttgaagatatcttcccagaaagagtctaccctaaaatgcggtgtgaagaaatattactgttacagtcacagtgactacttagatggtatcaggaaaaagccaacctagaatgtaaccagtgaaaacaaaatgctctactgtggggaattgatgtattttacagcttcttggtgaaatgaraaagacagtaattgaatgacaagaggaaagagaagagacatgggcatctcaaggctgagcaaagagaaagttggagaataagaatgtgtca

SEQ ID NO: 381185 - DNA, 508 bp, Homo sapiens
gtgtattctgaccatggatttttgctcagcaaacctctagtcttaatatttcctaagaaacagggtaactgtgagcttctcaggcatatgcaacagtaaatgttacaaaatgggcaatctggccaagaaaataataataaagtatgagtatgtggtagggagaataatgcccccctaatatccacaccctaagaaaattacagccatatttattaaatgtaaggtgcggtgggcaggggagagggagcaaagcacgttcacgaatgagttctcaaattgactctcagaacttatgtccagtgacatagaaaccaccttcccaaatggcagagcctttcyttccctggagatagtggcagagggagtggcggccactgaagccacggaggatatgggaatacagtaccttaaaaggcaaagggactttactacgtgtaattaaggttaaggacctcaaaatagagagaagtccttgttatttggttgggcctaatctaaacccatgagt

SEQ ID NO: 381186 - DNA, 370 bp, Homo sapiens
agatgctacaactcaagccacctgtataagaaaaatatactatttttcttacattctcacaacactcaataattgtagaacacctcactcccaacaccaaaatgtgtgtgtgtgttttttcccacaccaagcaatttttcarctctctggagacatggacttgatgtcctacaattcttttcaattttggcactatctacctgcaggtaacatcagagcccacaagttaagggatcagtcacacaatagtatccccataagccaattcagatgtcaattttaagtccgggttgtcacctgtgcttctgaccaagctataaatcggaggctctcacaacttcctcctcagattcaataatttgctagaatg

SEQ ID NO: 381187 - DNA, 560 bp, Homo sapiens
ggatggctaaaaataagcccacacagtgaacactacaataaatacttaatttttcaatgcccagacaccaacgaccatctactaaaataagcaccatccaggaatacattacatcaccaaatgaactaaataagccaccaggaattactcctagagaaacagagatatgcgacctttcagacagagattttaaaatagctgtgctgagaaactaaaaaaaaaaaaaaaatcaagataacacagagaagaaattcagaattctatcaaataaacttaacaaagagattgaaataatttaaaagaatcaagcagaaagtcttgagctgaaaaatataataagcatactaragaatacatcagagttctttaacagtggaacaggtcatgcagaagaaagaattagtgagctaaaagacaggctatttgaaaatacacagtgagaggagacaaaagaaaaaagaaccaaaaaacaatgatgcacacctacaggatctagaaaatagtctcggaagggcaaatctaagagttattgcccttaaagaggagggatagaaacagaa

SEQ ID NO: 381188 - DNA, 610 bp, Homo sapiens
aagatagtatttgcaagcctcatggcaacctcaaactaataaacatacaatggatacataacaaaaagcaagaaactaaatcatatcacaagagaaaattatcttcactagaggaagacagaaataaaagaaggccacaaaacaaccagaaatcaaataacaaaatggcagatgtaagtccttacttatcaataataacattgaatgtaaatgaactaaccttgccaatcaaaagacrtagggtagctgaataaatgaaaagacaagatatattgatctgctgcctgcaagaaacatacttaacctataaagatacatgtagactgaacataaagggagagaaaacgatatttcatgtcaacagaaaccaaaaaagagcacaggtcactatacttacatcagacaaaatacattttaagacaaaaactctaaggagagacgcagaaggatactgcataatcacaaaagggtcaattcagcaacagaatataacaattttaaatatatatgcacccaacactgaaacacccagatacataaaggaaatattattagagctatatagagagataggccccagtataataatagctggagactttgacacccc

SEQ ID NO: 381189 - DNA, 545 bp, Homo sapiens
aagcaagaaactaaatcatatcacaagagaaaattatcttcactagaggaagacagaaataaaagaaggccacaaaacaaccagaaatcaaataacaaaatggcagatgtaagtccttacttatcaataataacattgaatgtaaatgaactaaccttgccaatcaaaagacataggstagctgaataaatgaaaagacaagatatattgatctgctgcctgcaagaaacatacttaacctataaagatacatgtagactgaacataaagggagagaaaacgatatttcatgtcaacagaaaccaaaaaagagcacaggtcactatacttacatcagacaaaatacattttaagacaaaaactctaaggagagacgcagaaggatactgcataatcacaaaagggtcaattcagcaacagaatataacaattttaaatatatatgcacccaacactgaaacacccagatacataaaggaaatattattagagctatatagagagataggccccagtataataatagctggagactttgacacccc

SEQ ID NO: 381190 - DNA, 628 bp, Homo sapiens
ttacttatcaataataacattgaatgtaaatgaactaaccttgccaatcaaaagacatagggtagctgaataaatgaaaagacaagatatattgatctgctgcctgcaagaaacatacttaacctataaagatacatgtagactgaamataaagggagagaaaacgatatttcatgtcaacagaaaccaaaaaagagcacaggtcactatacttacatcagacaaaatacattttaagacaaaaactctaaggagagacgcagaaggatactgcataatcacaaaagggtcaattcagcaacagaatataacaattttaaatatatatgcacccaacactgaaacacccagatacataaaggaaatattattagagctatatagagagataggccccagtataataatagctggagactttgacaccccactttcatatgggacaggtcttccagatagaaaatcagcaaagaaacgtcagacctaatctgtactgtaaaccaaatagagctaataaatagttacagaacttttcatccaacagctacagaatacacattcttttcctgtgcacatgggtcatttagaccatatgttaggtcatgaaacaagtcttagaatatgcaaa

SEQ ID NO: 381191 - DNA, 610 bp, Homo sapiens
aagatagtatttgcaagcctcatggcaacctcaaactaataaacatacaatggatacataacaaaaagcaagaaactaaatcatatcacaagagaaaattatcttcactagaggaagacagaaataaaagaaggccacaaaacaaccagaaatcaaataacaaaatggcagatgtaagtccttacttatcaataataacattgaatgtaaatgaactaaccttgccaatcaaaagacatagggtagctgaataaatgaaaagacaagatatattgatctgctgcctgcaagaaacatacttaacctataaagatacatgtagactgaacataaagggagagaaaaygatatttcatgtcaacagaaaccaaaaaagagcacaggtcactatacttacatcagacaaaatacattttaagacaaaaactctaaggagagacgcagaaggatactgcataatcacaaaagggtcaattcagcaacagaatataacaattttaaatatatatgcacccaacactgaaacacccagatacataaaggaaatattattagagctatatagagagataggccccagtataataatagctggagactttgacacccc

SEQ ID NO: 381192 - DNA, 628 bp, Homo sapiens
ttacttatcaataataacattgaatgtaaatgaactaaccttgccaatcaaaagacatagggtagctgaataaatgaaaagacaagatatattgatctgctgcctgcaagaaacatacttaacctataaagatacatgtagactgaacataaagggagagaaaacgatatttcatgtcaacagaaaccaaaaaagagcacaggtcactatacttacatcagacaaaatacattttaagacaaaaactctaaggagagacgcagaaggatactgcataatcacaaaagggtcaattcagcaacagaatataacaattttaaatatatatgcacccaacactgaaacacccagatacataaaggaaatattattagagctatatagagagataggccccagtataataatagctggagactttgacaccccactttcatatgggacaggtcttccagatagaaaatcagcaaagaaacgtcagacctaatctgtrctgtaaaccaaatagagctaataaatagttacagaacttttcatccaacagctacagaatacacattcttttcctgtgcacatgggtcatttagaccatatgttaggtcatgaaacaagtcttagaatatgcaaa

SEQ ID NO: 381193 - DNA, 586 bp, Homo sapiens
gacaaattatgtttaccacatggtgttttgatagatgcatctattattgtaaaataattaaatgaagctaagtaacatatccatcatctcacaaatttatatgtgtgtgtgtgtgtgtgtgtagaaaacatttaagatccactttcttagcacttttcaagtatacgataaattgttaactatagttaccatgctgtataatatatctccagaaattattcattctaactgaaacttagtaccttttgaccaaactcctcccacaagccctggcaaccatcattctactctctgtttctatgagttcaactttttaagattccacatataagtgagatcamgtagtatttttcagtgttggttttatttcacttggcagaatgtcctccaggttcatccacatcattgcaaatggcagaattttcttctttttaaggctgaatagaattcctttgtataaatagctagaattgtattttctttatccattcatttgttgatggacacttaggttaattccattccttgtctattatgaatagtgctgtgatgagcatgggagtacacatatctctttgccttactg

SEQ ID NO: 381194 - DNA, 549 bp, Homo sapiens
acacactgcaggagagtgtgcataaatgcagccgttagattgggtgacagatcctctgtaatctcatcagattagcatgactgttcttcctgtttgggactcccagaagttagaggtttcacttgaattgcagcagtatttttttaagtctataatagcttcatccatatcttgactctggtttgtaagcagaaagtggcacttttagacttttgttatttcaaacattgttttcttacatcctggccataggacattttgtccaccatctttytaatggaactttgcagactgttcagtaacaatgttttatgctctctatcattctaataatcctccccacctctgtatttgccacctccccaactctgtgaattttccagtaataattgttggcttcatctagagagacaggtgcccagcttgggcatctatgtaatacctttgctaacgcacggagttccaccacttattagaaaacaagcaataaatcacaactgtcttcaaaaagaaagaaggaaagcagtcacaagaaaaacttgttgctcc

SEQ ID NO: 381195 - DNA, 549 bp, Homo sapiens
acacactgcaggagagtgtgcataaatgcagccgttagattgggtgacagatcctctgtaatctcatcagattagcatgactgttcttcctgtttgggactcccagaagttagaggtttcacttgaattgcagcagtatttttttaagtctataatagcttcatccatatcttgactctggtttgtaagcagaaagtggcacttttagacttttgttatttcaaacattgttttcttacatcctggccataggacattttgtccaccatctttctaatggaactttgcagactgttcagtaacaatgttttatgctctctatcattctaataatcctccccacctctgtatttgccacctccccaactctgtgaattttccagtaataattgttggcttcatctagagagacaggtgcccagcttgggcatctatgtaatacctttgctaacgcayggagttccaccacttattagaaaacaagcaataaatcacaactgtcttcaaaaagaaagaaggaaagcagtcacaagaaaaacttgttgctcc

SEQ ID NO: 381196 - DNA, 644 bp, Homo sapiens
atgacatttatgtcttttttttcttatagcatctagcataataaaaagacacatagcaggagactaacaaatctttagtgaattgaattgaacattcctagcagtttttctaatgtgaactgacaatggattttctgcctctccgggatgtgacaggcagcctcgagataggttttggatgcacagaacaattactggatatttcaatggtttatgacaaacagtggtgcagtgtatttcaaataattatatatggttggcgcattcagcacagtcatatttgctctacagacatttactaagcattgtgtctcagttacaaygataactatgatgctatccttgcctccaaggagctcacagtctgatgcccttagctagcttcaggagtacttttagagatgaagatgttgttgtcgaaagaggccaggcattctagaagtagtgtgtttgaggcagttgagtatatgttcctttcactacaaaatttgtggtaaaccttaagcaatgttaaattgatgcccctaccttgtttctcaaagtattgttgatgtggacttttcttcccctaatgtatttatttgcccagtaattatttggtcaactaatttccctatttcctaggccaatatgtagaaatagaa

SEQ ID NO: 381197 - DNA, 617 bp, Homo sapiens
ttttctaacctgtaaaataaggctattttctcaaatcctcatccaggccaatttgcttccttttttatcttcctggtgtaaatcattaggacatgatcagagaaagtaagcaataggtatcaccaggagagacagcagtaatatgtccttatttctgtcccactacctccttccttctgccatttcctaagtgtgagctagaaaaagacatagaaccatgccttattcctggtgttcttgtgctctgaaagcctagaacataacttagccagttgacacagaattatggycagttagctgttctactggacatctactgcagatgctttggcctcctcagtaccacagtcttctcgatgacctaataataactactctttgtgtaacttttccctatggtatttcacttgatcatcttcgcaactctgtgacttggttaaagtagataggattcaagtgctcattttacacataagaagtctgaaactcagaaaatttaagggacttggcaaagtcacatggatagtactggcagagctgagcctagagcatgggtctccacctccagctctggagttccttccttataccagattctgcagcgtgctgctaacaaa

SEQ ID NO: 381198 - DNA, 633 bp, Homo sapiens
tttcactctccaaagctgcagcccaagctgtatctaggcccctttgacccacagcgggagctagagcagccaggatgagggaacagtgtcctgcagctgagcagtgaagtggccccctaggcctggctgccaaaaccattcttttctccaaggcttctaggcctgtgatgggaggggctttcctgaagacttctaattggcttcaaggcctttttcccattgtcttggatattagaaatggctctcttttagtcatgctaatctctctagcaagtgagtgctctgaatcctacttgtatttttctcctgaaaatgctttttctttctcttccatgtgatcaggcttcaaattttccaaagttttatggtctgcttcccctttaaatataaatctttaagtaacttcttcacycccatatatgattataggctgttagaagcggtcaggtcacttcttgaatgatttactacttataaatttcttttgccagataagctgggtcatcaatcttaagtttaaacttccacaaatccctaagatgtggacagaattcagttaagctctttgctagggcataacaagggagacctttgctctggttcccaataacttcttcatttctatctgagacc

SEQ ID NO: 381199 - DNA, 633 bp, Homo sapiens
cttccaaattaagattgactccttttgcctagtacattatctctaaaataatgacatatatttttaccatttcaatggttgccttttaattttgttgattgcttcctttgctgtgcagaaactttttagtttgatgtggtcccatttgtttatttttgctttttgttgcctgtgcttttggtgtcatgtccaagaagtcactgtccagaccaacgtccaggagctttgttcttagttttcttttaggagtgttacaagttagtgtcttatatttaagtctttaattcatttcaagtaaagttttgtttatggtataaggtcaagggccaattttattctattacgtatggatatccagtttttctgacatcatttattgaaaatactaccctttctttattgtctatccttgttgcctccttgcaggtcactgtgcaggttcttgggaagtaggattgtggctaaaaggagcttgaaccaagtcacaggkcttcctcagagtccacagctggaacagaggtctacaggtcagcctctgggggtacgaatgggtgtgccttctgtcaagttcctaggaaggtagaaatgccccaaaactgcagctgagaggggccagagcctagtcacaggctg

SEQ ID NO: 381200 - DNA, 399 bp, Homo sapiens
attatttcttccttaaacgtttgatagaacataatattgaagtcacctgggcctgaagatttcttgacagatatgggctatttgaattttctattttatcttatgccagttttattaagtttcaatttttaagggyttttcctccttcatctaagctattgattttgctgacataggtattataggatgtataagatatttccccttttatttctgattaataatttgcgttttctttctctttttcttgatttgtctagtgagatgtttattacttaagaaaacatcttgaaaaccagctcttggtttcattgatttctctactgtttaataaggtttgcattttatactttttcctgctttcacttttatagttgcccacgtatttatcgttttcag

SEQ ID NO: 381201 - DNA, 584 bp, Homo sapiens
ggttgagctgcctacagcctggttgggcatgtaggtgagttattaattcttgccaacctttatggtgaaaaatgctattttattatggttttaatttacattccctgattattattgagtatgagcattttaaaaatacgctttcatttatctatacactattcttgtttctcctgtgggatgcctagtcatgtcttttatgcctttcttttttgtcgctttcttataatttatataattgcttttttattttttaaaaactttgtcataaaatatacatgaaatagtgtttattattgtaaacttttttcaacttcaattttaattgacaaacaatttatggggtacaatataatgtttattttttaagagattcwaatgttttgtttctaagcagttaaaatatacagagaaaggccgggcatggtggctcatgcctgtaatcccagcacttcgggaggccgaggtgggcggatcacgaggtcaggagtttgagatcagcctggccaatatggtgaaactttgtctctactaaaagacaaaaaccaaaaattagctggcgttgtggcacgtgcctgtaatcc

SEQ ID NO: 381202 - DNA, 587 bp, Homo sapiens
ggcatgagctaccatgcctggtgtagagtttgccttttgatgaatagagttttttttttaattgatattgtttaatatgcccatctattccttaatagccctgtactttttgtttttaatatcttccctatcttaaattcatattttctattgttttctcctaattatgtttaagtattgctttcacatttaaatctttgagatatgtcgagaattgattttgtaaatgttatgactggttcctactcccatcctcattttgacacttgattaccccagcacaatttattgattagtcttttttccactgatattaattacctaatctgttatttatcatgyttttggtatgtgagtaggtctgtttctgtactccttttgtctatctttctctcttatgctagtaccatactatcttaattgtttgagttttatactatatttaataaattataagatgcatgtttattttatgtttagcccatctgatgatggaatatcacttggccagagggcagtcataatgcagatttttttcctaagcaactgcaaatttaattatagatggtcatattgtagtcacttac

SEQ ID NO: 381203 - DNA, 608 bp, Homo sapiens
gatctgatccactaaccttccagaaaaaagacttatataaatataagctttattattatcaacaatgttctggctcttttcagatctttgattcagttttgttgaaataaagctcagaacagacaaaacaacttgaaaaaagaaaactgtccttcagtggaaattgtctttattacatctgccagaataccaagtgatgacataaatcaggactcaatgttttattaggcaagtcagattcctcagatcaatgttttgtttgaataaagataattaagaaatttttgctcatcttaaagaaaatatgcaaatctttttttttctttttagggaacaggaagaaatttagcataacttcaggcagagtgaattaggaatgttaaggtttttcaaaacaagtatttcttatagaaaatgtgttctctctaaaattgtctatctccagcaaaaatccttggttgtcatcatcaccaaatgcccacatatgtttatagttttctaagggtcttatrtttccttgaatgtttaaaatattctgtctctttcaaaaagtgtttgaaagtcatgcaacaaagaatataaataaccaactttccttccttcctccc

SEQ ID NO: 381204 - DNA, 588 bp, Homo sapiens
ggcagccttttgggtcacttgataaatgggccagagtaacacacccaagtgaggactgtgttgtctccaaaatccaaataggcccactaggccttgtaccacyttcttggttgtaggagtggccaaatgcagcaacttttccttcaccttagaaggacaagccctacaccactagaccccaagaaattttactgaggtagaaggtccctgaatttcccatcctctggcatgcaaatgtcccactgataaatccagtgtatttgctacttcttgctcactggatccaattagcataatatcatcaatgtagtggaccagtgtgatatcttgtggaagcaaaaagtgatcaaggtctctccgaataagatgacacaaagccagagttgatacaccctgaggtaggagagcaagggcatgttgctggccttgccagctgaaggcaaatttcttctggtgggccttatggacaggaatggagaaaaaggcatttgccaagtcaatggctgcatatcaggtaccaggagttgtgttagtttgctcaaacaatgaaaccacatcttgtatagcagctgcaattggagtctccac

SEQ ID NO: 381205 - DNA, 599 bp, Homo sapiens
gtgagggagtcctggggggtctatggcaacatattttattttctcatttgatcctcacttcagcctttcaaagctgtgttcttttcttcagccccaagggaattcagggtactcaaaaaactaggtcacaaattgcatccatctcttagaagaaaggagtgaaatgacattgttgttctctctgctcctcttatccagagataacagtgaatatgtgctgcttcagaggaataattatgaatgtgtgaaaatctactgtgattcaataacagtgcacattagtcaaaaaccctttagaggagctgaagcttatagtctacctaaaaccaaaaacctctagacctggagaytgaatggataatgaaatttaatcacagtcatcctgtgagtcagaggtgaataagcttgcagccctgggagtgatccaggtgcttatggccttgtctcaggcaaagagatctcttcagtagctttgccgtgagaagggcttctccagctcctctccctctcatgaatttttacctataccagcaccattctcatcccatgaaaatgagattccaaggagctcctcctcatattgcaaattaagcacctgg

SEQ ID NO: 381206 - DNA, 579 bp, Homo sapiens
tgtgcgtgctgtggcgagaagactggaatctctatgaggtattagcggtctcattaagcaggtgagcgagagatttagaaagaagagtggtgctgacacactttaatgctgtaacaaggttcccccaaatcaagggttctcaaagggtaggcactggaccagaggcattagaatcatctaggacttctagatataccacctcamagcagacttgctgaatcagaaacgcctgtgctggcacccttcaggtgacttcagtgcatgttcagatttgagaggcattggtctaaatcagtcagctctttgaaaaagtttagttgggaaaggcaaataagcaaggcattggagaggttaaatagaacaaagacctcattctatttgctcaattttggaccgagttacagaattctgccagtaagtgctttaagaataaagcaagaaggctttatgaagaaatgttatttgaatgatgggtgcaatttagaaagacaaagtagacagggaatatttagtagataaagccacaggccaatagacaagtagatattcaacaaataaataaatcaacacgtttaacaa

SEQ ID NO: 381207 - DNA, 579 bp, Homo sapiens
tgtgcgtgctgtggcgagaagactggaatctctatgaggtattagcggtctcattaagcaggtgagcgagagatttagaaagaagagtggtgctgacacactttaatgctgtaacaaggttcccccaaatcaagggttctcaaagggtaggcactggaccagaggcattagaatcatctaggacttctagatataccacctcaaagcagacttgctgaatcagaaacgcctgtgctggcacccttcaggtgacttcagtgcatgttcagatttgagaggcattggtctaaatcagtcagctctttgaaaaagtttagttgggaaaggcaaataagcaaggcattggagaggttaaatagaacaaagacctcattctatttgctcaattttggaccgagttacagaattctgccagtaagtgctttaagaataaagcaagaaggctttatgaagaaatgttatttgaaygatgggtgcaatttagaaagacaaagtagacagggaatatttagtagataaagccacaggccaatagacaagtagatattcaacaaataaataaatcaacacgtttaacaa

SEQ ID NO: 381208 - DNA, 588 bp, Homo sapiens
attaattttagctagaaggaggtaagattactacaaatgaatacttctgttggcagaggagtcataggccccagtatggtgtttggcaaatagtagaatgataaatatttttgaatagaagaataagtaagtacaaaacatccctttctctgtcctttgcctactagtttaactgtctagttttattgtatttttctaccataggagaacaaaaatatttttaaaaagagaaagaaaggcaggcagcaaggagaaaaaacattttttaaaaaaagaaaattaaaatccatgtaatgtctgatatctgttctgctgtatgtgtagatctttccatataccaactcattagccttattttacaggtgaggaaaatgagacygagagtccttcttacttgaccaagttcacacagcaagatcacacatggtagaaccaatgttagaacctaggtgtatacttgctcattcaatatgtacaataattgcaaaagtttccataggtcttattatatatcaggcactataaatgctatgcatgtgtcaactaatttaaacctaagcaatattataaggaaggtactattataga

SEQ ID NO: 381209 - DNA, 628 bp, Homo sapiens
gttctcacttataagtgggagctaaatgatgagaacacatggaccaatgagggggggagcaacagacactggggcctactggagactggagggtggaagatgggatgaaggagaggattaggaaaaatattaatgggtgccaggcttaatacctgggtgataaaataatctgtacaataaactctcatgacacaagtttacctatgtagtaaacctgcacatgtacccctgaacttacaagttaaaaataaaaatatttttgtatcataaaaaattatagtatagmggaattttaaattgaaaaagattcttagcaattatccaaacatgaattccagagagatattgtaatttgcctagggtaggacacctggtaagtggaaaggcttgtgtgttctcattagctcaatacttttttcaccaaccactcaacaggtcatgtacctgtttgttaataaaattgagttttcactccttgaaagagaaaaatgattaaagtctccattaatatactaacctttggaagattcaagaatctccaaattcattgccatatatatgaagaagcttgacttcctttcttagcatattcagcaacacacacacatgcacacacacacatatgtac

SEQ ID NO: 381210 - DNA, 612 bp, Homo sapiens
cactatcttgaattcttaaatctttacagcatcttgaattcttcaattcctttggattagtgatacggtttggctctgtccccacccaaatctcatcttgaattgtaatctccacaatccccatgtgtctaggaagagacctggggggagatgattagaccatgggggcagtttcctccatgctgttctcatgatagtgagtgagttctcatgagatctgatggttttataaggggctctttccccttcattccttgcttcttctctctcctgctgccctgtgaagaggtgtctcctgccatgattgtaagtttcttgtggcctccctaaccatgcagaactgtgaatcaattaaacctctttcctttataaattacctagcctcaggcagttctttatagcagcgtgaaaacgaactaatataattagtattctggtcatgtagaaaacatgtttttactttgaacataagttcaatrtgttacattctctggtcacatttagacagtaataagcttagccaaaaacatgggctgctgaggatactgtatgcctcgtttgctcattcataacatcagaatgttacctaaaatttccaagcagggttcaact

SEQ ID NO: 381211 - DNA, 594 bp, Homo sapiens
tttcttcatatgtaaaacaactttgtagctctctaatctcttggccttgctttaatgatccttagttttagatcatctagtcattctctctggtcctggttcaatacaatttggttcttatttcttttatcttttcaaggagaaagcccctggtgagccaggtggaatgtgatggtgtagatatgattttccactatcatcgattagatcaaggatcttsagcaagttatttaaattctctgagctcagtttcttcaatttcaaaatgctacaaataatagctacttgtcaaggctgtgagaattaaatgtgacaatagtaaagtataattaacagatgctaattaagcttgaggaggtaatgttagaagtgcaccacaaaggcttgataagtaaagctggatatagattgatggggagggggtcagagagtgccttgtgactggtcagatttgagtcattattagttatttcagtttggtctaagttagcattttcctaagtatcgaccacccacacaagattaaccccaatcatgtgtctctgtgtgtgtgtgtgtgtatatatgcatgtgtgcttgcatgtatatacttat

SEQ ID NO: 381212 - DNA, 568 bp, Homo sapiens
ctattaatgataaaggctccatgaaattctgcttttaagtaacctatacaagtaagtatttgactacaggattcttttaaaataacacctttttatactttgcataactaaagtttaatgctccatttttatataatacaattattaccttgctagcttcctaagcctcggtttttataacagtgaaatgaaattagaaagcctagcaggcttctagaatgttaaaacttggccttgtaattatttcttaattccatattttagtaatttctcttgttcagccgatgactaaaaatttttttgaatacagacaggaatacaagttccttatatgcaatgtagaaaatgyagaaaaataaaaagaatgaaatttaaatatcgtatatccactgttaacatttttatgtactttttattattttttatattcctacatataaatatatttttacaaacattcatttgtataccctgctttccccattccttaacaatttttctacaatgtaacagtcaataaatgcaaatattatatcataagaatgtaatttaatcaatcatttaattg

SEQ ID NO: 381213 - DNA, 568 bp, Homo sapiens
ctattaatgataaaggctccatgaaattctgcttttaagtaacctatacaagtaagtatttgactacaggattcttttaaaataacacctttttatactttgcataactaaagtttaatgctccatttttatataatacaattattaccttgctagcttcctaagcctcggtttttataacagtgaaatgaaattagaaagcctagcaggcttctagaatgttaaaacttggccttgtaattatttcttaattccatattttagtaatttctcttgttcagccgatgactaaaaatttttttgaatacagacaggaatacaagttccttatatgcaatgtagaaaatgtagaaaaataaaaagaatgaaatttaaatatcgtatatccactgttaacatttttatgtactttttattattttttatattcctacatataaatatatttttacaaacattcatttgtataccctgctttccccattccttaacaatttttctacaatgtaacagtcaataaatgcaaatattatatcataagaatgtratttaatcaatcatttaattg

SEQ ID NO: 381214 - DNA, 562 bp, Homo sapiens
catcatgtaatatttgttcttctgtatctggcttattttacttaacataatatccttcaggttcatccaagttgccacaagtggcaggattttcttcttctttttaaggctaaatattgtatgtggatactatattttcttcatccattattctgtcaatgaacaattggttgattccatatcttggctgttgtgaataatgctgcaatgaacatggcaatgaagatatatctttaagcttctgatttcaattccttttgatatacacccagaagtgggattgctggatcatgtagtagttctatgtttaattttttaaagaaacctccatattgctttccataatggctgtgctaatttacattcccaccaacagtgtacaaggattccttttctccacatcctcataaacatttattatcttttgytttttgataatagccattctacaaagtgtgaggggatacctcattgtggtttccaattgcctttccctgatgactagtgatgtttaacaccttttcatgtacctgttaaccatttgtatgtcctctgtggggaa

SEQ ID NO: 381215 - DNA, 562 bp, Homo sapiens
catcatgtaatatttgttcttctgtatctggcttattttacttaacataatatccttcaggttcatccaagttgccacaagtggcaggattttcttcttctttttaaggctaaatattgtatgtggatactatattttcttcatccattattctgtcaatgaacaattggttgattccatatcttggctgttgtgaataatgctgcaatgaacatggcaatgaagatatatctttaagcttctgatttcaattccttttgatatacacccagaagtgggattgctggatcatgtagtagttctatgtttaattttttaaagaaacctccatattgctttccataatggctgtgctaatttacattcccaccaacagtgtacaaggattccttttctccacatcctcataaacatttattatcttttgctttttgataatagccattctacaaagtgtgaggggatacctcattgtggtttccaattgcmtttccctgatgactagtgatgtttaacaccttttcatgtacctgttaaccatttgtatgtcctctgtggggaa

SEQ ID NO: 381216 - DNA, 581 bp, Homo sapiens
tccttgctccaactagactgtgtggtcttcttgatttgaatatgatatctgattggtctttgtaatcccagtactacagtaagttctcagcaacatttttaaaagtaaataaatagtatcaagttcttttctgattttcatggggctaaaggctaaaggggcatcagaatatctaaagggcatggaggagargatggaaaacaaagttgggagactttttaatgttgccaaatttcccatgggtgtgccctttattttaagtgggaagatagaggtttcagtcccggagccatgtaaaaattgagaagcactgccttgagccttttgatacataacagtaaactgaatggattaagaatttattataacttcattttttaaaatatagttcactttgctcagagaacacttggtattgaggcattcttatatggatggggtgaaatttgaggactggggagtgatagcagatattgagatatatggggggatatgcttgatggtccaggttgattttttaaagtaagatgtcaacttccccttaagaaagttaataaattgtacaaagaagaattagtgat

SEQ ID NO: 381217 - DNA, 581 bp, Homo sapiens
tccttgctccaactagactgtgtggtcttcttgatttgaatatgatatctgattggtctttgtaatcccagtactacagtaagttctcagcaacatttttaaaagtaaataaatagtatcaagttcttttctgattttcatggggctaaaggctaaaggggcatcagaatatctaaagggcatggaggagaggatggaaaacaaagttgggagactttttaatgttgccaaatttcccatgggtgtgccctttattttaagtgggaagatagaggtttcagtcccggagccatgtaaaaattgagaagcactgccttgagccttttgatacataacagtaaactgaatggattaagaatttattataacttcattttttaaaatatagttcactttgctcagagaacacttggtattgaggcattcttatatggatggggtgaaatttgaggactrgggagtgatagcagatattgagatatatggggggatatgcttgatggtccaggttgattttttaaagtaagatgtcaacttccccttaagaaagttaataaattgtacaaagaagaattagtgat

SEQ ID NO: 381218 - DNA, 596 bp, Homo sapiens
tacttaatatctgtattttgtgctacattagaatctccatgagattagggattatatctgtcttgttccctgggactaacataatacctgaaacagcagaaactcaatagctgttgaattcttcatagaactaaccagaaacctgctttgattatacagactaaattgaagyaattttgccatcgattggaaaattaataaactaaaaaagacttatgagcaaaggcaccctcagccttactatgtctgtctaatccttgtgctatcaggcttccccaggccttttcactcttgaatgctggtaataatatttggagttcaggtaatgcagctggagctttattccatttactgcattctcactgcttctagcaacctcttaaggcaatcaagagtcaaataagctgtcacttcctgtatttccatctatggccacaacagttgactctccaatactgatatactgaaagaaccgaccttaagaaatcacttatctcatttgttctccacctcttcagatgtttttggctgctgggtcagttaagggcattagagaacggttgcttcatagtcactccattattccctctgatagt

SEQ ID NO: 381219 - DNA, 596 bp, Homo sapiens
tacttaatatctgtattttgtgctacattagaatctccatgagattagggattatatctgtcttgttccctgggactaacataatacctgaaacagcagaaactcaatagctgttgaattcttcatagaactaaccagaaacctgctttgattatacagactaaattgaagtaattttgccatcgattggaaaattaataaactaaaaaagacttatgagcaaaggcaccctcagccttactatgtctgtctaatccttgtgctatcaggcttccccaggccttttcactcttgaatgctggtaataatatttggagttcaggtaatgcagctggagctttattccatttactgcattctcactgcttctagcawcctcttaaggcaatcaagagtcaaataagctgtcacttcctgtatttccatctatggccacaacagttgactctccaatactgatatactgaaagaaccgaccttaagaaatcacttatctcatttgttctccacctcttcagatgtttttggctgctgggtcagttaagggcattagagaacggttgcttcatagtcactccattattccctctgatagt

SEQ ID NO: 381220 - DNA, 533 bp, Homo sapiens
ctcagccttactatgtctgtctaatccttgtgctatcaggcttccccaggccttttcactcttgaatgctggtaataatatttggagttcaggtaatgcagctggagctttattccatttactgcattctcactgcttctagcaacctcttaaggcaatcaagagtcaaataagctgtcacttcctgtatttccatctatggccacaacagttgactctccaatactgatatactgaaagaaccgaccttaagaaatcacttatctcatttgttctccacctcttcagatgtttttggctgctgggtcagttaagggcattagagaacggttgcttcatagtcactccattattccctctgatagtcagtctgctttatgatgaaatgaagagaaactggatttataagtcaaataatctcctttcaagtttttatcctgtcacttgctagttgtgtgatttgggacaaatcatttaactccttgtaaagggagagaagraaggctgtaaaaaaattaagtaataaaaagata

SEQ ID NO: 381221 - DNA, 541 bp, Homo sapiens
gtgtggtaaaaatataggagtccctttaacctccatttctctttttaaatggaatatttgtgtaaattggccagcctgtcctttgtccaaatgacctcaacttaccatagctggattgattgggagataaagagatgagttattctttctctttttttaatctttttccattagcctaagtgaatatttccattcctccttttttttattacttcaaagtgattctaaacaggaagtgaggcataattgcgttttctgcatttgaaaaggagaagctaattcagtgtggagcagcaggcaccaagcggtagtggagaatragaaccacatttcatagcagcaacagatcaaaacatctattttgaagtaaacaatgtgacaatttattgatccgttggtattaactttaaaaaaatagagttctacatttcctgctttaaatctctgctttaacattcacatagacccttaaactgttgagattaaaagggattcagagagaagctgttctggaagaaaccctggtgctgaccatttattg

SEQ ID NO: 381222 - DNA, 604 bp, Homo sapiens
cttttgttgatgttttggaagagaggatgcctgtggaagcctactaggagtgatgcagactagggggagctgtagctcaaacatgcacagagacagtggtgaggagccactcttcctggaggaaactacagagattcccatactagagatggcaggcagggattaggggactgggaaatggagcagaaatcaggctgatcaatgaaaggactctccacagaggcttgatgctgtggttccccttctctactccagcaaacattagtggggtagagatgcagcactgacttttctgtagacagggccatccttagggcatgcaaggccccagcaaactgggtatgtgtgtgtgtgtgtgtgtgtgtgtgtgtgtgtgtrtattctttgtctatgaaaacaatttgatttaaaaatgcattacacaactcatggtcccatgtgaggtatagtcatttatgaataaaaattttttaatgagtatcaaaagacactaatttgttcattgcctaatcattctacatgaagattcttcatcgtgtccaggcaccatctcttcctttttggagtctagatcctctgtgttttttattgtcaaatgtgcaca

SEQ ID NO: 381223 - DNA, 579 bp, Homo sapiens
gttatatttttgctttattcttaccctcaggtctatatgtgggttgcagacattcaatgaaccccctaagaaaaaaatgtaaaatgtttamatatacatatttgtatttttctgtgggacacaatttttctacagcttctcagaagggtctatggcttgtatacacacacacacacacatactcacacatattatgatgtgtatatataaaataggcctcatatttttggcaaatttgcttacatttgctgttttataccatgttgctttcagtaagttaatataggtactttgtttatacaaagagatataaagtggtttattggagggagaatcttagattgaaggctctagatagtgatcatacctgttgcaacaactgggaaactcttgccatctgttgacttcactgaattaacattcaattcttttctgcctccagaatttctattattatccattctccttcatccttctagacgtttttctttcaatgtctttttatacccagaaggtactctcagaatccttcgaactgctttttaaatatattttaaaagaaatatttagaagatcagt

SEQ ID NO: 381224 - DNA, 571 bp, Homo sapiens
ttccaaaactgataaagtacattagccaacagattcaagaagctctctgactctaagctgaataaaaataaaaccactttagcaaaaaatctaactctaagctgaacaaaaataaaaccactcstagcaaaaacaaacaacaaaaacttcaaagaagcaacagtataactgattactgctcagcaaaaaatgatgcaaaccaaaagacaataagaagaaatctttaaaatactgtaagaaaattactgttcacctagaattttatacccagttaatatatccttcaaaactgaatgcaaaatagagatgtattcagacaaaaaccaagaaaactttgcactagcagaccaaacatgcacagaatgagaaactaaaggaaattcttcaagtagaatgaaaataatgccaggtaaaacatgaaaatacaaaaggaaatgaacagtgacaaggataaatgaatactgagtttacaaacagtgaatgtaatgtcctgtggggtctgaattatacatagaatacaaatgcacaataacaatgcgaaaggcagaaagaggtaaattcatttaaaggt

SEQ ID NO: 381225 - DNA, 571 bp, Homo sapiens
ttccaaaactgataaagtacattagccaacagattcaagaagctctctgactctaagctgaataaaaataaaaccactttagcaaaaaatctaactctaagctgaacaaaaataaaaccactcgtagcaaaaacaaacaacaaaaacttcaaagaagcaacagtataactgattactgctcagcaaaaaatgatgcaaaccaaaagacaataagaagaaatctttaaaatactgtaagaaaattactgttcacctagaattttatacccarttaatatatccttcaaaactgaatgcaaaatagagatgtattcagacaaaaaccaagaaaactttgcactagcagaccaaacatgcacagaatgagaaactaaaggaaattcttcaagtagaatgaaaataatgccaggtaaaacatgaaaatacaaaaggaaatgaacagtgacaaggataaatgaatactgagtttacaaacagtgaatgtaatgtcctgtggggtctgaattatacatagaatacaaatgcacaataacaatgcgaaaggcagaaagaggtaaattcatttaaaggt

SEQ ID NO: 381226 - DNA, 593 bp, Homo sapiens
tagaagggttagggacttgctagagctcactaatacgtggtgaaatcaggcttcggcactacccaatactgcctcaacaggggaytttgtataagtgacccaatggcagttgggctctgaagactgaaaaagttgctctgctgttagatttatgcttttcagaatatgttcttaatgaaagtttcacctgacttgttatctagtctgaaatctaaagaggaactggtgtatggaaagttggtaaccagcacaagagaattaaaaggagttatttttactcagactcgagtatcactttaaacaagacgtgaaacaaaacaaattctcaggctcattaaggttaagtgatagaaaaggctgtgactgtctctgttggcttagttgttctagaacaacatcctgttgttctttagtattagcacaaaagataatttgggagacaaaatagagatgtgccacagaataagatcactagtgactctttgatttgtttatttcacaagaagcagcttaagcacttcagtatactttggtataagtcttctttagttacccataggtataatttatatcaaagcaaacgcaacttagaa

SEQ ID NO: 381227 - DNA, 593 bp, Homo sapiens
tagaagggttagggacttgctagagctcactaatacgtggtgaaatcaggcttcggcactacccaatactgcctcaacaggggactttgtataagtgacccaatggcagttgggctctgaagactgaaaaagttgctctgctgttagatttatgcttttcagaatatgttcttaatgaaagtttcacctgacttgttatctagtctgaaatctaaagaggaactggtgtatggaaagttggtaaccagcacaagagaattaaaaggagttatttttactcagactcgagtatcactttaaacaagacgtgaaacaaaacaaattctcaggctcattaaggttaagtgatagaaaaggctgtgactgtctctgttggcttagttgttctagaacaacatcctgttgttctttagtattagcacaaaagataatttgggagacaaaatagagatgtgccacagaataagatcactagtgactctttgatttgtttatttcacaagaagcagcttaagcacytcagtatactttggtataagtcttctttagttacccataggtataatttatatcaaagcaaacgcaacttagaa

SEQ ID NO: 381228 - DNA, 573 bp, Homo sapiens
aaaacttggttctctatgagccaaatgaaacttggttcttcaatgaaatggaaactagggcttacagcattatgttgaatagaagtggtgaaagtagacatccttctcttgatccagttcttagaagaaaggctttcagcttttcctmattcaacagaatattagctgtgggtttgtcatgtatgacctttatgatgttaatatgcttcttctatgcctagtttgttgagagttttattgatttctatgtgttgaatcatccttgcatccctggtcgaaatcccacttggtcttggcatactaattttttgatgtggtgttggatttggtttgctaatactttgctgagaatttttgtgtctatattcatcaagagtattggcctgtgattttgttgttcttgttgtgttcttgtctggttttggtatcagggtaatgctggccttatagaatgagttagggaaagtttcctcctcttcaattttttggaattgtttcaggagaattggtattagttctcttttgtatgtttggtagcatttggctttgaatccatccagtcctgggcttttc

SEQ ID NO: 381229 - DNA, 506 bp, Homo sapiens
gtccctgacttctcacctatttctaaatttcaaagaggatattatcaactgaaaatcaaattcttcaccagtcctgccaattcagggccacagcagcagcatcatgtaggtcacttaactggagccccatgaaataccaggtctacctatcagccattcaagctactgtgcttctgttgtttgtccatttctcatttttgtaccagtattcccatcctaagcattataattacctgtgtaacaacctcatctcttttaagagattttggttcttatgattggaaaggttaaagagtgacctataggtcactttccaattatgaaaacaaaaaattaagaaatayatatattttcattatttcactccattgttcaaaaatctaaaaggcctccagtggaagaaaatctggtgtcttcagcctttctagccctttggaatggaatctcaccgaagctcacaccccctgatttctccagctgcctgtcttgtatgcgctgctcatggt

SEQ ID NO: 381230 - DNA, 521 bp, Homo sapiens
gttggtgtaactgcaaactttttytgtgatgaagggtgagtgtcaggattatttatgagatttaattcatttgtcttgtgtgtgcgtggtgtggactgtgaaacctgcagaagtctcctctgtgaggatctctgggcagtctggggtagggttgtgagaggtaatgctgataaaaggaacagatgcacactgattgaaatgaacttgtcttgaattgtaagtagaggctgctgttcttcagcacaaactgcctaatagttctgaatgacaaccttctgtctccaggtatcgactgcaaggcccaccttctagtcggtgtgtaattgctggacagggagttgcttggaccaaaatgccagtatgtgaaggtaggctaggcaactatggtctgacagcactgcattctcagcttaactaaaagcttttggttcagtcattaccttacagactcttactgaacacagaactcctagagatctttaaggatatgtgcttcaccaaagcatccttattttttgttt

SEQ ID NO: 381231 - DNA, 521 bp, Homo sapiens
gttggtgtaactgcaaactttttctgtgatgaagggtgagtgtcaggattatttatgagatttaattcatttgtcttgtgtgtgcrtggtgtggactgtgaaacctgcagaagtctcctctgtgaggatctctgggcagtctggggtagggttgtgagaggtaatgctgataaaaggaacagatgcacactgattgaaatgaacttgtcttgaattgtaagtagaggctgctgttcttcagcacaaactgcctaatagttctgaatgacaaccttctgtctccaggtatcgactgcaaggcccaccttctagtcggtgtgtaattgctggacagggagttgcttggaccaaaatgccagtatgtgaaggtaggctaggcaactatggtctgacagcactgcattctcagcttaactaaaagcttttggttcagtcattaccttacagactcttactgaacacagaactcctagagatctttaaggatatgtgcttcaccaaagcatccttattttttgttt

SEQ ID NO: 381232 - DNA, 510 bp, Homo sapiens
taaaacaacagctacatgtattctgtgaccttaatcttgattatttgattcttaatcttcatcccaatgaaaaaataaattttctatatattgtgtagtataaatacactttatcatttaaaattatttccatatcaattatcaaaataaccctatgatacatgtttttttcacttatcttaggtcataaattttcgttaatgtatttccaaaatcttcatatgtatcactttaataatcacataatattctactgaacaaaatttacttaatcatttacccagcttaactatgattccagactcctattagaaaaaactgaatcacaactagttaaattttagctttatatcccttccgtaaagtcttatttttcaagaytttgttcttttccaatttgatagggagaccaaagtcccaattcccttcttatatgggccataatatttcctcctggacacgagttcatttgaggactcttctaacatttatcctaacttaaaaattttt

SEQ ID NO: 381233 - DNA, 580 bp, Homo sapiens
ttatcgtctcttttttcctgcacactaaacttgtactaatgtggtccaacatgacagaagtgatttagacagttctatcacattattgactcactgagttaattacatcatgaagttgttttctcatgtgctgttcataagccatcctggtatccatattgaatttacacatttgaacatttgaagatttttataaaattaataatgcaacagtacttatattaacaaatagttatatttgtagtatttctatatggcaggtttgacctaaagctttcctaggtcagtattattttggatgmttatccttttaaccagctctggctattcatccctacttcacctcaatcacacatttaacacacatgtcatcaaaaattcttccaggtcagtgagagggccaaagtcaggcttctttttggaataaactatcaattgctaggaataattattttgtgagattagaagtaaaatgaaagcacacacttatagatcgctcataggctccagtagcgttgttgtagttgagctatatttctaaacatatggactttaaaagggtttaatttccttcacctag

SEQ ID NO: 381234 - DNA, 557 bp, Homo sapiens
gcaagttatacctgctcactgtagaaatttgagttttataatatttagcccmctatcactgtcacttttctgggaatacttgaacatgaataatttttgtcttgtcacaccctagccctgtttgctttggttaatgtccaatgtgcaaatgcctcattttcctcccacccatcctgagtgttttcttcctccttaccgaaactaaaaacagccccttccctgaaggtactgcttcctttgcagcctattccagtggtggctggtttattttcatccatatgactcattgttaagaggtggcggaggtgttttccttgttcctttgtcatgtcttccatctcaacccccacacacatctctttaaaaagagtaactgtccattcactctggtagggtaatttactaaaatgtcaaatgtttttcctataattctccttggtgaaaagcatggattctggagacaaatcggagccctggcatttatcagctgcaggactcaagggatgttccttgtcagtgtaccttagttatctatgtgtaaagtgggcctaaaatca

SEQ ID NO: 381235 - DNA, 546 bp, Homo sapiens
gagtagaagaaaacagaaatgtattaataggcgacagtgagtacttcagctttatgtgtaatgttttatttcttgtattacaaagtaaaagatatgaagcatttgactaaaaatgttaatttatataatttgaatgatgggtacatgggcagttgttatatttatatatacttttatgtattctaaatttttttctcaaaataaaaaagagaaacagycaagggttagtattgtgtcatcaaactcattacagacctcaattcattttgttttatttatttctgaacaacataatttgaggaagtaaagcatactttaaggaaatctgtagaagggcaaagtaaaagcatttgaaaaagtctcatcacctgaaaaaggcagagaaaaaaagaacaaaaggaagaagtgttctagaggtctcatctagtttgtatagggaagaaagttgaggtaatacagctgtgtgggaaaagggatagattcatatatacttgttcttgagagcagacatgttgttaacaatgaatgaaatggaaacacacaact

SEQ ID NO: 381236 - DNA, 590 bp, Homo sapiens
ataaaaagttttaacatattagtcaagatacatatataaacatagaatatcaaataaaacctgacacctcaatctaaggtctgtaaaaaactttaaaacaaagattggaatcgtaagagttaaagaaatatagacatttttgacaatgcaaaaaatgtaaataatggttagaaaaagtggaaataaattgctaaaacacaaaagagagattaatggtttgtgtctataatagacaaaaagctcttacattgataggtaaatgacataaaaccsaatacaacgtggacaggtatactgataggaaatttttagcaaggtaaatcagattgatcaagaacatatgaaaagatgttgacattcactaggagtcagagtaaagaaaatcaaaataattttccgaggtgtgaagtattagaatgaacacagaatgatggcatttcagggctaaggctggaaatggcccctctaagttgccatgggaactgagtaaacctggtcttaaccatgtattggagaaggaatctatccacaaaccaaggaggagtgtgggtgcgggttgggaccgggctgaccaaaggccgccggagagg

SEQ ID NO: 381237 - DNA, 593 bp, Homo sapiens
ttgcatttctccacagtaactaatatagtatcaagcatactactaataccctaggaatacctgttgaattgaatccactgaggcaatgcttggtgatcaccctccccacctttttctccacataagtrttttttttaaagatacatggctctttttgttaagtaatacaaatttgaaagtgaaccataaaaaagttgaatgaaattatctagtcctagtctactgtaattatatgtttcaatgattggactatatgatatttctatcttgatttatctatcttgaaaatgttgtctcacttacatatttaatgtggtttaatctagattggtatttggaaataaatagtctctgaaagttatcccaggaattggttccaagaggtggaagagctagtgatggttcccagggagaagcaattgaccagtgggccagaaggaggcagcaatacaaagaaggcaaaaaacccggttcagcagcagggagcttatttgccagcaatatcacagaagaatccagtgagtagacagccagcttcttttccaaaaccatagcaaatgcgacaacttactgaaacgtaaccaatctcccat

SEQ ID NO: 381238 - DNA, 535 bp, Homo sapiens
tacttgatagcaatttcctgatttcattcagctatttaaattatcatgaaaatgtattttccaaatattactttgcatggaaataggaagaatgaagagagagagagagaaagagagagagagacagaaacagagaaagacaataaagaaaggcaaaataattctggcttctaattataagagctaacaattatgatgtgcttgctaaatgtcaggcactattctaagtgctttcaatgtattggcttattaattctcccaacaacactaagagataaatactatatctttatcstcattttactaaatgaggaatctgagtcatggagaggataaatgacttgtccaaggtcactcagctgtagtgagtggatctgagtttcaactttaatggtggatctgagtttcaaacccatacagcctgaacagagtctatgcacctaaaccctacaacacactgcctccagttggacctttaaatctagccctggtctctctttgggaaagtccaatcagggtttcacttcattatatg

SEQ ID NO: 381239 - DNA, 619 bp, Homo sapiens
ttgtcattgatttttatcagagacaatattggcaatagttataagcagtgacttagatcctgcctttggctaacctaagtcaaaagtaaggtagaaaggtagctaagcatcactcatccttctcctcaggaagtaaatcaaagtctgtttaaagatttagcttgattattataaacggtgaaaatgaacagacttraggagctcataaccagaacaaacatggctgtgtggttgaatggaaagagttctgcactagaagtcaggaaacctgggtcccagatttcattcatcaccttatgggctaggggtcctcagtgaagtcactttacctctccagttttcattttcctcaaacattgcattacttgaacatttgaattactgaggaactctttggttcattccaactgtaggattctatttcattccacttataaaaaactataacttttttctcatccattcttactaaatagtaacagtctttccagttgattgtaagattttcagccactgaactattccaaatgcatgcctctaggtacagacatcttgaccctggtggtaggatctgatatcagccgctgtcccagtaccccttggcccacctgccacggct

SEQ ID NO: 381240 - DNA, 622 bp, Homo sapiens
ctgggaattcagatctcatgggagagctgtccttgaatccactggatggcagggcagcagattttccaggccagggttagtctgcagtcacagggcaaacaagaagcaatccgttagggcacagatgggtcaggcaaacctcagctggtggctggtgcatgggtttgcaatgagaatgaggatgtccatgtagcaagaggcctggaagatgaggtgttcctgttagaaaggccctgttgggaggtggtagtataggaaggactgcaagagaaaaacataggagagacaagagatgagcagagagaatcactccacctgcactggcaggcaggagacctggagtatagaatgcctatactgaaagggtcacagaaagatgatttccagaccatgtgagaggcgcaaggtctcagagagactgtgcattctgggtgcatggctgggacaaagcaccccttaatgtccacacatccaccctgcagcagatggaaagagcaggagcacccctcccacttgcaatgttcctctagcctcctctgctaagaaatcttagcatcatgctttctattaagaagaactatgtagaataattctgcctrttattgcagagtatatatcgagg

SEQ ID NO: 381241 - DNA, 569 bp, Homo sapiens
gaaatacttgtctctatttcaggaattctgatcatcgcagcatatttactctgctatgctgggtgaggagtccaggggatggcatggcacacaatagtgacaggagacttcattttgaacaaagaataaaatttggagcatgaaataagattaaatattttatgcatgtatcctgaatgtcttttgtagctaaggcctgttaatctttatttccttttatcaaagaaaaatgagcgatattcccttccaaaattgccaagaggctaacaattcacttttaaaagctgtaaagctctaaaagtaaatggagatagggtggagaagtggaatagagygtgagctttgaaggtcagtttggctctgcagcccaaaaccttagaataatcattttatgctacaacttttggttaactaaaaattaccagaaaaatgggtaactcttgggacttaccctggaattaaaccaagaggcagaagagaaacaggcccaaagaataactttgaatggatggtgaaaggaaacaatattgtttatttctgatggcaccttatggtcccattgtaaccca

SEQ ID NO: 381242 - DNA, 549 bp, Homo sapiens
atgaaacagctaaaacaaaggacctgaagagggagcattaaactgttttcaatcattatattcctaccaagcattagacagtttatcaggctgcttcttaagtgctgctacctggtataaagaaaaataccaaaggaaataaagctcaagtgaggaagaggagaggggtctttctgcaccacatcagatatatcccctttccctagggtgaaggggcaattgagtgcagcagcgtggcactggtaggtcagggagtgctggaaggggaggcggacatcacaagacacagacagacccattaaggacaaactgaggatgycaaatgcaaactgtaggtacataaaagtagttcttgaaagagcacttaaaataaccagcctattcctacctctctatctcagtgtttctcaaattgaaccaccgaggcagttgtcagatactccaggcatcacatcgggtctaccaaattggtatttatgcagtggggctcaggaatatggatcttaataaacacacagatcatgaatgtcatgcacactcaagttgaga

SEQ ID NO: 381243 - DNA, 548 bp, Homo sapiens
acagtaatgaaaagctagggccaggctgtactgctttagtaatgcctcaaacaggcaataaattgtacttagtggggctttttctccactaagtagagccaaattggttggcttttgaaatcatgtatcataacatatcaaattatagtgagtaacccaaagttaagaaatggctattgatgtaccatgttttttacttaaaaatcatgaaagtrtgtaacactttaacacattcttaatggttagacatgttttccataaaaaggaaaactctttagctcctcacaaattttctctttccaaaatatcttattccccaagatccaggtggctgagatataaaataaagggcttaccaactcttgggtatgaggtattatggacgccattgagactaggacagtcttcttttaaacataatctcttatagccaccttcttcaattttagttgcatttccacaggttgggcaaaacttgtatcgactgtgccaggcaagaacagatcttgcttgagctacaaccccttcaaaaaaaagaaaagcacaaa

SEQ ID NO: 381244 - DNA, 548 bp, Homo sapiens
ccgggctccagattggagatgcggtactggctgtcaatggcactgaggtcaccagtgtcgagcttgcagaagctgtgaaccttgcaatgaaaggtaggtgggccagttacagaatccagagttcatctgaaggagcagaaagctgccatacagagttccaatgtgggaggggacacctacaggtgtaagtgcacttctctcccaaagctccctttaatgccctgtcatcagcatgagttttcatagaaattaaatcacatttccctcccattttccttctgtattgatggctagccactaaactgaagcgagaaaatggcagtaagtaaaacataccctattattatcaaaatatttacttaaactccttatacatgcacagaaaaattctcattacaagaattcatttactattaccatcctttggtcccaccttccttcctccctccctcctttccttttccctttcctttctttccatcagttttkagagttaacagcctcaggattttaatgtaaaaaaaaaaagagagagagagaaatgaaga

SEQ ID NO: 381245 - DNA, 593 bp, Homo sapiens
caaacttcttaatgctgttttcaagttttatatactggtacttttttaaaagttttattttattgtagtaggaacatttaacatatctaccctgttaacaaatgtctaactgtacaatacgctattgttgactacaggtacagtgttgtagaatggwtctctacaacatattcatttacataactaaaatttcttactggttagttagcaactcccctgtcccagtttacccctgtacctggcaagcacctttctattttttgcctctatgattttgactgtttgaaatgccatacataagtggaattatgcagtatttgttcttttgcaattggcttactccacttaacatgatgtcctcaagtttcatccatgctgtcacatactgcagaatttacttctttttagggctcatagtattcatttatatgtatgcatatttttttaatctatgttgatggacaccgtggtttccacatcttggctattataaatagcgccacagtgaacatgggaatgcagatatctctttgagatagtgattttatttcctttgcatcaatacctagaagtgagattcctgcatcatatgg

SEQ ID NO: 381246 - DNA, 443 bp, Homo sapiens
acagtgaacatgggaatgcagatatctctttgagatagtgattttatttcctttgcatcaatacctagaagtgagattcctgcatcatatggtagttctctttttaattttttgaggactttttctgctattttccacagtggctacaacattttgcattcccaccctcagtgtgcaaatgttccaatttccccacatcctcaccaacatttgttgtctattgtttttttaatagtagtcattctggtaggtgtgtggtgatatctcattaaggttttgatttgcatttccatgrtaactagtaacattgagtattttttcatatacctattggacatttgtatgtcttcttgggagaaattccctagcctatttttgaatcaggctgttagtgtgtttttgctattaatttgtatgagttttttctatgttttggagattaa

SEQ ID NO: 381247 - DNA, 575 bp, Homo sapiens
ttccactgtattccataatttgtttacctattcatctgtcaatagacacttggattgcttccacatttttgctattgtgaataatgctcttatgagcatgagtatataaatatctgtctgagtccctgctttcatttttggggggtatataccaagtagagttgctggatcatatggtaattctatgttaaagtttttgaagaatggccatactttattccatagtgaytgtaccatttaacattcccactagcagtgcatgagggctccagtttcttctcctccttgccgacacttggtatttcctatttttgataatagccattctcatgggtgggaagtgatagctcactgtggttttgatttgcatttccctaatgatgaatgatgtttagcattttttcatttgcttattggcaatttatacatcttctttgaataaatgtttactcaattcctttgcccattttttaatcaggtgggtttttacaatttaatagacaaataaaagttgtatataatattatgtacaacatgatgttttgaaatatacatatattgtcaaatggctagat

SEQ ID NO: 381248 - DNA, 575 bp, Homo sapiens
ttccactgtattccataatttgtttacctattcatctgtcaatagacacttggattgcttccacatttttgctattgtgaataatgctcttatgagcatgagtatataaatatctgtctgagtccctgctttcatttttggggggtatataccaagtagagttgctggatcatatggtaattctatgttaaagtttttgaagaatggccatactttattccatagtgactgtaccatttaacattcccactagcagtgcatgagggstccagtttcttctcctccttgccgacacttggtatttcctatttttgataatagccattctcatgggtgggaagtgatagctcactgtggttttgatttgcatttccctaatgatgaatgatgtttagcattttttcatttgcttattggcaatttatacatcttctttgaataaatgtttactcaattcctttgcccattttttaatcaggtgggtttttacaatttaatagacaaataaaagttgtatataatattatgtacaacatgatgttttgaaatatacatatattgtcaaatggctagat

SEQ ID NO: 381249 - DNA, 510 bp, Homo sapiens
cagtcacctcagaagagggccattctgtggaccttggcttttcaattgatattgaggaaaaaggattctacacagagaattttcattcagcagcctgggttttctgaggggatgatgtgaatcttgaggatggtcccagatgtcttagtaaaaaacctcacccagtagctggtaaggactctacaattatggtaaaatgaatatgtcttagagaacttgtagccagcctccaggctctttgaagtcagcraatgtaaatgccggaagaagtgtttggggagctgaaatacgtatggtcccataagactatacatgtaccatgtgtttcttaacatcatgaaagaatctgaagctattaaaataaaagctttattaatagctcattcaggcattgaagagtaattccaaagttggaataaagattaatgtagacagagtcaagagtctgggttcatcctatgaataaaaaatacttattaatttgaaaaaatgcaccagacagtataaaga

SEQ ID NO: 381250 - DNA, 510 bp, Homo sapiens
cagtcacctcagaagagggccattctgtggaccttggcttttcaattgatattgaggaaaaaggattctacacagagaattttcattcagcagcctgggttttctgaggggatgatgtgaatcttgaggatggtcccagatgtcttagtaaaaaacctcacccagtagctggtaaggactctacaattatggtaaaatgaatatgtcttagagaacttgtagccagcctccaggctctttgaagtcagcaaatgtaaatgccrgaagaagtgtttggggagctgaaatacgtatggtcccataagactatacatgtaccatgtgtttcttaacatcatgaaagaatctgaagctattaaaataaaagctttattaatagctcattcaggcattgaagagtaattccaaagttggaataaagattaatgtagacagagtcaagagtctgggttcatcctatgaataaaaaatacttattaatttgaaaaaatgcaccagacagtataaaga

SEQ ID NO: 381251 - DNA, 510 bp, Homo sapiens
cagtcacctcagaagagggccattctgtggaccttggcttttcaattgatattgaggaaaaaggattctacacagagaattttcattcagcagcctgggttttctgaggggatgatgtgaatcttgaggatggtcccagatgtcttagtaaaaaacctcacccagtagctggtaaggactctacaattatggtaaaatgaatatgtcttagagaacttgtagccagcctccaggctctttgaagtcagcaaatgtaaatgccggawgaagtgtttggggagctgaaatacgtatggtcccataagactatacatgtaccatgtgtttcttaacatcatgaaagaatctgaagctattaaaataaaagctttattaatagctcattcaggcattgaagagtaattccaaagttggaataaagattaatgtagacagagtcaagagtctgggttcatcctatgaataaaaaatacttattaatttgaaaaaatgcaccagacagtataaaga

SEQ ID NO: 381252 - DNA, 578 bp, Homo sapiens
atttttatttctacaactagttattttgctatgatttatatcagttaggattttctgttgcaacagaaaatctgactcacagtgtgttaagcaatgaaggggatggactgactcacaaaagttgaaggcttggaaatagcacgggttttattttgtttgggtggctcaaacttttcatcaaaagcataatttctttcacctccttccttggtgttgcaagctttccatctggatttaaaacaatctcagcagtttcacccttcatatcgcaaatcacagagtcagaaagagagtggagacaggcttcaaacctcagatgtcrtcattttgccatgtcccttggggaccactgtgagctatttcacttaggctaaatacagggggaatagaattgtcctgattgagttaccagaaaaccagggcccaccctggacctgagggtggagtgatgtactaacttccatgagttagtacataatggggaagaaaagagggtattgggagaagacctctgacctctcagactcaagccatactgacacagtaacactctgcaccaaatgagtaataaacaacac

SEQ ID NO: 381253 - DNA, 542 bp, Homo sapiens
actttttcttaatttctgtcatctgacaaatagacatccagatgaaaatagatgcacaagagattagaggaaatcactgtgcccagcaaagggaacagagtgtgaatgggcagaacaaccttcggaccccgatgcatgtcattttggtacctgcaaaagaggacgagaaargaaacagggttgggcaagagccttgaactgcagtgtggccctgagaaattctgagacagaccaatagggagtcccagaacagagggtcctttagagactggccagcaaaagcctgactctaacagcccctccaaattcagtcactggctggaagcagcccaggaagaacatggcctcagtgtgaggcaagatggataagggtggcagttgaagggtttgagtcaatttcagccctcgcagcaggtagagctggatggtggacatctaagattgccacaaaaggtatagaatagaaagccctgaggatagggaggtgagggggaagcaaattggtaggaataattctaattaaaatgtgaagaatactactt

SEQ ID NO: 381254 - DNA, 542 bp, Homo sapiens
actttttcttaatttctgtcatctgacaaatagacatccagatgaaaatagatgcacaagagattagaggaaatcactgtgcccagcaaagggaacagagtgtgaatgggcagaacaaccttcggaccccgatgcatgtcattttggtacctgcaaaagaggacgagaaaggaaacagggttgggcaagagccttgaactgcagtgtggccctgagaaattctgagacagaccaatagggagtcccagaacagagggtcctttagagactggccagcaaaagcctgactctaacagcccctccaaattcagtcactggctggaagcagcycaggaagaacatggcctcagtgtgaggcaagatggataagggtggcagttgaagggtttgagtcaatttcagccctcgcagcaggtagagctggatggtggacatctaagattgccacaaaaggtatagaatagaaagccctgaggatagggaggtgagggggaagcaaattggtaggaataattctaattaaaatgtgaagaatactactt

SEQ ID NO: 381255 - DNA, 569 bp, Homo sapiens
ctaaatgaggggttgagggactttaaaattacacatattttcagcacttctgagaatcttattcacaccacaaaacattgttctggatgcactagagaggtttaattacacactgaagataaaaagataaagcaaagagacctgtaggtgggatggaaatgattatccataagtatacagaaactgagcttgctagtagcttgcataacgaattgcccacacccgatggcatttgcatgaacattttctatgaaagcctaaatgcttctgagatctgttggcataaacaaaagaaacagatgttccaactttgatactaagtaaatttgaaaagaaaactatacatttagaraagagcaaaccgtagaggaaattatggatagacccatctttctgaaagctctagaatttaaaatgctgctgttataatacaatttttaaaataaaaaatacaagccccctttgaaattataaggttttcagattctgtattgtatgtaaatatgcataaaaggatgaagtaactcagcatttagctctttataataaatacagaactgtgtagtaaa

SEQ ID NO: 381256 - DNA, 595 bp, Homo sapiens
tagattccttaagtaaaagattgttgtttgaaaacacattttacttaggagagacaatttgttattagatacatacctttaattatagtagtttatctactagaaaggcaatctagtcaatcatttaacatatattcaccagcacaaatggctcatwcattttccttccacttccataatccttcttgaagttctttagttatcatttactctcccacctcagatttaatcacctttcctcagtcttcattcttcttgacttcttgaatgaactagtattaaaaatgctatgctatggttacttttatggcattgctatagaaatgctgactattccctatatcttgaaatgcttctcgtgccttctgttgattttatactcttgcatctatgctctgtaaggtccgtctgctccttctttgtgttgctttttgtctcctgttttgccgtctctccctaaaggtaattattcttcaagattttttcttcagtgctctacatttctcttttaacatttgaccctttggttatgaatcttcaatctatttctattttttttttttttttgagaccaggtctcacttccgtcacccag

SEQ ID NO: 381257 - DNA, 572 bp, Homo sapiens
agcattctttctgtgtactcaagttaattggtgcagtaatttaatcattgagcctctgttcacatttcatgtgtaagtcacttaaacttttttttttttgcttttttagaatgyctaggttgatgagcatttaaataaatttgtagcatttaaaaatgtcctcaaaactgattgcagcatgacatccctcagattttgtattcagttttagtttagttattttgaagctttcagatgaaaaaaacacctaaatttaatattctgcaacaggtttttccatcactatgctgaagcccagaggaacgcagtgtattttttgagttttagtcttcaattttttccttaggatatttttgaccccagatactttttcctttaaatttgactgagctgtgatcatgactctgacctctagccttgaaagaagaggagttatacctctcaggagcgatgcctcaggcactttgcaagtcggctggcagggattatttcctaggctgtgaagtgatgaccttctatggagagtgaaagtctgcaatgcaggtaaattccttcagccaggattgagagcc

SEQ ID NO: 381258 - DNA, 534 bp, Homo sapiens
ttgactcttttctcttgaaaattatggatttttgtcaccttcatcttatattagggctaggatactttgttttttatttctttaaatttaaaagctccaagtttttgaatatgtcaaatttatttaaatgaaactgaatcttgtgattctttcttgacattttcaaatatgattcaaatttgggaaaattttttttgccagctagtaaatgattgctgaaatcatgaattgaaatttctctatttaaatggaatgccatatttataaaagtaatagcttgcaagagattgtcagtggcattcaaatcwgaatctaaaatatatttctttcattaaatatttgcacaaagttgttatatatttatataggtcattccctgggacgttttatacattgtcatttaaaaatattcattcttaaagagatacaatagaaacatactttatgtatacattccaggtgcatgcttgtatagtactgtgctgtatccattatctgcttttgaggctgtagctgttatttatagtgttacag

SEQ ID NO: 381259 - DNA, 534 bp, Homo sapiens
ttgactcttttctcttgaaaattatggatttttgtcaccttcatcttatattagggctaggatactttgttttttatttctttaaatttaaaagctccaagtttttgaatatgtcaaatttatttaaatgaaactgaatcttgtgattctttcttgacattttcaaatatgattcaaatttgggaaaattttttttgccagctagtaaatgattgctgaaatcatgaattgaaatttctctatttaaatggaatgccatatttataaaagtaatagcttgcaagagattgtcagtggcattcaaatctgaatctaaaatatatttctttcattaaatatttgcacaaagttgttatatatttatataggtcattccctgggacgttttatacattgtcatttaaaaatattcattcttaaagagatacaatagaaacatrctttatgtatacattccaggtgcatgcttgtatagtactgtgctgtatccattatctgcttttgaggctgtagctgttatttatagtgttacag

SEQ ID NO: 381260 - DNA, 511 bp, Homo sapiens
aatctgctatatattttactggtttatttttgttttgttctgwcttctttcactagaatataagttccaggagggcatggatttttcctgttttgatcattgctatattcataaaattagatagtacctgtcctgtagtataggtgctcaaatatttattgaatgcaaaaataaatgcagggaagtcacatcagatttctttgaatagttcacataccaaaacaaacaacaacaacaacaacaaaaccaggaacatagttcagcagttataatattaatacaaaatatttgaatctataaatgtttgcatagatttaactctcctagaactatgaatatctttatactttattcaacattattgtcttcatattactgatatctcaggctagaactgggtaattttttcagggagtgtgattgctttgagaaaactgggatacttttggactgtttttaccagaaaattataaaattgatataggcacaaacttacacttacattttgaaa

SEQ ID NO: 381261 - DNA, 580 bp, Homo sapiens
tcaaacaaaacttataagtgaggttatttaagaaaatactgtgtggcagtgataaattggaatcacaaaatgtgtgttaatagggaaatgactggataaatcatggtatattcactttccagaatattctgtaataattatgttttcatagaatattggcgagacaaartgctcatgatatagtatcttgtacttagcaggatattaactttatatactaattgaaaattaatgtgtgtttaagtgtgtgcactcatctgtgtgtgttttgttgcagggtgatgagttcatgtgatttttttaaagatgtttaattcttaaacattttacatattttctaaaataagcatggatattttatggcagatgatagcatttaaaaataaatttcttattaacttgtcattccccccttccccacctccattacaggcattaattgccttccattttgtcatctttatttttacatgtctggcttattcactttgctacccttgttccttgcagggtggcttacagatttaggtggtttcaaaaacactcacattacttgaaatctatttcagtatttaccagt

SEQ ID NO: 381262 - DNA, 371 bp, Homo sapiens
taataaaccttgaaaggaaccaaattacatttcactctatttagtttctttatagcaagtcaatggcattctgttaaaagatcaatggcattagaaggtataggagcaaattgtttttaaatttgtcaggtgacttttagtgtattttcttcagttattatgctaatctaagaaacattactgtaaaagagtgttgtgcttgttattttcacrtatcaatttgagtgggccatggggtgcctagagatttggttaaatgttattctggatgtatctgtgaggatgtttctggatgagattaacatttgaatcagtagcttgagtaaaaacagatgaatcttcctaatgtgcaggagcttcatccaatctat

SEQ ID NO: 381263 - DNA, 371 bp, Homo sapiens
taataaaccttgaaaggaaccaaattacatttcactctatttagtttctttatagcaagtcaatggcattctgttaaaagatcaatggcattagaaggtataggagcaaattgtttttaaatttgtcaggtgacttttagtgtattttcttcagttattatgctaatctaagaaacattactgtaaaagagtgttgtgcttgttattttcacatwtcaatttgagtgggccatggggtgcctagagatttggttaaatgttattctggatgtatctgtgaggatgtttctggatgagattaacatttgaatcagtagcttgagtaaaaacagatgaatcttcctaatgtgcaggagcttcatccaatctat

SEQ ID NO: 381264 - DNA, 610 bp, Homo sapiens
gcaagaatccaagagataaggaaaycagaggtcttttgaaaagaactaattagtgatcatatgcatccatgaatcaataaaaatttgacaagtaagctgtggtgtgaaataactattagaaattatgggtaaatagctaaatagaaaccttgacattaaaaaagtaataataatacaccaaagcaaaagtggaacattgtcagggagggaagatggaagaaaacgtaaggctactcatcttattttctttttctttctttcttttctttctttctttctttctttctttctttctttctttctttctttcttctttctttctttctttcttcttctttttttttttttttgagatggaatctcactctgttgcgcaggctggagtgcagtggtgcgatctcagctcactgcaacatccacctcccgggttcaagcaattctcctgcctcagcctcctgagtagcgaggattacaggtgcgtgccaccacccctggctaatttttgtattttcagtagagacagggtctcatcatgttggtcaggctggtatcaaactcctgacctcaggatccacccacctcggtctcccaaagagctaggattacaggt

SEQ ID NO: 381265 - DNA, 617 bp, Homo sapiens
atgggggtgtttctggatgatattaacattcraataagtagagtgagtgaaacagatttctctccataatacgagtggacctcatccaaattgttgaaggcctgaatagaataaaacgattctttctgcttgactgtcttctagctgggacattagtcttctcctgcctttagacttggactgaaacttatactatcagctctttctgactacagatcttggacttcccaggttttttaactgtgtgcaccaattccttatagtgagtgtgtgtgagtgtatctcctattgagtctgtttctctggagaacctagattaatacaagtaagtgtctaggggaagactgaaaatttacaaaatccctttgaggatgatttaaaaaatgatcagacacattgttgatatgtcaatatgtttttaagcattttgttgttctttctaaaaattattctatacctaaatggtaataattttgaaaagtagttactggtatattatatttttctcattgtcttaaataattactttgagaatttatatagtctaatagcttcatagtgtttttatttgaagtagttttatcatgtgatccttacataaagtaagtttaaagttt

SEQ ID NO: 381266 - DNA, 485 bp, Homo sapiens
ctaatattgaatgttgaaataaatgtgagctatacctacatttaagcaaggttaattttacaaaataagataattacctaatttttccagttcagggccacaggtaaccagaggccatcactgcagctgagggtacaagctgggaaccagctctagatgggaagccatcccattgcagagcacactcacacacatacccacacttggacgcaccagttcacctaacatgcacatctctggaatgtggaaggaaacaggagttcccagagaaaacctaggcagacaggaatggaacaatcaaacttaacacagacaatgctctgctaggaatcaattgttttttctcatcaatgttataatgaaamgatatcgaagaaaatgacattattcaaggaccagctgcacgttattaataaaatataaattaaccttttacagattataaactccataaccaatttacatcaaataaaagactattgaaa

SEQ ID NO: 381267 - DNA, 485 bp, Homo sapiens
ctaatattgaatgttgaaataaatgtgagctatacctacatttaagcaaggttaattttacaaaataagataattacctaatttttccagttcagggccacaggtaaccagaggccatcactgcagctgagggtacaagctgggaaccagctctagatgggaagccatcccattgcagagcacactcacacacatacccacacttggacgcaccagttcacctaacatgcacatctctggaatgtggaaggaaacaggagttcccagagaaaacctaggcagacaggaatggaacaatcaaacttaacacagacaatgctctgctaggaatcaattgttttttctcatcaatgttataatgaaacgatatmgaagaaaatgacattattcaaggaccagctgcacgttattaataaaatataaattaaccttttacagattataaactccataaccaatttacatcaaataaaagactattgaaa

SEQ ID NO: 381268 - DNA, 485 bp, Homo sapiens
ctaatattgaatgttgaaataaatgtgagctatacctacatttaagcaaggttaattttacaaaataagataattacctaatttttccagttcagggccacaggtaaccagaggccatcactgcagctgagggtacaagctgggaaccagctctagatgggaagccatcccattgcagagcacactcacacacatacccacacttggacgcaccagttcacctaacatgcacatctctggaatgtggaaggaaacaggagttcccagagaaaacctaggcagacaggaatggaacaatcaaacttaacacagacaatgctctgctaggaatcaattgttttttctcatcaatgttataatgaaacgatatcgaagaaaatgacattattcaaggaccagctgcacgttattaataaaatataaattaaccttttacagattataaaytccataaccaatttacatcaaataaaagactattgaaa

SEQ ID NO: 381269 - DNA, 529 bp, Homo sapiens
gtactttaatccccaacacatatccacctgtcgtattttcctactgtttttttttcagataacataattctaagaagtcagagttggctgacatttaaaatcctctttgtaaagtgacatactcatatataccagtaaggtcaaagcaatgtcatatagaaaaccacaaaagaaaaaaattaatgtccaacaacagagttgattccaattgattcccatcattttgggagtgcatttctatttctaatatcttccaacaaagcaagcrtctcattacatattcattaattcatttatatattcaattagtacttataaatgatgaacatatgacagtccttgtgggttctgggtacttattatcatagaaattattgcctggtgggagatacaaacaggttaaccaaaaattttattaaggtataacaagatatgtaaaagagggagtatgaagttgcataacctggactgggatgagtcaaacaggttttttgaagaaaatgatatctaagttggatccttaagaatc

SEQ ID NO: 381270 - DNA, 588 bp, Homo sapiens
ggcatttggtctattagtggatcttgactttttgtgacattgttgaagtttccaatttaccatcctcaaaraaatcacttcacttctgagttgttgtttcctccggtgtaaaatgaagggcttagacttcctatcctttaagatgttttttaactttaaattttatgaatccagagaaaatgaaagtattgaattctcactaatccctaaattttttcatgtgtaaacatcagactcaagaaccaatggtagaaagatcagatagcaaaggatttacaagtataattatttgggggatgcttgatattttaacgcatttcagcaaacaatatatcacactataagtaataagaaatccagaaatgaaccatattttaaaggtaacataaagtactttacaaattcggtcataagggactgccacttgtttgtcacaaaaagtaaaatgtaagctgtgcattctttcctgaaagtctaaagctaacagagtgtagtactgacactacattctaagacattccaaaaagtctttcctgaaagtctgaagctaacagagtatagtactgacaatatattctaagacattcc

SEQ ID NO: 381271 - DNA, 211 bp, Homo sapiens
gttaaaaggaaaattctctctttttctactgggcttcaggttatgaatatgtaagacctgaagttcytgtggtcataatgcaatatgcaggggagaactagtttgagaaggaggacagtattgaattgctgatgctgcaggtattcattagtccaaccactgctccatgaggccgccctgcccccggtgtgtttggctccagtcccatata

SEQ ID NO: 381272 - DNA, 549 bp, Homo sapiens
aaatttaaatttaattattttaaatgcatttaatatatatgtatgtgtatatctatatctatagacatggccatcttaagcaatatttccgaaaattatctaaattttcttcaggatcaagtatcgacgttgaataaacaaaatgtctaattatttacaatggattcttattttaaagtacattatttgttgaggggttattgacaaagtgggatatgttcatacaggtgaaaggacaaatgtaacaactttggatattttcattgtaaagtgaaagcctaatttctaggttctcactttataaaggagaactgagaaattaataccacatacatattgcaatatgtatgtatgtatgtatgtatatatccatattattttatgattttactctgtggaaactgtaaaagaaaatctaaaattgtagagtrcaggccatcccataataaaaattattttttaaaaattatcaaatgttgtgaaatagcctgtgacagtaattctgcattagtgacttttctgtgcagctatatataaagtaatacagac

SEQ ID NO: 381273 - DNA, 572 bp, Homo sapiens
caagtgttcatttttgcaaataacagttttctcagtaattaaaaaaaaaagcttcctactttaaagcatctagatggtctagatattatagtccaagtctattgtgactcagaatttgagtgagactcaagcatcagtatcaaaattttagatgcattttaaagattcatttattcacgcttgtcttctaattgctcttctaacctcttcttttggcattcctaaaactttgtccccattgaagaggaagcatgtgtttccaagagttgtctatttttattacctataagtttgcagaaaagatggaacaagagtgagacatagaaaaatactttctcagcctacgtatatggtgagagaggtggtgttcacaaggtttactttattttatgttagccattttacccaaaatattttcttagacactatttttctttcctacttattgrtttgaaatacattttacatgattaatgttttttataaaataatgtttgctttgttcataaatatttgccttatgaattatgtgaaaatggatctaatttttggaggactgagagaaattatat

SEQ ID NO: 381274 - DNA, 595 bp, Homo sapiens
ctagctgctgaaactgcctgctgtaacctgaaaccagttttaaccaatarctaatgaaacaaccagctgcaactctaagaacagttctgtccaccaccatcacttaccaatgagagcttgctggctcctcaaaaccttgctagtgccaagacaatttctcaaagagtaataaataacatttctccttttttgtaaaatgtctaatcttctctttgtccttcagacataccaaagaccacctggtttgtatgtatgccccaaattgtaattatttctccctaaacaaaatattttaattttagagatttatctctatattttacttgactttgacaactctaacatcttattgaaaaatatgaacaatctatgagatagcaggagagtaacttttatatgcctcctaatgtttatgccctttttttgaaaagtgtttaatttcctggcataaaacttttaggttcatattccatttcaaagatagtttatcttgtgttaactataacagtatttaatatttgtctcaataatggaaacatccacagagataaactagtttttgtgtaagctccttcataaggaaaaccatagctaa

SEQ ID NO: 381275 - DNA, 595 bp, Homo sapiens
ctagctgctgaaactgcctgctgtaacctgaaaccagttttaaccaatagctaatgaaacaaccagctgcaactctaagaacagttctgtccaccaccatcacttaccaatgagagcttgctggctcctcaaaaccttgctagtgccaagacaatttctcaaagagtaataaataacatttctccttttttgtaaaatgwctaatcttctctttgtccttcagacataccaaagaccacctggtttgtatgtatgccccaaattgtaattatttctccctaaacaaaatattttaattttagagatttatctctatattttacttgactttgacaactctaacatcttattgaaaaatatgaacaatctatgagatagcaggagagtaacttttatatgcctcctaatgtttatgccctttttttgaaaagtgtttaatttcctggcataaaacttttaggttcatattccatttcaaagatagtttatcttgtgttaactataacagtatttaatatttgtctcaataatggaaacatccacagagataaactagtttttgtgtaagctccttcataaggaaaaccatagctaa

SEQ ID NO: 381276 - DNA, 593 bp, Homo sapiens
ctaaagtggcaaattgatgttacttaaaggctatctcttaatatttgcacttttatatatttaacacttaagaagtttttaatgtaaggaaatggagaagraatgagactgagagatacataaaacccttcaggaattgcttatattatattaatcttagcaaaaagcatattttctcaaatagtatatttataatatttatggtgtaaaacattttaattttcttccattattgtatctatgatattgctaatcctatattttgaaactaaacagactatagatcaaattaaaagagtaaataattcaatgcaataaaaaatcttataaaaacatgttgggacagctctatttatttgttatctcaaaatcaaccaagagtagcaggcgtcatctagactacaaaggacacaagacctgcccaaatgttccaaaaccactttttaaagtgaatgttctattttagatttagattattttgtcatctagaagagagaatgtgagactttagatccttgacaccattttcttcaggctacacagagctgggtgaaactaagaggattagaaaatttagaaaatgaaaatattct

SEQ ID NO: 381277 - DNA, 550 bp, Homo sapiens
tgatactagccatatgcagctatttaaattaaaacccaataaaataaaagatcaagttttagttgtactagccacattccaaatattcaatagccacatgtggcagatgactaccatattggagagtatatcactacagcactgcaagaatggttttcctgtcctacctgaggctatggcaagaaaagaagattagaaatctagaaaatataaatatgtaaacacatatggaattggctttttcaaagcaagaagtaatctttttaactgcatcctggccattctttggtcaaatactagaggataaaamgctgataagagcctccagtagagtgcttgcacacattgtacttcctaggttttcaataaatacatgctgaaagaattaactgattattattttatgacggtttttcatgtgcaaaacactgtttaagacctttgcaagaatacacacacacacacacatacacacacacacatcctcccagaaattatgactttaaagcaattattttattctctgtttttgagtcatgttaattaaaat

SEQ ID NO: 381278 - DNA, 521 bp, Homo sapiens
tcagaatacttctgttctcccttatgttatttacctgcttcatgaccctaggaactgagcttctgttttctaatctgtgaaatgggaatagaaccacctgtcttacttcactcatacttaaatagtttgtgtaagggtcatataatacaactgtgtaaaaatattttttgatatccaaattattatacagaaytagagaagacactgaagcttctgagtgatataattcttatgttttcctcactctctgccaaatttaatttttcctcttcagtgactttctttttatctgccttcaaacacggagaactctccttcacctctcttgctgtatttggttctccatctgtctatcatcccattactgttctctcttttactgccaactttttgctttattttctcatcagatgagttatctgtaaaatcctatagtcttgcccctttccttatcactttaccaaatccgtacttaaatggcctttttcatgccatatgctatagccattttattatgttgg

SEQ ID NO: 381279 - DNA, 508 bp, Homo sapiens
ggactaaattcaagacctctattgtacaacatggtaactatagttaatgacaatgtattatattcttaaaaattgataagacagtagcctttaagtgtttgtttaccacaaaagaagtatgtgaggtaatacatatgtaaattagctttagtcattttaccatgtatatgtatttcaaaacatattctacacgatatatacaatttttatttgtcaaataaaaaataaattgaaataaaaaagaaaatgcatcaatacagcaaagcttgctaacttgccctagtacctattctcacaccacccctttccaatcttgttttagcatgatccatgggaatccgggtggagactatatttcctggctttccttgtctattcacatgttactaacttctcactaatagaaaataagcatctgyctttatggtagagcaatctgtattcctttgggtatatacccagcaatgggattgcagggtagcatggtagttctattttaagttctttg

SEQ ID NO: 381280 - DNA, 509 bp, Homo sapiens
cagcctaactggacgctataatcattgagtctcatttgcctagtactgcactttaatggatggtttttctgcctcctcacctactgacttaacattcaagtcacttactgtttctgcttgctctgactatacctggggtaactacatcgtggtgtatgcaacatcaatttttttatttgtagatatatcaaaataatattttattgttgtttacattaaagtttccagtcagaattaaaatgtactgataaccattgactgaaaaactaaagcaaagatagctattattcctatcatctgtgagtctaagagataaaattaaaaaattaattttaacccagaatgaaaatatgtttataattttaagcttttgaatggtaatatataarttcgctccctatgttttcagatactcagctaaataagaagttgttggttaggttgaaattcctatagttcaacttagaaataatcttacttataaaagtttcaagttatcaagccctcat

SEQ ID NO: 381281 - DNA, 534 bp, Homo sapiens
tttaagtgagtgtgcaattagattggacaaccaggaaggttttgcctaactcagtgaaactaatttacctttttacaagccagcaataaattgttttctttttatgatgctctccaccgaaagtgatttttaaaaatatgagtagtttgcagttttacttttgctctaaatacaaaggcagtatagtacatatgattccttatgataaccacaataacttgaaaatttgatacctcgatttatttcatgtctcttttcttctcagtttacatttcttytgaatgcagctctagtttgactgataaataaccacgttgtttaacactacttttaggcagtactttatctcattgcctaattcgtcatttctgtctttcattgcaaaacttgaaaatttgttcctgatgtcacataacaaaggctcataacaaaaaaatggaacacacacacacacgtatatgtatataaactgcatattatatagccaaacatttaaggtaactaatttaagaaactagttaccttaaagattat

SEQ ID NO: 381282 - DNA, 489 bp, Homo sapiens
tctccctttttaaaatataaatatcatatattcatcttgttaattaaccttttgtaatttcttgccatgataccagattaagaaacgatatgtgaaatatatytggaagttatatgctatcaagtttgctttatctaataaaatgttttccatatagtggaaactttctgagtatttaaaatttctgtgaaattctaatttattaaaattttcagcatgttccctctggtcagaatagaaggcattaggaagaaagaactatttgtttttagcacctgtctctactacaatgaataatcaatatacatatgaatatatcagaagctctctgtgtttgataaactgaacataattgaatggagtggaattagaagttagaacaatagctcagcttaacaatgtttatccatatatttaaactgtgtgcaatcttctaggctctttgttaagtgctagagagtcaaatgtaagaatttctactcccagaaa

SEQ ID NO: 381283 - DNA, 581 bp, Homo sapiens
ccttggtttcatacaaatttgactctggcaacatgtttttatcaagtagagattaataatcttgccacttgggagtcatgaccacagtgacactgtgacaaaagttaaaaggaacacaaaggtagattacagtttcctacttaaatatccttttcttcatgattgtatcagaaacttcacatttcaaagatcaactggtatacttgtttgtaatgtagctctactgattttattttccatggagtaaaaatccctatgctataaccagaaaccataatagcatataatttataagatgaagatggaagatttcactaatctaaataacagtatgaatccaaatggcaatttttttaaatcagagttaagccaggttttttttttagcctcatgataattgaaacacaggtttaatgtacttctatattattgtaagaacataaaacttayagtgaatctggggaaaaatctgcagatttatgaattcttatctcatctagaattccagcactgcttcgcaatcaccaatcctttattatatctccctttctgatatgcaagagtggacagatctctggaat

SEQ ID NO: 381284 - DNA, 506 bp, Homo sapiens
aactttctaccctgatctctgtctctacatcctctttaaggccaatagcttttagattagttcttttgaggctattttctagattctgtaagcatgccttgttattttttattctttttcttttgactccttgcatattttcaaacaacctgttttcaagctcactaattccttcttctgattaattctgctattgagagactctgaagaatactttagtctgtcaattaaatttttcagctccagaatttctccttcwttctttttaattatttcagtctctttgttaaatttatctgataggaatctgaattatttctttgtgttaccttgtatttcattaagcttcctcaaaacagctattttgaattctttatctgaaagatcatgtatatctctgtcactctggaattggtcattaatgccttatttagtttttttggtgaagtcatattttcctggatggtcttgatgctagtggatatttgtcgatgtctggcattgaa

SEQ ID NO: 381285 - DNA, 513 bp, Homo sapiens
caatttatccacatcctctccaacactcgctactattgtttttgaaaataatgttcattctctatttttaaagtcaaaaaaataacagatgttgccaaggctgtggagaaaggggaatgcttatatactgctggtgggaatgcaaagtagttcagccctagtgaaaatagtttggagakttttcaaaaaactaaaaatagaactactattcaactcagcaatcccattactgtttttttttccatttatatattaacatcaggcaatttattacaaaacactatacactttctactgcagctgtgttatttattgacagcaaatttctgcaaataagacagtgaatatattatccactccatgttgattaggaaaagtttttctagtttcagagtacatacccaaaggaaaagcaaagttctaccaaaaagacacttgcacttgtatgttcatcatagcactactgacaatagcaaagacatggaatcaacccaggtacccatcaacagtgga

SEQ ID NO: 381286 - DNA, 513 bp, Homo sapiens
caatttatccacatcctctccaacactcgctactattgtttttgaaaataatgttcattctctatttttaaagtcaaaaaaataacagatgttgccaaggctgtggagaaaggggaatgcttatatactgctggtgggaatgcaaagtagttcagccctagtgaaaatagtttggagatttttcaaaaaactaaaaatagaactactattcaactcagcaatcccattactgtttttttttccatttatatattaacatcaggcaatttattacaaaacactatacactttctactgcagctgtgttatttattgacagcaaatttctgcaaataagacagtgaatatattatccactccatgttgattaggaaaagyttttctagtttcagagtacatacccaaaggaaaagcaaagttctaccaaaaagacacttgcacttgtatgttcatcatagcactactgacaatagcaaagacatggaatcaacccaggtacccatcaacagtgga

SEQ ID NO: 381287 - DNA, 589 bp, Homo sapiens
ggctctgaggtctctacaagttcatttttaaccttttaggaacagccagattgtcatcagtgtctgtacctcacctcatggctaatcaaaatgtgaaagaatcccttaaagaaccaagatccatttagctaccttgaagcaatataatgcacgattggcactttgacttttttcattgaactgatcagttggatcagtttgtataaactgattggtttagcattttgtagtccacaaatagacaaagaaaatcattcaaaacctagcttcacttgttagtactgatggagcaccaagaataataaaatctgagattgtttaatagaagggcctttagagatcagtgtacccaagaagaaaacaagttctgcaaaattaacccaaaaatgcacaccttgcacactgaacactctcatgtttattttactgctcactcataaaggtttttcaaagacccttggcgttgatatttcacttactgtaagatggtttgtcatgaactgtttttaattttttatatatgaaaatatgmgaacattaaaaatatgcatataaatcacccaccatatttacaaatggtccctgactt

SEQ ID NO: 381288 - DNA, 574 bp, Homo sapiens
ccaggccatctgaagtgggaggagatatttgaagggaataaggttggaggcaggagggctactcagacactattgtaatagtcaaagaaaatgaagatgaagacctaaatgggggcagtaggtagtgggcaatggtggagttgaaggaagaggctgaagaaatttttatgaggcaaaaccagcaggatgtggtgattaaacaatgtggggaagtaaatggaggtaatgatctaaatctgatggttctatcttgggtgtctaccaactgccaaagtaaatacagtggaagaaagacgtttaggcataagacaatgagttcacctttgaaaatcttgagtttaaagtacgtgagggatattcaagtaggtgtaaggatccagtgaacgggtggaatttgggagaaagggcaagaccacagcytgagataaacacgtcccctgtgtgcagaaatatttaaagccgtgggaaaagactaaagcattcagagaaacccatgaagaggaaggttgtaaggatagatgcttgggaagcaatgacatttaagacctggtcagaagagaagcctataactgaa

SEQ ID NO: 381289 - DNA, 577 bp, Homo sapiens
tgtgttaacaaaaatatttcaccttaaaacaccgtatacttactgtatcaatgtttctgtggatcaggattccaggcatggcttaactgagattgctgcttcagcgcctcactgggtttcaatcaagatgtctgccaggctcaaattctcatctgaagcctctgctggggaaaggtctgctcccaaggccactcacatttktggcataattcaattccttatagctgtaggatggaggccctctgctcctacagactgctcacaattacctgccctgcagaccagttcatagttcatagttcatatagcagtttacaacatggctgctcatctcttcaaagtgaaggagagagagagaaatagagaatggggaggagaaggagaaagagactagcaagacagagtcttatataaagtaactgtattagtccgttcttgcattactataaagaatacctgaaactgggtaatttatatagaaaagaggtttaattggctcacggttccataggctcaacaggaagcatggcttggaggcctcaggaaacttacaatcatggtggaaggcaaaggggaa

SEQ ID NO: 381290 - DNA, 595 bp, Homo sapiens
gctttggctatgtgggctcttttatgattccatatgcattttagaatttttttttctaattctgtgaagaatgatggtggtattctgatggggattccattgaatttgtagattgcttttggcagtatggtcattttcacaatattgatcctacccatccacgagcgtgggatgtgtttccatttgtttgtgtcatctatgatttctttcagcagtgttttgtagttttccttgtagaggtctttcaactcctttgttaggtatattactgagtattttttttttttttgcagctattgtgaaatggattgatttcttgattggattctccacttggtcactgttagtgtacagaagagctactgattgtgtacattaatcttgtatccggagactttgctgaattctttyattagttctaagagctttctagaggagtctttagggttttcaagataaatgatcatattgtcagcaaacagtgccagtttgacttcctctttactgatttggatgccctttatttctttatcttgtctgattgctctggctaggacttccagtactatgttaaagaggagtggtgagagtgggc

SEQ ID NO: 381291 - DNA, 595 bp, Homo sapiens
gctttggctatgtgggctcttttatgattccatatgcattttagaatttttttttctaattctgtgaagaatgatggtggtattctgatggggattccattgaatttgtagattgcttttggcagtatggtcattttcacaatattgatcctacccatccacgagcgtgggatgtgtttccatttgtttgtgtcatctatgatttctttcagcagtgttttgtagttttccttgtagaggtctttcaactcctttgttaggtatattactgagtattttttttttttttgcagctattgtgaaatggattgatttcttgattggattctccacttggtcactgttagtgtacagaagagctactgattgtgtacattaatcttgtatccggagactttgctgaattcttttattagttctaagagctttctagaggagtctttagggttttcaagataaatgatcatattgtcagcaaacagtgccagtttgacttcctctttactgatttggatgccctttatttctttatcttgtctgattgctctggctaggacttccagtactatgttaaaraggagtggtgagagtgggc

SEQ ID NO: 381292 - DNA, 541 bp, Homo sapiens
aagtacctacaacatataagctccattacgtattttgttatcaatgttactttggaaatagacagatatgaaagcacataatcaacaaactatgatcaatagatcaaataactcctggggctccagggtggggacaggaacacaakgaagaagaagtaacaatgtagtagttggctcctccagatgaaaaaagtctaataagcaaagagcaaggctgggcttagtgtatgcactcaggacattctgagttcaagtttgaacttgtgtaccattggccatgcctttgaaaagccagttgattgatgcttctaagcaaagagttttcaatacaatcaaacattgctacttatcaagattatatattctagtgatagatttgatgccctaccaagatgggaattattcatgtgaaaagtctgaaagctcatagtaggagtataatctcaagctaattatccaaaatgcccaatttctcctatacttctttacaaagatttgccctagattctttcatgcttttttacctttctcctgagggaca

SEQ ID NO: 381293 - DNA, 601 bp, Homo sapiens
agtaataatagtagtaaatactgcctggtgcctttttaaaatctcaaaagttgtaaataaaatgaaagaataaactaatgttaaaggaaataggggaaattggaaggggaagtagatgatgatttctaataatcaaaaacacaggattttattgcaatctagaccttaagctgaatttttattgatatataatattggtacattttatagggtgtataaggttttttgttacatgcatagaatgcgcaatgataaagtcagggtatttggggtatctatcaccttgagtatttactatttatatgtgttggaacatttcaagtcctctcttctagctgttttgaaacatacaatacattgatgttaactgtagtcacccractctgctatcaaacattagaacttattccttctatctaactgaatgtttgtacacattagccaacttttcttcattctctatgcatacacacccttgccagcctcagatatctatcattccactctccacctcgatgagatcaacttctatacttcccacacatgagtgagaacatatgagaacatatgttctggctggctgatttcactaaacataatg

SEQ ID NO: 381294 - DNA, 565 bp, Homo sapiens
tttctccatttttctgatgaaggaactgaagctcagaacgattacaaagtttgcttaggtaacacagcttgtaatagtagagtcaaaattcaggcatgtctacctagctccaaagcctctgtactttcactactctatcacatcragctgtcattcacatgctgcctgacctccatggaaactgccttaccacctttttcaacccaccaagagtcggctgtcatgggtgaaaatctggatcacgttgtagcatccacatacctttgtcccaagcacacatcttctcttgtgtcctaagatcttgtccatttgaaacaggattagaaaaaaagagttggacatacagatgttcagataagaagtgttgacaccattccctatgcaaaaacaatgaaacatgccaaggcctaatgaagagtccagtctcctgaactctcctggcattttcagcagactgcagttttctgagaatgtctgtgttttccagagcatgtctgctcagaatgtatgagccaaaacctcctagggattttccatcagttgtttatattgtgactggatctac

SEQ ID NO: 381295 - DNA, 565 bp, Homo sapiens
tttctccatttttctgatgaaggaactgaagctcagaacgattacaaagtttgcttaggtaacacagcttgtaatagtagagtcaaaattcaggcatgtctacctagctccaaagcctctgtactttcactactctatcacatcgagctgtcattcacatgctgcctgacctccatggaaactgcctkaccacctttttcaacccaccaagagtcggctgtcatgggtgaaaatctggatcacgttgtagcatccacatacctttgtcccaagcacacatcttctcttgtgtcctaagatcttgtccatttgaaacaggattagaaaaaaagagttggacatacagatgttcagataagaagtgttgacaccattccctatgcaaaaacaatgaaacatgccaaggcctaatgaagagtccagtctcctgaactctcctggcattttcagcagactgcagttttctgagaatgtctgtgttttccagagcatgtctgctcagaatgtatgagccaaaacctcctagggattttccatcagttgtttatattgtgactggatctac

SEQ ID NO: 381296 - DNA, 602 bp, Homo sapiens
agtccacaaaaacatatttcctcagaaaataatcctaaaccattttggttcaacttgatttataagagaaatgaaaatattctaacaagcaaatatgaaaatttgtctttaccctaaagcagtgctatttacttgctatgaactaaaattcccaagatttgttgcacatgattcagtcagagaccagtctgctgtggagtcatttaaaatccctgctcagggagcatcagaggtgcccatgacagctgagctggatgtrtgctcaggaaggggaaaataaaaacaataggactgcattccctactgcattatcaactttagactccttcatgtgaaagatcaacttgtgcctctgtaaatgtttcacttttcagatttcacctctgagactgtgagggagaatatactttcattatttgaaacagtcagtgactttttcaactttctagacacaaagtgtcaagccaatgtgactgtgtcaagccttataggtgacctcatgagaagccagaggtggaaaagagaaagttctactttcaaccatattaccaatggagagatggaaaaaaaaaacaaagcatatatatataatacatgcacat

SEQ ID NO: 381297 - DNA, 520 bp, Homo sapiens
aatgaactattgatatgtaccacatgatggataaatcccaaaataattacgctgagtaacataagccccaccaaaaaggaatattctatgattccatttatccagaactctaacaaaatgccatctaatctagagtggctgctggttggctggggacaggagaaagaggctgggaagggaagagtgacaaggaggagagaattaaagaaggtacagggaaactttgggggagtggtgtatatatttattcaatatatattcattttgattataatggtggtacatttaaagtatgcttgatttattgtatgycagttatacctcaataaagctattaaaatgtatataacattgtatataaatttaaatataaatgaaaagtcgttttacctttttaagatggcaaaagaaggacatataataataataatagtagtgataattcgttagtaaatggacaataaaatgaacatatatcacactatgaatgaagagtttcgcataaataaacttctaatat

SEQ ID NO: 381298 - DNA, 545 bp, Homo sapiens
tatgatgttcttctctctagtgatttttaactggaaaggggtaaatggaaatgtgtagacaaacacattcaaaagaaaccctacttctgagcccttctaaagattttactgggtagtctttaagacaaaagtttcttttataaaaggcaaaaaatcaacttcaaaactcaggcttcaaatcatcaagggttactttctcctcttctaactagattaaacttttggagtcccagcaaaagggacttatcatatcccatttggcaagaactagtcccctataattacagwttgaaagtgttttctaggcttcatacatttgtccagaaaatgggcagtttaaggaatcataatgaggcatcattcaatgggagaaaggacttcacctgaaattcaagcctttgtggcttctctcagacatctggctctttctcactttttgtggtcagggcaaaatcaattattcgatgacctgggcatagatatggttctctctagtttcaaggagggaagaatgccagaaccacaagcactctcatgtgaaaggc

SEQ ID NO: 381299 - DNA, 573 bp, Homo sapiens
ttttagattccatatatgagtgagatcatgtggtgtttgtctttctgtgtctggcttayttcatttaacataatatcctcgaggctcatccctcttattgcaaatgacaggattgcttccttttttatggctgaatagtattccactgtgtctatataccatattttctttatccattcatccagggatgggcacttaggttgtttacatatcttggcttttgtgaatagtgctgtgataaatgtagaaatgcagatatctcttcagatgtctgtaatcttctttaaaatatttcagaatggactgtataacacagtattagttttactagaaggaacaatcagtgatcctaatcaggaatccatatcccaggaatgaggaggtaacaacaaaaaaaaagacgtagctgggcatggtggctcacacttgtaatccctgtcctttgggaggctgaggcaggtggattgagtgagctcaggatttgagaccagcctggccaacattgcaaaaccttatctctccaaaaaaacaaaacaaaacaaacaaacaaaaaacaggtatggtggtacacac

SEQ ID NO: 381300 - DNA, 581 bp, Homo sapiens
tcttgtctattgtgaatagtgctgtaataaacaatggaatgcagatatctctttgacatacttatttggatatatatccagtaatggaattggtggatcatgtggtggttctgtttttaatctttgaggaaactccatattgttttccataatggttgtacaaatttacattcccaccaacagtgcgcatgagttcccttttctctacatcctagccaaaatctgttatcttttatctttttgatcatagccattctaacaggaaggaagtgacatctcactgtggttttaatttgcacttccctgaagccacacaagatgttgagcattttctcacacaccagttggcaatttgcacgtcttgttttgagaaatgtytattcagctcatttccccatctttcaactgggttgtttacttgctattgagttggattcctgatatattttggatattaatgccttatcagatatatagtttgcaagtattttctcccattctgtaggttgtctcttcactctgttgattgtttcttttgctgtgcagagctttttagtttgatgtaattccatttgtctata

SEQ ID NO: 381301 - DNA, 491 bp, Homo sapiens
aaaagcaggggagcatgatatcatgaaaactaagagatcaaagtatgtcaagtaaagagtggtccctgttttgcatattattactgcaaggtcaagaagaaagagaagtgaccactgaatttggtaacatggaggttttggtgaccttgacatgcagtgacaacagaatggtaaggataaaatctagattcagagtggctgcaggccaggcgtggtacctcatgcctgtaatcctagcatttagggaggccgaggcaggggtatcacttgaacccaggaggtcaagaccaacctgggcaacatagtgagatggtctccacaaaaaagttttaaaaaattagctgggcgtggtggtgttccagctattcaggagactgaggtgggaggatcacttragcctgggaggtcaagcctgcagtaagccatgatatgccactgcacttcagtctaggcaatggagcgagactctgtctcaaaggaaaaaaaagagt

SEQ ID NO: 381302 - DNA, 535 bp, Homo sapiens
gaagaggcaaggagtggatttcgttctgagcctccagagggagtaccacctgctgacaccttggctttggacgtctggccttcagaactgtgaaagaataaatttctttcgttttaagtgaccccacttgtggtaatttgtaatagcagccctaggaaactaacataccacctatccaacaaaggactagtctttataataagtatataaatatccaaattcaacagggaaaaagcaaacaatccaattagaaaatgtgcaaggctgggcacagtggctcatgcctgtaatcccagcactttgggaggcccaggcgggcggatcacgaagtcaggagatcaagatcatcctggccaacatggtgaaacsccgtctactaaatatacaaaaattagctgggtgtggcacagtgtgtgcctgtatttccagctactagggaggctgaggcatgagaattgcttgaacccaggaggcggaggttgcagtgagccgaaatcatgccactgcattccatcctggcaacagagcaagagtc

SEQ ID NO: 381303 - DNA, 535 bp, Homo sapiens
gaagaggcaaggagtggatttcgttctgagcctccagagggagtaccacctgctgacaccttggctttggacgtctggccttcagaactgtgaaagaataaatttctttcgttttaagtgaccccacttgtggtaatttgtaatagcagccctaggaaactaacataccacctatccaacaaaggactagtctttataataagtatataaatatccaaattcaacagggaaaaagcaaacaatccaattagaaaatgtgcaaggctgggcacagtggctcatgcctgtaatcccagcactttgggaggcccaggcgggcggatcacgaagtcaggagatcaagatcatcctggccaacatggtgaaacgccgtctactaaatatacaaaaattagctgggtgtggcacagtgygtgcctgtatttccagctactagggaggctgaggcatgagaattgcttgaacccaggaggcggaggttgcagtgagccgaaatcatgccactgcattccatcctggcaacagagcaagagtc

SEQ ID NO: 381304 - DNA, 535 bp, Homo sapiens
gaagaggcaaggagtggatttcgttctgagcctccagagggagtaccacctgctgacaccttggctttggacgtctggccttcagaactgtgaaagaataaatttctttcgttttaagtgaccccacttgtggtaatttgtaatagcagccctaggaaactaacataccacctatccaacaaaggactagtctttataataagtatataaatatccaaattcaacagggaaaaagcaaacaatccaattagaaaatgtgcaaggctgggcacagtggctcatgcctgtaatcccagcactttgggaggcccaggcgggcggatcacgaagtcaggagatcaagatcatcctggccaacatggtgaaacgccgtctactaaatatacaaaaattagctgggtgtggcacagtgtgtgcctgtawttccagctactagggaggctgaggcatgagaattgcttgaacccaggaggcggaggttgcagtgagccgaaatcatgccactgcattccatcctggcaacagagcaagagtc

SEQ ID NO: 381305 - DNA, 566 bp, Homo sapiens
gggcacaagctgctggtggatcgactattcacagctgtagaggacagcggccccattcccacagctccactacacagtgctccagtggggagtctgcaatgggactccaaccccacatttccccttgtcattgcccttatagaatttctctatgtgggctttgcccctatgatacatcctctgaaatatagggggaagctgccaagtcttcttcactcttgcattctgtgttcctgcaggctttaacaycatctggatgccaccaagccttaccacttgtgccctttggagtggtggccagagctgtacctgggccgctttgtgctgtgactggagcaggagaggctgggatgcaggaagcaatgtcctgaagctgtgcagggcaatggggccatggacctggctccccaaattattctttctttccaggcctctgggcctgtgatgagagaggctgtctctaagatctctgaaatgcctttgaggcctttttcccattgtcttggatactagcactggactcccttttagtcatgctaatctctttagcaagtggtttcaatgca

SEQ ID NO: 381306 - DNA, 566 bp, Homo sapiens
gggcacaagctgctggtggatcgactattcacagctgtagaggacagcggccccattcccacagctccactacacagtgctccagtggggagtctgcaatgggactccaaccccacatttccccttgtcattgcccttatagaatttctctatgtgggctttgcccctatgatacatcctctgaaatatagggggaagctgccaagtcttcttcactcttgcattctgtgttcctgcaggctttaacaccatctggatgccaccaagccttaccacttgtgccctttggagtggtggccagagctgtacctgggccgctttgtgcygtgactggagcaggagaggctgggatgcaggaagcaatgtcctgaagctgtgcagggcaatggggccatggacctggctccccaaattattctttctttccaggcctctgggcctgtgatgagagaggctgtctctaagatctctgaaatgcctttgaggcctttttcccattgtcttggatactagcactggactcccttttagtcatgctaatctctttagcaagtggtttcaatgca

SEQ ID NO: 381307 - DNA, 567 bp, Homo sapiens
ttccattcctgaatctatacaaaagataattacacacacacacatacacacaaatccaaaaattatttttgcaacactaacatgaatatagaatcttccaaggtgattattctgaaaataacatttccatgtaagatcttaagatatatagtgatggccagtataataaatagttgaaagattgtttaaatgaaattgttctaagatttgggaattttccactaamattagagccatatagattgtgggagcttttgagaaattatgagccatcacagagattcaggataaacttagcttgaggaaggtcaagatgcacagttctttccctggttaactttagcatcattaaacatataaaaagaatgagagaattcaaattcctttcacctttagacactgttatagcaatatctcatttaaaggctttcttacagcatcttcactgcattcaaatgattttgtatattgaagagaggagaataacaaagtaaaagtatactaggaaatgtatttgactctgcaatattcagcaatacaattgtacagaaacatccactgcatgtt

SEQ ID NO: 381308 - DNA, 581 bp, Homo sapiens
ttgaagtttggtaatgtgatgcctccaggtttgttctttgtgcttaagattgctttggctattcaggctcttttatggttccacaggaattttagaataaacttttctaattctatgaaaaatgacattggtagtttgataggaataacactgaatctgcagattgctttgggcagtatagccatttaaatgatattgattctttaaatccatgggaatggaatgcttttctatttctgtaatctctgatttatgtaagtagtgttttataattatccttgtaaagatctttcacctccctggttaggggtattcctgggtggttttttttttttttttagctactgtaaatgggattttgttcttgatttcactctcagcgygaatgttatttgtgtatagaaatgctacttatttttgtacattgattttatatcttgaaacattagcaaagtcatttatcagttccagaggcatttggtgaaggttttagtgatttctgtacatagaatcatattgtcagtgaagagatataatttgatttttttccctatttggatgtcttttatttttcttgtctc

SEQ ID NO: 381309 - DNA, 354 bp, Homo sapiens
acttcttttgtggcctaaagtaatttattctgaagaatattccctgtgtattttagaagaatgtctacttagcagttgtyggaggaagtatttatatatgtctgtgaggtctagttggtttacagtgtttttcaagtcttttatttccttgtttattttttctgttgttccattcattattagaagtgggggtgttgaagtgtccaactattattgttgaactgtctatttctcccattcaattctgtcgtgtttactggatatattttggagattctgtttttaagtgtgtatatgtttataatttttatatatacttgacagattggcctttttattattgtaatgtccttt

SEQ ID NO: 381310 - DNA, 443 bp, Homo sapiens
gtgcccttaagctgtataatcatctggaaccctcaatttctttatwtgttaaatggaaagaagaggacccagaaaaacacctgtctcaacgggtttgtagtgatggagtggtaggaagcgtgtgataggcccagccctgctagtcgaggataaagaggccctggacataatcaaaaagaacttgggaatcatttccactggggttcaaacccacccccaccatttattgactgcgatgtttagacgatccttcaccctctttggccccaatagtacctacctcctacgagttttgtgaacataatccattctcagtgctcagctcatgatagatactaaaatagtagatgtcattgaaaatgtttgctcccttcttccaaggaaaagcatgggaacccagcgggactcactggggatggatgcacctttccccctaatttctt

SEQ ID NO: 381311 - DNA, 483 bp, Homo sapiens
ggggcctgccaatattttggctgtgcttagttttcaagctcttttttttttttttttttttttttgtcactctaggtcggatgattcatgctggtaagcatgttgtatcatttatgcagtaatgcagcctaataactccctccccttcaaatatgttccttaaagagccagaagaatttgttcctgtagactcaaacctatgttcttaataaagtctgattgaagaaatagagctctggaaaaaaaaaaaaagagagagaaaagtgggggtgtggggggcaacttggcagcttgctgatgaaacgccaacatggcccttgtgctcttccttctgtctctcctggkggtgttacaatgtgtggcttaacacaaagttttgcatacaaagttaatttttaaaaaccatccttctctcaggatccgcactaaagggatgccaatgttcttattttgtgctccataagaaggaaggcaatttactaa

SEQ ID NO: 381312 - DNA, 483 bp, Homo sapiens
ggggcctgccaatattttggctgtgcttagttttcaagctcttttttttttttttttttttttttgtcactctaggtcggatgattcatgctggtaagcatgttgtatcatttatgcagtaatgcagcctaataactccctccccttcaaatatgttccttaaagagccagaagaatttgttcctgtagactcaaacctatgttcttaataaagtctgattgaagaaatagagctctggaaaaaaaaaaaaagagagagaaaagtgggggtgtggggggcaacttggcagcttgctgatgaaacgccaacatggcccttgtgctcttccttctgtctctcctggtggkgttacaatgtgtggcttaacacaaagttttgcatacaaagttaatttttaaaaaccatccttctctcaggatccgcactaaagggatgccaatgttcttattttgtgctccataagaaggaaggcaatttactaa

SEQ ID NO: 381313 - DNA, 553 bp, Homo sapiens
gggcgcgctgggagctgagcctttcctccgaggggaagtgggagacgcgcgccgccaatccgcgccgggcctggcgctgacgccagagacgctcgcccctgattggctcttcccgaaggggctgccccccctcctttttttttttttttttttttttcctgttggaaataaattaggagttaattacaggagcagtcagcaaagttgttattaggcgatccctgaagggttataatcacgccgaaactgaaaagcccgagacctaattaagagcgattatttaaagcggaagttcgccgagtcccatttyttctctcttttgacccttctttaaaagggaccctgcgcccatcccactctccctttaccgccagaataagttcaagattcgcaaacagcattgcagaaacatttacgaagcccctactatgcgtcaaaattggcttactttacagttccagaaagtcggtgctgaaactcacaggccagtatccctgtgaaagaaatgtatgcacttagaagagtaactcgccactagccagcgctcaaaagc

SEQ ID NO: 381314 - DNA, 553 bp, Homo sapiens
gggcgcgctgggagctgagcctttcctccgaggggaagtgggagacgcgcgccgccaatccgcgccgggcctggcgctgacgccagagacgctcgcccctgattggctcttcccgaaggggctgccccccctcctttttttttttttttttttttttcctgttggaaataaattaggagttaattacaggagcagtcagcaaagttgttattaggcgatccctgaagggttataatcacgccgaaactgaaaagcccgagacctaattaagagcgattatttaaagcggaagttcgccgagtcccatttcttctctyttttgacccttctttaaaagggaccctgcgcccatcccactctccctttaccgccagaataagttcaagattcgcaaacagcattgcagaaacatttacgaagcccctactatgcgtcaaaattggcttactttacagttccagaaagtcggtgctgaaactcacaggccagtatccctgtgaaagaaatgtatgcacttagaagagtaactcgccactagccagcgctcaaaagc

SEQ ID NO: 381315 - DNA, 214 bp, Homo sapiens
tcttgagcaagtcatcccctctgaccctcagcctctgaacaatttcartgttttactgttttatctagtcgcttctactttggtgtccctgaagcactttgtacaaaagtttatgacaaaacttagcctctcttcagttttcctgcccctgtgcccagccgactgcaccttgccccacacagggaatagatggcaatcatggggctctaaatcc

SEQ ID NO: 381316 - DNA, 518 bp, Homo sapiens
agaaaggatctatcagaacagcagacagtcaaaaacaagatcaaaataccgtgatttaatatctaacgtaatttaaagtagtaatgagcataagtgatataaaatatctgcaaatgtaatgtgatatgggtatcacagttatcaaagttactggtttggccgggcatggtagctcacacctgtaatcccaacactttgggaggccaaggcggaaggatcacctgaggtcgggagtttgagaccagcttgaccaacatggagaaaccccatcactactaaaaaaagtacaaaattagccrggcgtggtggcacatgcctgtaatcccagcttctcgggaggcagaaaaatcgcttgaacctgggaggcggaggttgcagtgagccaagacagtgccattgcactctagcctgggtaacaagaacgaaactctgtctcaaaaaaaaaaaaaaaaaacaaaaaacaacttactggtttgtaccctacattcataatattttaaaaatgcccaaaatgccca

SEQ ID NO: 381317 - DNA, 518 bp, Homo sapiens
agaaaggatctatcagaacagcagacagtcaaaaacaagatcaaaataccgtgatttaatatctaacgtaatttaaagtagtaatgagcataagtgatataaaatatctgcaaatgtaatgtgatatgggtatcacagttatcaaagttactggtttggccgggcatggtagctcacacctgtaatcccaacactttgggaggccaaggcggaaggatcacctgaggtcgggagtttgagaccagcttgaccaacatggagaaaccccatcactactaaaaaaagtacaaaattagccaggcgtggtggcacatgcctgtaatcccagcttctcgggaggcagaaaaaycgcttgaacctgggaggcggaggttgcagtgagccaagacagtgccattgcactctagcctgggtaacaagaacgaaactctgtctcaaaaaaaaaaaaaaaaaacaaaaaacaacttactggtttgtaccctacattcataatattttaaaaatgcccaaaatgccca

SEQ ID NO: 381318 - DNA, 518 bp, Homo sapiens
agaaaggatctatcagaacagcagacagtcaaaaacaagatcaaaataccgtgatttaatatctaacgtaatttaaagtagtaatgagcataagtgatataaaatatctgcaaatgtaatgtgatatgggtatcacagttatcaaagttactggtttggccgggcatggtagctcacacctgtaatcccaacactttgggaggccaaggcggaaggatcacctgaggtcgggagtttgagaccagcttgaccaacatggagaaaccccatcactactaaaaaaagtacaaaattagccaggcgtggtggcacatgcctgtaatcccagcttctcgggaggcagaaaaatygcttgaacctgggaggcggaggttgcagtgagccaagacagtgccattgcactctagcctgggtaacaagaacgaaactctgtctcaaaaaaaaaaaaaaaaaacaaaaaacaacttactggtttgtaccctacattcataatattttaaaaatgcccaaaatgccca

SEQ ID NO: 381319 - DNA, 518 bp, Homo sapiens
agaaaggatctatcagaacagcagacagtcaaaaacaagatcaaaataccgtgatttaatatctaacgtaatttaaagtagtaatgagcataagtgatataaaatatctgcaaatgtaatgtgatatgggtatcacagttatcaaagttactggtttggccgggcatggtagctcacacctgtaatcccaacactttgggaggccaaggcggaaggatcacctgaggtcgggagtttgagaccagcttgaccaacatggagaaaccccatcactactaaaaaaagtacaaaattagccaggcgtggtggcacatgcctgtaatcccagcttctcgggaggcagaaaaatcgcttgaacctgggaggcggaggttgcagtgagccaagacagtgccattgcactctagcctgggyaacaagaacgaaactctgtctcaaaaaaaaaaaaaaaaaacaaaaaacaacttactggtttgtaccctacattcataatattttaaaaatgcccaaaatgccca

SEQ ID NO: 381320 - DNA, 241 bp, Homo sapiens
ctgtctcaaaaaaaaaaaaaaaaaacaaaaaacaacttactggtttgtaccctacattcataatattttaaaaatgcccaaaatgcccaaatttcagtgagaggttagtgaaaataaagaatttgttcctttcccgtctaagctggcacatccctggtgggggagggtctatagatkctaacagccctgcatactaattttatgtgtgtgcatcgtttaatcctctgctgataagcaggag

SEQ ID NO: 381321 - DNA, 455 bp, Homo sapiens
attatgtttttgttaaactaatgtgaagggaaagaagaaaaccaacaattctgccagygccagcccccgtgagttgtgctacctgcttttcatgtgttttctcatttatttgacaccagggctggcaatggggttgtgctttgcttcattttatggatgatgaaagtgagtctctgagaggtgaagtgacttgaccaaggtcacacagcaagttggtggcataaagccacaagtggtccatctgaccccaccaccggcttgtcagggctggtggggagtgtgtgtgtgtgtgtgtgtgtgtgtgtgtgtgtgtgtgtgtgtctttttttttttttttttgagacagagtcttgctcttttgccagggtggagtgcagtggcacaatctcggctcactgcaacctccacctcccgggttcaagtgattctcctgcctcagtctcctgagtagctgg

SEQ ID NO: 381322 - DNA, 604 bp, Homo sapiens
tgactttaaagatctgcctcccccactaaactgtgaactccttcagcatggcttggattctagcccagggagaataaatattaatgaaatgatggaagcaacacagygtgtgccaggactgcaaactccaatgcctatagcagaagagggctgggtaggagccagcaagctggagggagctaggttgttccatcaaatggggaagcagtcatatagcagttgtcggcatgaaggaacgggatccagtgttgccacttttttcaatttttcaagagaaactggacatctctatattcatatggaagttcctaacctcttaatgtctagatttgcccccgctggacacactgtgcaggcccctgttacaaaaactccctgtgtagggttttgggggcaagcagcttggatactaatcttgactctaccactaactggttaggcaactttagactaactgggcctccatttcctcttctgtaaaatgacaataataatgaattttatcatattgtcatgatgattaaatgatgatgacctcagaattaaagcattcagcacagtgctaggagtctggtaagtactcattaagtgctggttattaata

SEQ ID NO: 381323 - DNA, 604 bp, Homo sapiens
tgactttaaagatctgcctcccccactaaactgtgaactccttcagcatggcttggattctagcccagggagaataaatattaatgaaatgatggaagcaacacagcgtgtgccaggactgcaaactccaatgcctatagcagaagagggctgggtaggagccagcaagctggagggagctagsttgttccatcaaatggggaagcagtcatatagcagttgtcggcatgaaggaacgggatccagtgttgccacttttttcaatttttcaagagaaactggacatctctatattcatatggaagttcctaacctcttaatgtctagatttgcccccgctggacacactgtgcaggcccctgttacaaaaactccctgtgtagggttttgggggcaagcagcttggatactaatcttgactctaccactaactggttaggcaactttagactaactgggcctccatttcctcttctgtaaaatgacaataataatgaattttatcatattgtcatgatgattaaatgatgatgacctcagaattaaagcattcagcacagtgctaggagtctggtaagtactcattaagtgctggttattaata

SEQ ID NO: 381324 - DNA, 555 bp, Homo sapiens
tacgaggcttcacaggccacaagaaggagtttggattttattctaggagcactggaaagccacagacatttgaagcagggagtaactatcaatgaataatttaaaaatagctgaaaatatgactcattcaaatacatggtaagaacatgccaaagatttatttcacttactaacagggaaagcagcaggatgatagagctggttcaaagagcacttgaggaactgagatgtatatggtccactgggtaaggcatgctgaaataaatttgctaagctagagacataaccatttcatgtcctgcagggcaatgacagcctcacttttgcagttatcttttctatttcagataaaaacggtttgcatttgcattgtgtagrcacttatatgttgcccagaatctgagctcaacttcttctgtccaattcttctttctcttcttttatacacatggtgaccccaagagcaccctgtaaggagcctcatggaggtgcatctccatttcaggcaggatcccagagaacccaacagcatcatgcatatctacagctcagaag

SEQ ID NO: 381325 - DNA, 451 bp, Homo sapiens
gctgtggttagtgttcatgaccttattgctattaaggcccaaagattgtttgccacttccattcaacatcttctagggtaatgataaggcttccctttaattgaaaataaagatagagactcgtctatcacaattcttctgttgtaacttctttaaactttctacaaatgatgatgaaaacagcctcataactccctgtgctccacatggccatacagggcatatktgaatattggagctgtactatctaaaatggcagccactagcctcaggtggctatttaaattgaaattaattgccagtaccatttctctgttgcggtgccctcatctcaagtggttaagagctacacatggctaatggctaccatattaaccatacatttgtatagatatggaatatttttatcatcacagaagtttctaggtactagagctgtaattcacaaata

SEQ ID NO: 381326 - DNA, 520 bp, Homo sapiens
aagtaaacccctctgaaactttctttgtaatttttagaaaataatttggcactgtgaatcgagagacttaaaaatagttatattctttgtccctataataccacttatgaaaagctatcccaaggaaacaatcaaaaatgtgatgaaagatttaatgagtaggatgctcattacaacataattatatagggaaataaagggaaataatacaaatgtctaatattagataatggttaaatatatcatctcgatgtattacaagtctatgctgtcattaaaaatcatgtgcatttctaaaagyatatatataatttcacaggaattttatgcaaagccactttagctaacttattccaactttttaaaatgcacatgtacaaatagaatataaaagactggtacatgataactattattaatatttttatatacctctagttggtgaaattagggggttttttccttaaaattttttttaaatttatcttgtgacctaataaattatttctaatgtatgatt

SEQ ID NO: 381327 - DNA, 591 bp, Homo sapiens
gaattcataccccaccttttctagcttctggaggcatgcattccctggcttgtgaccctcccctctcatcattctctactcttgctttcagtgttacatcacttacctcctcttgttcagtctaatcttctctgcttctactttatatgattacttgtgattacaattagaatctacccagataatccaggataatcttcccatgtaaagatccttaatcacatccacacagccagataaggtaacattctcaagttccagggattaggacatgaataactttgaggaccattattaccatgatttagactactgtaatcactctctaaactttaaatatcctaacacacagctgtgggatatgtaaaaatataatgaatctattatttaaaactcaagcacagaaatggacaaaaacagaaaccaataaaatatgatgatttaatttaaaaagatatagaagcagaaaatataaaatcatatctaaaatgaaaatkataaagtacctaagggagaatatatatatatatatgaaaattaaataagaaatatttcaaacagacaagataatgaaaatgaatgaaataaaga

SEQ ID NO: 381328 - DNA, 519 bp, Homo sapiens
ctttttgtaagacaaataagacacaacaatgctaacagcacatgcttggaagaaaaacagctttgagttctacttctccctaaaactttgagaggttaggtaagttcactatcctgaacctcaatttcttcacatttgaaatggtagtaatacatttaccacagagagtactttccttttgtggtaaatacaatccatattcaaataatgggaaataattcctgttaccaaccagatattttaatactgagtggatttacrtgctctttagtagtttctatgtccagaatatttttaggtggtctgtagattctttttgaagtatataatttaaaattaaaaacattctggctcttctgaatgtccatgctgactgaaccatattttggctgtgactttccaaaggaagtgtattagtccattttcacgctacagataaagacatacctgagactgggcaatttacaaaagaaagaggtataattggacttacatttccacgtggttggggaagtttca

SEQ ID NO: 381329 - DNA, 644 bp, Homo sapiens
agccctaactgaaaattgcaaatatttactagaatggtagaaactgaaaggactgacatccaaagatgtgagctgtttttgttttgtaagacttgaatattttaagacaacttttagcaaatagtttattygatgctacccatcccccgagtgaagaatttgtttatgtaaaaacacagcaaagtctattaaaaatatagacattgtggggtttttttgctttaaggcctacaattagataacataaaaatgtaatttaactgttctgtaagtatgagttttaacaatccatctttgactttgtctatggactgacttccatgccttacatcaagatagtacagatgtgggggaggagccaagacggccgaagaggaacagccccagtctactgctcccagagtgagtgacgcagaaaacaggtgacttctgcatttccaactgaggtaccaggttcatctcactggggagtgtcggacagtgggtgcaggacagtggatgcagtgcactgagcgtgagctgaacaaggttgaggcattgcctcacccaggaagtgcaaggggtcagggaattccctttcctagtcaaagaaaggggtgacagatggcacctggaaaatcgggtcattcccacccaaatactgc

SEQ ID NO: 381330 - DNA, 572 bp, Homo sapiens
tggtgttaactattctgagtctttagctcctccttatccatggtttcactttgtgattttagttacccacaatcaaccacagtccaaaaatattaaatggaaaactccagaaataaataattcataagttatatattgcacaccattctgaatagtatggtgaaatctcayactgtcccctcaggacgtaactcattcttttgtccagtgtatctgcactctataccatactcgcctgttcatcatttagtagccatcttcagttatcagatagactgtcccagtattgcagtgcttgtgttcaagttacccttattttacttaatagtgaccccaaagtgaaaaagtactatgcctaattaataaattaaactttataaaagatatgcatgtttgggtacaaagcatagtgtgcatagagtttagtactacccacagttttatctgtccattgggatcttggaatgtattccctgtaaataaagggaaactatatttttgagtaattttgttaatattcgcaagataacatacagaatttgaactgagattgtgctgaatatattgatcaa

SEQ ID NO: 381331 - DNA, 596 bp, Homo sapiens
gctcatctttttattgttttgttttgttttgttttttgagacagagtctttctctgttgcccaggctggagtacagtggcacgatcctggctcactgcaacctccacctcctgcattcaggcaattcccctgcctcagtttcctgagtagctgggattacaggcatgcgccaccayaccgagctaattttttgtggggttttttttgtgtgtttttttagtagagacagggtttcaccatgttggcccagctggtctcaaactcctggcctcaggtgatgcacccacttcagcctcccaaagtgttgctattaaggtgtgagccaccgcgcccggccttgactcacctttcagctttctgaaatgctctaacttatggaaagccttccctgacctccctttttccccttgcacctggtaattaggtagtctctcttttagttttcataacattttgtatattcccccccagcataatccacatttatttgtttgcatgtgtgtttaccctctaaagagtgaacttcttaagacagatactatgtcttaggcttttaaaaaaaaattccaattgcctaacaaagtgctatttcaaga

SEQ ID NO: 381332 - DNA, 596 bp, Homo sapiens
gctcatctttttattgttttgttttgttttgttttttgagacagagtctttctctgttgcccaggctggagtacagtggcacgatcctggctcactgcaacctccacctcctgcattcaggcaattcccctgcctcagtttcctgagtagctgggattacaggcatgcgccaccacaccgagctaattttttgtggggttttttttgtgtgtttttttagtagagacagggtttcaccaygttggcccagctggtctcaaactcctggcctcaggtgatgcacccacttcagcctcccaaagtgttgctattaaggtgtgagccaccgcgcccggccttgactcacctttcagctttctgaaatgctctaacttatggaaagccttccctgacctccctttttccccttgcacctggtaattaggtagtctctcttttagttttcataacattttgtatattcccccccagcataatccacatttatttgtttgcatgtgtgtttaccctctaaagagtgaacttcttaagacagatactatgtcttaggcttttaaaaaaaaattccaattgcctaacaaagtgctatttcaaga

SEQ ID NO: 381333 - DNA, 612 bp, Homo sapiens
gctatttcaagacatcttcattggatgggtggatggctgggtggatgaattaaataatgagacataatagtagaaatcttggcatcactacatttagtggtcactaattaaaattcattaattaacaagatgattaaatagggtggaaatagcaactagctttgaagcaataaaactcaggtctgaatttccattgcaatacttacatgctattttgtcttgctttgattgcttgacttcttagaccaccagctrtctctttcataaacttataaaacttacctcccagaaattttataaaaattagttaagattacatatataaaaagtgtggtcaattataggtgattaataatagtagccattattatatcaacaccaaaaactcctctacatttttaaacatattcttgtttcaaaataaattttctgaagacctcccagaacacataaatacatgcatagacatttctaccttaacactttcaaaccaatagatgatttatgcacacacacatgagcacacatacacaatcatgaatacaaaacatgtgtttttcatttaaaacactaatttgggcctaagaactcttgcttttttagaaataagac

SEQ ID NO: 381334 - DNA, 612 bp, Homo sapiens
gctatttcaagacatcttcattggatgggtggatggctgggtggatgaattaaataatgagacataatagtagaaatcttggcatcactacatttagtggtcactaattaaaattcattaattaacaagatgattaaatagggtggaaatagcaactagctttgaagcaataaaactcaggtctgaatttccattgcaatacttacatgctattttgtcttgctttgattgcttgacttcttagaccaccagctatctctttcataaacttataaaacttacctcccagaaattttataaaaattagttaagattacatatataaaaagtgtggtcaattataggtgattaataatagtagccattattatatcaayaccaaaaactcctctacatttttaaacatattcttgtttcaaaataaattttctgaagacctcccagaacacataaatacatgcatagacatttctaccttaacactttcaaaccaatagatgatttatgcacacacacatgagcacacatacacaatcatgaatacaaaacatgtgtttttcatttaaaacactaatttgggcctaagaactcttgcttttttagaaataagac

SEQ ID NO: 381335 - DNA, 470 bp, Homo sapiens
tggaaacaggaaggtttctggacatctcctttagagattctgattctctgtggggtagagctcaagaatttgyataacaagctctcctaataattctgacgggggtggaccaggtaccatattaggacaaactctgcttcagggcatcttttgttatttaatagttaatattatttattttaaacacttcaaaaactgtaaagaattacaaaaattatctcttaatcattatgtcatctaccctagatcttaagatgtgcagacattcttgtagcaggtattgaaaggcaattagtttcaaatgtatcatagtttataacagaattctctattaaatgatagagacattttagttctcagagcttttagggtgctatttggaaggcaaattttgtcttgcaatctgttctaccacttaaataatatttattttatgttctacattttacccctcattagttgctcatagg

SEQ ID NO: 381336 - DNA, 534 bp, Homo sapiens
agagagaaggggtaatggaacaagcatcatccagaactgaatgaaaataagatattttactttttttctttaatcagcacatttcttttgataaatagtcatgagacgtgttctgtgagtcactacaattctcacttggcacttggaacagtcgtgttatataggtttaccataactctcagaacaggagtatattacaaacaagtggartagaacatagagaatacataatttgttctaatattcctcttccttagagccttcaaacttaaaccaagttgaaaaaaaaagtttcccaaattgaaaacattgcctatggattatctacagaagagaggaaaataagcaaccattttgattccacaaaccaagcgaagaataaggacatgaacagaccaatgtcttgacaccactggcaatattacatttacctggacaattttgatattgtcaaagagagaggatataatggctaaggatgttcctagagctgctgaaggaaccagagagctttcatccataaaaatatcactg

SEQ ID NO: 381337 - DNA, 579 bp, Homo sapiens
atgatgcatttaaattgttgttcccttccacacccccactgccagctgtctattgcctttttcagggttggttttgttcagaatttattacattcttgactgggaaaatagaagtagcatatcttacatgatgttggcataagygcgatcataataagtgagtactaagtgaattagcaactactccaatattggtgaaatgtacattctggttgagcatatgaatgacctacaatatggcttacactcaggatggaaaggaatacagaatatttttctggacatatgcaagtatgtgagtagctgcattggtcactcgaataaagaatttttattcctgagaggataaaagcaatgcccctctagtgctgatgtattaaaccagcttagctattaatcactgtcatccattttactgatgaagaaattaagggcaaggcattagttgactatttaagttaccctgttggtcagggacaaagtctacaatagactctggctactctaaggctcctcattgcttttcccaccacttcatgcggcttttgggtgaacaaagttattaatacaatgtcatcc

SEQ ID NO: 381338 - DNA, 546 bp, Homo sapiens
tacattctggttgagcatatgaatgacctacaatatggcttacactcaggatggaaaggaatacagaatatttttctggacatatgcaagtatgtgagtagctgcattggtcactcgaataaagaatttttattcctgagaggataaaagcaatgcccctctagtgctgatgtattaaaccagcttagctattaatcactgtcatccattttactgatgaagaaattaagggcaaggcattagttgactatttaagttaccctgttggtcagggacaaagtctacaatagactctggctactctaaggctcctcattgcttttcccaccacttcatgcggcttttgggtgaacaaakttattaatacaatgtcatccatgcttatgtatagaaaggtaattttctacttcaattcagatctaaagaaacaggcctatataccacttcagttaccttttagctttctgatctgatttcttcagaacaattgaaacattacactggtacaaagacaaagatattaatttaaaatttaattgtaattgg

SEQ ID NO: 381339 - DNA, 568 bp, Homo sapiens
cggcttttgggtgaacaaagttattaatacaatgtcatccatgcttatgtatagaaaggtaattttctacttcaattcagatctaaagaaacaggcctatataccacttcagttaccttttagctttctgatctgatttcttcagaacaattgaaacattacactggtacaaagacaaagatattaatttaaaatttaattgtaattggtgatatttattgctcatgtctactatgtgttggtttgtgccttagaaactcaaataggcacagcctctttgattctattttgaaacttctgctgtcttttaattcttagtcttttatgatttcctgctcttttaattttcaartacatataaatactcctttgctaactagtttcttggcaacaaaatatgtagcacctttagaaaaaccaaatttcatctctgatgataatggcagtgaattactgcgatagatcaggagaagccaaatagtacctaaagatagaaatcctttcaaatgaggcaggggtgatataaattgccaaaagccaagtatgtttgcttatgtgaataaaaaaa

SEQ ID NO: 381340 - DNA, 567 bp, Homo sapiens
ggaggtggtttatcatctctgcctctaatggataagaatataaatttgctctcaatgtgggataagtgaactaaatataaggtgttcagcttgtcagtctctgcatccaagccaatgatgagaagacatatgctcaactctgttgccaactttcatatttgcttcctgtgagagggcgttcccgggttgtgtgcttgtctaaatggcttctgaaagtcaaaccagactgaggaaaaaatagatatttatcaaagtctgtcaccccaaatgcttgactctagtgtatgatatgatgattaagatagcaggaagattttttagggtctggcatcactactgttttctgtctttggacttgtgatttttgttgcatttatactattagctggaaagaaatagattattgattaaaaatacctatatcattttatggagaaaatgttttttaaaaatttaagctgatgactccctaatgctaaagccagttagagaaaactctgtacttycctgtctgatactcaatacaaaacacacagtcgagcatacacgatatgctttttattagaa

SEQ ID NO: 381341 - DNA, 489 bp, Homo sapiens
ttaaaaattgctataaacaattacatgtcaaaaaattggataatttagaaaaaatctataaattcmtaaacacataaaacctaccaagattaaatcatgaagaaacagaaaatgtgaacagactaataacaagtaaggagattgaatcagtaataattcttccatcaaacaaaaacccaggcctagatacctcactgctgaattctaccaaacagctcaagaataactaatagcaattcttctcaaattcttccaaaaaataaaagtgaagagcatacttcacattaacctaactcattgtataaaaccagcattatcctgaaaccaaagatagacaaggacactacaggaaaagaaaattatgggccaatattcctggtgaacctagatgaaaaaaaatcctcaaaaaaaatttagcaaattttttttttagcaaattcaacagcactcttcaggataaatgtgatttatccctggcatgtaagaatg

SEQ ID NO: 381342 - DNA, 547 bp, Homo sapiens
taaacttgcaagattcaaaatcaacattaaaaaagtagtttttatatttactaataatgaactatctgaaaatgaaattcagaaaataatctcatttataatgacaacaaaaaatattaaattcttagatgtaagtttaaccaaggtataaaagacttgtgtagcaaaaattataaaaccgtgcaaaaaaaactgaagaaaacacaagtaaatggaaacatgtcctgtgttcatggatgaagagtgaattaaacattgtttaaatgttcatgctatctacagtggtctccagatacattgcaatcacaatcaaaatcaragtgtcattttacagaaataggaaaaacaatccttaagtccatatgagttgcaaaagataccaaatatccaaaacaatcctgaacaaaaataacataactggaagcacctcacatcctgattttaagacatattataaagtaaatgtaatcaaaacagcaaggaatggcattaaaaaaacacacattaaccaacttaagaagctagaaagcccaaaaataaaccgaaa

SEQ ID NO: 381343 - DNA, 547 bp, Homo sapiens
taaacttgcaagattcaaaatcaacattaaaaaagtagtttttatatttactaataatgaactatctgaaaatgaaattcagaaaataatctcatttataatgacaacaaaaaatattaaattcttagatgtaagtttaaccaaggtataaaagacttgtgtagcaaaaattataaaaccgtgcaaaaaaaactgaagaaaacacaagtaaatggaaacatgtcctgtgttcatggatgaagagtgaattaaacattgtttaaatgttcatgctatctacagtggtctccagatacattgcaatcacaatcaaaatcagagtgtcattttacagaaataggaaaaacaatccttaagtccatatgagttgcaaaagataccaaatatccaaaacaatccygaacaaaaataacataactggaagcacctcacatcctgattttaagacatattataaagtaaatgtaatcaaaacagcaaggaatggcattaaaaaaacacacattaaccaacttaagaagctagaaagcccaaaaataaaccgaaa

SEQ ID NO: 381344 - DNA, 547 bp, Homo sapiens
taaacttgcaagattcaaaatcaacattaaaaaagtagtttttatatttactaataatgaactatctgaaaatgaaattcagaaaataatctcatttataatgacaacaaaaaatattaaattcttagatgtaagtttaaccaaggtataaaagacttgtgtagcaaaaattataaaaccgtgcaaaaaaaactgaagaaaacacaagtaaatggaaacatgtcctgtgttcatggatgaagagtgaattaaacattgtttaaatgttcatgctatctacagtggtctccagatacattgcaatcacaatcaaaatcagagtgtcattttacagaaataggaaaaacaatccttaagtccatatgagttgcaaaagataccaaatatccaaaacaatcctgaacaaaaataacataactggaagcacctcacatcctgattttaagacatattataaagtaaatgtaatcaaaacagcaaggaatggcattaaaaamacacacattaaccaacttaagaagctagaaagcccaaaaataaaccgaaa

SEQ ID NO: 381345 - DNA, 547 bp, Homo sapiens
taaacttgcaagattcaaaatcaacattaaaaaagtagtttttatatttactaataatgaactatctgaaaatgaaattcagaaaataatctcatttataatgacaacaaaaaatattaaattcttagatgtaagtttaaccaaggtataaaagacttgtgtagcaaaaattataaaaccgtgcaaaaaaaactgaagaaaacacaagtaaatggaaacatgtcctgtgttcatggatgaagagtgaattaaacattgtttaaatgttcatgctatctacagtggtctccagatacattgcaatcacaatcaaaatcagagtgtcattttacagaaataggaaaaacaatccttaagtccatatgagttgcaaaagataccaaatatccaaaacaatcctgaacaaaaataacataactggaagcacctcacatcctgattttaagacatattataaagtaaatgtaatcaaaacagcaaggaatggcattaaaaaaacacacattaaccaacttaagaagytagaaagcccaaaaataaaccgaaa

SEQ ID NO: 381346 - DNA, 440 bp, Homo sapiens
attaacaactagctagactaacaaagaaaagaagggataaaccccaaataagtaaaatcagaaatgaaaaatgaaacattccaactgataacacagacatcaaaaagttgattagagactattatgaccaactatgcactaagaaactagaaaacttagagcatatggataaattctaggaaacatgcaacctacsaagattgaatcaggaagaaagagaaaatttaaactgtcaaaaatgagtagtgagactgaattagtagttaaaagtctcccaacaaagaaaggcccagaactgcatagatttactgctgaaagcaaacatatagaaaactaatactggccaggtgcagtggatcatacctgtaatcccagaactttgagaggtgggggattacttaaggctgagaattcaagaccagcctaggcagcatagtaag

SEQ ID NO: 381347 - DNA, 513 bp, Homo sapiens
tgtaaatagcaatctggtcttgcagggttggcatctgaacatgcagtttgctattttacgattctgcttatatttgtgttaaagtgcagtagtaaatgttccgcaaagaggcaggcactctgagcctcaccattatttcacagtccactgtactgcagactaatttggagaatgtaagaaaccagcaatgttgatgaatctctattattaatttaataatatgttttatatgtactatatattcatttttaatataggatctttctgaaatttaggaaataaatcagagcacacatttataatagacagataatatgtaataattatgcccatcatacaaaaagcaatttcagaaactaaagattgtttttacaaaatcacattagacaaaaggagattggtaaaagggacaatgtctctgctgawctcttttacggttttggttttggttttcctggttggaatgcaaagagtagaaaccatgaggcagaaataacacaaaaattcctttct

SEQ ID NO: 381348 - DNA, 540 bp, Homo sapiens
tatggggttggagcccatggatgttgttacatgtgagataggtctcttgaaaacagcaaacagatgagccttgttttttttttttgttttaattcagctatgccttttaagtggggrcatttagactatttacattcaaggttaatattgacatgtaaagttttgatcctattttgaagttagctggttgttttgtagtttctattgtgtgcttgctttatagggtttatgggctatgtacttaagtgtgtttttgtggtagcatgaattgttcttttattcccaagtttagtactttcttaaggatttcttgtaaggctgattcaatggtaacaaattcccttattgcttgtttgtctggaaactattttatttcttctttgcttaagaagcttagtttggcaagacatgaaattcttggttggaatttcttttcttaaacaatgatgaaaataggcccccgatttctcctgatttgttaggtttctgttgagaagtccattttcagcctgatgggattccctttgtatatgatataaa

SEQ ID NO: 381349 - DNA, 540 bp, Homo sapiens
tatggggttggagcccatggatgttgttacatgtgagataggtctcttgaaaacagcaaacagatgagccttgttttttttttttgttttaattcagctatgccttttaagtggggacatttagactatttacattcaaggttaatattgacatgtaaagttttgatcctattttgaagttagctggttgttttgtagtttctattgtgtgcttgctttatagggtttatgggctatgtacttaagtgtgtttttgtggtagcatgaattgttcttttattcccaagtttagtactttcttaaggatttcttgtaaggctgattcaatggtaacaaattcccttattgcttgtttgtctggaaactattttatttcttctttgcttaagaagcttagtttggcaagacatgaaattcttggttggaatttcttttcttaaacaatgatgaaaataggcccccgatttctcctgayttgttaggtttctgttgagaagtccattttcagcctgatgggattccctttgtatatgatataaa

SEQ ID NO: 381350 - DNA, 439 bp, Homo sapiens
gtttgagtcttaactcagcttatagttgaaattgaatgctcaggagttgctgaaagattattggttaaaaaaatgttttctcaatttttgtaatttttctcatttccttttctatacttccatcctctttgtcaaccattttcaatgatttatccagtggaatttactccctgaaaactccttttctagtctcctgaaatatgaaaaatcctttaatctagatgtctgagcaatgtgttgtggcaagtgcatatcggttacatcatggtaactttctggtgattaaaacattttctgcatagctaatctatgaaayactaacactgtaatgaaaaatgctaagtattataactcttgcacatacaacaaaatgcctgagtccagatgggataatgttctaaattatttccatactcaatattttatcattgcacccttt

SEQ ID NO: 381351 - DNA, 439 bp, Homo sapiens
gtttgagtcttaactcagcttatagttgaaattgaatgctcaggagttgctgaaagattattggttaaaaaaatgttttctcaatttttgtaatttttctcatttccttttctatacttccatcctctttgtcaaccattttcaatgatttatccagtggaatttactccctgaaaactccttttctagtctcctgaaatatgaaaaatcctttaatctagatgtctgagcaatgtgttgtggcaagtgcatatcggttacatcatggtaactttctggtgattaaaacattttctgcatagctaatctatgaaatactaacactgtaatgaaaaatgctaagtattataactcttgcacatacaacaaaatgcctgagtccagatgggataatgttctaaattatttccatactmaatattttatcattgcacccttt

SEQ ID NO: 381352 - DNA, 631 bp, Homo sapiens
gaaggtactatcatcacagatactctgtttctattgaagaatatatcctgttaagatttctgagacgctaataaaaaaagtgtcaccaaaatgatgatttataaattctgatgtaaatatcactgaaacatgccaatgaataaatgccaagtagtctactgtgtatgttgcaagatgtatgttacatagcacacttaaaatgatagattacgcatcactcaaaatgagataaagactacttctttaactacttttatgtctcattattttttgctgttttaaaatttccttcatatagagtggatctctcaagttagtccaacaatctagcttgctagttttagagatccttattctaaacatcattactgttgtatgaatcagctatcaggtacaacaatgcattatctcaaaggyaaacataaataattacaaaataaaacaaatgcatgacaaaaaattaaaaggttcaagataacagtagcctcctacatttgtttagtccttcttaatcttcaaataaattttgtatccacttctctgtttttatcctcagtatagtactacgagaaaaacattaaagttcttattttataaaggagaaaactagctcattgatataaagtcattt

SEQ ID NO: 381353 - DNA, 631 bp, Homo sapiens
gaaggtactatcatcacagatactctgtttctattgaagaatatatcctgttaagatttctgagacgctaataaaaaaagtgtcaccaaaatgatgatttataaattctgatgtaaatatcactgaaacatgccaatgaataaatgccaagtagtctactgtgtatgttgcaagatgtatgttacatagcacacttaaaatgatagattacgcatcactcaaaatgagataaagactacttctttaactacttttatgtctcattattttttgctgttttaaaatttccttcatatagagtggatctctcaagttagtccaacaatctagcttgctagttttagagatccttattctaaacatcattactgttgtatgaatcagctatcaggtacaacaatgcattatctcaaaggcaaacataaataattacaaaataaaacaaatgcatgacaaaaaattaaaaggttcaagataacagtagcmtcctacatttgtttagtccttcttaatcttcaaataaattttgtatccacttctctgtttttatcctcagtatagtactacgagaaaaacattaaagttcttattttataaaggagaaaactagctcattgatataaagtcattt

SEQ ID NO: 381354 - DNA, 631 bp, Homo sapiens
gaaggtactatcatcacagatactctgtttctattgaagaatatatcctgttaagatttctgagacgctaataaaaaaagtgtcaccaaaatgatgatttataaattctgatgtaaatatcactgaaacatgccaatgaataaatgccaagtagtctactgtgtatgttgcaagatgtatgttacatagcacacttaaaatgatagattacgcatcactcaaaatgagataaagactacttctttaactacttttatgtctcattattttttgctgttttaaaatttccttcatatagagtggatctctcaagttagtccaacaatctagcttgctagttttagagatccttattctaaacatcattactgttgtatgaatcagctatcaggtacaacaatgcattatctcaaaggcaaacataaataattacaaaataaaacaaatgcatgacaaaaaattaaaaggttcaagataacagtagcctcctacatttgtttagtcctycttaatcttcaaataaattttgtatccacttctctgtttttatcctcagtatagtactacgagaaaaacattaaagttcttattttataaaggagaaaactagctcattgatataaagtcattt

SEQ ID NO: 381355 - DNA, 539 bp, Homo sapiens
tcctttgcctattgagatgatcatatgctttttgtttttaattttgtttatgtggagaatcacatttatttatttgtgtatgttaaccaagttttcattccaagaatgaagcctacttgatcatggtgaattacctttttgatgtgttgctggattcatattgctaggtttttttttccaataatttttggggaaccagtggtgtttggttacatggataatttctttggtggtgatttctgagattttggtgcacccatcacccaagaagggkacactgtacccaatgtgtattcttttatccctcacctcactcccaccctttcccccaagtccccaaaatccattggatcattcttatgcctttgcatcctcatagtttagctcccactaataaatgagaacataagatgtttggtttttcattcctgagttgcttcactcaggaatgtgtgtgtgtgtgtgtgtgtgtgtgtgtgtgtgtatgcataggtgtatatacataaatgtgtctatatataaatgttacatatataaat

SEQ ID NO: 381356 - DNA, 551 bp, Homo sapiens
tccactttgcagggtacctgatttgggtaggtccagtcaccagccagaagttctggctttgggcactgcttccgctctgttcttacaaatctgcttcactaccaggctcaaggatgattcaggtgaggggattctttattctccaggtcccaaggacaattcctggggaacaaagtgtggagttgctaggcgaaacttgatacatatttagatatatggcatatagtctccatttgtaygctcggtcctgaaaattttgggggtctgtcttatagaacccatccatatacaggatgctgtgttaatcacaggaggtaaaaaataaatgcaatataagttgtatatgcaagagtaataggactctaatataagagtggagggaacaatgaattcactctccttgagaagaataagctggaagaagtattactagaaaacattagaaaaatgaattgcacttcaaactgatttcactgtgtctctaatggtctgtgacttggtagttccatgcaaaaagtaatcacatatacttttcatcaagtgacaagttg

SEQ ID NO: 381357 - DNA, 530 bp, Homo sapiens
tcactgcaagctccatctccctggttcaagcaattctcctgcctcagcctcctgagtagctgggattacaggcacacaccaccacgcccagctaatttttttgtatttttagtagaggcggggtttcaccacgttggccaggctggtcttgaatgcttgacctcaaatgaccctcccacctcggcctcccaaagtgctgggattacaggtgkgagccactgcgcccagctgaatttccctattgatgccaaagatcaattagcttcatagggaccggccattttctacaaagatcatgtgatttgagagggcaatgtgagaatgcttttattttgtaggataatttatccaaaatttaggcaattcctattactcattcaaatttggggataaacagattacagaagcaggttgccaggacagagcacagttgcagaagcccccaaaaagaggtggtgatcaggaccaggtcacacaccttgacttgggtcaggcaactgagggttaagctaatgagatgaagaaggggc

SEQ ID NO: 381358 - DNA, 465 bp, Homo sapiens
gacttgggtcaggcaactgagggttaagctaatgagatgaagaaggggcaggaaagttggaccatgaaggaggaagaagcagaggctcctgaagcacagagtcttgacacgaattgtccagtcccctgaggagataagtaggatcccatattggccagccaaagctgagacctactttatatcttcaacctccacatctccgaaatgttcttaacctcaaaatggacctttctagattaaactgggatttcatcaagtcaaagcgtatattctctctagacaatgggtctcccctacaacctaaaaagaaagaagccaacagaaaaagacagatgtaaaagggtgactgacaataacagtattagggacrtgactaaacactgctcatctctccagtggttacaagactgatcaggtggcttgacttaagctcgccctcagaatacaagctctctatttaaagag

SEQ ID NO: 381359 - DNA, 625 bp, Homo sapiens
ttctcaaaaaaaattgactacatttgaaactgtggagaaattcaagcccaagggcactttcaaaaatatgaagattttggtagtaaacaatcttttaaaaaggctgatagctctataagagcaacaaattaaactatatgctaggagatttaccagaaaaaaaaaaaatagaaaaaaagagccctacaggggtcagaacaaatcccaaagactggcctgtaaaactacctctgcaacaaggcctgcatttaattggatcagactgtgaaataatttatgtccccgggcattatcaaaaacagtagagcaaatcattgcccattagtggagccacatagctgagtgtgatgccaaaccaggcagataacttaacaaagatcaggaaaagcaacagttgaagagacasttgccaacaacattgtcatccagggtgattgcgtgcttaaaggtgcaccatcaaagaagaactatggaaaaaatagacttcaaaaaacagtttaggtaagtcatgaaacagaaacaaaaaaagaacaaaattaccaggtcctcagagaaataagacttaaaaattaattgaaattaataaaatttagaatagaaaaacaatagagaaaaatagaccccc

SEQ ID NO: 381360 - DNA, 625 bp, Homo sapiens
ttctcaaaaaaaattgactacatttgaaactgtggagaaattcaagcccaagggcactttcaaaaatatgaagattttggtagtaaacaatcttttaaaaaggctgatagctctataagagcaacaaattaaactatatgctaggagatttaccagaaaaaaaaaaaatagaaaaaaagagccctacaggggtcagaacaaatcccaaagactggcctgtaaaactacctctgcaacaaggcctgcatttaattggatcagactgtgaaataatttatgtccccgggcattatcaaaaacagtagagcaaatcattgcccattagtggagccacatagctgagtgtgatgccaaaccaggcagataacttaacaaagatcaggaaaagcaacagttgaagagacagttgcyaacaacattgtcatccagggtgattgcgtgcttaaaggtgcaccatcaaagaagaactatggaaaaaatagacttcaaaaaacagtttaggtaagtcatgaaacagaaacaaaaaaagaacaaaattaccaggtcctcagagaaataagacttaaaaattaattgaaattaataaaatttagaatagaaaaacaatagagaaaaatagaccccc

SEQ ID NO: 381361 - DNA, 625 bp, Homo sapiens
ttctcaaaaaaaattgactacatttgaaactgtggagaaattcaagcccaagggcactttcaaaaatatgaagattttggtagtaaacaatcttttaaaaaggctgatagctctataagagcaacaaattaaactatatgctaggagatttaccagaaaaaaaaaaaatagaaaaaaagagccctacaggggtcagaacaaatcccaaagactggcctgtaaaactacctctgcaacaaggcctgcatttaattggatcagactgtgaaataatttatgtccccgggcattatcaaaaacagtagagcaaatcattgcccattagtggagccacatagctgagtgtgatgccaaaccaggcagataacttaacaaagatcaggaaaagcaacagttgaagagacagttgccaacaacattgtcatccagggtgattgcgygcttaaaggtgcaccatcaaagaagaactatggaaaaaatagacttcaaaaaacagtttaggtaagtcatgaaacagaaacaaaaaaagaacaaaattaccaggtcctcagagaaataagacttaaaaattaattgaaattaataaaatttagaatagaaaaacaatagagaaaaatagaccccc

SEQ ID NO: 381362 - DNA, 598 bp, Homo sapiens
gaccttttctatctttgcccatactttcttttccttcctgcctgaaatgtggatgtgagttccatagctccagcagccatattggataatgaggcaaatttctggataaatgtcaagcacctaggttcacagagcaggaagagaaagagcataagtccatgaaaacttattggaggctgagatacctacttctgaatttgtttaaactgttattaaaattaatttctattatgtttaagttcacagtcttataacaacaattcctagatgattaaatgaattatcttggttagtctctcattttctctaagcctgcttctcttcagctttaaaataatgctaaatctgtaaaaggtttaatctatgtaaaacaatctatactaagtaggggtacgcatagcagatattttctgggcttggaaccctctgacacagtcttactgcttcattataatgggttctgttttgatgggtcagaatctgcatcatactagaaattgatctggcttcaaatctcatcctaaaatatgcaatagaaattagctccttttgtctaagctacagmaaattcttacctacataaacactgaaatcataa

SEQ ID NO: 381363 - DNA, 589 bp, Homo sapiens
gaaagagacttacttgatgatcttagcaggtagataagtgattgaaagtgtgtgaagtgtcaggcaaaggaaacaagatccagatgagttttttttatacaacagcccttcaacaaggattcatttctctttttattgactagtgtttctgatgccctatttagaaaagcaatgaaaaaccttacccatattttcacccctatgcctggatgaaaggggatattccagttaagagtcattctgtagctgcagtcaactcttggtagtaatgaactaacaagaagtaagcatttatgcagacaacacttaattgcagacagaccacttgtccttacatcctggccaagtctctttatcatggacttttcagtgtagcattagatagtgaccatagcagtatatggaatgagagacagcttcaatagcagatgtagctggagaggcagcctaggaatattttggagaggaagttaagaactagctgagaggcaaaaaagtagtatatgggtagataggatatgagtgtagagcttatttgcaatttgttattgggtakggcaaacattgctaacgtaacagtgattggcat

SEQ ID NO: 381364 - DNA, 566 bp, Homo sapiens
cttgcactagcaagctgtgtcaggactaaaggtagcaagggaagaggaaaagacacataaatagttgctgtttgaccccctctgtccaccatttttgatcttcagatccagctctattatttgtaacttgaacagtgttggaaggctcaccatgtctaggatttcttccagatgtggataaatgtgaatgcaatcttacctgcactaaacaactgccacatgcatactggctccctctatatcttctccctagggtgtggtatggggaaatccagggaacaaaataaagaagagaaaatctagagatacctgctcttctgccaggaatactagccacagatgtaggattcatcatatgatcaytgtggcgtgtttcagtttggactccctcaagagcagatttggagacaaggatttgagggcaaatagtttcttatggaggtgaaggaggttaagggagtgggtaacagaaagagggaaaggaaggcagcccaaacggaatgcatgatttagccaactaccaagttgaacaattggggctgaccaaatgaaactgttagacttct

SEQ ID NO: 381365 - DNA, 662 bp, Homo sapiens
tgtaataccgcagggcttaaatgcatgaaccgtgcccttagtgagctcaaagtatttggaactgttatgaacttactaatgacacaaaaacttgttactgaatttgtgtgtgtctggagctcatgtggtgtcaattacaagataagtaataaaaatctgcgaatttaatatacactaaatcttaatggtaaccacattaattgtttaaaatatagactaacaaaatattttttagggagtagtcctttatcgctgatgttatttagagttgccagatcatagtgctggtagaaagtagtttgcctaggccgtttagttcatttaattgttgttttctaaattctctttaaatataccccactattgtctgcattcrgagaagacagcaatcaatgccccacctttagaactccactgtttcctacacttagccctgcccctctaatagtgcttcagaaacacttctctgctttctttcagagccagatattagaaagccagtgttaagattggattgtgttttcagggaaccaggtttgaaggccaattctgatctgaagcagccaggctgcagggtggggaaatgtttcccttgcatccgaataatagttctaattgtttttcttgtttttcccctttagaaacacattatatacataaaa

SEQ ID NO: 381366 - DNA, 529 bp, Homo sapiens
gctgggtgcaggcaggatctgctgagactacagccaccctcctaggcacaggacccggcgtctctgcagcctgtaccctcggggggccccaggaaggaaactccccgccccaatccctgcagattggggggtgtctgctcccactgcctggccctcctaggtgctggacctctgcatcgctgcagcctgcacattcagaggccccaggaaggacactccccacctcctccgcatccctacaggttcgagggtgtctgttcccactgactggcctctctccactcctggcgcctgctcctatcttggagtggtgttggggctgagccccccgggccttgaatggcagtggcagacagagtcctggcctgaagggggcaggtccccagcaaggccccacttgcaggccagagagggcttgaaggctgaagrccaggctgccagtcccacagactggagtggggactggtggtgcctcttcacggcacccatggccgcccatggaccaattggcacccacttcctcccctct

SEQ ID NO: 381367 - DNA, 295 bp, Homo sapiens
ctgggcgtggtggctcatgcctataattttagccctttgggaggcagaggtgggaagatcacttgagcccaggtgttcaagaccagcctgggaaacatagggagacttaaacgttgtttttttttgtttgttttttgttttttaattatctgggcatggtggcatggactagtagtcccarctacttaggaggctgaggtagaaggatcacttgagcccaagtggttgaggctacattaagccgtggtcgtgccactgcactccagcctaggtaacagagtgagacccggtcaca

SEQ ID NO: 381368 - DNA, 586 bp, Homo sapiens
tttcactatataatgagataaaattgttataaaatgataactggaaaggtccataatcactgcatctagactaatttctttaaaaaaattataaaaagagcctttggattcaagaktccaagtttggttccagctccaccattcttaataatgtgtccttggataaatagcaatcattttaagctgcatcttctttatctaagaaaattgagtggggtggggcagttggacaaatagataatgacagttatccagtattatagtaaaatacagagtattttcaccaccctaccaccctaggaatcttctgtgttcctcttatttgtccaaacccatggaatacacaacactatgaatgaaccctaatatagaccatcgacttcaatgataatgatgtgtcgatgtgggttcatcaatagtagcaaagataacaatctggtgggggatgttgataatgggagaggctgtggatatagcggggcagggtatatactggaaatctctgtaccttcttctgaattttactgtgaagttaaaacttctctaaaaaataaagtctttttttaaaaggatgccatataataat

SEQ ID NO: 381369 - DNA, 557 bp, Homo sapiens
atgtaattttgaccagtttaaaaataatcacatccagagggaaaaggtaccatgtaaatagaagactgtttagagagccatatcccagaagggctaagggggaaamtaaaataaatggaaaaggaagtaatcaagtctctaatagctggtaaaactaataaaccaggatgcccttgtgactcattagagtaaacaagaggaaatgaaaacctgtatatagatagtccagtcaacagttttaatccatggaaattgaagctacagagaatattgtaaaataaatgtacagaaacccctgacaaaccattttggattacaatgtcttcaattttcctagaccttatttgccatgttatctctcttctaccatctaacactaatatgtaaaaaaatgtgagaaataaaaagacatgaaatcaacatttataggccaagtaatctccaaatatatattacactgggagcctcccatttttgccagtacttgtggccattttatgtattccttcaataactactatccctaaagtcacactcattattccatgtcaccatgt

SEQ ID NO: 381370 - DNA, 535 bp, Homo sapiens
agcttatgcaaatatacagaaaaagatactagttggacttatggagacacatttttttagtctcatttcttctttcctctgctcaatgtcttacattctgtgtatttgtttgtttatttcttcatcccttttatgcaagtctatacacttacaattcaagcttaggaccctcactggaagactccacatcttargatcacttgaataagctactgttattgatcagttgtactcctggcctctccatcacctattatttgtacatagggtggcattggtatgccaataaaactttgataaaaatattgaacaattgattgagttattgaagtattaatttaatggggattttttagactaaaaatgccacataggctgatgggaattttcctgtggggtttttacgtattttatattttgtagaatggcagtgagagactacattgcaaaactgagaaactgcccattttaaacataataggtaatctagtaggaagctggatagataatatgaacagtgatggttgtgaaagat

SEQ ID NO: 381371 - DNA, 528 bp, Homo sapiens
ccttcaggctgaccaccacatggaaactgccaaggctcatggtttgcactctttgaagcaatggtctgagttgtatctggggcccttttagccatgctggagctgaagtggctgggatgcagggaasagtgtcgtgaggctgagcagggcagcagagcactgggcctggactatgaaaccattcttctctcctaggcctccaggcctgtgatgggaggggctgccacaaaggtctctgaaatgccttcaaggccatttccccattgtctgcactgttagaaattgccttccttttagttatgcaaatttctgcagcctgcctgaattactcccctgcaaatggatttttcttttcttccacctggccaggctacacatttttcaaacatttatgttctgctttccctttaaattaaattccagtttcaggtcaagtctttgctcatttaaatgagcatatcttgttagaagcagccaggctacatcttgaacactttgcttcttagaaatttcttctaccagatatcc

SEQ ID NO: 381372 - DNA, 528 bp, Homo sapiens
ccttcaggctgaccaccacatggaaactgccaaggctcatggtttgcactctttgaagcaatggtctgagttgtatctggggcccttttagccatgctggagctgaagtggctgggatgcagggaacagtgtcgtgaggctgagcagggcagcagagcactgggcctggactatgaaaccattcttctctcctaggcctccaggcctgtgatgggaggggctgccacaaaggtctctgaaatgccttcaaggccatttccccattgtctkcactgttagaaattgccttccttttagttatgcaaatttctgcagcctgcctgaattactcccctgcaaatggatttttcttttcttccacctggccaggctacacatttttcaaacatttatgttctgctttccctttaaattaaattccagtttcaggtcaagtctttgctcatttaaatgagcatatcttgttagaagcagccaggctacatcttgaacactttgcttcttagaaatttcttctaccagatatcc

SEQ ID NO: 381373 - DNA, 582 bp, Homo sapiens
gaaggagaggcaagtgaggtagcctcctcagctgggatcagcagggggcctctgtggggaaggagaaaggataagkgagtgaacttcagaggttcacatccccactgcagactcctgcatcctaattgtgaaaaagactttagatcctcatggactcaaaggctaacatagggagctgcttaaagaccgtgcgaggcattgcttcaaagagggagctcatgctgggtcccacatacctcttgagccctagggagctatagcaagatgccatattgagaacccagccaccaccagactgcatcctactctggggcataacagaacctgcatctccacatctctggagacttattgacatgccctgcctacagccacacaccacagctggctgctgccttcaaggataaaggtgagccattggcaaagaccctgttgccccagcagtaaagccactatgcatttccatatgtactgacatcagatttccccacctgcagcagctacagctatggatgcaaaagtcagggctgaagtgcaagtaaagtgtactccccagccacctgcatatggctgctaccactg

SEQ ID NO: 381374 - DNA, 595 bp, Homo sapiens
tggattatgttggaacaattgattacatgattacatgagaaaaataagtaaatttgttctctatatgatatcatataaaataaattttatttatgataaaactgagtgacaacactccagagatagaacactgtatcaggtcaaactcaatcctacattagtgtctgataaaggtctataaatgaaaatccttctcctgctgctaaaatattctcattttatgttaaggagagaaaggttgwgagaggtgattaggatattactttatgattccatgcatatgtttttaaattcatgacactctaggaaaactgtaaatctacttgtgagcatttgtagttacaggtgaaattcagatagatccccattagtgaacatctgttttgtttttacaacttttttccctttcatctgatagatgaacctctatttcataaataggactgactcattgtgtggttctgatgtgtctcctaccacaaaattaggagtgtgtcatgaaatttcccaaactcattgctttggacatgggcatatgactcagggtggatcaattactgtcctttcgagacttagtctggaagagatattggag

SEQ ID NO: 381375 - DNA, 438 bp, Homo sapiens
ctaatgttttaaaaataagaaatgaaaactcattcatttgtgcctcatarcaacttgatcaggttgctttatttttatccccctttcacaattgaggaaatggaagcaaagggaggtaaagtaacttaatcaaggtccaatgtggtagagacaggactgtacacccaggacatctggctataaagaacctgcttttaaccactattctacgctgattaatagattgctgcactcactttattgcaaacagttaaacttcctggaactacatctacagaaacctttcattctggaagagagcctctgcttaatttaaagactcattccagagttttccctctccatcaagcggtagggggaggcagaggcttgcctcccatggtacatttacactgcaacttttagagaaattatttgctgattcaaaatggaaacgaa

SEQ ID NO: 381376 - DNA, 524 bp, Homo sapiens
taaacacatcttggcttgcaaactgtaattaatacctgactggttgtgaaataggaaaagtatttgtgaagtacattaaaagaaaaatataagcaagtgataaatgtatcacagggaaagtgacatctgagtaatgtttggaagatgagtgaaagcttccttagcagaggaattacacatgcaaagttagagataactctaacaccatactttgacctagatatcatcaraaatccattagtgtagcactggaatgtaaaaattcacaagcaactgatcataagagatgtgaagctgagagaaaagcaagatgtattgaatcagcaggataatatttttcagtagcagtggttctcaaagtatggtcaaaggactcctagagattccaacactttttcgggggatccacaaggtcagaagtatttttcttataataataaggcattatttgcttttaacactcttcttctcacacaagaatgcaggggaagtttctaaaggctacatgacatacgacatgacaa

SEQ ID NO: 381377 - DNA, 593 bp, Homo sapiens
actatgggctacagctgatcatgatgtcactgtaagttcatcaatcattacaactgttggacaatattgataatggggaggctacacatgtgtgggagcagtaggtawacaggaaatatctttactttccactctgttttgctgtaaacctaaaactgctcaaaaaattaaagtctattaaaataaataagtgtaaataaaatctctgtattttctactcagttttgctgtaaacctaaaactgctcaaaaaattaaagcctattaaaataaataaataactacaaaaaaagaatttatcttggtttttatttactaagttagaaattgtagtaatttcttgtaagatttaaaaacaataggagtaaactcaataacctcagtaatgtcatcttcctattaaaaagaaaataacaagaagactaagaggcaggatgataaacttttttttactcatgatcaatgttttaagaaaggggactaaattaggcaaaaattatcatataatactttgttgaaacaaacaccttctaagaaccatatttgattaggttaagtgaaaaaaacaaaataggatttccactgttgcaatgt

SEQ ID NO: 381378 - DNA, 297 bp, Homo sapiens
ctatgaagtggaggttgcawtgaactgagatcttgccactgcactccagcctaggagacagagcaaggctctgcctcaaaaaacaaacaaaacctattattcttttagggttgtatggcctaatgttggacaagtagcaagcaaatattatctgaccctccccacaaaaaaaatattaattgatgacattttagagccagtaccaggacaattattccagtgttaagtaacatggctatatatttgctgatgcattttaggtttgacagaatgagtcaaatacacagagaatctcta

SEQ ID NO: 381379 - DNA, 297 bp, Homo sapiens
ctatgaagtggaggttgcaatgaactgagatcttgccactgcactccagcctaggagacagagcaaggctctgcctcaaaaaacaaacaaaacctattattyttttagggttgtatggcctaatgttggacaagtagcaagcaaatattatctgaccctccccacaaaaaaaatattaattgatgacattttagagccagtaccaggacaattattccagtgttaagtaacatggctatatatttgctgatgcattttaggtttgacagaatgagtcaaatacacagagaatctcta

SEQ ID NO: 381380 - DNA, 297 bp, Homo sapiens
ctatgaagtggaggttgcaatgaactgagatcttgccactgcactccagcctaggagacagagcaaggctctgcctcaaaaaacaaacaaaacctattattcttttagggttgtatggcctaatgttggacaagtwgcaagcaaatattatctgaccctccccacaaaaaaaatattaattgatgacattttagagccagtaccaggacaattattccagtgttaagtaacatggctatatatttgctgatgcattttaggtttgacagaatgagtcaaatacacagagaatctcta

SEQ ID NO: 381381 - DNA, 297 bp, Homo sapiens
ctatgaagtggaggttgcaatgaactgagatcttgccactgcactccagcctaggagacagagcaaggctctgcctcaaaaaacaaacaaaacctattattcttttagggttgtatggcctaatgttggacaagtagcaagcaaatattatctgaccctccccacaaaaaaaatattaattgatgacattttagagccagtwccaggacaattattccagtgttaagtaacatggctatatatttgctgatgcattttaggtttgacagaatgagtcaaatacacagagaatctcta

SEQ ID NO: 381382 - DNA, 632 bp, Homo sapiens
tcctatgtcccatttgatttcactttaagttttcacctttacaaatgcattacaggccaatcccataatattttcattgctctctcactttagtaaaaaggcaacagagtaactcttcataaaattagcacacgactgtgggaatataaattgcagaaatgaagtctcctgataatgcacaagtaatagaatggagaacatttttgtttatgtgttttctcaacttcagatagctaatggagactttcttttttaaaaaaattttaatagtgacatttttatgctgtagaatattagacttgtacagagattactttcagttttgttacttttcagttgagatttattcaaatgcagaattcatggcagtatttgagattttgccgcctaacagatatgagacattaatttgtacttcattaatttagaatttctgaaaatttaagtctagtatgattttttgacagtgaaaaagaaggtatgctaaaaaaatagtgtacatactaagtatgtaaagtatacatatatacttatgtatatactaaggaaaagtatacatacttagaaatgagcaggtttcaamattttaagaatagttgaaaatgttcaaagcattatttttcaataacttt

SEQ ID NO: 381383 - DNA, 619 bp, Homo sapiens
taaatttattcatgccagaagaaaaatggacaggaacttaaaaatacctttaaattttgaaagacataatcaaatgaagatgattgtggcatcgtatttactactataagtaaaatttatatgaatattttggtataagaactgacagaagaaaaacatgtttattttagaagtgaactcagtaattcagaagatacataatgggctctatagggtaggttatacmtcttttttactcatttctgaaggtacccgactatgacaggagatgatatggtaaatttatgaggaacataactttgagaattaaaccaaattgggttcatattcttgcttctctaaatatttggacttggagaaattactttgaagccctattaagtgtgtcaaacatttgaaacatttattaaactatgatgatacattgaccttgttattttgaggcttcaactgaaatgatataggtaaaattcttattctatagtggattctcagtaaatgttaactatttgtatggtaagatgttttggatgaggtagtctataaatagatatttgttgagaatactcggcattaattttcttgggggttttatttcctttatcaaatatatattatt

SEQ ID NO: 381384 - DNA, 619 bp, Homo sapiens
taaatttattcatgccagaagaaaaatggacaggaacttaaaaatacctttaaattttgaaagacataatcaaatgaagatgattgtggcatcgtatttactactataagtaaaatttatatgaatattttggtataagaactgacagaagaaaaacatgtttattttagaagtgaactcagtaattcagaagatacataatgggctctatagggtaggttatacctcttttttactcatttctgaaggtacccgactatgacaggagatgatatggtaaatttatgaggaacataactttgagaattaaaccaaattgggttcatattcttgcttctctaaatatttggacttggagaaattactttgaagccctattaagtgtgtcaaacatttgaaacatttattaaactatgatgatacattgaccttgttattttgaggcttcaactgaaatgatataggtaaaattcttattctatagtggattctcagtaaatgttaactatttgtatggtaagatgttttggatgaggtagtctataaatagatatttgttgagaatamtcggcattaattttcttgggggttttatttcctttatcaaatatatattatt

SEQ ID NO: 381385 - DNA, 467 bp, Homo sapiens
gtttagcttatatggttttagaatatataaatgccagtgctttaaaatcttaaaatcagatttatatatttgtaatgggcaatttataaccttctgtctcagaagttactttttgagagcagattcagtgattccaaactcttctactagctccagactaatgatgaagatacatagttatctctgaggttatggatgggytagggaagaagaaaaagtgggcatactgatattttgaccctatttgcaagaagagatgaaatattataatgagcaggtaagatttttaagaaaaacaatatttaaaaatgcagtgtctagactaatatagcacttttggataaaaatgctcacagttgtgtagttgtgtaatttttctaatcccctttgccttctagcataggaccatggacaatttatcatgtaattaattctttaaatttatagtatatgtataataataaatt

SEQ ID NO: 381386 - DNA, 592 bp, Homo sapiens
attcaaaaagagaaaaagaaaaatggaaagaaatttttttaaaaagaagtaaagaagtaagaggaaaaacaaaattagcacaggccagaagtacaggggaaattgaaagcctctgcttgtgagagggagttgatggtctaagaagatctgagttcatgcatcagccttagaagtccctgaaatgtgctcataaagatgggaagcactaccttgaactagcatgaggtggtaggctgaatctgagagacgtatatcatrctccaaagtggtattttcctgatttaaaaaaaatttaaaaggtgtaaaaactacttcgatgccttctcctgcctcttacttaggcgagtaggtgtttaaaaatatacctgaaaaaacttacatcttgatccatgcacagtgtgaagtctgaatttggaatatatttttgatgctgaaatcttaatctatgaaattaaaataaaatcagtctgggaaaggtgagacaactaaggacttcagcaaaaagaaaaaagaaaaaaactttttaccaaagttcgtacaatccaaagaacaacaggctacctaaagtaaaatatccaaaaaaaaaaaaaat

SEQ ID NO: 381387 - DNA, 522 bp, Homo sapiens
acaagtggtgccaacattctgaagagaagaatatcatagaaaattgagctgacattctacatatacatttttccaagaggtatttaccaaaaatgggcacagcaagagattgaaaatccaggcttagctgagacagaaccactactgaggaacaaaaagacatcagaagaactttaggcagtctccagtgctagagataaagttggagatttgagcagcataaaacaagctgtcagatttacctttattgctcaaaatctgatgtgacaagaggtagaaggttacaaagctaagttgaatgcacactgaaagaagggagctttctaccatcagttaacactgaagagtcaaagacttatctttaggrtccagctaagaaaaggtcccagggaatattccagacttttgttgcaatttgttgcaattcctaactagctatccccaaggaaaatggctaaagggagagaagggaacccttaaaaaacataaccttacctcaatccagttcgaccctgattaatt

SEQ ID NO: 381388 - DNA, 578 bp, Homo sapiens
catgcaattataaaaaaaataaaaattttaaatataatacaattttaatagcataaaaatcaaatatctaaaagtaaatgtgcaaaccagtacactgaaaacttcatgagattaatgataggtatcagtcaaaatgttaactagaagaatatagcacattcatgaattggaagtgtattttaataatataaatttccccaaattcatgtatagcttttatgccatcctaatcaggatccaagttggtgcctgtgtgggtacttgtgtgtctacatagaagttggcaaactgtttccaaagtatatataggaatgtaaagagccaagagtaacaaagacaatctcagaggagaaagctggagaacctacattaccaggtatcaagacttattattaactactacaatttacaaactgttttattgacaagcctaaaaaatattttaaaagtgtttaaatagggtctagaaacagataccatgcaaggtcatataataataaagcaayggcgcaatacattaggtaaggaagataattctaaaaatggtgctgaatcaactaggcagtcacattaaaaat

SEQ ID NO: 381389 - DNA, 596 bp, Homo sapiens
ggatgagggaattggggagaagagcatgatgaaaaaagggtgcaaggaaaatactggagaatgttaccatacgaatgtgtgcayaagatgaaagaaaaattaaactggccaacaaaagttcaaggaatgctctaatttaaatattagatattctagcataaaatttgcaattcaagagaagctggttctcctaaatttacatctttataaggtagacagacaggaatttatattttgtctttggcacttatcaatcgtgtaccattagacaaattatttagcctccccacaacttagttatcccatctgtaaaatggggtgaagactagtacttgcttataggatggtggtgggcactacctgaaatgctgtgtgtatatggctcagcacagtgctaggtacatagtaggtaggcaatgagtataaattattttcggtttggattctatgtctatgcagaggtctcctcaagcttttgcaacttgtcatataattggtgtctatttttatgtcttttagatggtcaaaaaaatagaccctctcaccaaagtcaaaaagaggtcagattgagcctgaataatagtagcacacttatg

SEQ ID NO: 381390 - DNA, 614 bp, Homo sapiens
aagacataatctatgtaagaaaaaattgatgccagacttcataaaattaaaaaactgcttggcaaaaaaaacactgttaagggaatgaaaagacaagccacaggctaggagaaaatatttgtaagacttttctgagaaggaacttgaatccaaagtatacagagaggctgggtgtgatggctcatgcctataatcttagcactttgggaggcctaggcaggaggattgcttgaagacaggagttggagaccctgtctggacaacaacacgaaactctgtctctataagaaattaaaaaatatatttttgtaaaaggaaagaaaataataaaaaacaaactatagaaagaattattaaaatcacatagtaagtaaaaagtttcatttaaaaaatggacaagagatatggacacttcaccaaagaagatacttagatgccarataagcacatgaaagatgctaaaaaccatatatccttagagaaatgcaaattaaaacagcagtgagttcactacacacctattagaaaagctaaaatccaaaatgctgtaataagtattgtatatatgctaaaggcacccggaaaaagcttagggagccccgtagagtgagcag

SEQ ID NO: 381391 - DNA, 573 bp, Homo sapiens
tcaccatgtgtacctgagggagtatcagcatgtttaacatgggttagggccagagagtaaggtatatgcctgctaaggaattgtaactttatgttctagggctctgcaaatctaacttgaggtaaagtgaattgacatttagctttcagccaagcacatgattaagtctctcatgatctatctatatctatatctacatctatctatggccaagatggaaaaatataggctctgcagtggcatattggatgtcatgtgatcatcttcagatattagaagaactstcaggtgaaagagggattttatattttatgcccatatccagaggaaaagctggaatcaataaattaaaattacagggaagcagattacttctttgggttagaaaaaaaagagaaatttctaggcaatggctaataattatgttaataggaaaaggaaatgcttcactgcacacatgttcttggtttggcagaggttgtcaatgttatcattggttttactagtgatatgttttggtttgatttttctgagctccaaaaattgttaaagagtggtacttttttagaactc

SEQ ID NO: 381392 - DNA, 666 bp, Homo sapiens
gtttgctcttagaggaaaaataagaggaataagtaatgcgtgagctttatcaatccatcatatatatatgtatataatatacatgattatatatctgtaatgaaaataaccaaaaacaagtcaratagctgcttaaatacataagaattcatctcaggattctaaaataaggattggcaaatttacacttaaattaacacttaaccataatattattagatgcctaaaaaaagagatcgtttacctgcacctcaattcacagaaagggatcctttcggtattatacagtgtttaacataaagaacaaaacacacgaaatagtttggattatccagattactgttcagtaaatacttactcctcctacccttcaccacccctctgtgggcatggcgtatttccctgtcccatggatttggggttccggcacatactgactttagccaatggaaccttagaggatgataggcatagaggccttaaacttgtttgcacagttaagtttggctcttgtgttctcgctctttacacaggaactgctgagtagacgtactggtccaagaacagtgaaagacatgtaaagcagatgtaaccccaaacaacagctgaagaagagttgcccaactccgccagcctagatcaaactgcagtcaaatgtacaccctt

SEQ ID NO: 381393 - DNA, 617 bp, Homo sapiens
ttggattttataataatagtgatggaaagttatagtagtgctttaagagagtaacatgattcttttttgttttcaaaaagatcatcttagctgttaaacagaatagatttcatggcaggggcaggggcagggcagcttgagaggaagcacagagattggtaggaggctattgaaatctatgtgcaaaacgttgacttggactagggtggcaaccataaagatgaatcaaagtgataagaatagattctagaggtgggaggcaaatgaagaatcagggattataacgaagttttggtttaacaattgagtggatagtggtcattttaagatgggaagactaasagaaaaacagattttagaggaaaaatcaacaattctgtttcaggtatgttaagtttcatatgcctgtgaaacaactaaatgaagttgtctagcaggtacttgggtacttgagtctaaaggactgtggagtggtcagagctctacatacacattttatcatccctagtatacaccatataaaaacgactaatatccagaagcctatgttcacaaaggtaatcaacacaagagaggctaccaaccatttaaaccggagtatctgtgcattttccagg

SEQ ID NO: 381394 - DNA, 617 bp, Homo sapiens
ttggattttataataatagtgatggaaagttatagtagtgctttaagagagtaacatgattcttttttgttttcaaaaagatcatcttagctgttaaacagaatagatttcatggcaggggcaggggcagggcagcttgagaggaagcacagagattggtaggaggctattgaaatctatgtgcaaaacgttgacttggactagggtggcaaccataaagatgaatcaaagtgataagaatagattctagaggtgggaggcaaatgaagaatcagggattataacgaagttttggtttaacaattgagtggatagtggtcattttaagatgggaagactaagagaaaaacagattttagaggaaaaatcaacaattctgtttcaggtatgttaagtttcatatgcctgtgaaacaactaaatgaagttgtctagcaggtacttgggtacttgagtctaaaggactgtggagtggtcagagctctacatacacattttatcatccctagtatacaccatataaaaacractaatatccagaagcctatgttcacaaaggtaatcaacacaagagaggctaccaaccatttaaaccggagtatctgtgcattttccagg

SEQ ID NO: 381395 - DNA, 375 bp, Homo sapiens
tatatgaatgagttatgaattgtttatttttgtgcttatgaatatcccattattccaacattacttgttgagaagactgtcccttctccatcacatacatgtgggtctactcttggactctttattctattgatgtgtttgtggaacttgacaccaaaactatactgtcttgattactgtagctgaataaaaktattagaacttttgacattaggtagtattagtactctatctttttttcaaagttgttttggctattctagttctttgcatttccatatgaaatttaatattactttgtcaatctctacaaaaaaagactcctgtgattttggtcaggattattttagatctacatatcaatttgtgcataac

SEQ ID NO: 381396 - DNA, 375 bp, Homo sapiens
tatatgaatgagttatgaattgtttatttttgtgcttatgaatatcccattattccaacattacttgttgagaagactgtcccttctccatcacatacatgtgggtctactcttggactctttattctattgatgtgtttgtggaacttgacaccaaaactatactgtcttgattactgtagctgaataaaattrttagaacttttgacattaggtagtattagtactctatctttttttcaaagttgttttggctattctagttctttgcatttccatatgaaatttaatattactttgtcaatctctacaaaaaaagactcctgtgattttggtcaggattattttagatctacatatcaatttgtgcataac

SEQ ID NO: 381397 - DNA, 611 bp, Homo sapiens
ttcttattgtaatatgatacttcatttttttctaggttacatttagtaacactttttgaaaatgatcgtcatttctctcacctctcatctttggaacgggagatgacttttcgcactgaaatggttaggtttcttcttctaatgaattaatttgtggtttaagaatagcgagactatgaggtagaaatgtattaggaattgaaatgaacttctggtcaactgcactgtttcataagctataacccaggtttattatttaaatagtaaagtgtttgagattatttttctgttacttcattatctctcaccctttcctaatgcagacttctttttaagataataaagatgaattataatagctgaggaargaggacaaagaaagcactgaagaagtgataaaagggaatgaaatgagatgttatcagaaattgccttctctttggctacagttagattccatgttttacctgggccttttaatgatgacgattattatttggctttcttttgatttcaagataatctcttttaagagataactttttatataattttaaaataattttctgtttttcaatacttaatctttaaaatggagttttgtgctgtac

SEQ ID NO: 381398 - DNA, 594 bp, Homo sapiens
ttttgctactctttatataattttgttccttacttttctcctccatatkatgtcatatacatcttccatattggcatagttaaaaacatgtattcagatatcattcacatactataaaattcaccctttaaaggaatataattcagtgtttttcagtatattgaggttgtataaccattaacactaattccagaagtttcagccccccaaataaacttcatacctgctggcagtaactacccatttccctctttctccaactcctggaaaccaccaatctattttctctctatatagatttgtctattctggacatttcatgttaagtggaatcatatgatatgtagccttttatgtctggcttcttttagttagcacagtgttttcaaggttcaccactctgtagtataaatcagtacttcattttttttgcttaggagtattccattgtatggcttagtcttttttaaacaatatttttagtgaatacatagtattggaaaggtggctataccatcattaatattattctatagaaatttaaatttttttttctcttacagataatgctgaggagaattacttgtgtgtgtg

SEQ ID NO: 381399 - DNA, 594 bp, Homo sapiens
ttttgctactctttatataattttgttccttacttttctcctccatattatgtcatatacatcttccatattggcatagttaaaaacatgtattcagatatcattcacatactataaaattcaccctttaaaggaatrtaattcagtgtttttcagtatattgaggttgtataaccattaacactaattccagaagtttcagccccccaaataaacttcatacctgctggcagtaactacccatttccctctttctccaactcctggaaaccaccaatctattttctctctatatagatttgtctattctggacatttcatgttaagtggaatcatatgatatgtagccttttatgtctggcttcttttagttagcacagtgttttcaaggttcaccactctgtagtataaatcagtacttcattttttttgcttaggagtattccattgtatggcttagtcttttttaaacaatatttttagtgaatacatagtattggaaaggtggctataccatcattaatattattctatagaaatttaaatttttttttctcttacagataatgctgaggagaattacttgtgtgtgtg

SEQ ID NO: 381400 - DNA, 628 bp, Homo sapiens
cttttgaaactaagttgcatgcttcctgagacttctaaacactctgtaagcctattctgacaattagaacattatttttataatcccaacatctttatcacagctaagaaaatttataagaatttgttctttatatcacctaatattcagtttatattaaaattttcaggatagaccaactgcccctaaaccccctctgaactaggatccagctaaaattcatggtttggatttattacttttaatttagaaaaatctttccacatttttttctaaacacctcatttaattctgacactgtatgccttgaagaaggccccacgagtcccattttgtagaattagaaactgaggtcagagtggttaagacattcacccaaggtcacaratctggtaagtgacagaaccagtacaaggttttgatcttctgggttttaattcctcctttttggtggcatcataatagattgcaaggccaaggaagtggtgaccactgacagtgtcatcgaaaactgactttgaaaatatgggtaatgaaaatagctgaagataataatacgcacatttcaacataagttgctcctttggcaaaggtttatttctaattaatatcataaatgggatcaaaa

SEQ ID NO: 381401 - DNA, 622 bp, Homo sapiens
gtgatgccagattataattacatgggtttatatatgtgaattctctaaaatgttgccagatgatgttatgtaaaaatgttaagtataaattgggagctgaaataatgcccagagaaatatttgttatccacactaaccaaaattttgaaaaagsgtacaaaatattattagaatgaagaagatctagcattcgatagcacaacagggtgactatagtcaataataatttattgtacatttaaaaataaaagagtaaaactggattgtaacacaaaggataaatgcttcaggggatgagtactccatttccctgatgtgattattacacattgcatgcctgtgtcaaaatatctcatgtaccccataaatatgtacacctatgtacctacaaaaattaaaaattaaaagagtaacaaaacagaggaaggaaagaaacagaagacaccatctgaaaaggcagagatccagcatacagagaagatggggagttagactttctatgtcccttcctaagtcatacgttcactcatgattcagttatttatccagtgcttctttcgcatctcctactatgttccctgttctctcgtaggtgctgggaatacagtagtatgcaaaaggg

SEQ ID NO: 381402 - DNA, 622 bp, Homo sapiens
gtgatgccagattataattacatgggtttatatatgtgaattctctaaaatgttgccagatgatgttatgtaaaaatgttaagtataaattgggagctgaaataatgcccagagaaatatttgttatccacactaaccaaaattttgaaaaagcgtacaaaatattattagaatgaagaagatctagcattcgatagcacaacagggtgactatagtcaataataatttattgtacatttaaaaataaaagagtaaaactggattgtaacacaaaggataaatgcttcaggggatgrgtactccatttccctgatgtgattattacacattgcatgcctgtgtcaaaatatctcatgtaccccataaatatgtacacctatgtacctacaaaaattaaaaattaaaagagtaacaaaacagaggaaggaaagaaacagaagacaccatctgaaaaggcagagatccagcatacagagaagatggggagttagactttctatgtcccttcctaagtcatacgttcactcatgattcagttatttatccagtgcttctttcgcatctcctactatgttccctgttctctcgtaggtgctgggaatacagtagtatgcaaaaggg

SEQ ID NO: 381403 - DNA, 423 bp, Homo sapiens
tatggtgaaaaataaagtaggaaagagagacaaggaggaaatacggtaagggactgacattttgaaatagggggctcagaggaggcctaaatcaacaagattgtgatatttaagcaaagacttggaggctgaggaatctgaggaaagagtatttcaggcaagggaatgcagatgasaagtctctgaagcaaaacattcccttggggctggaatggagtccagctgcagccacagcggggatgaaagcagtcagcgaactgccccaagtggagcagcttctgtgacctctccactttggggtctgagtgggcaccgctcctacctgttctctgccttgtgagcacctgggagagactcttagggtgtaagtgaggaggggtggtagtggggctctatctcttgtgccatgaccctgaagaaaag

SEQ ID NO: 381404 - DNA, 423 bp, Homo sapiens
tatggtgaaaaataaagtaggaaagagagacaaggaggaaatacggtaagggactgacattttgaaatagggggctcagaggaggcctaaatcaacaagattgtgatatttaagcaaagacttggaggctgaggaatctgaggaaagagtatttcaggcaagggaatgcagatgagaagtctctgaagcaaaacattcccttggggctggaatggagtccagctgcagccacagcggggatgaaagcagtcagcgaactgccccaagtggrgcagcttctgtgacctctccactttggggtctgagtgggcaccgctcctacctgttctctgccttgtgagcacctgggagagactcttagggtgtaagtgaggaggggtggtagtggggctctatctcttgtgccatgaccctgaagaaaag

SEQ ID NO: 381405 - DNA, 423 bp, Homo sapiens
tatggtgaaaaataaagtaggaaagagagacaaggaggaaatacggtaagggactgacattttgaaatagggggctcagaggaggcctaaatcaacaagattgtgatatttaagcaaagacttggaggctgaggaatctgaggaaagagtatttcaggcaagggaatgcagatgagaagtctctgaagcaaaacattcccttggggctggaatggagtccagctgcagccacagcggggatgaaagcagtcagcgaactgccccaagtggagcagcttctgtgaccyctccactttggggtctgagtgggcaccgctcctacctgttctctgccttgtgagcacctgggagagactcttagggtgtaagtgaggaggggtggtagtggggctctatctcttgtgccatgaccctgaagaaaag

SEQ ID NO: 381406 - DNA, 569 bp, Homo sapiens
tgccacaatcaaaatgcatattattttttgtgtagctggatcacaggcatataaggaaatggaaccagagaaagtattttgggatctgaatatgaagagctgatgtgcttgcttggattttatgttctaggccagtagttcttatccttttggagattcatggatacctttgagaacctgagaaatgttatgaaccttctccctaaaaattacacacattgccagagatcaaaaatttccaaaaaacttccaagagttccaaacatcctgtgaagttcatttgtggacaagagtttacagatacctggagtaataacctaagttttagggaaaaggagttatcaaatgcaaaaaaaaattattttttgttyaaaattcatattacttgttatctctgtcttagtcattgattcatctacaccttaccataaggactgctgatctttgggatcattttgtggcagggactgttatctaattaatatttattctttcttctgattttattcaaaatgtgcccaactaaaacactacatttcgcagccttctttgcagctaggataggtttt

SEQ ID NO: 381407 - DNA, 440 bp, Homo sapiens
tctttcagaaaagcaaaatgtttcactgtgttacttgggaaattatttgtcttgtgtgtgttatgtgaaagatatttaaatcttattaagtgtgctttttagagacgtaactattacactcttttttaaaaaacaaattaagtgcatgaatttagcagttatgtgcaatttgtgggaaaaggaatacaccttagaaaaacaccatccagaatttgggcccayggacagcaaatcgtttataaatgtacaaaaaatatcttccaagatattgaaacaagttcttttgcatgtgaaaataaccacctaattctttcctacgttcatataaaattttgttaatatgacttatgcgtcagacttaaaggacatcagcttgaatgtatgttatagttgtcgttttattagaggttgctcagctcacttgactttcttcttaatga

SEQ ID NO: 381408 - DNA, 440 bp, Homo sapiens
tctttcagaaaagcaaaatgtttcactgtgttacttgggaaattatttgtcttgtgtgtgttatgtgaaagatatttaaatcttattaagtgtgctttttagagacgtaactattacactcttttttaaaaaacaaattaagtgcatgaatttagcagttatgtgcaatttgtgggaaaaggaatacaccttagaaaaacaccatccagaatttgggcccatggacagcaaatcrtttataaatgtacaaaaaatatcttccaagatattgaaacaagttcttttgcatgtgaaaataaccacctaattctttcctacgttcatataaaattttgttaatatgacttatgcgtcagacttaaaggacatcagcttgaatgtatgttatagttgtcgttttattagaggttgctcagctcacttgactttcttcttaatga

SEQ ID NO: 381409 - DNA, 546 bp, Homo sapiens
tttactataaatcctaagtcatttactaaaataacaaaagaaagttatatctaataaaccaacaaagaacatgaaatgaaatcatttaaagaaaacccaaaagaaagcaaaaaagaggaaagagataaaaaagaacagatgggacaaacagaaagcaaatagccagacttcaacttaactatatcaataatcaccttaaatataaatgcactacatatctcaaaaagcagagattgtcagtttgaattaaaaagtaagacctgattatatgttgcctacaagaaatatgctttctatgtaaagacataagttgaaagtaaagcagtgaaaaaaagtagcatgttaacaataattttgaaaaacttaagagttgtattaatatcaaagtagatttcagagaaaagaattttactagggataaagtagataatttcatacyattaaagggctccattcttcaagggtaatatacagtcctacatctttatgtctgacagaagtataaaaaaaacagacaaatatacaatcatggttggaaattttaat

SEQ ID NO: 381410 - DNA, 527 bp, Homo sapiens
catcaccgcttgcccttcacgcgcttcattgggagtgcagcccccaccccgagcgcgcagctccacgcagcctctccacactctccccagcgcctgcagcacccccagtgcgcacagctctgccagtcgcttccccgggcgccgcccctgcaccacttcggcccataaccttgcggcgactgtctgaagaacttcccgtggtttcattcttttcttcgggtttagtcttagctgtgacattttaaccaaaagattacacgttaattaacgaggtattaaagggaaagatctcagctgaaagaaatgactgtaggaagtgtgtcagggaagccaacggaaccgccggcccgccggcggtgcgcccggcattaggaacgtctctrctcccctacgatcgctgaggtatcggacagtcagtgcccgttgccaacgcagagggaacgggccgagactgcgggcaacaagtggcagagccggcgtgagtccggtgggtctgatcccagagcctcaggttgacgccacttcct

SEQ ID NO: 381411 - DNA, 481 bp, Homo sapiens
agcacatggacctctgaattgtggtcttttcatttctatcatcattcctgttatgtttgtgggaatggtgggagggttaaagcattgtcaaaagccttagtttattctttgaatctctgtggtgcttttgaaaactattgttcaatcaacttaatctgggatgaggtaatatatacagtagttcaatactagaaatcattgcctggtgaccagagccagtgattttaggtacatgagtttaartataatttcaaatttaaactttaatgtaaccaagaaggtatctctttgtgaaatctcccctactatcctagaaatttaatttctcctttctaattctgtaccttgtataactaatctggcacatatcttgatatactgtaatttttagggtccactattgtactgcacattccttaaggaaaagggctggacttcatttattctcaagggcagcagggtggagaatgagtaagacaca

SEQ ID NO: 381412 - DNA, 481 bp, Homo sapiens
agcacatggacctctgaattgtggtcttttcatttctatcatcattcctgttatgtttgtgggaatggtgggagggttaaagcattgtcaaaagccttagtttattctttgaatctctgtggtgcttttgaaaactattgttcaatcaacttaatctgggatgaggtaatatatacagtagttcaatactagaaatcattgcctggtgaccagagccagtgattttaggtacatgagtttaaatataatttcaaatttaaactttaatgtaaccaagaaggtatctctttgtgaaatctcccctrctatcctagaaatttaatttctcctttctaattctgtaccttgtataactaatctggcacatatcttgatatactgtaatttttagggtccactattgtactgcacattccttaaggaaaagggctggacttcatttattctcaagggcagcagggtggagaatgagtaagacaca

SEQ ID NO: 381413 - DNA, 481 bp, Homo sapiens
agcacatggacctctgaattgtggtcttttcatttctatcatcattcctgttatgtttgtgggaatggtgggagggttaaagcattgtcaaaagccttagtttattctttgaatctctgtggtgcttttgaaaactattgttcaatcaacttaatctgggatgaggtaatatatacagtagttcaatactagaaatcattgcctggtgaccagagccagtgattttaggtacatgagtttaaatataatttcaaatttaaactttaatgtaaccaagaaggtatctctttgtgaaatctcccctactatcctagaaatttaatttctcctttctaattctgtaccttgtataactaatytggcacatatcttgatatactgtaatttttagggtccactattgtactgcacattccttaaggaaaagggctggacttcatttattctcaagggcagcagggtggagaatgagtaagacaca

SEQ ID NO: 381414 - DNA, 566 bp, Homo sapiens
tggtatcagctggggtcacacatgctgttgcattcagctgagagctcagctggggctgcgacattcaagacggcttcactcacatggcacctaggctaagtgtgactggaatggctgaggactggctggatctctttctctctgtctcctggaaatccattatttaacagcacgactcttgcttccatgctggctggatcctaacacaatgaaaatggaagctgccaggtctctaaaaggacagacccaaactggcactgagtattgckgctacattttcttggccaaaacaagtcacaagtgagcccagattcaaagggaagaaagataggttctacctcttgatgggagaggcaacatgcatgttggtggccgtctttacagacaattttctacaatgtgtcctctggccacaacaattcacgtctctccgataggcaaaagatacccaacctcctttccttctctctacctgctaaagcctcatctagttacccattagacttaaactccagtctgcatccagtcctgatagctctctgtagagaataagagactttgtaaag

SEQ ID NO: 381415 - DNA, 566 bp, Homo sapiens
tggtatcagctggggtcacacatgctgttgcattcagctgagagctcagctggggctgcgacattcaagacggcttcactcacatggcacctaggctaagtgtgactggaatggctgaggactggctggatctctttctctctgtctcctggaaatccattatttaacagcacgactcttgcttccatgctggctggatcctaacacaatgaaaatggaagctgccaggtctctaaaaggacagacccaaactggcactgagtattgcggctacattttcttggccaaaacaagtcacaagtgagcccagattcaaagggaagaaagataggttctacctcttgatgggaraggcaacatgcatgttggtggccgtctttacagacaattttctacaatgtgtcctctggccacaacaattcacgtctctccgataggcaaaagatacccaacctcctttccttctctctacctgctaaagcctcatctagttacccattagacttaaactccagtctgcatccagtcctgatagctctctgtagagaataagagactttgtaaag

SEQ ID NO: 381416 - DNA, 566 bp, Homo sapiens
tggtatcagctggggtcacacatgctgttgcattcagctgagagctcagctggggctgcgacattcaagacggcttcactcacatggcacctaggctaagtgtgactggaatggctgaggactggctggatctctttctctctgtctcctggaaatccattatttaacagcacgactcttgcttccatgctggctggatcctaacacaatgaaaatggaagctgccaggtctctaaaaggacagacccaaactggcactgagtattgcggctacattttcttggccaaaacaagtcacaagtgagcccagattcaaagggaagaaagataggttctacctcttgatgggagaggcaacatgcatgttggtggccgtctttacagacaattttctacaatgtgtcctctggccacaacaaytcacgtctctccgataggcaaaagatacccaacctcctttccttctctctacctgctaaagcctcatctagttacccattagacttaaactccagtctgcatccagtcctgatagctctctgtagagaataagagactttgtaaag

SEQ ID NO: 381417 - DNA, 573 bp, Homo sapiens
caatgtaggcaggggtagctgagtgaacataggagaatttakcatcagcttaggtgagaaacacaccatgtgttgagataaagtccctgatggttaagttctctgaataaatattatgaacagagccccatcatccccaacaccagccctccttggacatgaaccaaagaaatagcttatgtggtacagagctgctaaagactgtttgttaccaagcataatcatcctgactgatacacaatacgagctatgtgcaaattcaaatgacgaccatgattttacaaacctcagttataagagaatgaatggtattagaatgcataaagagctcagatcttttgtttctgatctggaagagaagagaaaaataaataaagtagtaactaacagtcatgttgcacttactatgtgcagatcttgttctaatcactacacacgtttttactcataacaatcttatgaggtaagccctgttattatgcccatttcatggatgagaaaactgagagcatgtgcatagcttgcctttggcaatgcagcttcacagtgatgaagccaggatttgaacccagc

SEQ ID NO: 381418 - DNA, 442 bp, Homo sapiens
tatacatacatatctatgataaagtttaatttgaaagttagggacagtaagagattagcaatgtataattaataaaatagaacaattatagcaatatattgtaataaaaatcatatgaatgtggtctcttctctctcaagatatcttaatattttcagactatggttgactttgggtaactggaaccccagaaatctaactcacaggtaagggagacacttagcttattataactcagaaccaagaaagaaatgaaggagggcaagcagggagttgatggtgccaccagattgggactccaagccgctttgctcttctttytaaagcggtgtaggtaaggttttatttacttacttgtttacttgtgtattactggagagagagagagctagaatagcggagaggcagaatttttttttttttttagacggagtctcgcttt

SEQ ID NO: 381419 - DNA, 440 bp, Homo sapiens
caaattcaagaatcacccatcatcgcatgattataacttgtaatggatttttccttttatacaagttctgaacttgatttcagtcaactgaagtggtgcatccccaataatgtgaaggattttgttcataaacaaataaaaaatgaatgtgctccctaattttaaagataatatattttacttggtaaatgtatagcatgaaatcaaagaaattctagcaaatccaaaggtacccaaggtatttaaatatattgtgtttctaacartcacatttgcctaaaaaacaagggaagaactggcatatttaaaaatactcttcagtattctcattagaacagatgcacagaaaagtatctgagtaaatgaaggggagtaaatgaacctaagctaactagcttgaagaagaaatacatttctttagggcttggaaatgataaaga

SEQ ID NO: 381420 - DNA, 459 bp, Homo sapiens
taagtctcctgttgtcttccactgatgatctaggcccagtgtcccatctgtccttgatttcaggctacttggttttcttacaattcagctacctgatgggttcaagaaaagttgtgacttttawtttttctcttgctttttcttgtttttagcatggaagcaatgctttttccagctttctgcattctagggtaaagcctattctggctttaaaaaaataacttatccagggttagaaataatttgtagtgataaaaataaaaataataatctgtatggtggaaaccagaggccttaagacttaatatagaggaaattgatgaaggtctcccagaataatcacaattagtgagcaaacaatgaagaaaggatttgagttcatgtgggaaagaacatgttagtggcaaccttatgatatccatgaaatattttctttctttaccagggacatctaggaaa

SEQ ID NO: 381421 - DNA, 635 bp, Homo sapiens
cttttttaaagttccccaggtgattttgaaataaccagtcttatcactatcatttggtaaatgttttcaactactttcycatccatatgtcattagcgtcagactcttggttctatatctgcaatcctgatacctccttccaggcctttgactgtaccacctcttccccttctcccccgctcctctttctaaggggttagaatacacttaaagccagactgccattttgaaaaaatattcccctaggagacaagcacatttcaagcaccattctgagctgaattcttgatttcaccataataataataataataataataataagctgttttaaaatgatgaaaaaacatggtttagtgaaactattgagaattccataaaatttatcctacatgactaagcagtagcagccttttgtattcagtttaacccacatggaaaatgttaaatcaccatattaacaacacaatctagcagttaaatagcatgacagttaccatggaaatgtgccaaacacaggtgggctggcaatgtgtgtagggggttttggaggggggatgcattgtagattagaactgctatgcctgtttttatatttaaattacttatacagtcaacggattttaaagaaatgc

SEQ ID NO: 381422 - DNA, 479 bp, Homo sapiens
aatacgtcttatgtctgtcacctgtggggctcctgtcttccaggagttattgaaatggccatctcttctctcccaaaggaaaagtgccaatatgggacagtgatattcaagtacattcttaggttatggtgtttgggggatagaatttttggtatactgaacaaagggattaaaaaggtcagttttatgtagggactttctttgctggggagggaaggtctcatccccaagaattatttmtttattttcccttcccagagtttttacatggaagtatgaaatattaccttcctactatataattaatagaaaaaataaacagagcccagattatactattatgataaggtgtaggggaatgggaaaaggattcagccaagtgccccagattttaggttttactctgagttttctttctccggttttatcttctattgtctcttctcatcactggagtgataatgtttagaggcccaaga

SEQ ID NO: 381423 - DNA, 565 bp, Homo sapiens
tcaaaggtagctaaatccttgaagatgaggaaaaaccagtgcgaaaacgctgaaaattacgaaaaccagaatgcctcttctcctccaaatgatctcaactcctctccagcaagggaatcccacccccaaatcaacagaatattattcttctcagcaccacatagtactaattctaaaatcaaccacataattggaagtaaaacactccttggcaaatgaaaactgaacagagaataagattgacgaattgacagaagtaggcttcggaaggtgggtaataacaaactcctctgaggtaagagagcatgttctaactcaatgcaggraagctaagaaccttgataaaagttacaggaactactaactagaataaccagtttagagagaaacacaaatgacttgatggagttgaaaagcacagcacaagaacttcatgaagtgtacacaagtatcaatagctgaatcaatcaagcggaagaaaggatatcaagattgaagatcaacttaccgaaataaagcatgaagacaagatttgagaaaaaaataatacaaaggaatgaacaaa

SEQ ID NO: 381424 - DNA, 459 bp, Homo sapiens
tctgggtcccaaaagtagagaaacaccatgggactagagagtgcaatgcttccatggagtatctcgctgcaagcacattcccattccccagaggctggtgggcaactcactgttagtcagcccactctgtaatcacctcatttcccaggagtcttatccctcaggggggagtgtttccataacctctaagggtctccaggtcagcctttccttatccaaatgcacaaagagacaagcggccccctgtggtaataatcatttattgtcgacaactgtcattagtcacttctaacacagtgaatagttctattttccaaatatttgtgaaaccagcactctatcccactgacattctttgaaagtagaatttggaagaatatattctgaagaaagttcctaaaagcataacttrtacaggaatctatgaagcaaactaagcagaatgtataattgtgttac

SEQ ID NO: 381425 - DNA, 564 bp, Homo sapiens
gcttaactctgctgagtgagaggatatttgtgtatgtggctttgagaaagtctcataacctctctgtgtccctgttttactatctgtaaaacgaaagaactggactaaaccaatggtttccaaactgtgaggtctttagaaggctaaaatttcctcataactatcttgggtgaggtgccttatctgtgaggtggtgggatgaacaggggctagctcctcccctccattgtgataagttcagttctccttttatttattttatatattggagttcagtgttcaactaggacagaggaataatttgacagctaaaacatttagaaggtcacaagggtccctaaagagatctgctatgataaatcaaagaggtccatgcaaaagctggatcacttagcatgttccatatgtgaccagacaagagcgacagcatttccaaacacactagcctgcttacagttctcaatcccagctctgccaaygccctcagctcaacaccttccagtctccctgccacaaattccttccctaccccttcaatctgtgtttctttttcccaactaaaat

SEQ ID NO: 381426 - DNA, 559 bp, Homo sapiens
acactgagatctttatataaattatttcatttactcctcacatttaatacaataaggctttttaaaattagtattttttttaaaacagataaggagatagtggcacaaaaaaatgtagacaacacarttcagctacaaggtggtgaaagtgcatttcaaaaccagatattttaaacctagagcttagagcttagcattgttgggttgatgggaaaaagttacacacacacacacacacacacacacacacacactcataggacctctggaaaattatcttatacctatgagctattattgtggctagaacatagcgtgtgagatcacatgctttacccttcctctgaaatttcaccccacaactctggcactcaacattttacaagtgcttctgttaaacactatacatatgtaaaacattctcccactccccaccttgactgggtttcttgggttagagattatattttatatttcttaatgttctcctctccatcagtgccttgctcttactcaaccaaaaagtgaatgctgccagtaaaagcaaccagagtaagtt

SEQ ID NO: 381427 - DNA, 497 bp, Homo sapiens
ccagcctgtgcaacaacagtgaaactctgtctcaaaagacaaaaaatgttgagccagatgtcaagacctcagaagaataaaagcactatttgaagaaacccattcatcacctggtccaacctctcattcaatgtacaaaaatcataacatctcaaaaactcttccaactaccaagttctcactttatggtgaggagtcctttctgttttgttttttttttctcacagatcagatatttactcatttcatatggaggatttgttttctagtaatgcatagacaattaaacattttttatcaaatgaatagcatgaagacatcatcctactaacttttacttgggtaaatattttsccttgtaaatgtaaggctttatgtctctaaaatttcacagtgtctgttgcagttgcataataacattttctgtttcaattgcaccatccaatgcacaagtcaaatttctcagctgtatgtatctcaaataagaagtagcattc

SEQ ID NO: 381428 - DNA, 546 bp, Homo sapiens
gactttctttatccaattcgtcttttcataacctcatgtcttggtgacacagatgagacagatggctcctcaactactgttatatactgagcataaatctaacttaatgtttgctgaaacaaaataaatrcaaatatacatataaaatacataaatatgtaacatacatacataaaactatatatgtaaaatataagtaaatttaaagctctgttaaatataatatttctgtagggttttacaggtgagaaagaacattcatatccatcatctcctttgagcctcaaaatattttgtgatgtagtaatgagtgagaccatttgttgagatgttcctgaatggtaagtgatcaaatgacttttcaaaaattatgaaggaagtaagtggcacacaggagttcaaagtttaaaaggaatgatcctagtacagtgcatatcactatgtgtggtacacacaagtgctcagggactgttagctgtcactatcatcattactcaggtcttagtattccacaattctctccccttcaacacacacacactgata

SEQ ID NO: 381429 - DNA, 389 bp, Homo sapiens
tgtctcagtcctaattttgcaaaggcggtttcacccagatgaacattaaatgtcttctacttcaaagtacttgagtctcttttctgaacttctsacttcgattgacattttgtgcttgaaaatcccaaatagccagtagaagtaaattatctataaacaaatgaaagactgatcttggatcaagcaatagatgaaagagataagctgtaaaactagaatggcttacaaagagaaggcaagcatttaagatcagagaacgttgtgacactataagaagttaatgagaactcctaaaagatgtaaaaataactgtccctacaaaccaaggaagataagacacctaagcaggtggcaaagattctttattcttaattaattctctatttagt

SEQ ID NO: 381430 - DNA, 417 bp, Homo sapiens
cagtctaccaagaggtccactagcttatatttaattccagatacacagccaaacaatcaccaatgaaagaaattctgggtgataagacaaagtctcttatttattcagcagcttttaatagatacttataaaactctacataatgccttgccagtgccacagcctgaggatacagcaaaaaacaagagaaacacagtttctatcctcaggaacctttgccaaatccctctttaccatgctgttaggattccaaaacaggttraggaagaatgatatctgccttccctgagcactacgcctgagaggctggaaaagtctgctggactacctttttactcctggtaatcacattcgaaacacttcaacaaaacatttcattaaaagaaaaagtcattttctctgccacttgaactttta

SEQ ID NO: 381431 - DNA, 457 bp, Homo sapiens
ccctaaccgtctgcttgaccattttcttctgttctcctctctcacaatcaaagctaatctttgagctttcaaagaactgaatctgaaggtggcaggatcacatatgacactgttgatattttagccaagttgtctcctttatagtgaccaaacaaagttcatgccctcatggaatcaacaggttaaggtaatgtagaatactttagagtaagtaaaatagactaataaaatagaggcagggtgaggaggggcctactttatctaagattgtcagagtaaacatttctaagaagatgacatttgagctgagaactgaatgaaaaaaagaaaacaaacaaacaaacaaaaaatccagatacatgaagaccagggaaaatgtggaygatgataggcaaaatttctaaggaaggaagagcctagacatgactgaatattaaaaggaagtctactgggaata

SEQ ID NO: 381432 - DNA, 562 bp, Homo sapiens
atgatcataatatctctccagcaaaggaacaaaactggacagagaaggaaatggacgaattgacagaagtagcttcagaaggtgggtaataacaaagtgctgaggtaaaggagyatgttctaacccaatgcaaagaagctaagaaccatgacgaaaggttactgtaagtccttactagcataaccagtttagagaggaacataaatgacctgagaaacacagcatgagaacttcgtgatgcatacacaagtatcaatagctgaatcaatcaagtggaagaaagaacatcagagcttgaagactatctcattgaaataagctagggagacaggaatagagaaaaaagaatgaaacggaatgaacaaaacatccgagaactatgggactctgtaaaatgaccaaacccatgactgattggagtacctgaaagagatgaggagaatgaaaccaagttggaaaacacacttcagcataccatccaggagaaattccccaacctagcaatacagaccaacattcaaattcagcaaatatggagaaccccagtaagatactccataag

SEQ ID NO: 381433 - DNA, 381 bp, Homo sapiens
attcctcttctccctcgtcccataacctgttttaccagaatctaagcccaccttttttctataatctcaagatggtatataagcttaggtaccttattgtggggaggtcttcattctgaaggttctcatgtataaatgttaaataaattcatatgcccttttccccattaattaatgtgcctcatgtcagtgatttttcagtgagtctttaagggaacaaagaacytggccctcacaacatcaagattctgtttcccagaaggaacaaaaccagtaagcagccatcgtattggaattttgttactttaataagatatttttttctccaagtgtatttttcacaactagtctagtaaagataagttatttattctgaggact

SEQ ID NO: 381434 - DNA, 619 bp, Homo sapiens
tgtataatataatacaaggttgagatgtgatttttggtaccataagtaagaagtagttttttctatgtatccttttcagtgggtggtaaaagaaagatattataaagtctttatcaaacattcactgttctctacatatacatctagctcataaataattcctagatttcattggtaggaatatacaaaactaagacaagcagaaaaattttttttaaatagccaaaatatgtagggaagaaaaaaaaacctcaccctacacaactcagtaatccctgagaacatcacattagcatggtatctactctcagtatttggggcctgggccatcaagaaaaaaagacttaactgtattttagtattttaatatttttatgtctaaaaaggaaggtattcgttaaaaaatttttatctgcaaagacttaaaatacttaaattttagagtctcaaagctataaacttcattcagctaaaagctgacgtatatacaaatgttttgtttaccactacygccaagttactgtattagtctgtccaaattaatgataattacaaagcacttattgggagaaaagcaagatatttcagttgggtagcattattacacatatggtatctg

SEQ ID NO: 381435 - DNA, 556 bp, Homo sapiens
cacctaacatatttgcaatacttcgcagtaccttaacttttttttgtcttaaggctttcatttaaatgctctgttttctttgaacccttacctcctgttaaatatttctggcatattgttcattttcattaatggctatgtcaatstgccaggctaaaggagataagagccacttagcatgagtatttggaatataattgtcttggccattaacccttaacttacattaaggctctattcagcagaaattttatgaattggctcctatttattaagtcttagataatgtggctgctctgcatagttgaggtaaggagttgagccttgaaggaaaaactatgctagttatctgttgtaacagttatttattttatgtatagggaaaattgatccaagataaaggccttacctaaactattttgagatccatttaatctcttgatactaaaaacctaaacaatttccttttattagacctatacctttttttttttgagatgaagtctcgctctgtcacccaggctggagtgcagtggaatgatctcggctcactgca

SEQ ID NO: 381436 - DNA, 576 bp, Homo sapiens
tgtattttcattatctaatcttgaagctatggattcccaacttacccagacttggacataaataaaaacaaagctggcactctgctctagataagaagaaattatcttggtatataggagtgtaaggggtaaaatctgtaaaatatgatggtgatttgggggttttcctggtgtgtcaggaagagtaagcagtgatgcctcttctatttgtgatggcagagtagaaacatctacgttctgatgaaatccttaccactattaatcataattttataatctcagattacatagcagatgcctctaaaattaactattaaataaatgaattaactaataagataaatgaatagcatcaggctattctgaaagaactatcggaagctctggctagaatgaaaacattattattattattattattagaaaaacaaaaggcacacascacagcaatacttcttaaggctacattcaataaaatactaatatttaacaaaaaccctctactgagtacccaccaccacaagcagtgccacagatacagagatgagagagacctggttcctggtatcgagtaac

SEQ ID NO: 381437 - DNA, 576 bp, Homo sapiens
tgtattttcattatctaatcttgaagctatggattcccaacttacccagacttggacataaataaaaacaaagctggcactctgctctagataagaagaaattatcttggtatataggagtgtaaggggtaaaatctgtaaaatatgatggtgatttgggggttttcctggtgtgtcaggaagagtaagcagtgatgcctcttctatttgtgatggcagagtagaaacatctacgttctgatgaaatccttaccactattaatcataattttataatctcagattacatagcagatgcctctaaaattaactattaaataaatgaattaactaataagataaatgaatagcatcaggctattctgaaagaactatcggaagctctggctagaatgaaaacattattattattattattattagaaaaacaaaaggcacacagcacagcaatacttcttaaggctacattcawtaaaatactaatatttaacaaaaaccctctactgagtacccaccaccacaagcagtgccacagatacagagatgagagagacctggttcctggtatcgagtaac

SEQ ID NO: 381438 - DNA, 549 bp, Homo sapiens
gaaatgtaaacagggtagggggcataggattgccaaaggggtgagggagttgaaattttaaaaagagtatgattagggaagaccaccacatcgaaagagttggtagcaattgagcaaaatctaaaggaatgagacagtaagacttcctgtgtctgtgggaagagcttcttgggcagcaggccccagcgtagacatcctaaggcaagaaattctttgatgcgttctaggaacagcaaggaagctccaaaggctgggtccccatgcacatggtcagagggtgggagataaggccagcaaggttaaatgggaggctttagcactatttctgttaagagatgttggatgcagcttagatgttacttccttgttgagtttttccataggggccccttttgagtgctccaagagcacagagaatttgctctcagtggacctgttayactgtgtcctcttagcctgtattcccactttgttcactcagggctgggactaggtttatcttatgtacttaacatttggtcacttggcacattgtagtacttcagtgag

SEQ ID NO: 381439 - DNA, 590 bp, Homo sapiens
gtgactaatgacaccagcatctgccagcagttcaaatattcgtaccagttgtactcgtaaaatgtctcgacgcctgcgccgtttcatattctattccaaagatacaaacacattaattaaaatcctgctggtgtaacttggaaagaataatgtgactgcctcagagagaggttctgggctcaytgaagttattttgcttgtacagtgtagactgtgggtactctggtagctactgcctcaaagaggtatgagtgaacagtttgaaatgaatgagtcaaataaggtcacatgacatcttacatggtgacaacccctgtgtgtcaggggaagtaaaatactacatttttaggttatttgctaatcagacagttttggaattgaagcaattagtaaactgttatcatggaattataaggaatccctaataccctcccaaaaatatgacagaagtatagggaaaacaatcctaaaaaggacttaagattttgctcatgccacagttttctacacaacaattttggcacaaaaaatataaacaaatacaagaaaaacttctttactcattatgatatgaataaatatgtttgtat

SEQ ID NO: 381440 - DNA, 356 bp, Homo sapiens
ccttttcatggccaaataatattccattttttatggaccatataccacattttttatctattcatcaagtgatcattgtttgggatgtttcccctttctaactattatgaataatgctcctttgaatatttttacatgtttttgagtgarcatctgttttcaattctcttggttatatacctaggcatgtaattgctgcatcctatacaactttatattgaactttttgaggaactaatgaactgtattccaagctcagtggccacaccatattatattcctgctagcaattacaggaattccattttctccacaatctccccaatgtgtgttgtctttttttgtttgttttagtc

SEQ ID NO: 381441 - DNA, 555 bp, Homo sapiens
ttaaattgagttatttggtttttttgttgctcagttataagaattctttgtatgttctggatacaggacccttgtcagatatatgatttgcaaatatttctcccattatgtgtattatcttttcacttccttgataatgtcccttgaagtataaaattttttaatcttaataaagttgaatttatctacttsgggttgtttgtgtatatctaagaaatcagtgtctaatccaaagtcataaagatttatacctgggttttctttaaaatatcagtttttgaatgagaactttcctgggttttagtgaaaggtggacattatttaattatgccttgggtccattgtctgatgtttcttctgattgatattcctatgcccaccaccccctctctggagcatccaatgtcctgcaacagagctctggggaatggtaccctttcactgactttgattcaggtgagtggcctggtcatgtagttcagcccggccttcaaccaaaccagtttgacatattcctccataccttcagagctgaacagttgagtgcgtctctga

SEQ ID NO: 381442 - DNA, 479 bp, Homo sapiens
acatcttgcctacctgcaggagggaagagccgaaggaggcaaaaatgagagaaggtctgaaggtcctgccacctccttacccttactcccaacagaaaaggagtcatttgtccactcccttcagctactaattttagcttctagaattgatcaataatgtgctttggctctcatcatccaaaatcaataagaaaattgctaataacatcactgcaaattataactacttttagggaaatgtgtcctgtaaaaatgagtcatattaatgcaaacaccatggagaaggggtcaacatataataataagggggcattactaacmtggctcattggaattttaggtccctttgagtgtcagcttctcacttttcacttcccagtttccctatggatgagataattaaaagtaaaatggtatcaaactgcatggataattgaaaaactaaatcctcaccttccagtaaaaagagaagtggctat

SEQ ID NO: 381443 - DNA, 561 bp, Homo sapiens
gttacttctcacacacaatgtgtgtccctcacaggtcaattgatagccaagtagacagagcttctcccagttttcagccttgccatctggaaaatgtggccactgtagtcaccagtgcaggaagagatagagggagagtgtctctctggctcgtctggaatgaatgcaatgttgcttttgtccacagcccattggtcagaactaattgtgggcgcagggggctgggaaataggggatggsggctgggatggaagaaaaagtcagagaatatcaactctcccacatatgtcttgttatgaagcttaagcctcattctgaggccacagtttctcaaataagagtaatatgggaattcctttaaaggaaaaaaattcttgtagattcctagtgttgcttaaattatttttattatagtgcagttcagatatgtagtagttttacatgggtctaaactctttatacttagagctttcatatgaccacataaccaaaacaaatatataaataaaatatcaacacagctacaagtcaaatacatttggattaacctcatgaatttaa

SEQ ID NO: 381444 - DNA, 522 bp, Homo sapiens
caccatgagccctgcattctgtctcagcatctgcttctagagaacccaacctgcaacatttattttgtattattatggattcaacacagaatttggagtcagacaggcctgggctggaatcctagcactggtgctcaccaacctggtggccttgggaaagtaatttgaactcctagcttcctagcctctggctcaggaagtctcctcatcaaatggagatgaaaatatctttattgcagagttttaggattagttgaagtaatgttatatgtcarcatgttaaaatggaagttgggaatgagtgcccaagctatgaaatggaattgagggacagaccacccctttcaaagtagatatcccacagtggaacacatgacctttgtaagtcctcacctacttcaatttataaacagtatgattgaggagtatgtcttagagagtggttttgaaactcatatctggctcctggaggtaaaggtgaattgcaatttttactttgcttcaagacaagaaagaggactt

SEQ ID NO: 381445 - DNA, 561 bp, Homo sapiens
attcccaccagggaaatcaaaagggcaggacacaggctgaatggagatgatttagccattccacaatgtgtacatatatcaaaacatcatgttgtacatcagaaatatacataacttttgcccattacaaattaaagaaaaaacacaatattgagcaaaataagtcagatgcaaactattttacaccatatgattacatttatataaagaacaaaaacaggcaaaagaaacataagttagaagtcatggtagtatttacccttggggacattgtgactaacagaaggcaaaaaggtggattctaggtgcttgtcacgttctgattcttgatctggggtgctggttacaggaagtgctyagtttgtggaacttcactgagttgtcctcttatgttcacttctctgtatggtaaattcaaaatagccccatttctttacataagcaaaaatcaatcagataatcttgtaggggataaaataccattcatactagcaacagaaacactcaagagtcagagttaacaacaaggaatgaccacgttacctgcagagaaaattttac

SEQ ID NO: 381446 - DNA, 549 bp, Homo sapiens
ggagagaatgtaccactgtctgggtcagttgtcagcattggggagagatcagattggccatgatgtagacattttaagcacattggcccaccctattttcccatccttctgctggtggtggtggtggggcagggggacagaatagttaatggtgaagatcatgagcttgaatcatggcttggcagtttacttacctagaggaagtaatgcttgagtgagggctgcacagcggcagagtatggagcagggtatggaagagatagtggccaagatcaagcaaggaatttgtactagctggagcccagagtatctgtgggaaaatggcaggagatgaaggttgagtggtagataggactcgaggtggaaaagccttgaagatcctactaaggagtctagcttttaactctcaggagacataaggccactggaggatttttaaacagggaaattayataattatatagatcagtatggagaaagatttccttgactctagtagggctgataatctggaaaaaaggatggagaggatgcagcaatgtaagagag

SEQ ID NO: 381447 - DNA, 626 bp, Homo sapiens
tcgtgcttctgccgtctgcatgtcctgagaacttctggttcacagatgagagacacatggagcagacatgaacctggcctgtagactgwtgcagagtggccctaagtgacctgcagacacgtgaatgaggaaaacaaatcgttgttactgtaagtcattgaaacattggggttgttacacagcatggcactatctcagccaaaacctgactaatactgagtcacgtatggatcttttttagaggaaagaaattctggcaaactctctgtgttgatattacttactaattcatttaacaaataatactgtgtgtgtgagtgagagagagagacagcgagagagagagagagagagagagagagagagagagagagagagagagagagaggaagaccagttagaagtaattaaatcattttatacaatgaaacttaaatatttcaaacaatactaggtatacatttcttacccttgtaatcaataatcataaagcaaaataacattgcaaattaagttaaaataaaactacatcaataatctatgtcaacttaatggggtagatgatgcttttctttcttatttttcatgctacaaacaagctcctaactgctctgtctcaggttctt

SEQ ID NO: 381448 - DNA, 542 bp, Homo sapiens
ataaagtttatttatctttgccaccttcttacttgatccttcatggtttctcgtactttttccctccaaggtccattttcaactggctgtgaagaatgaaatgatcttagaaaccaattcacattaaaatgccaatacctaaaatccgtttatatttcaacgacagcaaaatataccataacacaggccaggtgcagtggctcargcctgtaattccagcactttgggaggccaaggcaggtggatcacttgagtccaggagtttgaagtgagcctacacaacatggcgaaacctcatctctacaaaaaataccaaaatattagccacgtgtggtggtttatacctgtggtcccagctacttgggaggctaaggtggggggagtctggaaggcggaggttgcagtgagctgagatcacaccactgcacccagcctgggtgacagagtcagactgtctcaaaatatatgtacatacaccatatatacacacacacacacacacacacacacacacacacaaacacataaacataccataatac

SEQ ID NO: 381449 - DNA, 542 bp, Homo sapiens
ataaagtttatttatctttgccaccttcttacttgatccttcatggtttctcgtactttttccctccaaggtccattttcaactggctgtgaagaatgaaatgatcttagaaaccaattcacattaaaatgccaatacctaaaatccgtttatatttcaacgacagcaaaatataccataacacaggccaggtgcagtggctcaggcctgtaattccagcactttgggaggccaaggcaggtggatcacttgagtccaggagtttgaagtgagcctacacaacatggcgaaacctcatctctacaaaaaataccaaaatattagccacgtgtggtggtttatacctgtggtcccagctacttgggargctaaggtggggggagtctggaaggcggaggttgcagtgagctgagatcacaccactgcacccagcctgggtgacagagtcagactgtctcaaaatatatgtacatacaccatatatacacacacacacacacacacacacacacacacacaaacacataaacataccataatac

SEQ ID NO: 381450 - DNA, 542 bp, Homo sapiens
ataaagtttatttatctttgccaccttcttacttgatccttcatggtttctcgtactttttccctccaaggtccattttcaactggctgtgaagaatgaaatgatcttagaaaccaattcacattaaaatgccaatacctaaaatccgtttatatttcaacgacagcaaaatataccataacacaggccaggtgcagtggctcaggcctgtaattccagcactttgggaggccaaggcaggtggatcacttgagtccaggagtttgaagtgagcctacacaacatggcgaaacctcatctctacaaaaaataccaaaatattagccacgtgtggtggtttatacctgtggtcccagctacttgggaggctaargtggggggagtctggaaggcggaggttgcagtgagctgagatcacaccactgcacccagcctgggtgacagagtcagactgtctcaaaatatatgtacatacaccatatatacacacacacacacacacacacacacacacacacaaacacataaacataccataatac

SEQ ID NO: 381451 - DNA, 542 bp, Homo sapiens
ataaagtttatttatctttgccaccttcttacttgatccttcatggtttctcgtactttttccctccaaggtccattttcaactggctgtgaagaatgaaatgatcttagaaaccaattcacattaaaatgccaatacctaaaatccgtttatatttcaacgacagcaaaatataccataacacaggccaggtgcagtggctcaggcctgtaattccagcactttgggaggccaaggcaggtggatcacttgagtccaggagtttgaagtgagcctacacaacatggcgaaacctcatctctacaaaaaataccaaaatattagccacgtgtggtggtttatacctgtggtcccagctacttgggaggctaaggtggggggagtctggaaggcggaggttgcagtgagctgagatcacaccactgcacccagcctgggtgacagagtcagactgtctcaaaatatatgtacatacaccatatayacacacacacacacacacacacacacacacacacaaacacataaacataccataatac

SEQ ID NO: 381452 - DNA, 536 bp, Homo sapiens
gagaaatcttgctgatcaaggagaattatgcattgcagaaccagtgactaccatagcaataatcagtgactccttcttgtatagcaaaatagaagagaaaaagaacttacagaattcagaccaagaaagtgattgaacaggttcatggtaaagggagaatgagcaggaagtgtggccggctactctttatccttctggattttccctgccacccttagggacaccagtcactgccctgtcctagtcatattcaccagtaaatatacagacaagcccgtttyttcctagaaccagcaggaggccagaaagagggtacaacctttgtccttgaccaagctgagacctgttcccaccatcaccaccaccatctctcctggatttcagggatctctgctcccagcactccagggctgtaacagctagtctgggggcagtagcagaattggagacatgaacatcctatatgctagtggaggtgtagcagcatgcccaccctgctcattcctttccactctgtttccagtgcaggaacacat

SEQ ID NO: 381453 - DNA, 587 bp, Homo sapiens
catggtaaagggagaatgagcaggaagtgtggccggctactctttatccttctggattttccctgccacccttagggacaccagtcactgccctgtcctagtcatattcaccagtaaatatacagacaagcccgtttcttcctagaaccagcaggaggccagaaagagggtacaacctttgtccttgaccaagctgagayctgttcccaccatcaccaccaccatctctcctggatttcagggatctctgctcccagcactccagggctgtaacagctagtctgggggcagtagcagaattggagacatgaacatcctatatgctagtggaggtgtagcagcatgcccaccctgctcattcctttccactctgtttccagtgcaggaacacatccttctcttccccttattctggaagaaatgttctcaaatgaccgtgctcaatgttcatgtctgacacctcttcagtcccttcccccatcctgctcacccagctttctttgctggatataatctctcagccatcagctataaataacctggcctttgcccttccaccctctgtgagctggtctaatcatcatcat

SEQ ID NO: 381454 - DNA, 585 bp, Homo sapiens
agcctcaaaaatgctactgtttcgtaactcagaagcctggccaatgtctatattgatcagagctgtagaaattaataagagcaaggtaataaaatgaaactgccatgctgtttattggctgtcatcactgatgacactccaatctctaattaacatcctcactacctatcctctttattaccaacatgacattgactgagacatcagaaacaaagtaattaaagagactttttcctgctcttatctcagaagtgcctctgtccagggttggcttttatctgctgacttacccatgacaatttcccttagtgcctcccagcayactggctcagaactctgtatggtctctgactgagagatattggccaggccttgttctaacccacctaacagatgcctgatacttttttctaagctactcgcaaatttaaagatgggattgactgctccatctcatgataactttggagttatcatgagttttacgtactgcatcagttgtttacaagagtgtttttaagtggacattccttttctcacttttaaagcttatccctgaccacacgataatcctcatccctcatc

SEQ ID NO: 381455 - DNA, 595 bp, Homo sapiens
catgtgtgcaggaagtttactggggactgttctgtgtcagcacttgctggggaagaaggtatgaatagcgtgggactgagcagaagaaggagctaactgtggtctagttgaaaccaaggccatgtctgatcccacatggagctacagcatggcccctgtgagctgtcctgagttgaagcaaggggactggacctttttaacccagatcaacctgttatyggatgtgagcttccctggagaaagatatgactgagtgaggagactcaattcagcccagggcaggatcagaatagtgggtgcttcagggatcaataaggcaaccagagcctccacatcagtgtcatgagttttcaggggaagagagaatcagaaactcccgtgccacctggagcaggtaagaaacacaaagctgttgccttatgattgcccaactcaagaggcactggagccaagccctagaaagaacacaagtcacttgacagtcacccctggggcttctccactggaagtgtcccccttggaaggaccaaccatgactcctaagccacctccacattcaccatcaactcccaacaaatctgtaggtgattgggtt

SEQ ID NO: 381456 - DNA, 554 bp, Homo sapiens
taaataaattcctgtctattcttagtttgctaagagctttgcataatamatttatgttgatttttagtaaatttttttctttatctgctggaacaatcatatggttttcatcccttgatatggtaataattaaccatatgtcaatgtatgtaattggttttctggaattaaaacaatcttatgttcttagagtaaccgaactggattataatttattgtggttttcatgcattgctgaatttggtttgataatattttctttaggatgtttgaatctctatttatgagtaaaagtggtctataatttaccttactcatcctctccttttatattaagtttttaatatgttgagatttttatatcaaatttatgacaggctgcttcttaaaataaactattacattttcttatattgtttggaacagtaaatttaagattaaaattagttgttctatgttttataaaacttacctgtaaagccgtctgggcctagtattttcttagtgggaagatttcgaacacctgattcaatttattatgtcactataagact

SEQ ID NO: 381457 - DNA, 578 bp, Homo sapiens
cgtgaaactccctgccctgttctgtttctctctgaccaccggtgcatgcagccsttgtcacgtaccccttgctttctcaaatcaatcacgaccctttcatgtgaaatccttggagttgtgagcccttaaaagggacaggaattgctcactcagggagctcggattttaaagctgtagcttgccgatgctcccagctgaataaagcccttccttctgcaactcggcgtctgagaggttttgtctgcggctcatcctggtacatggggaaaggctgttattgtctttgttttaaactataaactaagttcctcccatagttcagcctactttcaggaatgaacaaggacagcttggaggttagaagcaagttggagttggttaggtcagatctctttcactgtctcaattacaattttgtaatggcagttttatgaccaaatttacaatatacagaccaaaatgccttcatgagaactccagaaagcagtcctctaagctttaagactgttgtttattgacacccaaaggtcatcataaaatgtatcttgctacagctgttgccacttcactaaagcctg

SEQ ID NO: 381458 - DNA, 554 bp, Homo sapiens
ggacttatttggcccttgctggagataaccatggtagggactttccctgctgtcaagcatgcacactcctccagtaactcamcatagagtacccttttgcccattagagtagtaaaaacacaccccttggtggagattttaaatgctggagagacatgcgatgtgtgtactagcacggacaaccacagagcatgcatgtccaaggggacttcctaaaacgtgcttgcaagtgacaccctctcatgcccttacatgaataatcatgtaggattctcataaagagagtcctgtggcactagctgctactggctcagtctctctttcaggcagcccactctgacttcttctcgtactgtctctttaaacactttcttgatgacactgctactgttatttttccagctgggccagcctgaagctgttttccagctgcatcagcccaatcctctttgggagtgtactcttatgtctttaataaaccttttgcttgcattactaattgtctcttggctgaattctttctcccaaatctcccaggatcaaggaccatgcac

SEQ ID NO: 381459 - DNA, 644 bp, Homo sapiens
tcagttttctcactaagatcaggaacaagccaaggaagtcccctctcatcattctgtttcaacattgtacttaaagtcctaactagtgtaataagaaaaggaaataactaactacaaatagcagttwaaaaattcaatttctatattaaaaagaatgaagatgaactcttaccttacaccaggaaataaaagctacactgattaagagtaaataaataaaactgtcttgctgaaataaataaaagaagacataaattaatagaaagacatcatatgttcatgaattggaagacttaattttgttaaaatgtccatactacccaaagtaacctacagattcaatgcaatccctatcaaaagttcaatcataatttttgcaggaaaaaaaaggaatatcctaaaattaatatgaactctcaaaggaccccaaatatccaaaataatcttgagaaagaagaaaagctggaggcctcacacttcctgtcttcaaagcatgttacaaagctacagtagtcaaaccagttcacaggtaacatgactgtctatgaagaaaatccaaaaaaactcacaaaaaaaaaaaaaaaccctggaaccaaaaggcaattttaacaagggggcaggatacaaggttaatacaaaaaagt

SEQ ID NO: 381460 - DNA, 570 bp, Homo sapiens
ctaaatgcaatgcctggaacctaaaaaaatggcactggaatgcaaaacgtgggactaataaatttaatttgaggcttaagagttttcaaataattcaccaaatttcacagtccagttggtaatgatctgaaggtaaagccagcctcagtcatgattctcatttgaggagtccttcacagagcaagttcccagatcttagcttatttcatcctcaaarcaaacatgtaaagcagagagagaagttattatcaccattttacatgtttaaaaaaaaaaatcagacactccaagtggttaagtgacttacccaaggttattcagctaaatcagtcataatggctatgagaagttgagtgggaatttggggctttaagagacacatcttgagccctcagctgaacaatactgattaaattccaagcaaatgtcatcagatgaaatttggttatctttacatctgggaaattgttagaggaaaacatctggatcagacaggaaattccaagaaaatcccaagagtgtaagtgtgggagtttattgtaaacttcccaatgctcaatgaaatttttc

SEQ ID NO: 381461 - DNA, 624 bp, Homo sapiens
gagggcatgcatcccctttccctggcaactgtcctctcactcaaaagctgtgcccttgggaccaaggccacctcctacctcctccagcacatacagcctgacagcccagcatctgtcagttacaagccgaggtctccctgacagccctgacctgacttggggtcctaatagctgagttctgacaagtgaggagagttggtgatcaagggcagcagtcctgcgggcagctccaaggactccratgcttggcatcaggcacgccaaatcccagggtggcagggtgcatcttctgcctttcatccagctgttctgacatctcgacgccccggccagaggagatccatgttttacccctagccctgaccaagctctgagcgaagttgaaaaagtcaccaacctgatctgtagttctgcccacctgccttgtgaaattaggaatatccatgcaagagactccttcccttccttggatctgactaagccctctgttgtcccaggggtccctctctaaggccgacaagatgggacagtgagaaagaatccctgacactgggttcaccaccgtggctctcactcaggaaaatggactttgggagcagctcagcctgcagctgacaggtaaca

SEQ ID NO: 381462 - DNA, 601 bp, Homo sapiens
gacagtaccctgttccccattgcagcccatccccctaaaatgtcctgtcagatattcaggtcacatcatccataagaagatacattctgagtcttaaacagaggacataaagtcctgaacagggttagaattctgcagcaccaggaggaaggtttctaaacaacccacctcaagaacacctggtaccttgctgatggrttatcccttcttactgagcagagaaatgcattttcctgggtggtgggtgggagtaaggatcagctgtctgttgatggcaggcctgatttatctgctaccaaaaggaattaaagtctatcgggttaaacagagttttccagtgaactcttcttaaactttgcaccattatggtggttgttgggggaggggaaggtggctcctcaagcgcccacctgggcttttgttctccaatcaaaatctctgaagcagatttagagtgacaagatcaggggaagccagtatccattgtctaggagagatatttgtggcagaaaggagagcaatttcctgctgaattgatttacccatccttcgaatcatgatcttacagatgacccgggacacaggtttctacatggtattg

SEQ ID NO: 381463 - DNA, 521 bp, Homo sapiens
tgctttactaattctttgagaacagctataaggaatgtattgtatatattgtatccatcagtatcctttcaggagaacagaagctatcttcatctttttaagcagaactggctctaggacaggttattagaggtttacacagcctttggaatagcctgaagtaaaggttaagaggccattgccaggtctcagtaaaattagaagtgcaggatttacaagcaagcattccagtgatttcaaatgctggcagcaataatatggatgattctaacagaatttcaggaagttaaaactcatgtcttagactgtttctcctcacacagctggccacaggtatgtgttttctttctcttagtctttccaacctttccraaaatatgctactaactgcaacctaacaggaaaatttgctgagaaggagctaaggaaagtgtagttcccagatatcatccttatgatgtggtagagagtatggaaggcaacaggaatgatgctgctgtagcaacaggaaatctgttaca

SEQ ID NO: 381464 - DNA, 607 bp, Homo sapiens
caacatatttctaaataacgcatgtgtcaaaaaatctcaagagaaattttaaaatattttaaactaaattaaaatacaacttaaaaaaatttgtgggctagagcaaaagcagtgcttagaagaaattttatagcattgtatgaatatacaataatagacaaaagatctaaaatagaaaaagatcccaccttaggaaagtagaaagagaaaagcaaattaattccaaataagccagaaaataaaataaaattaaagcaggaatcaatgaaattgaaaataagaaataaatagaaaaaatcaagaaaaccaaagctggttatttgraaagctcaatacaatcaataagactctatctagtgtaagaaaaacatagagaagacacaaattgctaatagaagaaaataaaataggggacattactacagatcccatggacattaaaaaagtaataaaggaatattataaacaaaaccatggtcacaaatttgataacttatgtaaaatggaccaattccttaaaagacacatctgtcaaaactcacactagaatagacatcttgtataggcctatgtctattaaagacattgaatcaataattaaacattt

SEQ ID NO: 381465 - DNA, 640 bp, Homo sapiens
acctgtagagctttttgtatattcttctcatatagtttcataatcacctaaggtgtcaataaccactgaagtcatctctctaaatttacaaatgagtcccagagagataaaaagacacatatatgtcattgcctcactgtaaccagaacccaggtattctaattccatgcacagtgaccttcctgaacatgatgttaactggtgacatactgtgaattcgtaacacatccatatattcttcctaaaccttaaagagaaacagaggaagatgatacatttaatgataacagtaaaaatgaagcttactgctaattttgtttgtccttcaattcctaaattaattctgggagcagaatgtaacactaaacatatagtcacaacatgacctatactcagcattctttatttctgtttatttctttcatcttaaaatatttttttgaagtgagtagaagctctacattttgtgagaagtctccgaaatactgagggaaatgagtctgtcccaaacacccttgataaagtaagcaagcatctgaattatttttctgtttagggaaaagataaattattatrgttttgacttaaaaaattcagcatttattttattgatatactttctgacactgcattttttaac

SEQ ID NO: 381466 - DNA, 604 bp, Homo sapiens
aaattcaaattcttatctggaacttttgtagctatgtacaggaaagaaatttctttgtagcttccctgttcttgccaggtttggtaatcaagttatgtaagccacctacaataaggtggagaatattgattcttttgcttctttcaggaagatttagtgtaagactatattatttttccttgaatatctgaaatattttactgktgaagccaccagaacctggagtttccttcatggaaaaattttaaatcatagtctttatttgtgtgttctgtttttgtgtcagttttcataaagtcatttgttatctaggaattggttcacctcatatacatcttcaaactttgacaattcattatgccatctaattactttttacagtatgtagattctataatttgagtttttttctgacatttaagttctatttcattaatttcaactctttactattttctttcctttcctttgagattattctttttgttgctaaataagggcttagctcatttattttcaacatttccccccaataatatacattttgaacaattaatttgtctctgaatcacatcacctgtgtcccacaagttttattatgttg

SEQ ID NO: 381467 - DNA, 567 bp, Homo sapiens
cctgcttgagatcatagaagatgtaggttttctgtttgttgaatgaatgagtaactgagcaaacaaatgtggattaaagatttagacttctgtcattgacttctccataaagattctgatattgcaaaggtattttcaatcctttggggatcatttttatactcatgagttaatttttctccaatttgtgtattagacatatgttctatttaattaacatattctgaatacataaacaaatgtttacataaacaaaagttgccagggggtgggaacaaggagagagggattcctaacagatgggactattgataactaaaactattatttattgaaagactaatatacttcaagtggaatcttacaattttaaatatattattaamactgaagttgacaaggtgagcaatcagcacttgctgctatcagaaataaacttaatgatgaaaagttataggcatgtttaagaaataaaagtggaaatgatggttaagagataaatgttgaaaacttcaaatgcagcaagatatgaacatggattttgttatttttgttttttaattcaca

SEQ ID NO: 381468 - DNA, 533 bp, Homo sapiens
tagctttatactaggtcttaaagtcagacattgtgattctttttcctctccatataaactttacaatcagtttgtcaaattctactaaataacttgcttggattttgattcgaattgtatctgtgctatgacatcaaaatcatatttaccagaaacccatctacagatatcttgagttcctgatttcattaactttgtgaatgtggacattcctttccttaaacttcagaatattttattaaaaattgaatttaataatacctcttctacttgccttacagaggcacaaaacacatattttataaattgaaaatctttctataaatgtaacgaagtatagctgttattcccattatcctggatcatttcttacacattgtaatttgagctaattctattgcattccacccattacagggcagtaatatcatatcctcagagtgctacctatacgtagagaagcagcctargatagtctgccagttagacatgtaatcttctgaaatttaatgtataaattgattatttaatgc

SEQ ID NO: 381469 - DNA, 621 bp, Homo sapiens
aatggagcaaaatttttgtatgttcttgatgttaagatggtttacatttaacttagacttaagactttagaatgttaaatgcaatccccaagaaaactataaagaaaatagctaaataataggaaatgagaaaggaatttaaaactttcactataaaaatcaactgaacataaaagaagagagtaatgcaggaaatgaggtgggagagcagatattaggcatgtggaaaacaaatagcaaaatgacagaagtcactccataacagtaatactttaaatgtgaatggattaaactgtcctgccccatcaaaaaataaagattgtaagaataaattttttaaaatacccaactacatagtgtctacaagacacttactttagatccaaagacacaaaaaggttaaaagtgaaaaaatgcaaaaggatatttcatgcmaatagtaaccaaaagagtgcaagggtagctatactaataacatacaaaacagactttaaataaaaaaagtttgcaagagacacagaaagacattatatattttaaaaaggttcaatacagcaagaaggtataataattataaacatttacatgcttaataagaccatcaaaatatatgaagcaaaa

SEQ ID NO: 381470 - DNA, 627 bp, Homo sapiens
aactcagatgcacgtaatagcctccccatggcctcatttggttctgatgtggtatagtgaaacacattcatctaatccatttaaaatatgttagctgaagtgcagggaaagtaaaaaaaaatggaatgtacttttagtggcgtacttaacaatcttactctagtaaaatatatgcttaatgttaaatgacaggcaattagtataaaaactgattcttgaactagatgtgaatgacccaagttataaaatacctcagttcacatcwccttgctggattccctccaaaacactgagaagtggctgacccatcattttgaacagatatgtacattactgtttaaccgaggagacgaaaatgtaaaacaaaccaaagacaatacctaaaaatatgaaatactgaaaagctaaaatattggttattatagaaagtttgttagtgagaaatcagttcaccaccaaaataataatcagttccataaatctttgtatagactgagaaaattttcctttgaagctattgactgatttttaaaactataatctgcacggcctctagacaaagagtattgaagaaatccttaaattctatcgaccatgatttttccttgctgccaaacctggcagtca

SEQ ID NO: 381471 - DNA, 627 bp, Homo sapiens
aactcagatgcacgtaatagcctccccatggcctcatttggttctgatgtggtatagtgaaacacattcatctaatccatttaaaatatgttagctgaagtgcagggaaagtaaaaaaaaatggaatgtacttttagtggcgtacttaacaatcttactctagtaaaatatatgcttaatgttaaatgacaggcaattagtataaaaactgattcttgaactagatgtgaatgacccaagttataaaatacctcagttcacatcaccttgctggattccctccaaaacactgagaagtggctgacccatcattttgaacagatatgtacattactgtttaaccgaggagacgaaaatgtaaaacaaaccaaagacaatacctaaaaatatgaaatactgaaaagctaaaatattggttattatagmaagtttgttagtgagaaatcagttcaccaccaaaataataatcagttccataaatctttgtatagactgagaaaattttcctttgaagctattgactgatttttaaaactataatctgcacggcctctagacaaagagtattgaagaaatccttaaattctatcgaccatgatttttccttgctgccaaacctggcagtca

SEQ ID NO: 381472 - DNA, 627 bp, Homo sapiens
aactcagatgcacgtaatagcctccccatggcctcatttggttctgatgtggtatagtgaaacacattcatctaatccatttaaaatatgttagctgaagtgcagggaaagtaaaaaaaaatggaatgtacttttagtggcgtacttaacaatcttactctagtaaaatatatgcttaatgttaaatgacaggcaattagtataaaaactgattcttgaactagatgtgaatgacccaagttataaaatacctcagttcacatcaccttgctggattccctccaaaacactgagaagtggctgacccatcattttgaacagatatgtacattactgtttaaccgaggagacgaaaatgtaaaacaaaccaaagacaatacctaaaaatatgaaatactgaaaagctaaaatattggttattatagaaagtttgttagtgagaaatcarttcaccaccaaaataataatcagttccataaatctttgtatagactgagaaaattttcctttgaagctattgactgatttttaaaactataatctgcacggcctctagacaaagagtattgaagaaatccttaaattctatcgaccatgatttttccttgctgccaaacctggcagtca

SEQ ID NO: 381473 - DNA, 509 bp, Homo sapiens
ctagtcttgctatgttgcccaggctggtctcaaactcctggcctcaaccaktcctcccacctcggtctcccaaagcactgggattacaggtgtgagctactgtacccagcctgtttattcatttagtaacacaacaaaactacacatttctgtagaggaggaaataattttttatttctagtaattactcttgagcatatggggctacaattaaagagtgataattgtttaaaatacaattactccaaggaaacagaaacatctgaatcccttgctcaagtgactccccacctcagtgtgtcagggattatatactaacaattaataaggcaaaatactctttattaagtactaagggtattggttgcaaaaagtcaaatcccatgtagaacctctttccttctaggtaggcctgaaaggccaagactcaaagcagagcaaatgactctgtctttatttttacaccaaatcctaaatgtgaaaccaaagtcttagatctctatggacat

SEQ ID NO: 381474 - DNA, 509 bp, Homo sapiens
ctagtcttgctatgttgcccaggctggtctcaaactcctggcctcaaccattcctcccacctcggtctcccaaagcactgggattacaggtgtgagctactgtacccagcctgtttattcatttagtaacacaacaaaactacacatttctgtagaggaggaaataattttttatttctagtaattactcttgagcatatggggctacaattaaagagtgataattgtttaaaatacaattactccaaggaaacagaaacatctgaatcccttgctcaagtgactccccacctcastgtgtcagggattatatactaacaattaataaggcaaaatactctttattaagtactaagggtattggttgcaaaaagtcaaatcccatgtagaacctctttccttctaggtaggcctgaaaggccaagactcaaagcagagcaaatgactctgtctttatttttacaccaaatcctaaatgtgaaaccaaagtcttagatctctatggacat

SEQ ID NO: 381475 - DNA, 509 bp, Homo sapiens
ctagtcttgctatgttgcccaggctggtctcaaactcctggcctcaaccattcctcccacctcggtctcccaaagcactgggattacaggtgtgagctactgtacccagcctgtttattcatttagtaacacaacaaaactacacatttctgtagaggaggaaataattttttatttctagtaattactcttgagcatatggggctacaattaaagagtgataattgtttaaaatacaattactccaaggaaacagaaacatctgaatcccttgctcaagtgactccccacctcagtgtgtcagggattatatactaacaattaataaggcaaaatactctttattaagtactaagggtattggttgcaaaaagtcaaatcccatgtagaacctctttccttctaggtaggcctgaaaggccaagactcaaagcagagcaaatgactctgtctttrtttttacaccaaatcctaaatgtgaaaccaaagtcttagatctctatggacat

SEQ ID NO: 381476 - DNA, 565 bp, Homo sapiens
taagcttttcatcaatttggtacagagcttaccattttgctcagttgcagtaagagtgattcttttcctgggctaggaacaccaaaactcgtgcaagtttataataggtctcaaacctgtccaggatattaaactcaaaactgatccagattaaattacagatttaattctcaaaactgtccgagagatkaaaactacctaatgatttactctttcagagcataacagctattgttagttaaaggtgaaataaaataattggtgaaagattcgcttaagtgatgactgtctcacacataagaattccttaaaaaatagagaaaattgatatgtataaaaaagcttaatgtattaaaagtacaaaaacaggtaaacacagtcctttttaaatattaatgaaaccattataattaatagtagtattattttatcttcaagacaatctgacatctcaagtctttacttatctctttttatttttatttttaaactgatgacttcacaaaatgtgaggaaagagaggctcctattttttactgcaaatcagttctaaaagggataagac

SEQ ID NO: 381477 - DNA, 565 bp, Homo sapiens
taagcttttcatcaatttggtacagagcttaccattttgctcagttgcagtaagagtgattcttttcctgggctaggaacaccaaaactcgtgcaagtttataataggtctcaaacctgtccaggatattaaactcaaaactgatccagattaaattacagatttaattctcaaaactgtccgagagattaaaactacctaatgatttactctttcagagcataacagctattgttagttaaaggtgaaataaaataattggtgaaagattcgcttaagtgatgactrtctcacacataagaattccttaaaaaatagagaaaattgatatgtataaaaaagcttaatgtattaaaagtacaaaaacaggtaaacacagtcctttttaaatattaatgaaaccattataattaatagtagtattattttatcttcaagacaatctgacatctcaagtctttacttatctctttttatttttatttttaaactgatgacttcacaaaatgtgaggaaagagaggctcctattttttactgcaaatcagttctaaaagggataagac

SEQ ID NO: 381478 - DNA, 614 bp, Homo sapiens
tgttcttaggaggtattttatactattgttcctctgtatgggcttttagcatatgctaaagggaaaacccaaaaggattaaactgttgtcaacaaatcaataatattccagaaaaaagctcaagagtatttgtaaaatgcagaaaaaaaagaaaaataaataatcaagaacccaacaaagttgaattttcagttctatatgtgatgcaaaatcccaaggcatgcaaaggaagcagaaaaatgtgacctataatgaggcacaaaatcacccctttctgcaaatgcttattttcatctggattattttccatctacctgtgggaattcctttaacatttcttgcagtttgtatctgcttattgcctttaaattttgttaggcaggaccacagcagaatttgacctatggctaattttgctccacaattgaggcacaaatttttaacgtactctacccaataccctgtgaattattaggatttgtactctagttagtggaaatgacgatttacttttccagccctgtgtaagtacaaaggattgttacctctgtcttttcacgcatttctttctctggtctcaaattgttttcccrtgttcctgtgctgattagtat

SEQ ID NO: 381479 - DNA, 459 bp, Homo sapiens
tcttaaatatctaagcaaagatattctacatagctttgtattggcagacaaaaaaattgctctttaagtcaatttctgtaaggctaaggggtgtaacccccttcaaaatcctatttgtatatatatcagtttccagaaaacatagtcgatgccgtgttcttaataaatcaattcagtgtttaaatgagtacatttgctgtctcaataaagcataataaacagttgctacctttcatttctgcttccatcaaggaggagttaaagatattaaatggaaacttgtcatttttgtttcttggcaggaaattrttctctcttatacagaagttggcacaacttccaagttcaaagaaacacaggattttacattcaggaacatctgctttaatttgtgcttgaaataaagtgtgaatgtaaacatctttcaatgatctttctcttctaggcatttctacagca

SEQ ID NO: 381480 - DNA, 557 bp, Homo sapiens
  misc_feature (1)...(557): n = A,T,C or G
atacattcaagagattattttcattttaatttgtatgaactagccaagatctaggaatcttattaaaactcagcaggttctcctaaaatgaaaattgaatgagattagcattatttctttgtggtcagcatcaggtccaatgtgaggtatgcattcatatagcaggtgctttaactaatgagttatttacttaatgtaacgagtttcctgtgctaggttgactaagtgagataaatgcaggaaatgtctttttctttctccctatatcaccatttatcaaataagaaaggttctttcttccctgttcctgtatttcaagcaggaatcatagatttttccatcattaagtatttttaaacaatgctatttaaaattatttaaaaatacaatccaaagtaaatcaaattttatcttttcttcagtttaatttatcttttcttcagtttaaagtttgtcttctccactgaagctccctgcctgaactgcattgaggaagaaaattctcaycacctagaaagcccttttntgagagtttctccctgaacacttagtgaaag

SEQ ID NO: 381481 - DNA, 563 bp, Homo sapiens
ctggagttccaagccagtgggtcttatcctgtgaggtactgtggaagcatggcctgcagactattgctgttcagtcccttggattcagccccttttctaggggtacgtacaagggtctaacctcccactttgctggagttgcaggtgcttttgcccgaaagcccagaaagcctgtgtatctaagccttctgaatttccatgtgtacccaaatggctgctctcctgagactccatgtagctctgtgtgtcagaccgaaggccctggtggcttgggttcatgaggggtctcctgatccaaggattgcaaagatctgtaggaraagcgtgggttcctggggttgcacattcacttacggcttccctgggcaggggagatttgcctgtctctgttgctcctggtggaccatcatcctagcatgcttttctccattctccgtggatccagttgtttccctgattagtcccaatgagagtacctggatgtttcagttgaaggtggtgtatttactcacctcttccattcctctctatgagagcagtgcacactagctgtttccagtcag

SEQ ID NO: 381482 - DNA, 563 bp, Homo sapiens
ctggagttccaagccagtgggtcttatcctgtgaggtactgtggaagcatggcctgcagactattgctgttcagtcccttggattcagccccttttctaggggtacgtacaagggtctaacctcccactttgctggagttgcaggtgcttttgcccgaaagcccagaaagcctgtgtatctaagccttctgaatttccatgtgtacccaaatggctgctctcctgagactccatgtagctctgtgtgtcagaccgaaggccctggtggcttgggttcatgaggggtctcctgatccaaggattgcaaagatctgtaggaaaagcgtgggttcctggggttgcacattcacttacggcttccctgggcaggggagatttgcctrtctctgttgctcctggtggaccatcatcctagcatgcttttctccattctccgtggatccagttgtttccctgattagtcccaatgagagtacctggatgtttcagttgaaggtggtgtatttactcacctcttccattcctctctatgagagcagtgcacactagctgtttccagtcag

SEQ ID NO: 381483 - DNA, 558 bp, Homo sapiens
cagtcacagcaatttaacatgtatctaggaagttccaaaacttctctcatcttcctgtcttcttctgagccctccaaactgttccaacctctgcctgttacccagttccaaagttgcttctacattttygggtatctttatagcaatgccacacttctcagtaccaatattctgtattggacacagatccaaaccatatcaatttttttttatatttgaacatagattcaaaccatatgaacaagcatgctggtgcaatatgagctgatcattttctaaactgggcttactgaattcaacttgttaagctaaatattgtctttgaaagtatgctatatcaaagcacaaccaattttttttttactctttcctgaaatttattaaataactaaatgattgcttgcaacttccttttaaaatatattactgaatgttaaaactgatcttgaggttctggaggctctctactgggagttatatattcatcattgaacttaatatacataaacacttcagaggagagctaatattacacccataataaagagagaaaagtta

SEQ ID NO: 381484 - DNA, 488 bp, Homo sapiens
tcgagagtagcaaaattcacagaaacagwaaatagaatagtggttgccaggggcataggacaaagggaaatagtaggttttggttttgcagacaaagaagttctggagatattgtagttgcacaataatatgaatatagttagcacattgaactgtacacttaaaaataagatggtaaattttatgttgtttgtattttactacaataaaacaaatttaaaagggctcagtggtaagaatataatttctcgattcatacttttgctgttgaacagcaccatgaaaagatgatatgctctatataataataaattgttaccacagccatactgaaaaaaaattaattaaggagatagtctatctctctttgagcaacagacttcagggagttgttctatctgtagggcttacccatcaaagagaagatgtgaatgcaggccagttgaataggattctggatcaaaggtagtataattagaggaaaattc

SEQ ID NO: 381485 - DNA, 607 bp, Homo sapiens
agttatatattcatcattgaacttaatatacataaacacttcagaggagagctaatattacacccataataaagagagaaaagttaccatcagagagtggaataaattgtttaaaatcacacatcaaagatgtggtggagactaaatttgatcctatgactttctggctccaagcctgtgctatttagattatactattaagtgtcttaaatccgtttttaaaagggttaactttgatatagctcacacaatacccattttttwaaattcagttgccttctgtcaggcaccattgagagcaatgaggaaagagaaatggacaacacaaccatcattgtggccttattggttttatagtttagtggcaaaatacagccactaatcaaatatgatcagaacattataatcatatcaatttacactcaaaacatgttaaaagtgccaagagaaaaagaaacaggttacttctagatcagataacaggaaatcagaaaagtcttccataatgaaaattttggaactgagatccaaatttatgtgaactgagatctgaggaagagagtttacaaacataaaatgcagggagtacttgggatcagttccagct

SEQ ID NO: 381486 - DNA, 603 bp, Homo sapiens
tgttctttttgcttaggatggctttggctattctgggtcttttgtggttccatataaatgttaggatttcttttttatttctgtgaagaatttcactggtattttgatagggattacattgaatctgtagattactttgggtagtatggacattttcgcaatattgattcttccaatccaagaacctagaatacttttccatttttgggtgtcctatttatttttttcatcaatgttttatagctttcattatagagatcttttattactttggttaattcctatgtattttattttatgtatggctattataaatgggattactttttaaaatttctttttcacattgttcactgttggcatatagaaatgctactrttttttatgttgattttgtatcctgcaactttactgaatttgttcatcagttttaatagttttcctgtagagtctttagggttttccaaatatctgatcatataatctgcaaacaaggataattcaaatttttcctttccaatatggatgccctttatatctttctcttgtctaattgctacagctaggacttgcagtactatgttgaataatagtagtgacagt

SEQ ID NO: 381487 - DNA, 514 bp, Homo sapiens
tcccatggcgtgcaaggaattagagggtgttgagacagaaaagtgtcctgtcactaagtctagggttttctacagtttttatagtgttagctccctagacacgtcccttttaccagtatgtttttttaatactgctatgtccttttcttgtcccacactgccaccccagtctagaagtctgttttcaaaagagaagtgggttcattatgcctggcgttaatttttgctacctaaaacttctaagcactaactgattttgtataattaaatgcaagtgtaaatttggtgtctgctcattaaacatattaatttaatycttatctttgctatatactgcaaataacggaaacttatattatgctttgaggtttttaaagttattcctcatgcttcatttcatttgatttcaaaatagttgtgaaaaaaaggtaggacaccagctctgtattttttccataggtcagcgagatacagggggcagaaattcatgtgatacaataaagtgatgaaaata

SEQ ID NO: 381488 - DNA, 590 bp, Homo sapiens
cagaaatcatattgatgtcatttgggaagtgattcaaatgaaaggataggaaagtagtgagtcagaaaatgtgggratttttgttttgatagaaaagagagctccaaatagagggttaaatggcaaaaggcttgtgctctctctgtctctctccaagactaaacaaattaacaaatttatatgctaatggaaggaaccaggagaaataggggaagatctataagagaattaaggaagttgatagtttaagtgtcttgttaatgaaagataaaatgcatttattcattttcataatgattcatgtattcatctaacacttactgaatgcctatcgagtgccttcatgaaaaggttgaacttagataggagacactctttctccactgcaacaggaggagaggagtaagaaattaatatggaatctgaaccacatatataatttattggggcttagaagtcattttattccaatcctggtgattttcctcatcattatctacaaagtgaaggtatttcataatgatacattggcagggaaattctaggaggcatagaagagactattacagctcttgttgcaagtatgaatt

SEQ ID NO: 381489 - DNA, 504 bp, Homo sapiens
agaagctaaataggtaagttgagtattcgtgattataatagctgcttaaggtggttcccaatttcaaaattgaaagaaaaaacagaaagactaaaaagtggagtataactttcagcagcctcaagggcaaggaaggtcaaaaattaaagtttagggctcaccaaaaagacagaatgagagcatccttcaaaaataatttgtctttgaatgacttcactcatgaataaaataaggtgattgtcccaaaacaggcttcctcctagaagaaaatgtaaatgctcactgaacgaaaaagatatttaaagccttcaatttttctaaaaaatttcattcacaatatcaagcamacaagcaaaattaatcaggtatacagaaaggaaacattacaccaaaaaaaaaagtaaacataataaatatgcaggatatcaagccactggaatcatcaggtattggtttcaagataagttaattcatatttaaaaaggaatttaggaactggtaaat

SEQ ID NO: 381490 - DNA, 562 bp, Homo sapiens
ctctttcaggaagtttactattattgggtttatgtttctctaagtatacaggtggagcttctaaatgcctctcatgtataccacttcctgggtatacatgggccttcagagagctatcagtttgctgggcctgggtcccaagttttcagagagctatcaggttgctgttgctttccattgtcttgayccaacccgaggaacaatttagctcaacagttgcagaaaattacagcactcaatgtgctggtgtggtgatctgagcctgattaagtttgaatctgacaacactgctattcaccagctattgcccttaagggagtaacttgacatcaggtttctcatcaacaaagtggagtcaatgctggtcccacctcaaggggttgtttcccagcttgaatgataagggagttaacatgcatccaatgcaatgtatagtgtttttattttattttttattttttctcctgatggagacaatatgcataatactgtgagtcttgggcagacatccaggaaaatctggttgggaaagacctagagaattctgattaaaagaaagaat

SEQ ID NO: 381491 - DNA, 562 bp, Homo sapiens
ctctttcaggaagtttactattattgggtttatgtttctctaagtatacaggtggagcttctaaatgcctctcatgtataccacttcctgggtatacatgggccttcagagagctatcagtttgctgggcctgggtcccaagttttcagagagctatcaggttgctgttgctttccattgtcttgacccaacccgaggaacaatttagctcaacagttgcagaaaattacagcactcaatgtgctggtgtggtgatctgagcctgattaagtttgaatctgacaacactgctattcaccagctattgcccttaagggagtaacttgacatcaggtttctcatcaacaaagtggagtcaatgctggtcccacctcaaggggttgtttcccagcttgaatgataagggagttaacatgcatccaatgcaatgtatagtgtttttattttattttttattttttctcctgrtggagacaatatgcataatactgtgagtcttgggcagacatccaggaaaatctggttgggaaagacctagagaattctgattaaaagaaagaat

SEQ ID NO: 381492 - DNA, 592 bp, Homo sapiens
cagccaaacaaaacccacgggctttgtgtgggggtatgctttttaattggcctctgcccataaaactgccagaccctgaaaggcgttcactgtctgtctccctttggaaactttgctccaagtgtttgtacatgttatagccaaagccaagctgttctgttttcctgttttacaagagttggcagcaggggagggcaaggggccacaggtgtgctctgctggacagggagrcatgtatgcctctgtgtgtgtgtttgtgtgtgtgtgtgtgtgtgtgtgtgtgtgtgtgaaacagggagactggggaggttgtcagtttaggtagtcacaagcaccccaaatggtaattcagaattcagattctggacccagtcctgacactaacaggctgctggactctagtttctccctagtcttgccctcggtgtctcttcataaagaggttagctggacaagaacttcactgaagaatccttcagctttactaattgttttttcaatgtctcgggactgcaactggaaaagaagagggtaaccaactatatatatttgtggaagaggaggatgtttacagagcaaactcctggaggag

SEQ ID NO: 381493 - DNA, 571 bp, Homo sapiens
ttcatggatggtgcttgactcaggctccrttcaaatttattcatatctccctcaaataatcacagaagacctactgtatgtcaggggatacaggttgaatgagaggcagcttctgtgtgtttctaaggaatgaaataagtaaatggacaattatcatagtgtggttaagacaattgtggaggaaataagagctgatgtgggctcacagggtttccaggcttggtcaggctcagagaagccttctaggagtatcattaggcattgctatgtttttgtgttcatgaacagattgcctcagttcaaattcagatttcatctgtttactagtcatactacattgagaaatttatttaaaatttcttgccccaatttcctcatttttaaaatgagaatattgatatttataccgatctcaatgggtttttacatatattaaataaatgattatgtgtgaagtacttaattccatgccaggcatttagtgagtctgcaattaatgtaagctataataatgatcattaatgagcttatctaaactccaaaatgaagaacaaagaggagtgaggtgtgc

SEQ ID NO: 381494 - DNA, 658 bp, Homo sapiens
ttgttcgtatgctaaaatctgcttcccaggtccttcaaatttggtgcaaaaccaccatgcgatctattccctactcaggattccaagcctcccagaaggtggtctagcttccctgagacatgctttttgttttcatcattgcctactaaagtcaaagtgaccagtatgtgcagagacttatgttttctcaaaagacacttccacatcctttctttcacttgatcacttatacatcagatattccattacacagttctattaatcaactttgctayagtgcacgacaattttccacccatgattttactcagctcctatagtttaaaatacaaagtgggtcttattatatcagctctacatagggacctgaggctctgagataagtaagtagcttgttttactttaaataccagacttgacacttattattacttttggcaaattcttattcctttctgagcttcagtttccccatcaataaaagggtgattgttgcagcatctgtcttatagagttgtcaaaagtgttttcttgtttggaaatcactgagtacattgccttaccccatagcaaatgcctgacccatagcaagtgcctctgcaaatgaaaactgctgtgattatgatcatggtgtgctcgataaaagttatcaccagga

SEQ ID NO: 381495 - DNA, 570 bp, Homo sapiens
caattattgagttgctttcttgggtctctataatcaataacctgtctgcagatatctatctatataaagatattatatataaatataaatttacatatatatgcacatgtatatatagttgtacatatatgtgtgtatatatatacttaaatgtaatatttacaaaataaaactgtgatctcgtctagagaaaatgtattcatattacaaactgctcttccatatttatgtaccatattatacctttttattrttgttataattattatgggtatttctaattaatatgatgttgaaacctgtttggcaccttctggaagctaccaaaaaaatgacactccattgaagtgcttaaaagctgttctcataagaattcttctggcctattgtaaaaaagaaaaaaaaaaagaaaaagaagaaagacacaaagaaaataatctaaacaccaaaaactaaacacaattccaatcctttttctgtacctcacgcgcataaatttgctgctcctatttttttttctgtttatgtgtttttatggatctaagttaaatcttttggcaatatataaaa

SEQ ID NO: 381496 - DNA, 570 bp, Homo sapiens
caattattgagttgctttcttgggtctctataatcaataacctgtctgcagatatctatctatataaagatattatatataaatataaatttacatatatatgcacatgtatatatagttgtacatatatgtgtgtatatatatacttaaatgtaatatttacaaaataaaactgtgatctcgtctagagaaaatgtattcatattacaaactgctcttccatatttatgtaccatattatacctttttattattgttataattattatgggtatttctaattaatatgatgttgaaacctgtttggcaccttctggaagctaccaaaaaaatgacactccattgaagtgcttaaaagctgttctcataagaattctwctggcctattgtaaaaaagaaaaaaaaaaagaaaaagaagaaagacacaaagaaaataatctaaacaccaaaaactaaacacaattccaatcctttttctgtacctcacgcgcataaatttgctgctcctatttttttttctgtttatgtgtttttatggatctaagttaaatcttttggcaatatataaaa

SEQ ID NO: 381497 - DNA, 476 bp, Homo sapiens
ggagggacagttttgacctgacccctagaggagacagttttgacctcttcagcaccaggaaggaagctctgaggatggttgcagtgaggaagcatgggtctttaaggacttctctctcttttttgctggacattattgagtttgtgggaccctgcctcttcctgctacctgtgggtctgcccagagtccctgcaggcctgtccatgcattaaaaattcctattgtctctctttctgcttgggtggtatttcttaccaagggaatgtgcttgagagacytctgtttattcacttattgagtatctaccctgtgccagtcacagagcatatgcaactaaagacagagaagcttccttccctcagggaacttattgcccagtggaaattatagagaaggagtctggtcatttcaagctgtgctagaggaagaatggaggttctttgcactcactgttagagcatgagacacactggagg

SEQ ID NO: 381498 - DNA, 549 bp, Homo sapiens
attgacaaataaaaattttaaatatttasgatatactatataatgtgatgttttgatacacatatacattgcgaaaactaatatatccattacctcattattacctttttacttgtatgtgtgtgagcgtgtgtgtgtggtgagaatatgttaagatctacccccttagcaaattttaattatatcatacagtattattaactgcaatcaccatgctgtccattgtatcttttttcaaaattcttaaggtagtaccatataggacattgcttttagataattcttctttgcttatatgagcatttaacactataaattttcccataaaagtactgttttaacttcattccccaaattttaatatagtaaaagtataattattattgttttaaatattttatagttttccttgtgacttttaatcatccctgtttttgctgttattgttgaagaaaaagtaaaacatgtgccctacttctgaaccaacaatttggtagttaaatttattaacaccatggtcaggtttagcatagatttataattatatca

SEQ ID NO: 381499 - DNA, 593 bp, Homo sapiens
aaaatctgttgaatttattttaaacaacattagcactaccaatgtatattttcttcttgctgcttatcatgaaatgaaagagttgctttttgactgtcttcacaggaaagatttaggaaaagtagtctgtcctgaattagactgtgcaagtccaagaaaatatctcttcaaggatctggatgggagagccctgggtctgcctccaccagtttctgtatttcctaaaacagaggcagaatggactgcatccttcttcaacgcaggtaagctatatctgaatgcaatgcctgtggtagaggcaagggtgcttgtgaaggagctggttttgctgtgctcactgagaatgaaatgtactggtgaagacctaaattctagagttggagtctgtgctaatctgctgccaattcacctgtattacaggaatgctgagtcattatgtgatctcacaactttactgctgtgccytctatgagattgcctgtgtccatgtcaaaagtgcagattctcaatgcccaacttagtgcacagctgggaggacagttctcgcccagcttgggcacttgggcctgaagcagccatcatgctcagtgttt

SEQ ID NO: 381500 - DNA, 594 bp, Homo sapiens
atgacaaaatgggacagagtttagggatggaagtggagtatcagtgattcaatggatggaaaatagttttggcatttactgacccctcttccacttgttcctcctccttctgctgctcctcctttycctctttcacctccctctttcattagtcatgttacccttttttttttttttaccatgggagaattagagatgatatatatataaagttatccttgacagggtggggaaaggattttcaatttgtagcaaaaaggaagggcctacttgggctgcagtatctcttagacaggttggaagcattattttcagtttcttacatgcataaagggccatatgtagattgcacatgcataaattgtgaatgactgcattcaatatgtaagtcaacaacactgttcctgtggacctatgatcagaagaaagaaattgggatggagacagcagcagacacaacaggcaacggtatcaatgagctgtttcaattgtgaaaaaatttcgagagaggaaagtcacctagtaatcattatcaggctttgattttcccgagtccttcctttacttctatgattatacattgtagggaaaatt

SEQ ID NO: 381501 - DNA, 594 bp, Homo sapiens
atgacaaaatgggacagagtttagggatggaagtggagtatcagtgattcaatggatggaaaatagttttggcatttactgacccctcttccacttgttcctcctccttctgctgctcctccttttcctctttcacctccctctttcattagtcatgttacccttttttttttttttaccatgggagaattagagatgatatatatataaagttatccttgacagggtggggaaaggattttcaatttgtagcaaaaaggaagggcctacttgggctgcagtatctcttagacaggttggaagcattattttcagtttcttacatgcataaagggccatatgtagattgcasatgcataaattgtgaatgactgcattcaatatgtaagtcaacaacactgttcctgtggacctatgatcagaagaaagaaattgggatggagacagcagcagacacaacaggcaacggtatcaatgagctgtttcaattgtgaaaaaatttcgagagaggaaagtcacctagtaatcattatcaggctttgattttcccgagtccttcctttacttctatgattatacattgtagggaaaatt

SEQ ID NO: 381502 - DNA, 568 bp, Homo sapiens
tggcactttcttgtaattgtcacacaagcaaaatacttcagtgaatgcattttaataattaaattaaaaacaaaaccaaaaccaaaatagaacatatacctggactaagatttattagtttgtgataactcttgagttttgctctcctaatcagtgatacttctgtgcaatatgagaagattctaggggcaatagttacttggccacttatgataaagtgtaaacacctttaaaagtgtgaaaataaccttcatataagaaaaaatttcaaggtccaggtgatatttttatttcaagtagtgttgtactgtaccttgaaattaatcrtaatggtttacatgaagctcctattatgattttccccaaaaagttttaaatttcatttctgagattagctgccaatatcaagccatcgtggaaaaaatttctagtactgctagagagactattttccaaatctctctgtttggcataataataataataatatatattatgctttagatactgttctgagccttttaaaatacatttaattggcacagacaccttaggagcttgataccgt

SEQ ID NO: 381503 - DNA, 637 bp, Homo sapiens
tatacacttaataatatcttcaaagtcccttgccatattcacataatcaggattagggcataagcatcctagggaggctattattcagcacaccatagttatttgtaagaccttagtgttagttgaaataawaaaagtaagacattggaatactgatgccatctctgcaagattttttctctttcaagaaagaaattagaccttacttaccacattttagaggtactgtggaagtgtggagaattccatatccactctgtaggataaacatcagtttttgattgaaaaattatgaggaaatgttgacagttcatatggggctggcccaggaagctggagggggatgaagcggtaatgggaacttagagggaacagaggtcagttcatgtggggtataccaagagatgtaaaaggatggataggatggcagaaaagaggtgattaagaccagttcctgcggggccagtatagcctggtttgtctttgacatttttgtcccaagttgaagcaagaaaattttattttaatatgcactttattttaccatatgtattttaagtatgattgtttacaataaactctctttgatgtgtttatttactacacaactgcttcaaaatacggccaggattggcct

SEQ ID NO: 381504 - DNA, 617 bp, Homo sapiens
tgagtttttgtcctcaccttgaaaaacaaaccttcataaccaaaatattaaaaatctataaagcaatgattttaatatgattaaaacctagcaaaatgtcaaagacaactggatttaattattattgtacatgtctggttaggtctgttgatgggtcaggggtactcatattagtaataaaatagagatatacataaatgtaagttattatgtattatatataatttacttttctgccttctcagaaaaatactaaatatattgtgataatcaagattttacattatttggtggtagtgctgtttcacaacgctttgagtcattayagattgtagtaatttttataaattcctacttgtacaaactttgcattgtctcaacacaatttataaaatgagacagcttcacaaataaatcatgaattttaaatattatattcaaacattgcagtgggctcccacaaatcaacaatagatgcttcttgacttaaaatgtgattatgtcccaataaacctatcataaattgaaataatcataagttgaaaaggcatttaataccccaatacacccaccataaagtagaaaaatcataagatgaaccatcataagtaaaggaa

SEQ ID NO: 381505 - DNA, 617 bp, Homo sapiens
tgagtttttgtcctcaccttgaaaaacaaaccttcataaccaaaatattaaaaatctataaagcaatgattttaatatgattaaaacctagcaaaatgtcaaagacaactggatttaattattattgtacatgtctggttaggtctgttgatgggtcaggggtactcatattagtaataaaatagagatatacataaatgtaagttattatgtattatatataatttacttttctgccttctcagaaaaatactaaatatattgtgataatcaagattttacattatttggtggtagtgctgtttcacaacgctttgagtcattacagattgtagtaatttttatmaattcctacttgtacaaactttgcattgtctcaacacaatttataaaatgagacagcttcacaaataaatcatgaattttaaatattatattcaaacattgcagtgggctcccacaaatcaacaatagatgcttcttgacttaaaatgtgattatgtcccaataaacctatcataaattgaaataatcataagttgaaaaggcatttaataccccaatacacccaccataaagtagaaaaatcataagatgaaccatcataagtaaaggaa

SEQ ID NO: 381506 - DNA, 626 bp, Homo sapiens
attacctccttccttctacttggagtttaatttgctatcctttttccagtttctaaggtgaaartttagactttgattttaaacctttattctctttcactacaaatgtttaaagctaacatttgcctccaaatactgctttagctccatcccacaaattttgatatattgtgtttattaataatgtttattatcatttagttcaaaatattttaaagttttctttgcaatttcttctttgacccatgggttatgaaggaatgtgttccttgatttccagataactgcagcttttccagatatccttctgttattggttatcagtttaatcctcttttggacacagagcatattctgaacaataatagttctttgaaatgtgttgagatttggtttatggcccagcatatgatctgtcttggtggatgttccaagttaaatagaaaagaatgtgtattctgcagttgctgggtgtagtgttttagaaatgtcaattgggttaagttgcttgctctaaatgtagtttattgccaatttttaaatttgtttaacttggtcattagatacaaacacaagtaggattattatgtctccttaattaatagacaattttatcattattaaat

SEQ ID NO: 381507 - DNA, 601 bp, Homo sapiens
ggagatgggttaaatatgcctctggtatagttaggctaaattgtaactgtgaaaggctgtgttctctgtgactttttatattctccaaacaagaaagaacagagagtgagagatataagggtgattttctattacaatcgtcaaaagtagagagcagatttatgggggcaaagggaaagaagcatcattatttagggtatttgaaatcttattacatttagccctatgtaaatttccagaacaaatgcataatgattgatgactatttgcttctctgtcatctatcatttttctaacctggtagaaatataagaaattgacctacctcttgcccccaaccaaccagaaaaatgaagaggcatcaataagaaagataattgctcaaaagataagttgtacttcaagcttttaaacyatttctatagggagatttgctcctgttgagtgcctgataccaaagatgcattgcccatcaagggcatggctccctgactcacccagctggaagttcccctcttaccggctgcattgtgctggtgataccagattaactcagggattgattgaaaggcgtgtctttcagccacataccactgtcctg

SEQ ID NO: 381508 - DNA, 566 bp, Homo sapiens
aatttttttcttagactctctctctctatatatacgtatgtrtatgtgcgtgtgtgtatgcatacacatacacagtataatgaagcctcttctcacttctttctctctctccatgaatatatggaggaataagagaatatatatatatgtatatgtgtgtgtctatatgtgtgtatatgtgtttgtgtatgtatatataaaatatatatatgtacatgcaggaaattaaacagcaagcttttttttgtacaagttaatttaggatttaaagaaaacagtcctttcaaccctatcattgataaatatatgggcagataggggtaactgtaggggatgagtatcttgcaggcttcataagcaaactctgtatcctgtgtttacctctgcagtgcaatcccacttatactctgagttccagtggatgagaagaggagaactttttgtcctgccagagcacactcttcttccacctgccctctcacctcccagccccagccccaatttcaagtcactgttcctcagttcacttctggagaagcagtggaaacctctagtttaggcggggt

SEQ ID NO: 381509 - DNA, 566 bp, Homo sapiens
aatttttttcttagactctctctctctatatatacgtatgtgtatgtgcgtgtgtgtatgcatacacatacacagtataatgaagcctcttctcacttctttctctctctccatgaatatatggaggaataagagaatatatatatatgtatatgtgtgtgtctatatgtgtgtatatgtgtttgtgtatgtatatataaaatayatatatgtacatgcaggaaattaaacagcaagcttttttttgtacaagttaatttaggatttaaagaaaacagtcctttcaaccctatcattgataaatatatgggcagataggggtaactgtaggggatgagtatcttgcaggcttcataagcaaactctgtatcctgtgtttacctctgcagtgcaatcccacttatactctgagttccagtggatgagaagaggagaactttttgtcctgccagagcacactcttcttccacctgccctctcacctcccagccccagccccaatttcaagtcactgttcctcagttcacttctggagaagcagtggaaacctctagtttaggcggggt

SEQ ID NO: 381510 - DNA, 606 bp, Homo sapiens
gtctgggggtccaggactcaatgatattatatttagtataatattgtaatttagtataatatcataatttagtaaatatatacaagtgtgttcttttctgagacaattcatcaaattgcctcctcaaaatagctaatgtgagtcaatatattcattcattcagtgtacatttatttagtacctattaactcttcctcattaaaagacctcaatttgagtccacagtacagtcatccctaggtatacgtggtgatcggtttggttgaaaaaaatccacatataagcggacccatgtagttcaagcccaagttgttcaagggtcaactttaaatagaatgtacaggattaagaaaatgctattgttcttagttttwaaaaaaaaaaggatattacatgctagacactgggcaagggagtgttcattagatcccctactgtgaaaagcaatttgcctagtcaagagtatcaccttgggacattagacaaactttggttaaaatttcaaattttctacttgcttagctgtgttacttaggtcaagttacgtccttcatgatttcttaattaaatgatcaatctaatgtgtaaactgccaaaaatgaggtg

SEQ ID NO: 381511 - DNA, 606 bp, Homo sapiens
gtctgggggtccaggactcaatgatattatatttagtataatattgtaatttagtataatatcataatttagtaaatatatacaagtgtgttcttttctgagacaattcatcaaattgcctcctcaaaatagctaatgtgagtcaatatattcattcattcagtgtacatttatttagtacctattaactcttcctcattaaaagacctcaatttgagtccacagtacagtcatccctaggtatacgtggtgatcggtttggttgaaaaaaatccacatataagcggacccatgtagttcaagcccaagttgttcaagggtcaactttaaatagaatgtacaggattaagaaaatgctattgttcttagttttawaaaaaaaaaggatattacatgctagacactgggcaagggagtgttcattagatcccctactgtgaaaagcaatttgcctagtcaagagtatcaccttgggacattagacaaactttggttaaaatttcaaattttctacttgcttagctgtgttacttaggtcaagttacgtccttcatgatttcttaattaaatgatcaatctaatgtgtaaactgccaaaaatgaggtg

SEQ ID NO: 381512 - DNA, 605 bp, Homo sapiens
acttccaactgttgttaaatggaattcataaatgttctctttcaaatctcatgcaaagggccaagtatgttttcagtgagtaatttaaaaactttgacatgctaatatgaaagacaaagctaagaagaacaaggggaaagtaaaatttgtgccaggaatagatgggatcatatggagagacactgtggttgcccttgtagaaaacatcttaagaatgaagttctattatttcaacttggttctgacacattttgatttttgttctagagaaggttcatcgggttttaggcattatcatataaaggaaacaacaacatctccaaagaagtattacctagctgaaaaacatgcttttggctccattcctgagattattgaatatcataagcacaatgcagcaggtaagtgagctgtgaaaacctacttcaaatataaggtagtgattaaaatgatcagatactgtgattaattccttgagcagttttattttatagttagttcattgtagaatgtggttgatttwaaattactgcatattaaaggaatgatatatacaaagaaaatttagaaataatatcaagttttataaaaagctctgtcttgac

SEQ ID NO: 381513 - DNA, 545 bp, Homo sapiens
aaaaaatatccaataataggaaaatgaatcaatgaattatggtataatgaaatacaatagaagattatgtaatcttaaaaagaacgcattagatagatatttagcgatataaatattatcataatataatattacataaaatcagaataattttaatttaagartataatggtaggtataaggaaaatgttaatattggttatgccaaaatagtaagactatgtttccattttcttttctttctttctgtaatatctttttatgaagcatgttttatattagaaatatgaatttaatttttacaattctggaactcagaagtcaatcttcctaaggtacacagtactcctctaattttctctgctaggcatcttgaggtgcctcctctcttgagagcctcctacgctactggagctgaaaccattcaactgaggcaataagtgttactcggttgttcattgttcagcaagaaaaatattgcaaatactggagaatgcatgatgtatttttggagctaatagatggaaataaaggcagttttgcta

SEQ ID NO: 381514 - DNA, 545 bp, Homo sapiens
aaaaaatatccaataataggaaaatgaatcaatgaattatggtataatgaaatacaatagaagattatgtaatcttaaaaagaacgcattagatagatatttagcgatataaatattatcataatataatattacataaaatcagaataattttaatttaagaatataatggtaggtataaggaaaatgttaatattggttatgccaaaatagtaagactatgtttccattttyttttctttctttctgtaatatctttttatgaagcatgttttatattagaaatatgaatttaatttttacaattctggaactcagaagtcaatcttcctaaggtacacagtactcctctaattttctctgctaggcatcttgaggtgcctcctctcttgagagcctcctacgctactggagctgaaaccattcaactgaggcaataagtgttactcggttgttcattgttcagcaagaaaaatattgcaaatactggagaatgcatgatgtatttttggagctaatagatggaaataaaggcagttttgcta

SEQ ID NO: 381515 - DNA, 545 bp, Homo sapiens
aaaaaatatccaataataggaaaatgaatcaatgaattatggtataatgaaatacaatagaagattatgtaatcttaaaaagaacgcattagatagatatttagcgatataaatattatcataatataatattacataaaatcagaataattttaatttaagaatataatggtaggtataaggaaaatgttaatattggttatgccaaaatagtaagactatgtttccattttcttttctttctttctgtaatatctttttatgaagcatgttttatattagaaatatgaatttaatttttacaattctggaactcagaagtcaatcttcctaaggtacacagtactcctctaattttctctgctaggcrtcttgaggtgcctcctctcttgagagcctcctacgctactggagctgaaaccattcaactgaggcaataagtgttactcggttgttcattgttcagcaagaaaaatattgcaaatactggagaatgcatgatgtatttttggagctaatagatggaaataaaggcagttttgcta

SEQ ID NO: 381516 - DNA, 634 bp, Homo sapiens
atataaataaattaatttttactcttatttcccaccccctgtgctctcagtactgtcctggaatgcaagggaaaaagttgacctttgaaatattacattttaaccacagacttcttgtattttcttcaccataacaatagagaaaagtacttttctttcatattttcccacctcctaattwgaacaactattgtagctgcatattttctcaagaaagagtacagtttccttgccaggacaacacggataagtgaaaggcttctgtggctgcttggtactgaacaaatggagaagaaatgaagggtgtcagcactctccttcctcccagacctgctgtgaggattaaacgagactttacaggatctgaaagcactttctaaatgctaatgtgatgtccaaatagaaggcagtgttcatctccctcagccacttttgctgacttcagtctccccactaagtgaaatttcttaaatcccaaagcggaggctcccctcaaaaagggcatcataaattccctctgtagccaggagtcttaaagcttccctgaatttccccaaaccaagcaacacatttcagtatttgtaagatcctgttatgagaaggaactgggtaccttttctttaataaatggtgg

SEQ ID NO: 381517 - DNA, 647 bp, Homo sapiens
taggatctcactttgttgcccaggctggtctcaaactgggctcaagttatcttcccaccttggcctcccaaagtgctgggattataggcatgagccaccacattcagcccaaacatttctgagaccactacttgaactatcaagtctcctcttgtaactgattctcattagaaataatacacatttattgaatgtcattgatatataaagataccattctttgagtgggggaaatataatttaaaagtcgcaactactgacaatcaacaaataaactctaatgagaatcataaagcttgttcccagagaaccatgatacagggtgggacagtacgcaaataatgggctcctgttgtcagacttcatggtgattacaytagtgctttctccagtatctttcttcctattgtactcctgaagcactcagaatgataaagataaatttctgatcattcctacaaagagtgcaggcaaagttaagatttaactgtgattgctggttgtttcatctcgaattcaaaatcctggatttccgaaacaatggagcttgatgtcacatttggctatcttgcttttgtctcctcttctggaaagaacaaatcatcttcctgaaaattacaggagacacttagtatgacaaaataagg

SEQ ID NO: 381518 - DNA, 647 bp, Homo sapiens
taggatctcactttgttgcccaggctggtctcaaactgggctcaagttatcttcccaccttggcctcccaaagtgctgggattataggcatgagccaccacattcagcccaaacatttctgagaccactacttgaactatcaagtctcctcttgtaactgattctcattagaaataatacacatttattgaatgtcattgatatataaagataccattctttgagtgggggaaatataatttaaaagtcgcaactactgacaatcaacaaataaactctaatgagaatcataaagcttgttcccagagaaccatgatacagggtgggacagtacgcaaataatgggctcctgttgtcagacttcatggtgattacattwgtgctttctccagtatctttcttcctattgtactcctgaagcactcagaatgataaagataaatttctgatcattcctacaaagagtgcaggcaaagttaagatttaactgtgattgctggttgtttcatctcgaattcaaaatcctggatttccgaaacaatggagcttgatgtcacatttggctatcttgcttttgtctcctcttctggaaagaacaaatcatcttcctgaaaattacaggagacacttagtatgacaaaataagg

SEQ ID NO: 381519 - DNA, 647 bp, Homo sapiens
taggatctcactttgttgcccaggctggtctcaaactgggctcaagttatcttcccaccttggcctcccaaagtgctgggattataggcatgagccaccacattcagcccaaacatttctgagaccactacttgaactatcaagtctcctcttgtaactgattctcattagaaataatacacatttattgaatgtcattgatatataaagataccattctttgagtgggggaaatataatttaaaagtcgcaactactgacaatcaacaaataaactctaatgagaatcataaagcttgttcccagagaaccatgatacagggtgggacagtacgcaaataatgggctcctgttgtcagacttcatggtgattacattagtgctttctccagtatctttcttcctattgtactcctgaagcactcagaatgataaagataaatttctgatcattcctacaaagagtgcaggcaaagttaagatttaactgtgattgctggttgtttcatctcgaattcaaaatcctggatttccraaacaatggagcttgatgtcacatttggctatcttgcttttgtctcctcttctggaaagaacaaatcatcttcctgaaaattacaggagacacttagtatgacaaaataagg

SEQ ID NO: 381520 - DNA, 568 bp, Homo sapiens
ttttgtctcctcttctggaaagaacaaatcatcttcctgaaaattacaggagacacttagtatgacaaaataaggcctctgaaactgtccaatctcacatgtaaaaagtgtaaaatcacagaactaaaatcaggttccggattttcctggaaatagaatgtcaccgggatctgttcaaaggtgagctttggctacattttataacagtgtttaaaactcgaatgcaaaaaactgctttcaatataatcagatatgtgcaaaaacaatttgttaaataacatgggaagattatattaacaaaagacatttccagaatactaacattcatgtgatttataaaggtgcattttctgtaaagagctatacagcccaaaaacatgaaattcttcaagggagtcccctttatcccatgagttggaagaatttattttcatattctatgcatggatcactgaagtgatgaatgwcactcgtcttcaagaaggaagcactctcagccttgtgaagaagaacctcaagggttcctggggctatgatcatgaagagcaccacaatgaagactgctgcg

SEQ ID NO: 381521 - DNA, 560 bp, Homo sapiens
ctccttaaacccagggcaagatcctttggtaatgaaatcagtggttctcatcccccaggggacatttggcaatgttctagagacatttttggttgtttctcctgggggaggggtattggcatctaatgggtaaaggccaaagatgctactaaatatcctccaacacacagcacgtcctcctacaacaaacaattatccagcccaaaatgtgaactgtgctgagatccaagaacacttggatctggagaaactagagtctgaatgragaagattctccaaagagagctgagaaactgaccttgcacataccacacaccctgtcgttaggaaacctgaaaagcatattgcccctacttgcaccctcagtgttgctagtgtctacaagttgttcccatggtaacacaattcaaggcagacacaggaaagagcacaagtacaatatgggtaaaggaactgcgtatgtttttaagagaaaagcaactcactgataaaaagacatttcatttggttttgaaagtttggaagttcatcaaaaagtaagtaataaagcctctccttcc

SEQ ID NO: 381522 - DNA, 553 bp, Homo sapiens
ggagaaactgcatctctaccaaaaaaaattaaaaagttagctagacaaggtggtatgcatctgtagccccagctactcgggaggctgaggcaggatcacttgagccttggagattgaggctgcagtgagtcgagatcacgccactgccctccagcccaggtgacaggttgagactctgtctcacaaaaataaaagagtgaaataaaataggatagattaaaaaattgcagacatggtacatgtgtgaggattgtttcagttacctgtaactatctatcctctcttcttccttccttcctctctccctctctccttccttccctcctatctgtcatcacttatctactttacctaaacacctatctctatatgttttgcattgttatttaacacacacatatrcatacacacatataaacaggtaaaactgtatctgggttttcttcaaaaaattttaaaagccaccaactcagtacatcatttcacctacttagttatgacaaaggatcttaaaagtccaagtctattaaaaccaaaacaaaacaatgacaaa

SEQ ID NO: 381523 - DNA, 501 bp, Homo sapiens
gtcacaacaaagcttctcacggacactgcactaagaagcgaactctccaaaaagctgggatatgtgaaaaatcagtcagcaacataaccttcctctaaaacaacaagcaatctggcacaaatgaagtgtgaatctcctggggtgcagaggcatgacctttggaaattaaggaattcctgcaaagcctgttgtctgtttttcgggacatcattaataggaattatatggagccatttctgtgtattctgtgggcccaagatgtgtgccaaaggagcctaggtgtatgaggcttttacacaatcatacttatacttgcatggtgcagcttctctatgctagcctaactgcacattaacttgttaatctgttccccagactctgtttactgaaaggatacttgctagaccagttgtgcttcagactccakgacaaggatgtgaactttagtttatccattctgttccttcctgttattttgggcaatttgtaggaatcattttt

SEQ ID NO: 381524 - DNA, 580 bp, Homo sapiens
ctcttaaagcaaaacagagacaaaacagacaaaattttgtgtcaytttcagcattacatcatatccatgataacacagctatcccataagtttgcaaggtgaccagacattgcaaaaccagagtttaaaggtactctgaatctcttacactatctaatgttatatatcctctatattgaacactgagatttcggcctccttgaatgaagacttctgggaattatctttggcaaccatatgcttagcaaaaaagtctgattattttggctgccttgtgtcacataacaacaagtagtcgcagacttccagtgctttcctcagagtgtgttgctttctttatggcaatcaatttacttggcccagctgtcaggcattcaacttcccaattaacaactggaaatagaactcgaaccacaggaaggaagaaagctcagattttccccaatgcacacttaatgaaaaattgagcctactctagctcatctgcgtttttcccataaaacacaaatgtcaatttggaaaacaatatacctacagagttttctccacatagaaaagttccacatgatatgtgactggg

SEQ ID NO: 381525 - DNA, 520 bp, Homo sapiens
ttagcactctccccacctaatcctattatgaaataatgctttcaggcaattattctgccataagatattgaatacaaacatgagtcagaggcagtacccaaagcaaaaacctggggtgcaatggtaaagtgaggatggagaatttgccaaacagaaaagctcagwctagagatagaccactcttgcctcattataagacgacactactgatccataaacagtggggcatttacttagcactgttcttctgattatggtgataaatccatgtctgtagcccaagtcatcactgagtccaaaatggcctttttttttttaaagaacagtttttattttggaataattttagatttacagagaagttgcaaagatggttccaagagttcccatatatccttcacccagaattccctaatgttagcatcttacataaccatggtacatttgtcagaactaagaaattcacattactatgagctaaactctagattttattcagatttcaccagtttttccacta

SEQ ID NO: 381526 - DNA, 353 bp, Homo sapiens
atccatgtaggcttatagagtgtcattttaatgttctatgtctttactgtgcctccactttctttgatgaaaaggtctatttaaaaattggtaggaaaatatttaacataataagatgatgagtcagagttttaaaaaagctaaaaagggaagatgtagttaaataatgcacctttttattttctagctacatgactcatgacatataatgtattctgctaagttcaaagtttcctcttacaaaragagttttatgaaacaactcttcttcagaccatttttatttcaattatagtagcaggttttggagtttaaatcattaacaacctctgagtgaacttttatccaaatga

SEQ ID NO: 381527 - DNA, 353 bp, Homo sapiens
atccatgtaggcttatagagtgtcattttaatgttctatgtctttactgtgcctccactttctttgatgaaaaggtctatttaaaaattggtaggaaaatatttaacataataagatgatgagtcagagttttaaaaaagctaaaaagggaagatgtagttaaataatgcacctttttattttctagctacatgactcatgacatataatgtattctgctaagttcaaagtttcctcttacaaagaragttttatgaaacaactcttcttcagaccatttttatttcaattatagtagcaggttttggagtttaaatcattaacaacctctgagtgaacttttatccaaatga

SEQ ID NO: 381528 - DNA, 398 bp, Homo sapiens
gcctcagtttcatctcgcttgtggggtttctgctgagaaatctgctgttcacgtgataggttttcctttataggttatatgatgcttctgtctcacagctcttaagagtatttccttcgtcttaactttggataaagtgatgacagtgtgcctgggtgaagatctttttgtgatgaatttcccaggtgttctttgtgcttcttgtatttggatgtctaggtctctagcaaggccaggaatgttttcytagattattcccccaaatatgttttccatgcttttggaattctcttcttcctcaggaacaccaattattcttaagtttgatcatttaacataatcccagacctcttggaggctttgttcatattttcttactcttttttagtattagttgt

SEQ ID NO: 381529 - DNA, 575 bp, Homo sapiens
tttgcttagaatgatgtttgccccagagaacaactgttagtagcatactcattctctgcctttttactstcatcttgaaacggcactttagtcagtttaacacttggcaatcaatgcttagtggctcagtacaatgaactatgactgttaccatttgaaaagctgaagaaatactcactctatacaaagagttaaaactatttcagtattttctaatttagtagccactgactttattgttattttactttattttattttctcctgaaaataatttatatttaaacaaagtcgatgcttaatatactaaaacctttacttttccttacttttgtacctcacagcatatattactttctcatgtgtttctaaaaatgtgaaaagtatagggtaggaagaaacttgcttagatttgttcaaaatgaaagtttatgtaaaactggaaaaaatgactcagctacatttgtcctgtcaggtggctccaggattctcgccagtaaattgcatgctggatagttcttcagatattgttggttttatctctattttaaataatcaaccatgccacttatact

SEQ ID NO: 381530 - DNA, 573 bp, Homo sapiens
tctgtctggaggtgcagaaaagagtccttcaccaaagatgtctttgcccatggagaggagaggggagggactgcattagtaaagagggttgcagaaaaaaaaagaatccaggaccctgtaccaagtctccaaatatttcaaattgaaccccccctttggtttcacttggcttatataaattgaggagtttggcagagataattgttgttatacgtattttgaattttaggattgtatgcattttatgaagttttcatatgttttgtctcactataatatgttatgattgaaaaaaggcaaatatttaaagtctccattacaaccacaatggaactgaccttgagaaaagttaaatgtgttgtatgtatggaatctctctggctttaactttctagaactcatcctytaagtcaagaaagcatgatttttttatgaagtctaaaatgtaaaatatttacattttaaggaattataatttaggagtgataatgggattgtgattatgtttttaagaatccttttgtttaagacatatgtactaattttttttttttttttttttttttgagctgg

SEQ ID NO: 381531 - DNA, 573 bp, Homo sapiens
tctgtctggaggtgcagaaaagagtccttcaccaaagatgtctttgcccatggagaggagaggggagggactgcattagtaaagagggttgcagaaaaaaaaagaatccaggaccctgtaccaagtctccaaatatttcaaattgaaccccccctttggtttcacttggcttatataaattgaggagtttggcagagataattgttgttatacgtattttgaattttaggattgtatgcattttatgaagttttcatatgttttgtctcactataatatgttatgattgaaaaaaggcaaatatttaaagtctccattacaaccacaatggaactgaccttgagaaaagttaaatgtgttgtatgtatggaatctctctggctttaactttctagaactcatcctctaagtcaagaaagcatgatttttttatgaagtytaaaatgtaaaatatttacattttaaggaattataatttaggagtgataatgggattgtgattatgtttttaagaatccttttgtttaagacatatgtactaattttttttttttttttttttttttgagctgg

SEQ ID NO: 381532 - DNA, 605 bp, Homo sapiens
gtggcacgcaactgtagtcccagctactccggaggctgagaaaggagaatcttttgaacccaggaggcagaggttggagtaagctgagatcgcgccactgcactccagcctggcggcagagcgagactccatctcaaaaaaagaaaattctttrgtggtatccactgatgtagaacatgtgacctagtaattttattccttgatataacaaagtttagcctgcaatggaattgggaaataatggtcttcattggttttttaaatggtttttcatttcttaacacataccacatattcaagaaatagaatattatagtatctctaaagcctcctttatgctctctcttattactctccaaacaaccactatactaacttctgtcatatattaattctacctatttttgaactctacataactggcatcatatagtatatttccttttatgtcttggttctttcactgaataatacaaatttgatactgagcctttgtgttttgcatagcagcaatttgtgtactgccattactacatgattcttacttttacagataaagcacaatttattcattctgctatggtggtcatttgggctgtttctcg

SEQ ID NO: 381533 - DNA, 605 bp, Homo sapiens
gtggcacgcaactgtagtcccagctactccggaggctgagaaaggagaatcttttgaacccaggaggcagaggttggagtaagctgagatcgcgccactgcactccagcctggcggcagagcgagactccatctcaaaaaaagaaaattctttggtggtatccactgatgtagaacatgtgacctagtaattttattccttgatataacaaagtttagcctgcaatggaattgggaaataatggtcttcattggttttttaaatggtttttcatttcttaacacataccacatattcaagaaatagaatattatagtatctctaaagcctcctttatgctctctcttattactctccaaacaaccactatactaacttctgtcatatattaattctacctayttttgaactctacataactggcatcatatagtatatttccttttatgtcttggttctttcactgaataatacaaatttgatactgagcctttgtgttttgcatagcagcaatttgtgtactgccattactacatgattcttacttttacagataaagcacaatttattcattctgctatggtggtcatttgggctgtttctcg

SEQ ID NO: 381534 - DNA, 657 bp, Homo sapiens
aagaaatacactgtgattaaaaatgaaattaaagcaggaaccttgggaggtaagtgaacaccaaagcttgttttcagccagagggttttctgacaaaccctgggaacttgaggttttgctttaatgaacctcattacataatggggtatgagggagagaagataaaactcagagcctgcccaagattcagaattgagttacataaagcaaacccctacagtttaatgaaaattaaaccccattgcacagaaaggaactgattggagaatttaaaaatcttaaccttgacaataaatgaagagaaaaattcaccctgcatatttatattcacaaggtggcttttacatggggtgaacatctataaaaataatgtaattcatgccaggcacagtagctcatgctataatcccagagctttgggaagccaaggccaaaggattacctgaggccaagagttcaagaccagcctgagcaacatagtgagacctcatctatacacaaagaaaaaggaaaaaaaattatctgggtgtgatggcatgtgcctgtagtcyttggtacttgggaggctgaggcaggaggattgcctgaacccaggagtttgagattagagtggcctgtgactgaaccactgcactccagtctgggcaacagagggag

SEQ ID NO: 381535 - DNA, 519 bp, Homo sapiens
ggaaattattgttaatattggaatctagagggcctctgtagcctgaaggaatgatcaagtaaaaagtgaaatctagatgattcaaaaggtaagggggtaaattatttaaaagtttgtctacatagggaactcttaatgttctaaaatgctgtgtaagcgaagcatagttaaaatgagacattgtgaccatgaatttgcatagccctaggttttcttttccaagcagaaagaatagacattaggagacataaaaaatctgtaatattcctggaataatctttctgacattgaaaaatgtaaggcagacagagcaaaatatgtgagtatagatatgagaccacagaaaataatttgatacaatttttcatttcttcttgaaataatktgaaagttatccttttgagtttcttaatcatagaaagtattctgggtctactgaactaccaagagcttatgaatgcatgtggaacagaggtatgaccagagtcaaaggttttctatttcttccttgatgtaaaa

SEQ ID NO: 381536 - DNA, 580 bp, Homo sapiens
agtgaaaatttggagttgttactacagcataacctgaactattttgaatgwattaagaagctaaagtagaaggactagcaggaaaattaaaccccagaagaagtaaaggaaactgggtagaagaaaatctaaatcttcaaactatccctaagccttaggaagaaaggagttgtgtgtgaaagaaattgtagaaagtgctatgtcatggtatagctcagtttatgtattcctttctagtggaactgggtttgaaggttatttcagtttcttcgcaaaattttacctcatttaaaaaatttttaaatattttagttgccctgggaccagaaacctaaagttgaggattttgagtcttaaaattagaaaacagattatgactttgaaaggtttcaattttttatcttacaaaacttacagtgactaaaaaaaggtaattaaaaattaaatagctggtcttgattcttaattttttaagaaaatgcaacttgtctttggtctttttatgtttatgtgttgctttaccattttatttcagggatctgggtctatcttacacgaatttcctatgaagagaggctta

SEQ ID NO: 381537 - DNA, 563 bp, Homo sapiens
caagacaatttcaattgataagtaaaataatttctttccattttatgatccaggatagctcctattattttttccacataactatctttcataatcaatttatatacataaattggtgaaagttaggcaaatttataagattcattctctttttatgaatcactactatacattttaaaccaagtttctttcttcccttggtagctagttccacccataccaytaccttctttagtgtaaaaatgactctgtctttgaaattaaaaaatatatataaatatttgtaaacatcataaataaattacggaataataaagaaaagcccactgcttacaattgtagctcaggcagtatggggaattagattagggaacctgggtggttttctgtttgaataatatatttgtaatggtattacatttagtaggattagacacatatgataattgttaaattcatacacaaattgactttagttacctctcatggtgcattgttactggaaacactcttaatatattttgaatctctgtggcatgtattcattagcttcttttattgca

SEQ ID NO: 381538 - DNA, 436 bp, Homo sapiens
caatagttctagttttaagtatttcttatctgaaatcaacacccaactgattattgttccatctcstgaacattcctggcaaaacattttaagagatgttattaaatatttcctctttatgtttcctctgaaatgacttttattttttgacattaaaaatgttgatttttctaaaatgggttggtttcctcaacaatactttattattggttttgcaccccaatttggattaatgctcagtattctatgattttcttgatttgacgtagagcctttctcatgtttaaggattataattttaatctttccaacctctgccacatcagctattcatgaaggcaagattgggcaacagttagtgacatccttaagatcctccagtacggaaaatgagtgctgacacattccgtgggggctatatgatttggtttattca

SEQ ID NO: 381539 - DNA, 559 bp, Homo sapiens
tattctatgattttcttgatttgacgtagagcctttctcatgtttaaggattataattttaatctttccaacctctgccacatcagctattcatgaaggcaagattgggcaacagttagtgacatccttaagatcctccagtacggaaaatgagtgctgacacattccgtgggggctatatgatttggtttattcaacttgcttttgtgcttccaaagcacgtgttatttatttctatgtcattaactattgtattttattttaattatttatatgacttattcttgttttgactctgtttgtcttgaggattttttccattcatttatttcattatcattgctctctaatttctgtcaaaacacacacacacatgcacacacacacacacacacacacacacacacacrtacacacaccagatccaaaacatattaaagagttgatacttatttagagaatgggtctgtataatattaagtacaatttgataaagaatcgtgagcttgacaataaaaactctcaacacattgcttacggaaggtaaaataaagcattc

SEQ ID NO: 381540 - DNA, 584 bp, Homo sapiens
ttaacatagatttgcctggatacttgaaatgcacgcttccccaggcatataaaagaacatcagtttttacaagtaaagtttcagtgagcgaatgacagaaaaaaagtgatcaagccaacatatagatttatggggatgagatgggagatgttgtgaagggaatgagcaaaacaagagtgaagtttgtagccaaagagatcaaagcaaaaatgaggaagacagtgtatcaaaataaactggctaatctatgttttgagttttctccaaaattgaaaaaaaaatgctgttcatactcattaacgcaagaatagatcctatgagaattaaattcatggggatcataaatgtgaggctatttattctgacacttattttttccatatatcattcttacccccaagttcatgtttactcaagagacatcaaattaaaaatatatttgaagagattaattaaattttagtatttagwtttataatttccttcagagttgaagggtatttttgcataaaaaagtaaatctttgtttctccagctcattactttctccttatcattgcacaatgtgaacgctagaaaaataa

SEQ ID NO: 381541 - DNA, 544 bp, Homo sapiens
tagaatgagttaaggaggagttcttcctccctgattttttgaaacagtttcagtggaattggcaccgattcttctttgcatgtctggtagaattcagctctgaatctgtctggtccagggctttttttggttggaggctttttatcactaattgaattttagagctcaatattggtctattcatgcttttgatttcttcctgattcaatcttggaagattgtgtatttccaggaatttatccattttccctagattctagtttatatgcccagaggtgtccatggtagtgactgaggctcttatgcatgtctgtgtgatcagatgtaatgtcacatgtcacttttgtcatttgtaattgtgcttatttagactgtctctttttatttgttaatacagctaragttctatcaatatttttattctttcaaattaccaacttcatttcattgatcctttgtatgaatttttatctcaatttatttagttcctttctgattttagtaatttcctttctttggctagctttggatttggtttgttctt

SEQ ID NO: 381542 - DNA, 593 bp, Homo sapiens
agctttctttcttctctcaattacatagtgattatatattagtattatattttataaaacatgcttatgtggctagttttaatattttcattgtttctttgactatgttttatccacacttaatatctattttactccattttggctgctataagtaaataccacagactgggtagytttaaaaacatgtaaatttatttcagacaattctggaggttgggaattccaagatcaagatactggcagattcagtgtcagatgaggatctgttcctcatagatggcgccttctaactgtatccttacatgatagaagggatgaacaagctttctttggcctcttttataagggcccaatcccattaatgagggctctgtccccataatctaagtcctcacccttaatactatggcattgagggttaggtttcaacatatgaattttgagagggcacaaacattcaggccataacaagattatttctcctttctttaagactcaattttcttacagtttctttgcctttattcatgtctttgattaccatgcttcattaatatttagcaaatctcatatgtaagatatgattattc

SEQ ID NO: 381543 - DNA, 593 bp, Homo sapiens
agctttctttcttctctcaattacatagtgattatatattagtattatattttataaaacatgcttatgtggctagttttaatattttcattgtttctttgactatgttttatccacacttaatatctattttactccattttggctgctataagtaaataccacagactgggtagttttaaaawcatgtaaatttatttcagacaattctggaggttgggaattccaagatcaagatactggcagattcagtgtcagatgaggatctgttcctcatagatggcgccttctaactgtatccttacatgatagaagggatgaacaagctttctttggcctcttttataagggcccaatcccattaatgagggctctgtccccataatctaagtcctcacccttaatactatggcattgagggttaggtttcaacatatgaattttgagagggcacaaacattcaggccataacaagattatttctcctttctttaagactcaattttcttacagtttctttgcctttattcatgtctttgattaccatgcttcattaatatttagcaaatctcatatgtaagatatgattattc

SEQ ID NO: 381544 - DNA, 629 bp, Homo sapiens
atactaatgttctatattttgttaaaagtaagatattttgtagacttttgttcatatacctaatttcaaacttactggcatctctattgtttttaattcaaatatcagtctttctacttacttttctgtttgctaggaattctatttccctagattttatgatttaggcctcaaatcaaatgtaatctcaaagaagccttccttgactatgctatattactatgttacagacattcattttatttctgcattattaatttaactgcttagagaaattatctcagttgtttactttgttattagaattttagctccaygagagcaggaatgtagtctgtctcatttatcactgtattctcaatccctagtacagtgtctagagtatagtatgccatatgtattttctgaataaatgaatcgtacttactattgttaggagacaatcttccatagttctttaacatttctgcatagtgtacagtgaggcattggccccattttattctggatgtcttttcaagattgtctgagtaatgaacagtctttgaagatagatctaatattttcctctggagcaaagggaaacatgctttctagtataataaagataatttctatctcccaagtac

SEQ ID NO: 381545 - DNA, 577 bp, Homo sapiens
ctgagcccttccagagattagagatgtgctcttgacacccaagcccagtgtcgtcaaatcccacctgtttccatgtcccacctgcttagccaggtcccccattcacttcaatccccataagctgggccctgcagacytccagctctttatccattgtccactgctaggctggtcagacataccttgtccacctctctggacccctttcctcttctcctcctcttgtctgccagctgctgggacatctctctcccactttgtagctctgccccacccccaggccagggttcagccatccctgcatgtgcttttcatgttcacatccaggagccattgtgacaattgggccatttttagggtgccccaaacactcaccttggttcacagaaaggcattgaagttctgctcaagagctggagggtataaaacacacaactgtcagatgtcctccttcctgattccattctgacatgagatggagatgccatgtcatgactaggaggttatttagaagtagcactcaaaatatagaacagatattatataatttttcacagagaaagttgtggtttcaaaa

SEQ ID NO: 381546 - DNA, 577 bp, Homo sapiens
ctgagcccttccagagattagagatgtgctcttgacacccaagcccagtgtcgtcaaatcccacctgtttccatgtcccacctgcttagccaggtcccccattcacttcaatccccataagctgggccctgcagacttccagctctttatccattgtccactgctaggctggtcagacataccttgtccacctctctggacccctttcctcttctcctcctcttgtctgccagctgctgggacatctctctcccactttgtagctctgccccacccccaggccagggttcagccatccctgcatgtgcttttcatgttcacatccaggagccattgtgacaattgggccatttttagggtgccccaaacactcaccttggttcacagaaaggcattgaagttctgctcaagagctggarggtataaaacacacaactgtcagatgtcctccttcctgattccattctgacatgagatggagatgccatgtcatgactaggaggttatttagaagtagcactcaaaatatagaacagatattatataatttttcacagagaaagttgtggtttcaaaa

SEQ ID NO: 381547 - DNA, 587 bp, Homo sapiens
tttaaatttattcttaactaacaaagacgaaaacaagtacagtgctgagatttgctgaaacaattgcagaggcagaatagagcagcatttggatgtctcttagtccgctgtcaacaaaccagacaacaaagctaatgacaattacagttaacaggtggcagagacatagttctcatcagttcagtctgtttgtacagcatttggtggactctaacttttcagagtttgctacttacgaacyacgaggctatgatttaagacagcttcaatatattcagcctttgctctgtggaagagaagccatcactagtggcttcagcaggaccagttggacagaaaaatggggctgagtcgtcccagaaacgtaaatggagctacccaaagaccagggagaggaggctcggaaatcagttttaacacagccccagggtgaaactgctaagtaagagagtatgctgtgagacactgtctaatgcattgtatgtgcaggaatgagtgtgtgaatttctttttattgttgttgttttttttattttttgagacaaggtcttgctgtgttgcccaagctgagtgcagtggcatgatca

SEQ ID NO: 381548 - DNA, 587 bp, Homo sapiens
tttaaatttattcttaactaacaaagacgaaaacaagtacagtgctgagatttgctgaaacaattgcagaggcagaatagagcagcatttggatgtctcttagtccgctgtcaacaaaccagacaacaaagctaatgacaattacagttaacaggtggcagagacatagttctcatcagttcagtctgtttgtacagcatttggtggactctaacttttcagagtttgctacttacgaaccacgaggctatgatttaagacagcttcaatatattcagcctttgctctgtggaagagaagccatcactagtggcttcagcaggaccagttggacagaaaaatggggctgagtcgtcccagaaacgtaaatggagctacccaaagaccagggagaggaggctyggaaatcagttttaacacagccccagggtgaaactgctaagtaagagagtatgctgtgagacactgtctaatgcattgtatgtgcaggaatgagtgtgtgaatttctttttattgttgttgttttttttattttttgagacaaggtcttgctgtgttgcccaagctgagtgcagtggcatgatca

SEQ ID NO: 381549 - DNA, 587 bp, Homo sapiens
tttaaatttattcttaactaacaaagacgaaaacaagtacagtgctgagatttgctgaaacaattgcagaggcagaatagagcagcatttggatgtctcttagtccgctgtcaacaaaccagacaacaaagctaatgacaattacagttaacaggtggcagagacatagttctcatcagttcagtctgtttgtacagcatttggtggactctaacttttcagagtttgctacttacgaaccacgaggctatgatttaagacagcttcaatatattcagcctttgctctgtggaagagaagccatcactagtggcttcagcaggaccagttggacagaaaaatggggctgagtcgtcccagaaacgtaaatggagctacccaaagaccagggagaggaggctcggaaatcagttytaacacagccccagggtgaaactgctaagtaagagagtatgctgtgagacactgtctaatgcattgtatgtgcaggaatgagtgtgtgaatttctttttattgttgttgttttttttattttttgagacaaggtcttgctgtgttgcccaagctgagtgcagtggcatgatca

SEQ ID NO: 381550 - DNA, 522 bp, Homo sapiens
ggtggcctctggtatgttgaggctgagaggtggtagaagcaaaaagagaaaagtgttaatattcattgagacactttgctgaattctttaatatattaacatttttacaaggaaactgaagcttagaaaaaataagttacccaaggtcacacaatatttggcagagcagggatttaaagatctcaagtgccacatattgcagtgaaacctcaaccccaccctgcatcaaagccctaatttccatagcacagtaggaagagagaggaatcatgctcactaagaatcattcacactaatgtgtgacatcaacctacatttaacaagtatccactaagagtaagacaccgtgctttatgatagcttaagaaagatatgtaaggggtgtagtagrtgaacattcttattagaaaatatacgaatgcagcagctggaaaattgctattcaaagagttgcagcttttggtttgtaagtgtgtgtctgagagatggaggtcccaggtggagatttgagttgacttttga

SEQ ID NO: 381551 - DNA, 522 bp, Homo sapiens
ggtggcctctggtatgttgaggctgagaggtggtagaagcaaaaagagaaaagtgttaatattcattgagacactttgctgaattctttaatatattaacatttttacaaggaaactgaagcttagaaaaaataagttacccaaggtcacacaatatttggcagagcagggatttaaagatctcaagtgccacatattgcagtgaaacctcaaccccaccctgcatcaaagccctaatttccatagcacagtaggaagagagaggaatcatgctcactaagaatcattcacactaatgtgtgacatcaacctacatttaacaagtatccactaagagtaagacaccgtgctttatgatagcttaagaaagatatgtaaggggtgtagtagatgaacattcttattagaaaatatacgaatgcagcagctggaaaattgcyattcaaagagttgcagcttttggtttgtaagtgtgtgtctgagagatggaggtcccaggtggagatttgagttgacttttga

SEQ ID NO: 381552 - DNA, 611 bp, Homo sapiens
tctcttgtcagacacccacagtggctcactgtagtgttgcaaatccaattagggccttggataaygtggcctcctggtcccctggccagggccgctctcactcctctgttgtcttttactaagcacctctctggacttacactttcccttagcccaggcaacctgtgcgctcagctcccacaaaacctaacaggccattccgcctcctgaaacacctctctcactgtttcccagttgaacagcaggatactcctgcaaggtcttctcacaccaacaccctctggctccactcattctagagattccagcatcccctgggtgcatttctctctacagtttcagctagctgtgcgccttacacagttgggcatttttagttcatgtttttgtggggttttgcccatctaatcttctgaattataaatttctcaaaggcatgggctgtgtctcttatttttaactcttttttcatgaagttagaaaactaataataatggtattaatattttgcttttgctttattgtttacaaagtgctgtcacaaatataagcacttcacagcaacatgttgaggtgagaatagaagcatgaaagttaaagagtttaggctc

SEQ ID NO: 381553 - DNA, 611 bp, Homo sapiens
tctcttgtcagacacccacagtggctcactgtagtgttgcaaatccaattagggccttggataacgtggcctcctggtcccctggccagggccgctctcactcctctgttgtcttttactaagcacctctctggacttacactttcccttagcccaggcaacctgtgcgctcagctcccacaaaacctaacaggccattccgcctcctgaaacacctctctcactgtttcccagttgaacagcaggatactcctgcaaggtcttctcacaccaacaccctctggctccactcattctagagattccagcatcccctgggtgcatttctctctacagtttcagctagctgtgcrccttacacagttgggcatttttagttcatgtttttgtggggttttgcccatctaatcttctgaattataaatttctcaaaggcatgggctgtgtctcttatttttaactcttttttcatgaagttagaaaactaataataatggtattaatattttgcttttgctttattgtttacaaagtgctgtcacaaatataagcacttcacagcaacatgttgaggtgagaatagaagcatgaaagttaaagagtttaggctc

SEQ ID NO: 381554 - DNA, 611 bp, Homo sapiens
tctcttgtcagacacccacagtggctcactgtagtgttgcaaatccaattagggccttggataacgtggcctcctggtcccctggccagggccgctctcactcctctgttgtcttttactaagcacctctctggacttacactttcccttagcccaggcaacctgtgcgctcagctcccacaaaacctaacaggccattccgcctcctgaaacacctctctcactgtttcccagttgaacagcaggatactcctgcaaggtcttctcacaccaacaccctctggctccactcattctagagattccagcatcccctgggtgcatttctctctacagtttcagctagctgtgcgcyttacacagttgggcatttttagttcatgtttttgtggggttttgcccatctaatcttctgaattataaatttctcaaaggcatgggctgtgtctcttatttttaactcttttttcatgaagttagaaaactaataataatggtattaatattttgcttttgctttattgtttacaaagtgctgtcacaaatataagcacttcacagcaacatgttgaggtgagaatagaagcatgaaagttaaagagtttaggctc

SEQ ID NO: 381555 - DNA, 579 bp, Homo sapiens
ctgggagcattgcagcaggctccaaaatttctttggctgtatatctttaatgaaacaaatgttgagcataccccaatatgtgcatatctgtttacaaattacatacatggactactgtgccaatgtattctgtaaagtaaaagcaacaacaaaaaagaaaatttgaaaaatgaggtgaaagataaaataatattcttaaactgatttttaattttattttctaacagtgtaaagatattttgytttcatcaaaaagaattaacatgttttagcaagagcaatggttcagtaaatctttgttaaacccattatgataaaaacaatttgaggagctggttctaaacttaggcagaataacttaaatcttggttttcaggactgtcagaaataaaaaatttcctttgccaagggacacaaagacaaatgataaaatgcatcactggctggaattaataaatcatttagtttattttccaatcttatttgcaaattatgcaaattcattgaatttggcttggaaatttttatctttatcttccttgatgtctatcagttgttcttacaaagtaaacttgcact

SEQ ID NO: 381556 - DNA, 548 bp, Homo sapiens
atggcagtactgactgaacaggattgttatgaggattatatgagatactgcatgaaaccatttagcatggtgcctggtatgatgaaagttggttatgatcatgcttgcacttcaagttctattaatcaagaatctcacttgaaccaaatttagcaaactcaagtctgcctagaataattcatcattgctcctcaccccattcccacctctatcccaggtctgattttgggcacggcaaatacatttcatcgcacatgttggatccaatccattgagagtagctgctcagagcactggggttgaaatggactgtgatgttgaatctgtgttcaacagaagaagagtgctgtgattgattatcattgtctgccatgagccttggaggtagaaattrtagcaagctttgcagatactactaatccttatctaatttctaatatcttatttctttttcaggactgccaggattatccttacataatcagtccctagcatagtttccattttgtatctgagagtccaacaaggtctgttgagtaaaatgaaca

SEQ ID NO: 381557 - DNA, 592 bp, Homo sapiens
aattaaagtgaattgacattgattgaattgtagaaaattaaaacattagtgaagccctctggaactaaccaaaggtttattgagtattacaaaacttgaactaagaatgactgtaatctgtgtgttcacatataaaacaaatatggatttatacatgtttgatacaatgaatgtataattataatttaatgtctgccattaactattgagtaatgttcatcatttagtataaacaggaaacagaaaacatccactcaagttgttaaacatgcctttgatttctggactctaayttctacacttggttcagtaaattaaattgcttagtgttctcttgtcatttgttttattgtgaaaattagtcaacccttgactaatgttggatataaagttacatggtagccatgtgttaaacattgtctgctgtgtgtacagaatctggaagtacaaaatacatttcttttggcatttaagagagcctgacaaatggcactcctcattcatgatgaagttctgagccaaatggcaaatcagacaaaagaataagacagtcagaaagctaaatcacctttttttcactgataaagtgaaa

SEQ ID NO: 381558 - DNA, 533 bp, Homo sapiens
catcatttccatagcaccctcagagtaggtgcccaataaatatgtctcccttgctcttgatctgtcctgtgaggatccacaatagggttcctgcatctaagaagccaaggaaaacttgggaagccccttgcagtgagtgctgagagggtaggagtgatgagaaatggggagcagattgcggacctgcgagaaaacacctggctgctccccttcactctgyctgagcttggacatcaatcagcacggtgcacacttgactctgtggttggaagacaatctgctaatcatggcgaggggaaaagcgctgacatgctgggctcttcccactctgctctaggagggtttgcaaatggggtgtaggtcaggaggtggatcttctgagaaagggggtggggggagcctctctacaattagtctgagttaagaataggctgcctctttgtcttcctactcagagactgatgatgttgggtgaccaggtgaaatgccagccgaaatggcatgtcaggagctttgtggtggccttggtcacc

SEQ ID NO: 381559 - DNA, 570 bp, Homo sapiens
tgccaaagtctaggaaaacttacttcgttggtggaatctgtgtccaggataggccttgggaaaatttatgtctcaggacaagtttaaattctcccggatatttcttggtgcatagacaccactgctctgagcctaccttttgtggcttcccatctcatgctaacttgagccatcataggaatgtgctgtttctattctcaagtcttcttgactatcattttttttgctcctaaagtgtcaaccacttattatttaaaaatcagtagaaactaatgagaacaagcctttctttttccttccttttagtgtatttattcattttagcaatgttcttctatttaattctgttcaacacacaatgattcctgagggcctacacaatgtgtcagacattatttggacacagtagttcaaggatactgaaatscttctgcttctggtaggatatgtaatcccctagcagaccagtcctctctcagagttgtatcaactctggataaaatttaaatacaaaatgaaaagacaccaacaatttggagaaactggagtgctattgtctggatgtttgtg

SEQ ID NO: 381560 - DNA, 651 bp, Homo sapiens
atgggaagtacaaaaagaaaaaaaatatatcattttcagactcatagtccaaagaaatgggaataagggaaataagacaacatttatagcaaaaatacatttcaaaagatgattaagtataagaattatttatttacatgcagatatttggttgactagcttgaactgatttgggtcatcaagtgaaaaatgaataagactaatgaagaattggtggactctttctaaaaggacaaagcttttaaattactcacatagatttggtcttttcttttgatgtaatattgtgctcttctgagctttgctactgtagtaatttgcattgtagattcaaataattaatgagcactctcacttttctaacttctgagtttgtgtcatcaacaaatatttattgagcacctactaagtgccacatgctgaataaagtactgattatatgttaatgtttatgaagattattgtttgtgacataatacctttgtaatcattagatcatttaaagaaaaatcaagagttttacaatagtctyggagtgcctcagacttccagagtaaatatgctttttgatcacatatgaggactaattcttacctgcatataaacaggacttccagttataatagaattgccttttcagaatccatttcc

SEQ ID NO: 381561 - DNA, 612 bp, Homo sapiens
aacataaatttattaacacaattcatcccacaccactatccctgccctctgttctacagcccctttttaattttctttaaagtacacacatttcttctcactacagggccattgcacatttgctgtctctgcttaaacctcttccattacttacttccattctcctggtgaaactgctaccaatctttctgatctcagctcagtccttacttcctcatggaaacccttcccccatccaccctcagcatagccaagtcatccgatatttctttagcagyctatccttttcctttgtaaaaaatattttttaattcatttattgtttagagatggagtctcactctgccacccaggctggagtacagcggtgcaatctcagctcactgtagcctcaacctcccgggctcaagttatcctcccatctcaatcccccaagtagctaggactacaggtgctcaccagcatgcctagctaatttttgtattttctgtagagatggagttttgccgtgttgcccaagctggtcttgaactcctgagctaggcaatccaccctccttagcctcccaaagtgctgggattacaggtgggggagccaccactccaggcctcc

SEQ ID NO: 381562 - DNA, 630 bp, Homo sapiens
gttggcaaagataaagtcaacaaccaaagcacacgtcacatctcctgcagaatgcttgaccacggctacttgggcgtggcaacccaagcctgcgggaaatcctcacagcaaacacactagggagcccatctcctgttatatggctgatggcagggcaccgaatgttgctcctgaaagcaatgatagcaaagctagcgagggccccaactgtttgttaaacgcctaatgattaacagaagcctctgcctaggcctttgggctgccactcagggaagtctgtttagtaaacagtcaaccaccaatatctcgaacaggttgaacagatggctctagagttcaagccaactgtgtttccctcaatttcacacagctttgggtaatgaaggccataaaattcaagaaamgtataaacacaaacacccccattctcacctctcccatgtacaagggctccaatctctagatgatgaaatctgagaaagatgtgaaattaaagggagaggagaacctccatggaatggatttgaattcattagaaatcacctgtgtgttattgaaggtcaaggagaaggaaataaaatctccataaacttttctgcgtagagcacctgaaagaacgaatacagtgaa

SEQ ID NO: 381563 - DNA, 540 bp, Homo sapiens
agaatcatgttgcatgtataggaacaaagataggaattaccaaagatctatttccagaagttgttataaactgaattgcatgcaattcgggtgcaattgaggttgggttgaagcccaaccccaatgggactgtgtttggagatggggcctttaaagagatgtttaaggttaagtgaggtgatacaggtggagtcctaatgccacaggactggtgtccttatgggaagaagaggagacaccaaggactcatgcacaggaggaagccccatgagttcacagtgagaagttagccatcttgaagccaaggagagaggcctcaaagaggtraaccctgccaacagctcgatttggactttccagcctccaggactgcaaataaataaataaataaataaataaataaataaataaataaatacattgccattgtttaaagcaccagtctggcattttttttttaatggcagccctagcagactaatacagaagccatgcaagcaagaagagaatggagtgaaacattgaaagtatggaaataaa

SEQ ID NO: 381564 - DNA, 540 bp, Homo sapiens
agaatcatgttgcatgtataggaacaaagataggaattaccaaagatctatttccagaagttgttataaactgaattgcatgcaattcgggtgcaattgaggttgggttgaagcccaaccccaatgggactgtgtttggagatggggcctttaaagagatgtttaaggttaagtgaggtgatacaggtggagtcctaatgccacaggactggtgtccttatgggaagaagaggagacaccaaggactcatgcacaggaggaagccccatgagttcacagtgagaagttagccatcttgaagccaaggagagaggcctcaaagaggtaaaccctgccaayagctcgatttggactttccagcctccaggactgcaaataaataaataaataaataaataaataaataaataaataaatacattgccattgtttaaagcaccagtctggcattttttttttaatggcagccctagcagactaatacagaagccatgcaagcaagaagagaatggagtgaaacattgaaagtatggaaataaa

SEQ ID NO: 381565 - DNA, 617 bp, Homo sapiens
attaattttgggaactaatttgggaactaataaatgtccgtgaaatcttcacaatttgtgttcttctgccatggcttctctagtcccatggtccctccgtttggggtacctgacttcccgcaacaatctgggactccaaatctttgcttctaacaccacaccattctcttatccaaacaccaaatgtctttgctcttattacatggctgggaactgggttcactataatctctttatatcctagtttactctgggcatcactgccatctctaaattgtccacaggacacatcttcaaatttccccacctctccttcctctggytgaccttttgcctaaaccactaaaggaaactaaacaaagccatgtaggacaaaacaaaaccaagtttcatttattccattaaaacatgggcctttcaatgcaatgggtgcctccatagattttaggccaaaaattgcaagcccctgtgatcttttcttaaatctatgtttctgtttaattttgattgtgctcatggtcttggtaggaactgatttccactggctctccttgccctgttatcagagggcctattttgaggcccagggttttcctgagaccctttgtgtatatcca

SEQ ID NO: 381566 - DNA, 648 bp, Homo sapiens
cccttctcattagtcatgatagataacaggaagcaagggaattgctgcttcaaacgckaagtattatgtctgtaaattagaattcagttcagctacaagttacagaaaaaccccaaatagcagtgacttaaacaaccagagacttaaacaattttatttttctttcgcatcagaatctagaagattatcaactgttatgttagcttttttctatgttccttaaggatctaggtcacttccatctttcagatttgtggtgtccaggatgtgtcccatgtcacacagcccaagaaagcacttcggccatcacatccatgctcccaaccacaggatggaggaacaggtaaagaagcagcgaaggacacatttcaactgtctattgaggagggttctgttgcagcatcactattcctatcgacattcattggctaaaatagtgacatggccatgcctagagtggatggaaagtgtagtcttcattttggacagccacatgcccagttaaaaattctatttctatggaacaaacagacaatgggcactgaggggaaagtagcaatttctgttacactgtgtatggaagagatctgaggctttttggtttttgtttttttaaaaaagacattttaattccaagaatcataacta

SEQ ID NO: 381567 - DNA, 648 bp, Homo sapiens
cccttctcattagtcatgatagataacaggaagcaagggaattgctgcttcaaacgcgaagtattatgtctgtaaattagaattcagttcagctacaagttacagaaaaaccccaaatagcagtgacttaaacaaccagagacttaaacaattttatttttctttcgcatcagaatctagaagattatcaactgttatgttagcttttttctatgttccttaaggatctaggtcacttccatctttcagatttgtggtstccaggatgtgtcccatgtcacacagcccaagaaagcacttcggccatcacatccatgctcccaaccacaggatggaggaacaggtaaagaagcagcgaaggacacatttcaactgtctattgaggagggttctgttgcagcatcactattcctatcgacattcattggctaaaatagtgacatggccatgcctagagtggatggaaagtgtagtcttcattttggacagccacatgcccagttaaaaattctatttctatggaacaaacagacaatgggcactgaggggaaagtagcaatttctgttacactgtgtatggaagagatctgaggctttttggtttttgtttttttaaaaaagacattttaattccaagaatcataacta

SEQ ID NO: 381568 - DNA, 547 bp, Homo sapiens
tctgtgtctttctgggaagccatggctcctatcatgtgcagctctctctccaatccctataacttttctctttaagtctacagttgatggctccctgctcgggctagccttgggatactccactatctcttgtgtattttcctccacccgcttctatttttataaatagtccctttattaaataccctaaatttaatacctattttgcatataccatctccgatcttgtgcactctgactaatacagatgagataagcattcacatgacttgaaattttccttgmaggcatggcagcgaagatgattgcctgcttaatcaagtgacattgtgaaagattaaatcccacctgtgctctgcattgcctgtggtttcgtcacaaccagtttcctcctcatttaggaagaaaacactgtgaaataagcgcatcaggtggttatgcagaagaaacgacgcctaactggcttcagaatgaggttaatctggaggtcagattgcccccaaaaccacctgagcccacacttggtataaccctgttaaaaaacaaa

SEQ ID NO: 381569 - DNA, 547 bp, Homo sapiens
tctgtgtctttctgggaagccatggctcctatcatgtgcagctctctctccaatccctataacttttctctttaagtctacagttgatggctccctgctcgggctagccttgggatactccactatctcttgtgtattttcctccacccgcttctatttttataaatagtccctttattaaataccctaaatttaatacctattttgcatataccatctccgatcttgtgcactctgactaatacagatgagataagcattcacatgacttgaaattttccttgcaggcatggcagcgaagatgattgcctgcttaatcaagtgacattgtgaaagattaaatcccacctgtgctctgcattgcctgtggtttcgtcacaaccagtttcctcctcatttaggaagaaaacactgtsaaataagcgcatcaggtggttatgcagaagaaacgacgcctaactggcttcagaatgaggttaatctggaggtcagattgcccccaaaaccacctgagcccacacttggtataaccctgttaaaaaacaaa

SEQ ID NO: 381570 - DNA, 551 bp, Homo sapiens
ataggtaatacttgttatctggtttacctgtctaacttgctctttgttttctctggtatctgaatacaaactgaattgtaaaagagaacatcaaagctaacagtatgaattgagtgtgaaataagtcatgacaaggaggtggtttatgagtgtgctgaaaagaaaggggaaaactcaggcataaagtaataatgagttgcgtctactaagagacatagggaagaaaggagaataagatttgaaaagtagatagcctatgtggcagagagctaattatcctgacatctaatcttccaggaggctaacagttagttcacctgctaaaagtcatctaggagtgaggtgcagagatatttttaaatgtgccattttcataatctagcgtgcctacatctgatagtcaaacccttaaggactagctgttagagcaaaatatgaaatactstgttcagctctgtgctttagacactgggaagttattagcaatcataagcctcttaacaccattgaaatgagttcctgaaacttgctgctagacttggaaggcctgc

SEQ ID NO: 381571 - DNA, 572 bp, Homo sapiens
ctcatagtctcatgtactttttcaccttccttcacatcagagatattaagatgcacgttaagtatgacatttctgctgtaaaaactttaaatataactttgctcatcaaattatatattattagcaaactaaaatttagtttacagctggctataatttttggcgaattattttgtttatccttgggaatttgggtaagaaaatctattctttttttttttagayggagtctcactctgttgcctaggctggagtgcagtgtcacgatcccggctcactgcactctccacctccttggttcaagcgattctcctgcctcagcttctccagtagctgggattacaggcatgcgccaccatgcccagctaattttttatatttaatagagatggggtttcaccatgttagccaggctgatctcgagctcctgaccgcaggtgatccgcctgcctctgttttccaaagtgctggtattataggtgtgagccaccacaccctgccagaaaatctattctatatgatagattattttcaaatatagtaaaatttgataaatgttaaatttagctatt

SEQ ID NO: 381572 - DNA, 584 bp, Homo sapiens
gttgcatacatttgtgaaactgagcaattggaagagaaatgaagctgggagccactttcagccartttgttaggggctgccccatttcatcacgtagctgtaaggttcttaggctggtactgcatgtggctcataaaatgtattcaagtttagctagcccagaggataccacacctccagcatcccccatccatgtaccactcatccatcatcagacactttaaaacttgcttgtagacattctatttcctgagtgctgctttgccaggatcctggagctatgagcatttacccagtctgttagaaacagttacactggtcctaagactttgacaatagcctaataaaaactccagttccactgtaatgagataccactttatgcctatgaggatggctataataatactaattcccactctacctttaattcccctctatcccctattcagaaacagaagccatatcctctgcagaaaatgcagtagttatctcccttaatcttggatgctgctttttaaggcagccagactaatattttcttccccaatctatacactgcccccttcttcagcaatgacaat

SEQ ID NO: 381573 - DNA, 584 bp, Homo sapiens
gttgcatacatttgtgaaactgagcaattggaagagaaatgaagctgggagccactttcagccagtttgttaggggctgccccatttcatcacgtagctgtaaggttcttaggctggtactgcatgtggctcataaaatgtattcaagtttagctagcccagaggataccacacctccagcatcccccatccatgtaccactcatccatcatcagacactttaaaacttgcttgtagacattctatttcctgagtgctgctttgccaggatcctggagctatgagcatttacccagtctgttagaaacagttacactggtcctaagactttgacaatagcctaataaaaactccagttccactgtaatgagatrccactttatgcctatgaggatggctataataatactaattcccactctacctttaattcccctctatcccctattcagaaacagaagccatatcctctgcagaaaatgcagtagttatctcccttaatcttggatgctgctttttaaggcagccagactaatattttcttccccaatctatacactgcccccttcttcagcaatgacaat

SEQ ID NO: 381574 - DNA, 623 bp, Homo sapiens
  misc_feature (1)...(623): n = A,T,C or G
nnnnnnnnnnnnnaaaatcacaacaagatacctctacacatccatgagaatgactaaaatttatttttgttttttgtttgtttgtttttgtttttttgagatggactctcactctgtcgcccaggctggaatgtagtggcctgatcttggctcactgtaacctctgcttcccgggctcaagcaattctcctacctttttttttttttttttttttttttcatatttttagtaaagatggagtttcaccatgttggccaggctggtcttaaactcctgacctmaagtgatcctcccacctcctaagcctcccatagggctgggattacaggcatgtgccaccacccctggccagaatgactaaaacttaaaagatgaaaaataatgaatgctaccaaagatgggaagcgataaaaactttcatactgctgttcaaaatgcaaaatagtacagccactttatgaagtaaattgtcattttcttgtaaagtaaaacatatgtttaccaaatgacccaaaagttcctctcctaggtatttacccaagaaaaatgaaaacatgtgtcacagagagatttttatgcaaatgattgtggcactttattcctaatagttcaaactgaaaat

SEQ ID NO: 381575 - DNA, 623 bp, Homo sapiens
  misc_feature (1)...(623): n = A,T,C or G
nnnnnnnnnnnnnaaaatcacaacaagatacctctacacatccatgagaatgactaaaatttatttttgttttttgtttgtttgtttttgtttttttgagatggactctcactctgtcgcccaggctggaatgtagtggcctgatcttggctcactgtaacctctgcttcccgggctcaagcaattctcctacctttttttttttttttttttttttttcatatttttagtaaagatggagtttcaccatgttggccaggctggtcttaaactcctgacctaaagtgatcctcccacctcctaagcctcccatagggctgggattacaggcrtgtgccaccacccctggccagaatgactaaaacttaaaagatgaaaaataatgaatgctaccaaagatgggaagcgataaaaactttcatactgctgttcaaaatgcaaaatagtacagccactttatgaagtaaattgtcattttcttgtaaagtaaaacatatgtttaccaaatgacccaaaagttcctctcctaggtatttacccaagaaaaatgaaaacatgtgtcacagagagatttttatgcaaatgattgtggcactttattcctaatagttcaaactgaaaat

SEQ ID NO: 381576 - DNA, 619 bp, Homo sapiens
tacttacctttcccttgctctgcacctggaagggtttatgagcacttggtacagttgcaaaggcctgccaggtaggcaatttgagagagttggcagaccattagattaagagtcaggtggccaggcatggtggctcatgcctgtaatcccagcattttgggaggccaaggcagatagattgctcgaggccaggagttcaagaccagcctggccaacatggtgaaaccctgtctctactaaaaatgcaaaaattagctgggtgtggtggtgcacacctgtaatcccagctgctcgggagrctgaggcatgagactagtttgaacccaggaggtggatgttacagtgagcggagatcatgccactgcactccagcttgggtgacagagcaagcttctgtctcaaaaaaaaaaaaaaaaaaaaaaaagtcaggagaccttaggcaaaacacttttcttctgtggacctcaatttctttagctgtataatggggggttaactattagtgcataactccaggaacttactctggagtacagaaaatgttgctgctgctaaacctcaagggaaggagagatgcctagttcatacactacccttctagtgctttcattccataaag

SEQ ID NO: 381577 - DNA, 565 bp, Homo sapiens
atcccccaaatggtcttcatcctccaagtatatctgtcaagtgctgccacccaacctctgttggggaaatgacaaacagcaagtttctgccttctgacttgcctacagggccataagcaactccatcatgcttgggttagagtgagtaaaaacagaacaaaatattgggatttgatgttactgaagaaaatctatgtcctggagctgacagatcttgtctgacaactttcccagagggtctttctgggtgtcatcagtgggacctgggcttctaaaactgggtggggagaaactcatattttgtccttgtcatttttccccagagttattgtcacccagacagacaggcagactggaatgaggagagaaggcaagacaaagagagaaaattagtgtgggccaagasgcaggagtttatcattcctgaggcataggatggggctttcttcctcttctgtctctggggtgctttctgcatctctatctccattatctctggcttctggccttcacaacctacgcaagcacactctaaagttaagaaaacaaggaaacaagggaagga

SEQ ID NO: 381578 - DNA, 530 bp, Homo sapiens
gacagacaggcagactggaatgaggagagaaggcaagacaaagagagaaaattagtgtgggccaagacgcaggagtttatcattcctgaggcataggatggggctttcttcctcttctgtctctggggtgctttctgcatctctatctccattatctctggcttctggccttcacaacctacgcaagcacactctaaagttaagaaaacaaggaaacaagggaaggagataagtaaagaaaaaactacatccataaaagaactgtcattctgggatytgaagagagagtgctaagatagccctagtaattaaacttattttgattggaatttatttatttatgtatccatttcctaagatgttaattagcagcttccaacaaaagatgcagatataagaaaattaaatcatttaattagaattaagtgtgagtctaatatgtacaaagtactgggttgcatggagttcagccttatgcagagagcaggggctttggaataccttttagctgtgtaacttaaaaaagttag

SEQ ID NO: 381579 - DNA, 607 bp, Homo sapiens
tggctccattgtctccaaagcctgacagcttcccctgagctgtgtcatcttttcatgaaaaaagaggaaaatttgtttgcaccttcccagtcaaaaggttaaaggaaggcaagaggttggtggactgtcccgggcttgccttgacatggttgtgcagggtttccttgggagagggtatgcagtactgaggaagagagaaagacacagaaaccagctcctgttttataacttcacctagcamctgtatttgtcaagaaatctttccagctgcaaatactagaaacccaactcaaactggtcgcataggaaatggggtctattggtttgtgggcctgaaaagcatgccaggagttctccccatctctctctttctctatctctcagctcggctttcctctatgtctgcttcattctcaggcagcctctccccacgtggtgacacaagtgaccagcaacagtctagacttaatgtctcaccagcctaggaccccctcccccagctgacacagtggaacttttccccaacagttgtagcaattaaccaatcttgtgagcaaggggttgcagcaccttgattgtacaggccttgagttcatccctgccccca

SEQ ID NO: 381580 - DNA, 607 bp, Homo sapiens
tggctccattgtctccaaagcctgacagcttcccctgagctgtgtcatcttttcatgaaaaaagaggaaaatttgtttgcaccttcccagtcaaaaggttaaaggaaggcaagaggttggtggactgtcccgggcttgccttgacatggttgtgcagggtttccttgggagagggtatgcagtactgaggaagagagaaagacacagaaaccagctcctgttttataacttcacctagcacctgtatttgtcaagaaatctttccagctgcaaatactagaaacccaactcaaactggtcgcataggaaatggggtctattggtttgtgggcctgaaaagcatgccaggagttctccccatctctctctttctctatctctcagctyggctttcctctatgtctgcttcattctcaggcagcctctccccacgtggtgacacaagtgaccagcaacagtctagacttaatgtctcaccagcctaggaccccctcccccagctgacacagtggaacttttccccaacagttgtagcaattaaccaatcttgtgagcaaggggttgcagcaccttgattgtacaggccttgagttcatccctgccccca

SEQ ID NO: 381581 - DNA, 582 bp, Homo sapiens
ctagtctagaggcttggagatttgagaccaagaagagccaatatttcagtctgagtttgaaggaagggaaaagctgatattcaaaggcagtcaggcaggaagaattttctcttaccaaagggaggatcagcctttttgttccattcagaccttcaaaaggttagatgaagccctgccacattagggaaggcaatcctgctttacgacctaccgagttgttaatctcatccaaaaacaccctcacagaaatatcaagaataatgtttgaccaagtacctaggcacgctgtggcccagccaagttgacacataaaagtaaccatcacaatctgagtctcactgtcctttttgtaaaagggggataataagcatatttcatcaagggattgctgtcaggagcaaatgaggtcatacattccagattcccggtgttcagtaaargctagttttcctgaagccccgttatactcataatccatcctaggtcaagtctacaccctacacaaaaatgttaataagtcctctctacaattgaagcagtcctgctccagtgaacttcttcacatcattcacatattgtgta

SEQ ID NO: 381582 - DNA, 582 bp, Homo sapiens
ctagtctagaggcttggagatttgagaccaagaagagccaatatttcagtctgagtttgaaggaagggaaaagctgatattcaaaggcagtcaggcaggaagaattttctcttaccaaagggaggatcagcctttttgttccattcagaccttcaaaaggttagatgaagccctgccacattagggaaggcaatcctgctttacgacctaccgagttgttaatctcatccaaaaacaccctcacagaaatatcaagaataatgtttgaccaagtacctaggcacgctgtggcccagccaagttgacacataaaagtaaccatcacaatctgagtctcactgtcctttttgtaaaagggggataataagcatatttcatcaagggattgctgtcaggagcaaatgaggtcatacattccagattcccggtgttcagtaaaggctagttttcctgaagccccgttatactcataatccatcctaggtcaagtctacaccctamacaaaaatgttaataagtcctctctacaattgaagcagtcctgctccagtgaacttcttcacatcattcacatattgtgta

SEQ ID NO: 381583 - DNA, 391 bp, Homo sapiens
gttaaattgggataaagctagctttgctcaataagactattgttgtcaacaaaaaagtcaatcttattaggattcccattgaataacttccaataacttatcttttaaaatgctaaacccaaatcccagttgaattctctacgttgtctgcaaatcgggaaaggaaataacctcaaccggtgagccccatctagtgtcagggaagtaaattgctggtcagaaaccgggtctataattttttcttatctttaatctgatttttaagattcttctatttgtgcccaaacccttatgtttttgtttctttctggggtttatttgcctatatttttatttctaaaactaaayaactttctataccaagcacattttttcttgataacttataaaa

SEQ ID NO: 381584 - DNA, 453 bp, Homo sapiens
aacacccctggctaatttttgtatttttaatagagacagggtttcaccatgttggccagactggwctcgaactcctggcctcaagtgatcctcctgcctcccatagtgctgagattacaggcataagccaccacgcctggccaagattctacatttctaacaagctcccagataatggatgattcctatgctgcaggtccagggactacactttgattagctgaggccttagagaaggagaatacagatatgtgtcactgacttaagagtcaaaattatatatcatcatcaccacctgaccactaacaccttgttgtgctaaatgctttgaacactttttctcacttgatttttaaagagccctcaaaatagctattatagccatgccccatttacagaaggaagaagtgagaccagggatccttagtgaccagctagcatgtggtaaagcca

SEQ ID NO: 381585 - DNA, 565 bp, Homo sapiens
aaattatagagttcattaaatattttctctgtgtatataatatcggggtagtcccactgcccattgctctgaagtgctgtatccaattccaagtcacacactttttaagtgggacactgaggcagaggaagtgcttttaggagggtaaccaggaggttgaagagtctgaaaaccacatccaggtactattatagrtgatagaaaatgctggggtagctttccttggagatgattttgagatgagatgacataacaactcttcaaattcctgaaagattgtcatgaaggaaaaagattagtcactctgtggagcttcaaatagcagaactaagaccaattcatgtaaggcatagaggctgacttcagcccaatataagaaattcctacagagttgaacacagagggaatgagtcacttcacattgatgagctccaaacatgctggggcccgcggcattgtcagccactgcctgtgtgaccatctttcaggagtgttggaagggaatgccctgcttgaattagatcaaatacacctaaaggaactgtacagctgaaagaatccacac

SEQ ID NO: 381586 - DNA, 552 bp, Homo sapiens
ttggcagtgcaacagctctgtgccttctcctgcagagtagcactaccccacaggcagtgtgctgacagtagcagctcagggcagttttgcagtcatatttatacccactttaataaaatgcagattaaggagtgacttatgcggaaatttctagggaagggktagtaacttttgggtcattggatcattgcatggaaagggatggtaactcccaggtgttgccatggcaatggtaaattgacatggcatattagtgggcatgtccaactgaaagttgctttcaccctggctgtgtcttagctagtcctcagtctgatctgtaagccctgtctcctgcttcacctctatcctgttgtgtctgtttctgtgttcaaatttccactttttatgaggacaacaatcatattgaattagggacaccctaatgatctcatttcaacttgattctctctgtaaagaccctatctccaaataaggtcccattctgaggttttagaatattggactttaacatattttttgggatggggggtacaattcaacctgtaacac

SEQ ID NO: 381587 - DNA, 514 bp, Homo sapiens
tcactatgagacacaggaattctggcctaagttgtcccagctcttcaaggacagcaagaatccaagtttccccacgcgtcacctgaagccccaacttctggaaacgccctcctttcctcgcctctacgagctgcgagagcagaacacgcagccgcgggcgctactgctgtcgccgctaaagccaaagaggcgactggaagctcaggctgttcggcggcctcggggcgaccacaggccaggccctggtcctgatccacgaaccaaggcgcctcctctcccccaggaagtgagctactgcgcccctcggagcacccaggcgagcccgggcaccgggagaacgctctacactcggcgcccagccccgggacgccgcccagcgcacggctccggctgagcacccgggcagcggtagctgcggggaagaggggcgtgttccctgagcctcggagccccaaggccgggtycaggcgggacagaggaaggcggcaagcccagcacgctgtccgtgacggcg

SEQ ID NO: 381588 - DNA, 605 bp, Homo sapiens
cttactatgactagtaaaaaattgagtttttaaaaaagaactccatctttacttgctgtcccccagcttaacttagcttcactaaatgccttcttgagaaagcagaactacccttctggttgaggtaggcaagaggaaggaagcttcctggggcttaraaagcattggctcctttattcctaacttttggtaaactagtagaattggcacttaacttttgccactatttcttttattttattttttccttaaattctattttaggccgggtgtggtggctcacgcctgtaatcccagcactttgggaggccgaagcgggtggatcacgaggtcgggagatcgagaccatcctggctaacacggtgaaaccccgtctctactaaaaatacaaaaagttagccgggcatggtgccaggtgcctgtagtaccagctactggggaggctgaggcaggagaatggcatgaacccaggaggcggagcttgcagtgagctgaaattgtgccactgcactccagcctggatgacagagcgagactctgtctcaaaaaaaaaaaaaaagttctattttagatggaaaactatgcaatcgaagagtatccagtga

SEQ ID NO: 381589 - DNA, 287 bp, Homo sapiens
ataaatgaagggctcacattataaaaacttactgccaacttaatttttcttaatgatacaaaatccttttgagtctcagaatttggaggccattttattgcctagaattttatgccttttcatttataaacaaatctggatatacaatggaaagtaattgtcaaacattaatatttcaatgtaagcctgttgtccttttctcaaatagaaaacaaakaaatttcacttctaataataaccatgctgtgtttctaaggaaattaaatagactgaggggttatactaca

SEQ ID NO: 381590 - DNA, 472 bp, Homo sapiens
aggaatttagccaccaagaagatcctaatattaaaaaataaggctaataaggagaaatgaaacctgagttaatttgcctagaaaagtgaagggtggaggttggttacagtgcttcagttttcagcaaggtaatttaatagatgttgaccagctcttcttctttgccaacagaggtactgccaagctgagactgtagcatgagagatgttgtcatgacatctgagattatttccggatcactgctgagcgagtcactcatgtgctattatccttgtrgcagcctgtgccagacactgtaggagtgagaaggactacgcttatgacaactaggctttccaaggaaaatatgtttgtggccccaaatgctgggggccgtggaatctgaagggaagggcagaagttggttaatatctttaaagaaatgtcaccttgaaggatgttgagactatcctctgaggatcttatgaaggct

SEQ ID NO: 381591 - DNA, 472 bp, Homo sapiens
aggaatttagccaccaagaagatcctaatattaaaaaataaggctaataaggagaaatgaaacctgagttaatttgcctagaaaagtgaagggtggaggttggttacagtgcttcagttttcagcaaggtaatttaatagatgttgaccagctcttcttctttgccaacagaggtactgccaagctgagactgtagcatgagagatgttgtcatgacatctgagattatttccggatcactgctgagcgagtcactcatgtgctattatccttgtagcagcctgtgccagacactgtaggagtgagaaggactacgcttatgacaactaggctttccaaggaaaatatgtttgtggccccaaatgctgggggccgtggaatctgaagggaagggcagaagttggttaatatctttaaagaaatgtcacsttgaaggatgttgagactatcctctgaggatcttatgaaggct

SEQ ID NO: 381592 - DNA, 556 bp, Homo sapiens
tctgagcccagagatattaatggaattataatggagaaggtcttgggcaaatatatttgtcaggctaactgtgaatttgatcttaaattgtactaaagcctgtgatagggtggcattaagtaaaactgccgtgggacttcagcagttgatccgaacakctggctgattctattctcttctgttctctgcttcaaaagccaagtttgtccttatatcatgttatataacccaagattaagattggttttgcagagaattttaaaactctttatatatatttgaatgtcaactatcactaaaactgtttatgtatatttgaatgtcaactatcacttggactcttgtgatcccaatgttttctttgttcctatctacttatacctccatttttaatctttttcccacttcggtaggatcaaagaaaagtagaaattaattactgaaaatatatttcaatagtcatcaaagaagatcaatgagaatcaaatcgtttcagcattatttttaagccggatttaattctaaagtcttttagtttgctctgtaaggttttgta

SEQ ID NO: 381593 - DNA, 556 bp, Homo sapiens
tctgagcccagagatattaatggaattataatggagaaggtcttgggcaaatatatttgtcaggctaactgtgaatttgatcttaaattgtactaaagcctgtgatagggtggcattaagtaaaactgccgtgggacttcagcagttgatccgaacagctggctgattctattctcttctgttctctgcttcaaaagccaagtttgtccttatatcatgttatataacccaagattaagattggttttgcagagaattttaaaactctttatmtatatttgaatgtcaactatcactaaaactgtttatgtatatttgaatgtcaactatcacttggactcttgtgatcccaatgttttctttgttcctatctacttatacctccatttttaatctttttcccacttcggtaggatcaaagaaaagtagaaattaattactgaaaatatatttcaatagtcatcaaagaagatcaatgagaatcaaatcgtttcagcattatttttaagccggatttaattctaaagtcttttagtttgctctgtaaggttttgta

SEQ ID NO: 381594 - DNA, 556 bp, Homo sapiens
tctgagcccagagatattaatggaattataatggagaaggtcttgggcaaatatatttgtcaggctaactgtgaatttgatcttaaattgtactaaagcctgtgatagggtggcattaagtaaaactgccgtgggacttcagcagttgatccgaacagctggctgattctattctcttctgttctctgcttcaaaagccaagtttgtccttatatcatgttatataacccaagattaagattggttttgcagagaattttaaaactctttatatatatttgaatgtcaactatcactaaaactgtttatgtatatttgaatgtcaactatcacttggactcttgtgatcccaatgttttctttgttcctatctacttatacctccatttttaatctttttcccacttcggtaggatcaaaraaaagtagaaattaattactgaaaatatatttcaatagtcatcaaagaagatcaatgagaatcaaatcgtttcagcattatttttaagccggatttaattctaaagtcttttagtttgctctgtaaggttttgta

SEQ ID NO: 381595 - DNA, 527 bp, Homo sapiens
gatttcttaaaaaatagaagtatggagggtgggggagaaagaacagttcttgtttttttctsttgattaaaatccatccttttagatgtgatgtatttttctagtgagagaggtgtgcagaaaaaaaatacatgatgaaggaccagtctgtttttcagctcaaaattagaccaaggattttaatttatcttctagtttcttctagttgactgtgtgaagagtctggaatgaggtctccagagtaatatagtcacaaataaggaggagcatgcagagagccaaagggaagaaataatgatgaagcaacctgatgttcctattccacaggctccaaaatgaggcaccagaggcataggcaatcccagagccaacctggaattacagccagatgaatggatcatatctacagagaattagaaatgagagaacgctaaatcctaaagggaatggctgcctataaaagtccttcagaacaaatctcagatacatgcctttctttcagacaaggaacatagatctagggacag

SEQ ID NO: 381596 - DNA, 567 bp, Homo sapiens
agtgataaaaacaggccagtggacattagggtgtgtgtgtgtgtgtgtgtgtgtgtgtgtgtgtgtgtgtgygtgcgtgcgcacgtgcatgtacatgtatgcgtgtgaaatatactttcctctgtgtggctgtaacaaagccaattaatgtaggaagctttcctacccagatggtgctctatctttctatgctcttctttctctgtcactgtcacccagtcacctacctggtctctcccagcacaagttgaccattgcactagtacacataagaaatttagtgtcagtcttggataaagcagttgggccagtcatgcagcatgtatttatgagtcctggtgacaaaggaaattaaaactcttgctgtgaaaggcagatgaactctattggtgagatttatgtagttagtaatgcagcttttatttgttctgccaagatattcactgttttttctccactccatgtatcactctgttttcacggacagatatttttaaacccattaattatttaaggacaagagaggcattattaaggataagtcaaaatgaaggcttttggagaaga

SEQ ID NO: 381597 - DNA, 433 bp, Homo sapiens
aagaccttttccactgagaagtctttattatcctttgctcctttattttataggagggactatccacggagaaggatatttgaagaaacatgtgtctttgtcctcttcatctccctcccaccctagaatgatttcattgggaaggcaatgtagatgttgtattccctattatttattgacatttttgaactccatatgccccagtggattggacagatgggtttccagtttccaggaaataaacmcttggggcatggtcttcagtagtgaaagaggcccaatattttccaccgtctctgattgtgactggtggataaatcacgttatggtgcctctcatgaaggggaaatgggaagcccaggctggcctcagatctcagttgctgcacccagttcttctgcttccttgaggccagtttagtttcaaggttttc

SEQ ID NO: 381598 - DNA, 589 bp, Homo sapiens
ccctctcacctcgaatggcctttctcacatctttaaccacagaaattccatccagtcttgaaagctcatgaacatacctcctcctctatgaattcttctccagtgctctcagtgagaagtgttttggtcccctgaactccatgacattggtccagatttctgtgactgattcctacgaacctgccacctttcagcctcatagattgtcttctctagccttacagcacctacaacactgcctgaaagtgaagtaaatttaagtacttggttgttttcttaatcaagtaatatcttcttgaaggcaggcactgtctttccttcttagtatttcagtattcttcaaagagtctcattcactttaggtataaggcaagtatttgggtgcgtgygtaaaatagtacttgataaaacaacccacaccatgataactagaaaataatttttatcctttctgtgtttgaggacattccacaaggtatgtacaaagtttagtcacataaactaattttataatacccagcaaatctgaaactaattctgctcaccataagaaaatattctaatgcatttaaacatgctgagcatccct

SEQ ID NO: 381599 - DNA, 623 bp, Homo sapiens
aagtcttgttatgttgtatgtgtctagttacttctagattattcaatttttggcatgtatttgttcatagtattctctttttttgtatttctggggtatcagttttaatggtctcttcttccatttctgattttatttattwgcatcttcttcgtatcttagtctagctaaatgtttgttaattttatcttttccaaaagtcaactcttatattcattgatttttctactggttttctagaatccatatcatttaattctgctattacaattactattttcttccttctactaactattagcttagtctgttctttttatagtttttgatgtgtaatattaacttgttttatgaaatctttctcttttgatgtagacatttattactatacactttcttctcagaagtgcttttgctccatcccataagttttattatggtgcatttccaatttttttggtcctaagaaatttttttaatttctcttttaattccttctttgacatattggtttttcagaagcatggtgtttaatttatatataattgtgatttttcaaaaattcgtttgttattgatttcctgttttataccattacagtatgaaaagatacttgaaatgat

SEQ ID NO: 381600 - DNA, 464 bp, Homo sapiens
tagttcttcctctgcacgttttggagaagttctttctgttcttttctcatcacccttagttcattaatatttcaccaaacattttctacacaaaaagagtcttaatttggaacckgaaatacccagcccagtgtcagaattatatgactccctcttcttattctatttaaaatttctttggcagggcacagtggcttacacctgtaatctcagcattttgggaggccaaggcaagagaatcactcaaagccaggagtttgagaccaacctgggaagcaaagaaagtcctgtttctacaaaaattaaaaattaaaaaaaatagccaagcatgttggcatgcacctgttgtcccagttactcaagagcctgggtgggaagattgcttgaagccaggagttcaaggttacagtgagctatgatcatgccactgcactccagcatgggtgacagagtgagaccttgtc

SEQ ID NO: 381601 - DNA, 585 bp, Homo sapiens
ttgtcctctcgggcagtagtttcagatccttcacggtagaggaaatggtattggaggaagggcacacctcccctcaacaacagtgatgtattgggtatttacagctagttctttctctcaagggtatgtggagagctcttgttagctttgcayagatgggcctactggagatctttaactttctttccttcatgcattcactgtcccagtgtagctggttacttctaattcctcccttagtccctgcagagccagtggtcctctccctctctggggactatttgctccattgggcaattctctaaaggatcaaagatggcctagactagctccctcttggggaaacaatccattctctgtactaaacttcatcctctgatatagaatgcttcttctggacactcctctagaggcaaatttttggtacctgtacctcaaaaactcaaaggaacatagatcaattattctgagtgtttctcttgaagttccctaaatgctctcccttcctgtatgggcaaggaagagggtgtcaatcacatgcagcatattaacaaatctctccccaaaagcctttaaactgaaaca

SEQ ID NO: 381602 - DNA, 472 bp, Homo sapiens
tatcataatgttgaccgagaaataatgaaaaacgaatagaaataaaattaaagagagatgggctacacacacacgcagagagagagagagagagagagagagagagatttcagccctcagtgactatgtcataaataggcatggaaagttccagctaagcatggagaagatgagatgaaattatacatcaggcagaagatgggactatgaaagtacatgacaagaagaagtagttgtttctttatcttacacaaaagttccctcattttgctatgtgccagaaaccaaaatcaatttcctttctttcttatcagcaaaataaaaaggcaagtctaaatatgttctgatgagaattagagagaaaattccagttcttctcaacaaacataagcagttgatgaactcgccagcrgaatgagtagaggaaaacaataagcatcctgagaaacatcaacatataggaaatgggtag

SEQ ID NO: 381603 - DNA, 646 bp, Homo sapiens
aggttcattattccctggttgctgttgtcaaagtgaagagaatcattattctcccctagaaacatcamacagagtcagacaactttatgaaagttttggctcaactgcttattcattgtgtgacctggggcaaggcatatacgtttcaggtttgtgatctctaaagtagggttaataataaacataagtgaatagtgaggatcaagtgagataagataatagctttcaaaccacattttaggaagactcttgggtgaagagagaggtcaagcaagagagggtacagcccctgccccaccctccactgctttgtctagagaaagtcagccttcaaatttgcagatcttagcttcgggccttcgaattcccagctcaattacctggccaccacaccagtgtgcacactcccttacaattgtccaatgctgtagagtgcacagagcacatttatatacattattgtacagctaatccttaccatgatacaggaaaattacctttcccacttgggagctgaaagactgaagtcctaaaagattaagtggctaagggtggttcccaagataggtcagcagcagcagcccccaaccagatagttgtgcttttcctgaaactctgggaaacccatacattcctgttttctata

SEQ ID NO: 381604 - DNA, 563 bp, Homo sapiens
cttgtcttgtgacccaccaatgtcctgtgcccatattatcatagatgccagctgacactctcagaggcatccttcaaattagaataaaattgttctaatacagcatgaaaccctttactctgatacaaaagatgcagccatatcataaaggtacatgtttggggagaactgcaatatcaacacacatctaatcaaaagcttggccagttctagcmaccacattgtgattcttaagcaggtagtacttattctctcttttcctgctgcctctccatagtacaccaaaacttccagaatgctcactttttttccaagagaaataatctctggatatcatcaaggttatctcaagtctcaagtactccctatggtcatcatcagcttccctcccagaataaacttgcatactgacgatatttcaccttaaaacaatctactattcccaagaccctcattcaagacaggaggtttaacaaactgtacttctagaagtatcttgggaaccaattaagaatgagaattttaaaactaaaacataagtgatctactaagaacatgaaata

SEQ ID NO: 381605 - DNA, 563 bp, Homo sapiens
cttgtcttgtgacccaccaatgtcctgtgcccatattatcatagatgccagctgacactctcagaggcatccttcaaattagaataaaattgttctaatacagcatgaaaccctttactctgatacaaaagatgcagccatatcataaaggtacatgtttggggagaactgcaatatcaacacacatctaatcaaaagcttggccagttctagcaaccacattgtgattcttaagcaggtagtacttattctctcttttcctgctgcctctccatagtacaccaaaacttccagaatgctcactttttttccaagagaaataatctctggatatcatcaaggttatctcaagtctcaagtactccctatggtcatcatcagcttccctcccagaataaacttgcatactgacgatatttcaccttaaaacaatctactattcccargaccctcattcaagacaggaggtttaacaaactgtacttctagaagtatcttgggaaccaattaagaatgagaattttaaaactaaaacataagtgatctactaagaacatgaaata

SEQ ID NO: 381606 - DNA, 569 bp, Homo sapiens
gctttaattggcagctctcttcttttttcttcttttcactggctttttacttggtgctttttcttgttttgcactggtggtctgtgttctgtgaataaagcaaagtaagaatttactaagagtatgttaagttttggattaytgaaataagaggcatttcttagttttccagtaggatctaaaatgtgtcagctatgagtaagactggcatccaagaagtttatattatagatttaggtcctaatttttataaatcacaaggtaaaaaaatcacagaacagatggatctctaatgaaaaagggatgtctttttgtttatagtcatgtggcaagatgagagtaaaaccagagagcaaacctctataagtgttgagtatatgtatacatttgaaataaaccagaaatttgttaccttattttctttggattcttgtctggttccaaaatgatcatttcttcttcttcactatctgagagtattatgggagcatctttgtttttttattaatttaaaaaaaaaaaaaaagttaagcaatctcttacaaaatttatttctacatgaatttatt

SEQ ID NO: 381607 - DNA, 569 bp, Homo sapiens
gctttaattggcagctctcttcttttttcttcttttcactggctttttacttggtgctttttcttgttttgcactggtggtctgtgttctgtgaataaagcaaagtaagaatttactaagagtatgttaagttttggattactgaaataagaggcatttcttagttttccagtaggatctaaaatgtgtcagctatgagtaagactggcatccaagaagtttatattatagatttaggtcctaatttttataaatcacaaggtaaaaaaatcacagaacagatggatctctaatgaaaaagggatgtctttttgtttatagtcatgtggcaagatgagagtaaaaccagagagcaaacctctataagtgttgagtatatgtatacatttgaaataaaccagaaatttgttaccttattttctttggattcttgtctggttccaaaatgatcatttcttcttcttcactatctgagagtattatgggagcatctttgtttttttattaatttaaaaaaaaaaaaaaagttaagcaatctcttrcaaaatttatttctacatgaatttatt

SEQ ID NO: 381608 - DNA, 495 bp, Homo sapiens
ttttaaaaaaacaagattaaaacttctgattacaatagaaaagactgataaattcaacttcattacaatttaaaatttctgtttaaagagatactataaagaaagtgaaaaggcaagccataaactgggagaaaatattggtaatgcttgtaattaaaaataatttatatccaaatatataaagaactttaattcaataagaaaaactcaaataacccgattttaaaatgggcaaaagacaaacaaatgtttcacakaaatggaaacgtgaagggtcaacaagcttaagaaacaatttcaaactctgttgcagggaaatacaaattatgactaaaaggagacacaattttacatctaataaagagaacgattaataaatctggttatgccaagtgttagaaaggatatggatcaatggggacttttatattttactggcaagactgcagacaactttgaagacaatttagtactatctttttagtttttaaattg

SEQ ID NO: 381609 - DNA, 554 bp, Homo sapiens
taggatggctattatcaaacagacaaaaaataacaaatgctggtatggatgtggagaaagagaactcatatactmttgataggaatgtaaaattagtacagccattacagaaaacagtatggaagttccttaaaaaattaaaaatagaaccaccatatgattcaaaaatcctactactgggtatatatccaaaggaaatgaaatcagtatattgaatagatacttaaaaaattaaaaatagaactaccatatgatccagcaatcccactactggtatatacccaaaggaaatgaaatcagtatgttgaagagacatctgtactcccatgtttactgcagcactattcacaacagccaaaatatggaatcaacctaactgtccatcagcagatgaacagataaagaaagtatggttgtatatatacacacagtggaattctattcagccacaatgactttttgtctttgtggcaactcagatggacctggaggacataatgttaaatgaaataagccaggtacagaaaggcaaatatcatatgatctcactcata

SEQ ID NO: 381610 - DNA, 534 bp, Homo sapiens
tgtgtttggagatttgaggaaagtgggcgtgaagacttagtgttcatttcctcaacctctctctgtgtgaacatacaggaatcaaatctgtctagcctctctttttggcaaggttaagaacaattccacttcatcctaatcccaatgattcctgccraccctcttccaaaaactatttaaagacatgttcttcaaagttatatttgtctttccttcagggagaaaaagaataccaatcacttataatatggaaactagcagaaatgggtcacataagtcatctgtcagaaattgggaaaatagagtaggtcagtctttccagtcatggtacttttaccttcaatcaaatgagatacgataatttcttatttatattaattctacccaggctgaattcttaagacatatttaaaatgttaattaaaaatgtaaatgcaattctctttactttcccttttcttttatgtcaaatttattctgtgctacatgcacacctcttacaggttccaaatgcaaccccatgctaagttctga

SEQ ID NO: 381611 - DNA, 543 bp, Homo sapiens
aagcagaatcctagaattcagtcaatttctaattgaatgctaaacagctcctgttaaaagccttgttcaaaacaattcatatttaaaagcataggctatgggggaaattaatcattcataactctaaaatgaaccttttttcttttcttttttttttttttttttgagatrgagtctccctctgttgcccaggctggagtgcagtgatgcaatttcagctcaccgcaacctccgcctcctgggttcgagtgattcttgtgcttcagcctcctgagtaactgggattacaggtgtgtgctactgcacccagctaattttgtatttttagtagagacagggtttcaccatgttggccaggctggtctcaaactcctggcctcaaatgatcttcccgtctcagcctccaaaagtgctggaattacaggtgtgagccaccatgcctggcctaaaatgaacctttaacattactttgtccctggggggtaaaaacctcatagactcactggatttttccttttacaaaagggctgatgccaagaaatg

SEQ ID NO: 381612 - DNA, 629 bp, Homo sapiens
aataaaaaaaatcatatcctacccaaataattttcttttctgaaggaaatgagttggaaagttcaggtttagaaatgtttgtctcttaggggaacttaatcagttaaaacattccatcaggtttgaagtagccatcttggagtccacttcttttttccctgcacttttacaagtacaactaacagtgtggcatgctctgcagagaagggaaacatggaagttgagccattcccagagcccatgtttagagctgcmgtataccacctatcttatggaaaaaggcaacatagcaagaattttccatgtatgtcccatttttgagattggcattctgctttcttttcatgttatttaaagttttaaaagattgacctttaggagaaacagacttggtaattcccaagaaatttctatgtgctacggataagctacccccaaacgtgccctttttgcagctgtgtaacaacaaggtgatgtgtaaatgtgttgtttattcttctgtgtctaacatggaaaatgtgacattcgtctgtgtgcattcatgttcaatcccaaaaatccctgacatctctttcatcatttattgacatcccattaaggttctagacctacaaaaacatttgtttgga

SEQ ID NO: 381613 - DNA, 431 bp, Homo sapiens
tcctgtggcctcagcctaggtcaagtaattattttatacattttcttttaagccattacattttttaaaaattctacagtattttccctttatgtagtcaggacaatttgttaagttggacaatttgttaagttgttaagttgtactattttgtcctcttgtcccagaatggcattttctgctttcagtttcttcagaatgtcctaggacckctcacttaagggtttcatctttttcaaacgatattgctcactttttagcatgacatggaaatgagaagagaggataagagtgtgatatgagtatcattgggaaactgttcttcttgttaaaaatcttgtggacttatttctccaataatcactatggtttgataactaaccattgtgattgtatagaacatattttcttctccaaaagtcttatgggat

SEQ ID NO: 381614 - DNA, 611 bp, Homo sapiens
cctgcaccctctgtatttgttgtgacaggaatgatgtggtctgaatgtaaagagctctggctggaaggacctagggaatacattttgcagttgtggaatgtgcttgactttgggatgctgtccatcttcattgctgctttcacagccagattcctagctttccttcaggcaacgaaggcacaacagtatgtggacagttacgtccaagagagtgacctcagtgaagtgacactcccaccagagatacagtatttcacttatggtaagttgttagcttcagggtccccttrtgttttgggaaaggtattggaaccacattttggaaggaaatgccaattggagtatgtttagtatgagaggtgtattgaatatttatggacagtggagaaagcatgaactttggaacctacaaaactggattcatttcaaggctctgaccccctttgctgtgtaaacttgttcaagtcaatttgcttcactgtgcctcagttttcatagctataaaaagacaatattgcaaggtggaagaaaattacctttaagcctataagataattactattgggagactgtcttaattagggaaaaaatagtttgataaactgcttgat

SEQ ID NO: 381615 - DNA, 614 bp, Homo sapiens
aacctcaacatatcatacggtaaacaaacaaaattaataattctttctgatgtttattttgtgttgttgttacattattaatgtttctgatcaaagtgatttatctaactgcatctggtcaactccttctagagataaatgaagtatcagtcaaacacactttaaagctaatccacccaaagctggagtaccagttgcttttggctaagaaagtgcagttaattgatgctttaaaagtaagtacatgtgtcrtcgtggactggtgattattatttgaagtcataggatttctaaaattatcaatactttaacattacattggattgaattttgaatattaaggtgcttctgtttttaattttaaataggaattacagattcatgagggaaatacgaactttctgataccagaatatcactgtattctagaagaggcagatcacctacaggaagaatacaaaaagcaacctgcacatcttgaaagactctatggttagtggaccattctagaataccttgccatatttcttttcaactggctatttcccaaggatcatgtaagagaagctgggcagaaagataaaaagattacatcagtcatgattcatgaacca

SEQ ID NO: 381616 - DNA, 608 bp, Homo sapiens
ttcataatcaggtgagatatttaatccttacaatagctctgcaaggtaggtggtattatcttcatttttcatatgctttaactgaaatctgagtctaaggaatttgttgtcacctagcaagttagtgatcatgcctgcattagaatcttctcaccccaaaatgcatgccttttacactatgccaagccttccatagtcactgtagagccaattggtatcactagtacacatggatccttaagcctgcctactgaattttttattacatatccagagactttctcacaaactgtagctatatttaatgtcttaacctttattacatgacaagcacatgatctcttttatccttataataacttatgagattggctgtayataatatcactgattgcaaaatccagacagctttgtaaaccaaagtttttttcataaataatttgacagcaaaatcttgacttaatctgaattaatttaataacaaaatctgacttaaactgacatgaggttttatatatattttttgtttgtttgtttgtttgttttttgagacagagtctcgcttggtctcccaggctggagtcagtggcgcgatctcggcttactgc

SEQ ID NO: 381617 - DNA, 636 bp, Homo sapiens
aattagacatgctgtaaccagtggagctattcagcgtgcttcaagtgaagagtgcagaaatagtgatgccatcttagattttcctacactagtatcttctagatctctttttatcatatatgacattaaggctacagaagttttgtgcattaatcttaattcatatttattaatttcaagggaatattgaaaggttttaaaatggcatacagataatggaaaataagctttatgtttcaagaagggcagactcacgaattttttagaaaacagtgcttcttaatgatatgctattatacttattagttatgtgcaagctttgtatattcttatatttatatataaatataaaaatttgttaaaggcacgtatagttaagagagttttattttaataaggtcatattgtttttactatgtttaaaaaactttacttctgaaaggaacataattatatctaggtcactagaacgtcattgtgttttttgttggttgccacagcttggggaaaaatagaaaaaaattaatgactgtatttgaatattttgtaatrcactgctatttattatatatatcaacagtagttcaaggtgccatcttaaattaattgcatcttcattaggaaaaataaaaagca

SEQ ID NO: 381618 - DNA, 571 bp, Homo sapiens
aagtcttcccattaacccatagtctagtttatgacaaaatgattcaaagtaaggactggaaagtataaatggaaaaataaaatcttacttaaacaaggctatcatgtttaagtggctgtctaaagcagtgatttttacagctcgttcccagttgtggtttaggtgcagaaattgcaacatataaggttccatgmaagatgaacaacagtgacaatgtttatgtagaagcattttttaaataaaatgctatacaagtggaagctattaacatgcagaaccagccaactcctttgtgtcttatttttcttatctttccctattgatagcatttattgttcactttaaaataaaaatctgtcacaatgtgacaggctctatagggcagctcagaaaaatattagaatgctgatggtcatagtgcaagctttcattctagcttatatgtcattctctgaatctctgttatgaacagaattggaaaattcaggactgaatttgtttttgcttttgcttttttcaaatgttaacagggtatccttctcaaggaccttgtcaagttattctctcaagc

SEQ ID NO: 381619 - DNA, 443 bp, Homo sapiens
catataccaacttttaatatgaagtttgatatcaaaagctggaaatatttgttagagtgatattctagaaaggttaaaatcaacagaatcaaccagaatcaacaaaggaactgttaaaggtatataaaaataatccaagaattcttacatagtargtttaagaaaacttgttttggtagcaggttttacataaaaaagatttagtggctttatttattcacaaatttgattgatttattcattcatttaataaatatctatcaaaaacataccatgtactaggtcctgaattctgggtactagaaatatagtagtaaattagacaaataaggaatcttctacagtttatgttctggtagcctgagacagaaaattaataagtaaatgaataaacaagataatttcaattagaaataagattcaaaatatgtgaattagatgga

SEQ ID NO: 381620 - DNA, 443 bp, Homo sapiens
catataccaacttttaatatgaagtttgatatcaaaagctggaaatatttgttagagtgatattctagaaaggttaaaatcaacagaatcaaccagaatcaacaaaggaactgttaaaggtatataaaaataatccaagaattcttacatagtaggtttaagaaaacttgttttggtagcaggttttacataaaaaagatttagtggctttatttattcacaaatttgattgatttattcattcatttaataaatatctatcaaaaacataccatgtactargtcctgaattctgggtactagaaatatagtagtaaattagacaaataaggaatcttctacagtttatgttctggtagcctgagacagaaaattaataagtaaatgaataaacaagataatttcaattagaaataagattcaaaatatgtgaattagatgga

SEQ ID NO: 381621 - DNA, 443 bp, Homo sapiens
catataccaacttttaatatgaagtttgatatcaaaagctggaaatatttgttagagtgatattctagaaaggttaaaatcaacagaatcaaccagaatcaacaaaggaactgttaaaggtatataaaaataatccaagaattcttacatagtaggtttaagaaaacttgttttggtagcaggttttacataaaaaagatttagtggctttatttattcacaaatttgattgatttattcattcatttaataaatatctatcaaaaacataccatgtactaggtcctgaattctgggtactagaaatatagtagtaaattagacaaataargaatcttctacagtttatgttctggtagcctgagacagaaaattaataagtaaatgaataaacaagataatttcaattagaaataagattcaaaatatgtgaattagatgga

SEQ ID NO: 381622 - DNA, 564 bp, Homo sapiens
gaaatgttatttagctataaaaaagaatgagatcctgtcatttgcaataatatgaacagagctggaagacattgtgttaggtgaaataagcaacatgcagaaagacaaatgttgcatattctcactcatgtgggagttaaaaattttaaaaattggactcacagagatagaaattagaatgatggtcaccagagactgggaagggtagcagggagagcaaggataaagtgggaatggttaatgggtacaaaaatacagttggaataaatattacctactatttggtaacacaatagagtaactatagttaataatttattgtgtattttaaagtaactaaaagagtagaatttgaatgttcttaacacaaagaaataataaatgcttgaggtgatggataccccarttaccctgattggatcattacacattgtgtgcttctatcaagacattacatgtacctaaaagattaaacgtttcagttaaaacaaaagtcccttttaaatactatgcccagtccctacccttatgttacatttggacaaaggtaaccagtgttgtgtg

SEQ ID NO: 381623 - DNA, 596 bp, Homo sapiens
gactctgtctcaaaaaaaaagaaagagaaaagtcaaacgtatatacaatgaaatgttatttagctataaaaaagaatgagatcctgtcatttgcaataatatgaacagagctggaagacattgtgttaggtgaaataagcaacatgcagaaagacaaatgttgcatattctcactcatgtgggagttaaaaattttaaaaattggactcacagagatagaaattagaatgatggtcaccagagactgggaagggtagcagggagagcaaggataaagtgggaatggttaatgggtacaaaaatacagttggaataaatattacctactatttggtaacacaatagagtaactatagttaataatttattgtgtattttaaagtaactaaaagagtagaatttgaatgttcttaacacaaagaaataataaatgcttgaggtgatggataccccagttaccctgattggatcattacacattgtgtgcttctatcaaracattacatgtacctaaaagattaaacgtttcagttaaaacaaaagtcccttttaaatactatgcccagtccctacccttatgttacatttggacaaag

SEQ ID NO: 381624 - DNA, 609 bp, Homo sapiens
tatcattatgtaagtgcatgtttctaaaactacaaataggcatactttgaccatggtaactttcttaaactggcccaactccttagaaaccaatctttcagaactttaaattttacttaagtgattttttaaaaatcctcaataaagcatcaatttccatttctcagtcttgtcttatactaattcttgagagtctcatwcttttaaaatcctgcaagtgactagccatagaagaaaaataatgttatagcatttctaataacccctttctctgagtgctttgaatggcactaagttgttctctctctctctctctctctctctctctctgtgtgtatgtgtgtgtgtgtgtgtgtgtgtgtgtgtgtgtgacagagtctcgctctgtcacccaggctggagtacagtagcactatctcgtctcactgcaacctccgcctcccgggttcaagcaattctcctgcctcagcctcctgagtggctgagattacgggcatgcaccacgacacccagctaattttttgtttttttcgtagaggcggggtttcaccatgttggtcaggctggcctcccactcctgacctcaaatgatctgcccgcctcagcctc

SEQ ID NO: 381625 - DNA, 594 bp, Homo sapiens
ataggcttaagtacaaagtgtaataatggcaactcaaaataacagataaccttccatatcctttacttgaaatatttgtttggtatatctcttctgattctttcaagaaggagcagatccatctctttatattctccatagcacattgcatatatattcctctattgggatatttttcacattgtatcctaattatctgtaacgctataactgtttccctggaaaatatgtcacaatctcaaaagcaggtggcctgtgttagaccgtatgctgccaggaagtagcaaagggaaccaacatcactgagtcttcactatgtgctttttatgatcataatatttttcataaattattttatttaatcctyacaagaatctattgaaagggatactattatgtcaatattttgcatgaggaaactcagactcagaaaagttgtcactggcatcaaattacacatctactaattttaccattaagctgtatgatatccaaacccaagtccttgacactgcatcgaagttatgattttccaacccctaaaatattgtttgactcatagtagttgctaaataaatacttcttgcatgaata

SEQ ID NO: 381626 - DNA, 630 bp, Homo sapiens
cagttgctttatttcagattccctttgactcaccatggtagatcctcacttaaagcattttagaatatatcaagtcatttaccttaatctatgtgacacctaacaacaaccttgaaagatgtgattcttatctttactctacaggtgaggaatgattttcagaggagttaagcaaattgtgccatgtggcatcctagtaaaagcctaaggagagattcaagaacttgccaagaccacgctgaatcccactgaaatatccaagttcttaaaaagagcaaaccacttttctgtgtgttcattttgcacccttatctctgtgcttactacattttaatcacccattttatttctctccaaagtctgtatgctccttcaaaccataaactcctttttaaaaatactctcagcagttggcatcaaacctgatattcataaaatatgataaattagtgcttgttgaaagtttgttgaaggagattttattatttttaaataacatacatgagatcttayatttgtttattttatgtttcatgggagtgtagtagtttagaatgagaaaggacaagaaaatgatgtttattgagaccctactatatgtcaggtcctctgagagtacttaacgtgcca

SEQ ID NO: 381627 - DNA, 567 bp, Homo sapiens
cttgtcccaggctactcttgaatgtcagagctgggacatagactcgtctctctgcttcaaagctattgctctttcctttgatcaataaatgcagggactagccagttgcctgtttttgtaaataaaatttattggaacacagccatgcacatctacttacggctgctttcaggttacaatggcagagttgagttgctctaacagacaccatatggctcaccagtgcttaacagtgctgaatagccacatttggctagtgactatcactattggacagtatacttctaaatgcaccagtgaattagttgagggttggaaaaatggggtgaacagaacaaacrtataattatcatttcccgtccattatacatcatcctacttgtttccacattgtgttgcttcaatatccttttgaggttatctcttgggtttgtaaatgtattatctcctgtatttgtcttggtggccaaaacatttacttatcactcttgttacatgttagcatctgcaggtcagttgccatgttcctgctccctgtgtcttcttattctaggagctagctgaatg

SEQ ID NO: 381628 - DNA, 567 bp, Homo sapiens
taatagctagttcaactggttttgctaacaagagtccttgagaggcaattttttggaccctgctttgcccacacaagaggtttattatgacctctgagatgttcattcatgaatgatatttttttctccaacaaaagtggaggactaacactgttgaactttacctgagtcccatgcttacagagaacgcaatggctaagaactgctgctccctctgccccccacacctccaaactttttgtgttctggaaaatgggcaaccagragggaacacctgctctcccatactctgagattaagacttacctccactcttcctcaatggcactcttgttttatgaaactagattttctccctcttattttagacagttatcattaataaatattctccccattagaatgacctgaataaaattacctccttaattatctggctcattttgtttttgtatctgcttcttcctcttctttcttttcactgatgttgatccccagtaaaatattttgcagtctgaatgctgtctccatgtctgtttctgaggaagtcaatctataacattaatt

SEQ ID NO: 381629 - DNA, 546 bp, Homo sapiens
catgtaagaagtcaatgaatatttatttcccaccaaataaataactggaaaaataatttttaaaattactaatctgaacagttttgagtctttatgtgaaaagggccaatgagtactaaaattataattgaaaaaaaaaacacctagagacattgtgatgaaatttgttaatgcccaggaacaaatggaaaattccataaactaacagacagagtaagaaaataataaawatttccagtattacagaaaacattaaatcatgcctataaagggcttatggaaaatattttagactcatctaaattatgttcaattatgaatgcaaaagaaatacattttcataaattcaaggaatcaggcagctgaaaactaattccttccccttgattaattattaaagtatgctctccagcaaaacaaaaaactgaatcgaagaaaagagaatgaagaagaacatataaatagtaaaatacataattaactccaaactatatggataactcatttatgaagttcataaaatggaagactcttcagttttaaata

SEQ ID NO: 381630 - DNA, 551 bp, Homo sapiens
tgtatttttactgtaaatgttctatgtttagataaacagatatatatcattgtrttacagttgcctacagcatttagtacagtaacatgttgtatgggtttgtagccttggagccataactatatcagacagcctaagtgtgtagaagactgtaccatctagggttgtgtaagtgcactctatgatatctgtacaacaaataaatcacctaacgatgcattccttagaatgtatccctgtcattaagtggcatgtgaccatattataggtggtgtaaggaagtggttgtcagcacaggttttggagccagaatgcctaaattcaaatctttcctctagcatttattatctgtgcaatgctggcaagtatttaaactctttctttaaaataggaataataatgatgatagaactcacctgctacgggctgaattgtgtccccctaaaaaacatatgttgaagtcctaacccctagtaacttacaatatgaccttacttgaaaatagggtctttatgaaaataatcaagtttaaataaagtcattagggtggg

SEQ ID NO: 381631 - DNA, 551 bp, Homo sapiens
tgtatttttactgtaaatgttctatgtttagataaacagatatatatcattgtgttacagttgcctacagcatttagtacagtaacatgttgtatgggtttgtagccttggagccataactatatcagacagcctaagtgtgtagaagactgtaccatctagggttgtgtaagtgcactctatgatatctgtacaacaaataaatyacctaacgatgcattccttagaatgtatccctgtcattaagtggcatgtgaccatattataggtggtgtaaggaagtggttgtcagcacaggttttggagccagaatgcctaaattcaaatctttcctctagcatttattatctgtgcaatgctggcaagtatttaaactctttctttaaaataggaataataatgatgatagaactcacctgctacgggctgaattgtgtccccctaaaaaacatatgttgaagtcctaacccctagtaacttacaatatgaccttacttgaaaatagggtctttatgaaaataatcaagtttaaataaagtcattagggtggg

SEQ ID NO: 381632 - DNA, 415 bp, Homo sapiens
tttctactcttactgatatggttgtgggcaagtattagcccttcaccacttgggcctttccacagggccacctcatgacatggcagctgactctctccagacagagcgattcaagagagatcaaaagagactgcctaaggtgaaggccacagtgtataatctgctctcagaagttacagcccttcatttttgttgttttctgtttattagaaaccagtcaataagccttgctcccattcaagggaagataagtacatgagggtgtgactaccaggaggtatggatcattggrtgtcatctcagcagctaccttctacatgcaggaagtggaagtaggggggcttttcacatggtatctccagtgctttgcatgtaagaggtgctcactaactgttcaaaataaatgcataaaatt

SEQ ID NO: 381633 - DNA, 625 bp, Homo sapiens
aaagaaggagaagcaatacagagaatgaatcctgccccctttgtaataagttttaagttgttcaagtaagacaatatacaaagtaatattagtaaaattgagttttcaaatttttatttgtattaattttacaagtaatgtagaactgttcttactctgtttttatttaataaagcatacaaataaaatgraattcttccctgaataccactaccaattctagtctctgagagagagagagaaaaaaaatttatattttgtggggtatgagtatatatgtgcatacatatgtatttatataattgttaccctatacatgcagttcttcaatttatcattttaatttaatctattttggaactcttttgtggcctgaatgggtttatcttaatacctaccttattaggttacttttaggattgcctgtagtaatgcatataaaatgtttcgaatagagcatgggcatttagtaaacatttaataaatatatattagctatttttattgttataaaaaggaagacaaaattttaaaggagttgcaccaagaagtttctttgtgatgatgaaacaattcagtactctaattgtagtggttgtggctgttaattttatgtatcaatttg

SEQ ID NO: 381634 - DNA, 558 bp, Homo sapiens
tttttaaaatgcctataactaaaggccagagaatatttcagctttaattttcccactaattattctgttgcagaatatggtatgttgtcataggatcagtggaacagaatagttccctaaatctccttttttaaaattatgagctttctttgtttttacatggatatgtctactttgcttggccaacttatttccatatatttttcaaatgaaaacctatattaaatatatttagaaattaatttctgttgtcttaactaaagggaaaataaatcattacttaaaaatacaaaaaagtctgtatcatttgaaaagcaaaagactaaaattaatgaagcatttattcttaggaacctaggaggacaaatacaacaaaataattrtaaggaaaggaaaagataaagataaaaactgatagttataaaacagacaatattcagaaaaagtagaagggaaacagaagcaagtggagataaaacctgaaactagtaaaagagagaaaagacaatacaatagattaatagataaatctcggaactagttcttttgaaaaatata

SEQ ID NO: 381635 - DNA, 579 bp, Homo sapiens
acaaattattttatacttctggaatttggagaatttttctcagcaagaaataaacctcaaaagatgaaaaaaataaatattgatatacttatctataagattttggcaataggaaaataagataaagaaatttgaaagactaataaccaattgaagtaaaaatccttgctgacaatagcaaaaacaaaaacaaataaacaaaaaagctactttctttaatagatgaaaaactcatacaatcaatgagaaaaagaatatcaayctaatagaaaaattgacaaagaacacaaactagtagtacacagtacacacagaataaatggttagaaaaaataaagtcaatgtcattatgaaataaatacatgccatccattttttatctatcagattgacaaaaaattacttgagagattatatctggagacagtttgggaaacaaactttagtgaaatatgcatgtaaattctcatccttcattacaatttgcaatatttaccaaaattgaagacacatagcctttaacccaagcaatgctccttctaatgagctaactgatcttcaaagatactgacacatttg

SEQ ID NO: 381636 - DNA, 579 bp, Homo sapiens
acaaattattttatacttctggaatttggagaatttttctcagcaagaaataaacctcaaaagatgaaaaaaataaatattgatatacttatctataagattttggcaataggaaaataagataaagaaatttgaaagactaataaccaattgaagtaaaaatccttgctgacaatagcaaaaacaaaaacaaataaacaaaaaagctactttctttaatagatgaaaaactcatacaatcaatgagaaaaagaatatcaatctaatagaaaaattgacaaagaacacaaactagtagtacacagtacasacagaataaatggttagaaaaaataaagtcaatgtcattatgaaataaatacatgccatccattttttatctatcagattgacaaaaaattacttgagagattatatctggagacagtttgggaaacaaactttagtgaaatatgcatgtaaattctcatccttcattacaatttgcaatatttaccaaaattgaagacacatagcctttaacccaagcaatgctccttctaatgagctaactgatcttcaaagatactgacacatttg

SEQ ID NO: 381637 - DNA, 514 bp, Homo sapiens
agccttgggagaccctaagcaaaaaatccagctaagcctggtgtccaraaactgtgagataataaaagtgtactgttttaagccagcgaatttgtggtaatttattatatagcaatagacaactaatacaatcaatccaccatagattaccataagtgagatccaaatctcctgaaaattagtcttggcaatttgaaagggtagaaggaggcagaaactagctcactggatagcaaagggtgtaagtagagctgtccctaagaggataacaagtgtggaaagaggattttgattaaagattgctgaagatgaactttgctcacttcacaattttacccaaggccctgtagtgaatactgattggatgtcttgattccagttttgaatagaaataaaagcctccaggaaaggaagtgtttgtgtgtgtgtatgtgtgtgtgtgtgtgtgtgtgtgttttctgtgtaagtattaaatctctccaccagttcaagtcatatgagtaaggattggcag

SEQ ID NO: 381638 - DNA, 514 bp, Homo sapiens
agccttgggagaccctaagcaaaaaatccagctaagcctggtgtccaaaaactgtgagataataaaagtgtactgttttaagccagcgaatttgtggtaatttattatatagcaatagacaactaatacaatcaatccaccatagattaccataagtgagatccaaatctcctgaaaattagtcttggcaatttgaaagggtagaaggaggcagaaactagctcactggatagcaaagggtgtaagtagagctgtccctaagaggataacaagtgtggaaagaggattttgattaaagattgctgaagatgaactttgctcacttcacaattttacccaaggccctgtagtgaatactgattggatgtcttgattccagttttgaatagaaataaaagcctccaggaaaggaagtgttkgtgtgtgtgtatgtgtgtgtgtgtgtgtgtgtgtgttttctgtgtaagtattaaatctctccaccagttcaagtcatatgagtaaggattggcag

SEQ ID NO: 381639 - DNA, 514 bp, Homo sapiens
ctggtatcacactgaccctgatcattttattccatccctcctaaggtgatgtctgtgctttggcataattattctgccactgtggattttcagaactgcttcattgaatctctttctcagtgatgacagggaaatcatacttctcttaagcagtctcctctttcattrcacagtgcaatgctactggcaaattttccagatcctattaaatgtcagataatcaactttctcatcacatcaaggatctcaaagtttaagcctacttgtcagccctattccttcaatttttaagaaacgcagaaataattactcatggatccggtataagagaggtttctgtatcaattgtacttagtaaatacatgaagtggagaatgaataagtcttgcctgttaaagtcttcatctgtcagcctaatgtagtatgaggtagaaagaacatggaatttgggataaggtagaccaggaattgaacttggttctgccacttgttttctgtgtctgttctccttcag

SEQ ID NO: 381640 - DNA, 514 bp, Homo sapiens
ctggtatcacactgaccctgatcattttattccatccctcctaaggtgatgtctgtgctttggcataattattctgccactgtggattttcagaactgcttcattgaatctctttctcagtgatgacagggaaatcatacttctcttaagcagtctcctctttcattacacagtgcaatgctactggcaaattttccagatcctattaaatgtcagataatcaactttctcatcacatcaaggatctcaaagtttaagcctacttgtcagccctattccttcaatttttaagaaacgcagaaataattactcatggatccggtataagagaggtttctgtatcaattgtacttagtaaatacatgaagtggagaatgaataagtcttgcctgttaaagtcttcatctgtcagcctaatgtagtatgaggtagaaagaacatggaatttgggataaggtagaccaggaattgawcttggttctgccacttgttttctgtgtctgttctccttcag

SEQ ID NO: 381641 - DNA, 527 bp, Homo sapiens
ggaagctgcctattctctgccactcaccaacttattctctcacaaaccacattagataagaaaaatgatgacagaacttttcaatgtatttactcactgagagtctcaaagcaatttacaaacatcgatcaattatgtttcaatacatcyccatgggttacatagctgctaattttttcagctatgtgcaggatgtgtgaaacttttttacacaatcttttttattcccaattttgcccttggctacttagagtgtgcaattctgtggagttaaaaggggttaagaagaacatgtttagtaagaaagcaagaagaatctgaatataattaaacagctaaggtagagtgagttctctgtatataaatatatacatttccatgtctgggaccatccttcttccccaaataccatgatttttaaaaatctacctaactttatacttgctgttttgtctgcctaggatgcctttttggttcttcagcctcactccaatctcctataaactcaaccttttagacccaaagtg

SEQ ID NO: 381642 - DNA, 527 bp, Homo sapiens
ggaagctgcctattctctgccactcaccaacttattctctcacaaaccacattagataagaaaaatgatgacagaacttttcaatgtatttactcactgagagtctcaaagcaatttacaaacatcgatcaattatgtttcaatacatccccatgggttacatagctgctaattttttcagctatgtgcaggatgtgtgaaacttktttacacaatcttttttattcccaattttgcccttggctacttagagtgtgcaattctgtggagttaaaaggggttaagaagaacatgtttagtaagaaagcaagaagaatctgaatataattaaacagctaaggtagagtgagttctctgtatataaatatatacatttccatgtctgggaccatccttcttccccaaataccatgatttttaaaaatctacctaactttatacttgctgttttgtctgcctaggatgcctttttggttcttcagcctcactccaatctcctataaactcaaccttttagacccaaagtg

SEQ ID NO: 381643 - DNA, 360 bp, Homo sapiens
tggacatatttcctgataggttaggaatttatgattgattggatgtaggcacgagagaagaagatggtagaaagacatatttgccatcacctgagatgcggtgcattgtaaaaagaactggttaaggagaaggtgttgatcatgaaytcagttttggacttcgttatatttgagatgctgcttagatatccaagtgaagacatttagttggtcatataaagctggagtccaggaggaaaattcatgccaaattagtaataaaaacagtttgagatcacaagggaagtgagattagataaaaaagaaaagagagccaagaactgatccctgtgacaccttaatactataaagtcaaagaga

SEQ ID NO: 381644 - DNA, 516 bp, Homo sapiens
cattatatatttcagctttagtgaaagaataaatgaaacatttacattttatttaaaagcccaacttttacaaaattgtcaatgaaaaatgacaggatatgtattatatttatattgaagctagaactattaaattcaataaagcaagaaagtcaatttacaatggaaactagtttctaatccctttggaggaagaagattggaacaaaagactccaattcatgattttctaacaagattggaagaagckaaaaagcaaagcagctgctatattaattaatcagatgttgagaattactgttacaatatgggtttcatgaaagcacatgactaatgtaattttaaggtatcaagtgttcttaattcatgttttgcttaaatgagcaaggggtttatattcttaataagattttcttcttttaccctatactggtctctttattatttctttgtcgtgcatattacagcccaactatactgtactgatccttatctaaagcacaaccatattgaatc

SEQ ID NO: 381645 - DNA, 608 bp, Homo sapiens
ttcattggccttgatatgttccattatcacagcacttagggcaaggcattgtaatagcctctttgcatacctatcatcccaaataaaccattttagtccttgtgcctcatgcaatgtctggaccagagaagcactcaataaatttattaaaataaacagatttttagaaagacataatacattatttctactatgaatttcatactggttcactgtttcatggttgcaatagcctaaaaagaaaagcctgtgatgtcagtcagctattgtttgccctaattctctcccagtgcttttcaaaatggtgaattttctctatcatatttaccaattttaaaaataggacctctgctgtagcctttgcttgtcttagttaagcatggtgagattctcagtaattactgcttgtaaaacaccgccaggttctcagatgaattaaagtgtgaaatcttatcacaggctgtatattgctggagttacaaacaggcatggcaaattacaccatttcctagtctctattgcttttaaggaacaacacaattcrtaattattcacaagtactgattcagttgtctcctgctatcttgactgccagattagcaatcctc

SEQ ID NO: 381646 - DNA, 462 bp, Homo sapiens
tcaaaaatggaaagagacaattttcaaagaattattgagggaaagtaaaaatgctaggattggagtcctcaacttcctttcaggaaaaaatcctagattggccttttgcacgtagaggttgaggcatccattcttttgtacatagaggcctttgtaaagaatgggcmactattctatggcataggtaaaatgcttatgctgaagctgcatcagatattgctatactgtaggtcctatattgggaacaaggtggcacctctgtagttggcagacaagaaacaattcaaaggcgagattgttcctagtatttatttcacaatgatacttgaatttcatactggacattcagaatgaaaactgtcagataggtagaaaaaaacctcttcccctgttgttagttcttgactaaacgtcagaatgtggacagattgccctgtggacagatccactgtaattctgttt

SEQ ID NO: 381647 - DNA, 587 bp, Homo sapiens
ttcctgcttgctcttgttcttctcagagtgtctatttggatcctccaatcttgcctgaaccctcttgcaaaagtatctttatgaaggtctcttttgatacctgtgggaacttaactattcatttctagtggtcacagtaacacattaccatcaagttggtggttgaaaccacagaaatttattctcttataattctgggggccagaagtctgaaatcaatgtattggcaggactttggaggatgggatccattcttgccacttctcagcctctagtgacttcaggcatactttggcttgtgcctgcrtcactccagtctctgccattgtcatcacaggatgttctcctctgtactttcctctctctgtctcttataaggacacttgtcattgaatttaaggttcactcgggtaatccacgatgatctcatctcaaggtcctaattgaatctgcaatgatattttttctaaataaggtaatatttacagtttttaaaacatacaggtatatttattgggaacttccattcaacccactgcgttgactcacacaagttcttaatacttaaaacacataataaaagtgct

SEQ ID NO: 381648 - DNA, 594 bp, Homo sapiens
gcatgatgctgcttctctttcacctgggtcagcctgaagaccaaatcttaatcttccctcatccaccaatggaaggacccattttctctgggacctgacagggtgttggaaaaaaagattgtatgacaggtatcatacttcataaatggagaaaatagtatctctttatcctatcttcttttcttctccactagatcttaggagtgtacaaagtagcattgaagcttgactttgtttcatccataggttgtgagtctgtattgtgtcctctgagcaaatgaatctttacttgctacatgttcacatacctctttgcctaggcagagtttttttttctcattgaaatttgaaaatagcaagttattctttaacaggactaacatactcatgcatcccaagaggaaaaaacctaaaacaattatracttttgaactgatgcagtcagcctggtcctgtaaatgtgcatctccacattgatgaatgttgtctatttaattaaaatatatcgatcatggcacatttgtctttatcagagtggccatgaatgatctttcaaggagttattgtttattggtttgagaaactaacgggaag

SEQ ID NO: 381649 - DNA, 623 bp, Homo sapiens
gtgtattggctgcagccagcaaaatgtcaattcaatggactctgtggcatcttcataaccaacctgaattcctatttgatgttagttactcttcaaaggtgagccagttgtccaaactgagcaatgttcccctcattctgaccgtcgctttctggcmacattgatccaaatggtggtgttctcatcgtcttgatcatccccactggctggccacccaatcactgatggataagtgtttctgcattcacaggatcacctgtgggcgcttccctgggttggcagcccctggaatcacttttccttgagaccagctcatctgcaggtgcttgtttataaaggtgccagggaaagacttgtttttgtgtgaaagctgctctgatgtgagcagttgaaggagatggacctatgttcctgcctgagtagggataacaggaaagttacacaggggtaaggcctgtgataggggctgaggatgcagaccatagatattgggacgcaggtgccaatgtaagggcagagcccaatgcctcaacaagatgagcactctgggcttttggaaaagccacatagacacttacccactcaagggtggtaatttgtgtctatcaataataatgatggta

SEQ ID NO: 381650 - DNA, 620 bp, Homo sapiens
cctctgttgactggttggtgcctgaatcttacagccttttaattataattattctcttaattgcttccactatagaatgtgagtcttattcccagtgccaaaaatatatagtgtctggaactatgatggttgatggaatggactttttgagcattcttttctgtaccagattccaggctaggggatttgcatacatgacaggaagtcagcagtagtattattctccatttcattctcattgttggagaagattcaaggaaggatataatttcctgtccagtaaccaaatcttacgttgcagaaagtaaagttgaattgtcctagaagargaggcgctccaaaaggtgaagggaaagaaatagtttgaccatgtgtgtgggtgattaggggtatgcgttggggggtgagtagcaaatggtcatgccctactggcatgcaacatccaagtggggcaggctttccaatgagtactaccttgatgttagaaggtgggtggatggtgatgatgattagactctaagcactatggcttttgtggtgagcaatctgggtgtcctcactttgtacagaggaaggaaatcctactgcctttaactgtcttacatggttttgggcaatga

SEQ ID NO: 381651 - DNA, 533 bp, Homo sapiens
gcctgtaaagttgtcatgtcgttctgtctttttatatttttctttttaaatcttaaagcaaattattataaatcccttaagtaacctcacttgttacagatgtctcatgaatatcasatccaaaacctagtatctgatcatgaaacttgatttaaaagcagcaatttcttcgtcatttccagagaattacatgtttaggggaaaacaatttaaactcagtgtattacagaagcaaaataattcttttcagaaccttgtgtcagtcgagtagacaatcctcttggttggttggcttttgtttggtccaattggactcaaaatatgagcatgaggctgggcgtggtggctcacgcctgtaatcccagcactttgggaggccgaggtgggcagatcacttgaggtcaggggttccagaccagcctggccaacatggggaaaccccgtctctactaaaactacaaaaattatccaggcgtggtggtaggtgtctataatccctgttacttgggaggctgaggcaggagagggagggg

SEQ ID NO: 381652 - DNA, 533 bp, Homo sapiens
gcctgtaaagttgtcatgtcgttctgtctttttatatttttctttttaaatcttaaagcaaattattataaatcccttaagtaacctcacttgttacagatgtctcatgaatatcacatccaaaacctagtatctgatcatgaaacttgatttaaaagcagcaatttcttcgtcatttccagagaattacatgtttaggggaaaacaatttaaactcagtgtattacagaagcaaaataattcttttcagaaccttgtgtcagtcgagtagacaatcctcttggttggttggcttttgtttggtcmaattggactcaaaatatgagcatgaggctgggcgtggtggctcacgcctgtaatcccagcactttgggaggccgaggtgggcagatcacttgaggtcaggggttccagaccagcctggccaacatggggaaaccccgtctctactaaaactacaaaaattatccaggcgtggtggtaggtgtctataatccctgttacttgggaggctgaggcaggagagggagggg

SEQ ID NO: 381653 - DNA, 631 bp, Homo sapiens
caagccattgagcacattttccgggcatgggctcaggaaggcagaaatgtgggggatgcaagacctagaactcatttcaaacactagctgaatggtgctcagaacacttgaattggcccagcatacatgtgatgaagtgagccatactcatttccacacaggttctgttgcttccagtgaatgctcatctctgttgcttgtgtgtttctacattttctcatgggctccagccatttcctcagattctccacagaggggattctaggcaaggaaggaacagtctatgtgcaatccctgtccgatgtgaaagacacagggaagaaacttggcctcgttagagtgcatggctggggctggggtgctgctagaagtgcacatggagtggctacctgctcctcccttgtgctccttctacacatgctgtttgtgtcaaaatggacacaagtgcagcattagaagtcaacatgcagttaccagccctggtgtctgtgaaggaagaactaggactcatattcatcagcaaatgcagctgaatatggtcacagctgttcttggtgkgtcacctggcactttgggttgtagttttatcaacagaaacagaagtttagctactcagtggtagaacagaaat

SEQ ID NO: 381654 - DNA, 611 bp, Homo sapiens
agggtccctgatcctagctaaagcaccgctgtctttactgtgtgatgatctattatcatgcttttactgagtttgaaatggcatcagacttgcatgagatttctcacctgattgccaggtggttcaggagctgacagcccagaaattccctggaagtacctgtattttgagaactgtagtgtgggcatttacagagcctgatgtgagctgaggctatcccaagtgaatgaatgaactggatcactgacttcactgcgtgtagaacaagtcactggtgttttcttcagtagataaggctcttatttattcttattaatcattctccctcacccccaattaatgcatyggacaatggatttagggggtttgtgtccatattaagagttccatttgtgaaagagaaaatattataaaacaatataaaccttagaaccccatatttgttttgttgcgacaaattctaagtacttctctgcacctggaggtctgttgctgaaagaaacggttatctaaaaatagatttgttcttggaaactgacttagaagttctgtcaggctttctttttgcacaggtcagatttccacagccaggcagtttgccagacaaggca

SEQ ID NO: 381655 - DNA, 595 bp, Homo sapiens
caaagaccatggcggttgcctttttattcacgtttacattagggctaactcttctggcctcgcctgttcagatcaatgttcagtgtgggatcagcagtgtggatagaattgaccttccctgacctcttttccctggcataaagctcggaaaatgaaaatcagaggaacactgggcaggctgttcagctttcagtaatcatgcaaagctaaagcctctttctgctcactgcttgaggatattagacttcaatatgctgtgggtcacactgtcataaacactgaattcttagggagcaaacaaatttggataatcagcatcttagagtccagtctactgggtacctgagaactacagcttgtagcaaagaagaggtttaagaggaaaagcagcagaggatcccaagacctattcttgagaaataagatagatcattctttctcatgagggcaggtgttctactatctcctcaaatagggaatgggagagggcagggctggaaggaggcctagsgaataagacacatgtctttttgagtcctgatcagttgtcagaatcctgtttttttgtttgttttttacatttgtctaaatataa

SEQ ID NO: 381656 - DNA, 569 bp, Homo sapiens
attactttaaaaattaaaggagataatatataggaaattggcctaaatacatacaggaatttagtaatggggaaaaataaattattcaatacatggtgtttaaaccataggatagccatctgaagaaaaattaaattttatccctacttcacttaaacttatctacatttcacatggtttaaatatttaatcacacacacacacacacacacacatacacacaaacacacatataagtaaaccataaatgtagtagaggaaaacatgagcaccatgttggagttcggatggcctttgtaaacataatccaaacactataacaaaaggaaaggtttgataactattggctacagtaaattctttaaaaatctatctgagaaacaaaatgccataaawtgataaaagaaaaactcgggaaaatatctgcaacttacaacacaaaaaacttattctcttattacatgaagatccctataaatcagtaagctaaagaccaacaactcaaaataaaaacggacgaaaaatatgaatagacaattcatcaaaaaagaaagacaaatggcttataa

SEQ ID NO: 381657 - DNA, 555 bp, Homo sapiens
ttcccattcctgttcctttactatatttttacttatttctgtaggtacaattttatattttatgatttatttctccctgtgtatctataagagtagatagataggtaattgatagatatagatatttccatagtttgtctttttrtatatagaaagttatagtatactatacatgcactcttctgtgctttgcttttttaacaaataatatattcatatcaatttatagagatcattctcatccttttggatggttatataatatgctattgtgtagatgcaccatggtttattcaaccaaaatctagtgagaggtttacaggttaattccaatattttgaagttaccataatgctgtaataaataactttatgcatatgttgttatagaagtagatttttagggtgaactatcaatttttgaggcatattgataatgctttcatcaagatgccatttgtgtatttcatgatatttttatatactccagatactgttggtaaccagtctacctaaatgccagaagtaataatcagtcactaacatgtcaggcaat

SEQ ID NO: 381658 - DNA, 646 bp, Homo sapiens
tgagcagggactgaggcttcctgtcggtattcctaagcatctaaagaaaaataaaaccttttaccagtcattcaagtgttttgtgtctgcatgtcaagaaccattcagaagctccaagtatctgaatatttggtgccctatagacaacatatctgtgtgactgtctaaatttccctaatttaattttgatgtttggcctcacaaagatgcagccaaagcctgaccagctatatcactgaatatgtcaattacagtgggatctgagggttgtaagttaaagatcatgcgtttttttttttgttttgtttttgttttcccagactgtgtttgatgaccgcagtcacattttggtgcatgttagcccatgttttraaaacataagagtgtttttgaaaagataaggcctactttctgaagagtgggcgtgtgtactagaggtggtcggcagtgctgcagcctgtcagtcaaaatctgccggcaatgtcattcaaggtcagagacccagtgaaccaccaatcaaagtcagcagggctgctcatgttcacttgtcagtgttggaaagaggtcacacgctcagtggtgtggctagtgtgtgaacaatgagagtattttagtggtcagaagcacattctgctacctaccccct

SEQ ID NO: 381659 - DNA, 530 bp, Homo sapiens
ctctgagatgatcctatcattggctgctttaaaatttgtgattagtctgctttttgggcatgtgaaatataattggtggtgcagataaayttttattcaccagagagagcttattacagagctgcttgtcatgacacgtggaaactcaggaaacttctgtggagtctctgtgtggcgattctggccagaatggtcgtatgttttcaagatgctaactctagtttccccaaagctgtcttttgcctgctggctttggtcctattccacgtgactgtggagtgcctcaaactcaagacagcaaatgggaaaggaacaggatctggctcctgggaatggcctgctacctgacaaggtgccctgatcagctgagtgctaaaaaccccgtgctgccctgtgagcctacgcgtcgggtgaatgatctccagctggatacatagggggatgcagggttaaaatggaagtatttgtttcaatttaattaaacattttagccaaaattctacgtaagctgtgttatatgtaaacttgaa

SEQ ID NO: 381660 - DNA, 530 bp, Homo sapiens
ctctgagatgatcctatcattggctgctttaaaatttgtgattagtctgctttttgggcatgtgaaatataattggtggtgcagataaacttttattcaccagagagagcttattacagagctgcttgtcatgacacgtggaaaytcaggaaacttctgtggagtctctgtgtggcgattctggccagaatggtcgtatgttttcaagatgctaactctagtttccccaaagctgtcttttgcctgctggctttggtcctattccacgtgactgtggagtgcctcaaactcaagacagcaaatgggaaaggaacaggatctggctcctgggaatggcctgctacctgacaaggtgccctgatcagctgagtgctaaaaaccccgtgctgccctgtgagcctacgcgtcgggtgaatgatctccagctggatacatagggggatgcagggttaaaatggaagtatttgtttcaatttaattaaacattttagccaaaattctacgtaagctgtgttatatgtaaacttgaa

SEQ ID NO: 381661 - DNA, 605 bp, Homo sapiens
ctgagagtacataagtggttcttcagctctgagatgatcctatcattggctgctttaaaatttgtgattagtctgctttttgggcatgtgaaatataattggtggtgcagataaacttttattcaccagagagagcttattacagagctgcttgtcatgacacgtggaaactcaggaaacttctgtggagtctctgtgtggcgattctggccagaatggtcgtatgttttcaagatgctaactctagtttccccaaagctgtcttttgcctgctggctttggtcctattccacgtgactgtggagtgcctcaaactcaagacagcaaatgggaaaggaacaggatctggctcctgggaatggcctgctacctgacaaggtgccctgatcagctgagtgctaaaaaccccgtgctgccctgtgagcctacrcgtcgggtgaatgatctccagctggatacatagggggatgcagggttaaaatggaagtatttgtttcaatttaattaaacattttagccaaaattctacgtaagctgtgttatatgtaaacttgaaacccaaacccctggtttcagttgccccctcttataattatgaggttcat

SEQ ID NO: 381662 - DNA, 614 bp, Homo sapiens
gatactatgattgtttgttccacctttcatgatggagaaagtaaggcagaatggttaagtaacttgtcttaggtggcccagcagagaagtggcctggctctggagtctgagctcttaatttctgtatacctatagcaccttctacatcagctttctaggagcartgtgtattggtaagtggatacaagtccttgagaagtaccagtctagtccttgttttggttaaattggctaattgactaataacagtagaggccttctctatcatgggatacccaaagcttcaatcaggtaggaccactaggcatggtagctgctgtcaggatcagtatagccacctgagtgccacctccacctccctcccaacttcttccccactcttctggctctgccaggaaactatggtgcaacactgtcaggctgcatgggaggaggagagcacagactaggaaccccatggggttgtccttgaattagtccttcttcctgactttcaggattcagccatgaatactgccccctgagggagcaggaaccagcacattgtcctgtactccaagtggggttcatacccccttccttttgtcttcaggaattctatagcgattcttccc

SEQ ID NO: 381663 - DNA, 591 bp, Homo sapiens
cttcctcataatgaataagctcgcacttgtgagttcaaactggcaaattgccaccagacatttattagctctggattaatggatcaagactcaaactttctagttaaaagaacaagacaagcccttaggattcaagactctttaaaaaaatcctcattcacttggcattaccatttcttgcagtccttcctctcccttgtagggttcgatttgtcagtaaagcagtggaaaggacttatttttcagccattttggatcagagaaaattgttgatcttagttgttcatgttttcctgggacttttaaatgggactggtgttctggcagaaattactggaatatgctaggtggaaggagactaacattgccatgacatcatgggctcaaaggggcaggtagaggcaasgttgggagggtgatcctcctggagaagaaaaagactcaaggggctgtgtgaattgtccaaagactgctggcaggctgagctggaggaagaaaggtcacccttattcttacagctacaaagagctgtgcagagactcctgagtgggaccctgggagacagattttggttcagaaagaaaatggaat

SEQ ID NO: 381664 - DNA, 588 bp, Homo sapiens
aagttagcctgtgatagatcacaccagccttctgcataaagataagttccatttccattaaacatagtgtaacccatgtaggtaatcagaaaggttctgggcagttagaagcagttcctcattaggagaaaaggaagagaaacacaaggtgcaataatgagaagggccaggccaagccactctaataaatattgatttagcagccaaatgtgccagtcatgctagattgtgccctttctatctagctttgtcctcacattgtctcaggcattgctatggttatgtagtttatgtctctgcctctataacaytgtacttttctcgagagtcctggccatgtcttgctcatgtaaatatctccacctcagtgtacagtgccgggcatattgcaaggagataagtgaaagaagcgaggaaaaagaaagggatggggagaggggaaaagaagaaaggagagagcaagaagggagatggagcaaaagaaaccaatttgcagagtagcaaaatcagataagggttctaatccttagctgtgtaaacacggacaaatgacttaacctctctggccttcagttgactcatctgtaa

SEQ ID NO: 381665 - DNA, 588 bp, Homo sapiens
aagttagcctgtgatagatcacaccagccttctgcataaagataagttccatttccattaaacatagtgtaacccatgtaggtaatcagaaaggttctgggcagttagaagcagttcctcattaggagaaaaggaagagaaacacaaggtgcaataatgagaagggccaggccaagccactctaataaatattgatttagcagccaaatgtgccagtcatgctagattgtgccctttctatctagctttgtcctcacattgtctcaggcattgctatggttatgtagtttatgtctctgcctctataacattgtacttttctcgagagtcctggccatgtcttgctcatgtaaatatctccacctcagtgtacagtgccgggcatattgcaaggagatragtgaaagaagcgaggaaaaagaaagggatggggagaggggaaaagaagaaaggagagagcaagaagggagatggagcaaaagaaaccaatttgcagagtagcaaaatcagataagggttctaatccttagctgtgtaaacacggacaaatgacttaacctctctggccttcagttgactcatctgtaa

SEQ ID NO: 381666 - DNA, 423 bp, Homo sapiens
ttgattctaggctattaacctgtacagcacattactatactgaaagctgtaggyaagtataagacaatggtaagtatttgtatatctaaacatatctaaacatagaaaaagcatagtaaaaatatggtagtataatcttatgggaccattgtcatatatgtggtccatattatgtggcacatgactgtatttatataatactctatattatttcttaaatacataaagattgagtttctttttattttaccagttaagaatttaaaaagaataacatatcctcaatatcattttaccatcaaaaaatagaaaagtatgattctggaataaagggcaggactttaaattgaatacaaacatctttaacaagaatactcactattgccctttttttttttttctcatttactctccaccaattga

SEQ ID NO: 381667 - DNA, 543 bp, Homo sapiens
ggttggaaagggggcatctgcttcatgcagttagtcagagacccaggcttcttcagtctagactgcaggattctgtgctggatgttttatattcaggaagacagagaatgaggtttgggtgggggaggaatctagtggagttttagaggcctggcctaggacatccttccatattccgcaggcagaatgtatcatgtgacctcactcaaagcaggagatatgacacatagtcttcctgtatgaacctgtggcgttgtctctgccacaccaggaaagtccattgagaaagattagaagaaagaaaatggaaaacaacccctscacttaagtgtagtaggtatagtgcttgttagttagttggtaaattatctcagttccactcaattagaaaatgttcatagagaacctactagattcaaggcactgtgagaagcactgaggagaacttaaggtaaagatgacccagttcctgtagtcagagaggaccatctcctgagtggcataggacatggacaaactcatgacctctctagcctcaatgtt

SEQ ID NO: 381668 - DNA, 520 bp, Homo sapiens
gggaaagagaagtcaaaacaatcaaaacaaaccagatggttgggtagaagatgcttccttacctggtcaaagatatccccaggagctgctcaagctcattttcaagcctaccaatccagggctaaaacagagagatttaaagatcaggaatacctgtgaggggagagtatataagacatatagagaggagctgggacaggcactgtgggggatggtgaagagyagaatgaagaccctgttgtgtatctgaggcataggaaatgtagagaaagttagagaaaattaaaaattgattggggacctaccaggagcgttggtactgagaaaagaaaacaagagcttgtatttcgagtcaggcctacatggatgaatgtgtgtatgaacctggacacatcacatcacctctcagagcctcagctgtcttatctgtaaaagggaggtaataacaaaatctcagagggtcgctatggggattaaactaagctgtataatttgtgttgaacactgagcccagggtgag

SEQ ID NO: 381669 - DNA, 621 bp, Homo sapiens
cttcaccaggagtagattccatctcaagaaaccagtttctttgctcatccatgaaaaccaactccttattcattcaagttttatcgtgatattgcagcaattcagctacatctttaggctctacttttcattctrttaatagttctctcactgtttctaccacatctgctattacttcctccatttaagtcttgaatccatcaaagtggtctatgagggctggaatcaacttaatcaaaaatcctattaatattgatatattgacctcctactttgaatcacaaatgttcttaatagcacctagaatgatgaattctctccaggttttcaacttactttgcccagattcatcagaggaatcactatctatagccttataaaatgtgtttcttaagtaataaggcaaacgttgaaattactctgatccatgagccacagaatggatgctgtgttagcagacatgaaaacattaatttccttggtacatctccatcaaaattcatgggtgaccaagtgcattgtcagtgggcagtgatattttgaaaggaatctttttgagcagtaggtctcaaaagtgggcttaaaatattcagtaaaccatgctgtaaacagatgtaaaca

SEQ ID NO: 381670 - DNA, 621 bp, Homo sapiens
cttcaccaggagtagattccatctcaagaaaccagtttctttgctcatccatgaaaaccaactccttattcattcaagttttatcgtgatattgcagcaattcagctacatctttaggctctacttttcattctgttaatagttctctcactgtttctaccacatctgctattacttcctccatttaagtcttgaatccatcaaagtggtctatgagggctggaatcaacttaatcaaaaatcctattaatattgatatattgacctcctactttgaatcacaaatgttcttaatagcacctagaatgatgaattctctccaggttttcaacttactttgcccagattcatcagaggaatcactatctatagccttataaaatgtgtttcttaagtaataaggcaaacgttgaaattactctgatccatgagccacagaatggatgctgtgttagcagacrtgaaaacattaatttccttggtacatctccatcaaaattcatgggtgaccaagtgcattgtcagtgggcagtgatattttgaaaggaatctttttgagcagtaggtctcaaaagtgggcttaaaatattcagtaaaccatgctgtaaacagatgtaaaca

SEQ ID NO: 381671 - DNA, 535 bp, Homo sapiens
gggtgcagtggttttgttttgttttgtttttgtttttgaggtatttttgttttgttttggagtgttttgttttgtttttgaggtagatcgtgcagtkgcacgatcacagctcactataacctctacctatctaggctcaatgatcctccctcctcagcctccagagtagctggaactacaggagcacaccaccacgtgtggctaatttttgtgttttttgtagtgatggggttttgccatgcttctcaggctggtctcaaactcctgggctcaagcaattcgctcacctcagcctcccaaagtgctgaaattacaagcatgagccactgtgcctggccctatccctacaattctagcagattatctccaggagaaaagtgttgccttagatcagctttcctcaaagtgtttcagtgatgttaacagttaatacatagaaaatgagccaaatgagtttgaaaaatacagtactgaatttagcaaaattaagcagattaacttacttggggacatcacagagcctttaacacaatag

SEQ ID NO: 381672 - DNA, 534 bp, Homo sapiens
attctgctatggttgcctgccactaggtgaactgtggcatctgaattcttgagctaaaatacactgatgcccttaaggtccagatgagaagaagcagggccaaagtactgatccattcatctgcatcattttctacaaaatattaattttaagttgaaaaagagacacagagtcattgcaaaaacaagagttctaaaaatacttttagaacttttgyataaattcactgctaatcattttttcacagtaaaaaacaatattgttttaggtagttttcctccatttctgaagaaaggccatccagtttgttcccagtggccaggaatgccctttattcccttctcttgattttgagaactcaagttgtcttaattctttttccataagccttggcattagggcagacttgaggaagagaaaacatgaaaagtttgggttgtctctctttttcaagtgactttgaatttcccatctcaagacacacctaacttactcttggttggcatttttctttgctgtctgggtctgtgttta

SEQ ID NO: 381673 - DNA, 577 bp, Homo sapiens
tgtctgccttctatgttctcatgagagataaagagagaaagacagacagagagagagagagagattctcttcttataaggccaccagtcctattggattaggaccccactcttacaatctcatataaatttaactatctcctaaaagccctgtctccaaacatggtcacattgggagttagagcttccacatacatattttgtgggaagacaatttggtccataacgtctgtctaactcaaactgctatcaagatagaaaacatgatcatcatcctagaaagttgccttttctcacccgcagagatggtcactgttctaattttttgcaccataggttggttttaactgttctagaactccacatgaatggaatcatgcagtaggtactcttttatataaagcttctttyactcaatatgttttcaagactcatctgtgttgcacataccagtagtttgttccttttttattcctgaggagtatccccttgtatgcatataccacattttgttgatctgttctcttattaatggacatatgggtcatttccagcttggggttattgtgaatatggtt

SEQ ID NO: 381674 - DNA, 564 bp, Homo sapiens
cccaaatgacaggatttccttcttttttgaggctaaatagttttccactgtgcatacatgccacattttctttatccattcatgtgataatggacacttaggttgatttcatgtcttggctattgtgaatagtgctgcaacaacatggaagtgcagctatctctttgacatacagatttcaattcctttggctatctacccaaatatggggttgcttgatcacatggtagttctatttttaatttttttwagaagtgctgcactgttttccataatagatatactaatttatattcccactaatagtgtgcaaggattcccttttctccacattctcaccaacatttgatatcttttgacttaaaaaaaattttttttgaggcagggtctcactgtcacctaggctggagtgcagtggcactatcacagctcactgcagctttgaacacctgggctcaagtgatcttcctgcctcagcatctcaagtagctgggactacaggcacatgccaccacacttggttaattattttaagtttttttagaaatgaggtttcgctatgtt

SEQ ID NO: 381675 - DNA, 541 bp, Homo sapiens
catcacttagttttatttagtgagtagtagtgagcaacataatgagcacatcacaaattcagtcagacaacactaggcttttactttatatccttaggagagcatattttacctgtgtgaaaaactaacagggtgccacaaagtaataattatgctcatttacatggctacatttacagcacaacttgagacatatacaatttcaacttccttctctttatacatttcaaatgaaatgcagttgttttatatatatatatatatatatatwtattatactttaagttctagggtacatgtgcacaacctgcaggtttgttacatatgtatacatgtgtgctgcacccattaactcgtcatttacattaggtatatctcctaatgctatccctcctccctccccccaccccacaaaaagccctggtgtgtgctgttccccttcttgtgtccaagtgttctcattgttcaattcccacctatgagtgagaacatgcagtgtttggttttttgtccttgcaacagtttgctgagaatgatggtt

SEQ ID NO: 381676 - DNA, 420 bp, Homo sapiens
ctagaaaaagagagatgtcctcctggattttctactactctgcataggttawgaaaaatcaaaatttgctttctttgctagatcacacacttgtgcacatgcagtagatacatcactgagtaggttttatttaattcagttttagtattcaatgacccacgaaatggggtggtaaggaactcattctcattactgggagtatgtatgtagtgaggccagtgtaaaaactaaattgtaacattttgcaactgaggggaaggtgagatcctgagaggcattaaatgggacaaaattttaaaaaaaattacttcgcaagtgataaagcactatactcatattaggggtaatggttattttaaagtatgcctttttttggggaagacttctatttcatgcggtacatggtttgttactcatatc

SEQ ID NO: 381677 - DNA, 449 bp, Homo sapiens
tctcaaaaaaaaaaaaaaaaagtggccatctcttgctgtctgtcttgagcacttggatccatcttccatcttccactcttctaccttctacccttccacagtggaatgacccttgcctcatactggtgccatgctcttggacctcccatcccccaaagccatgagccaaataaacttctgttctttataaatcacccagtttcaggtattctgttatagcaacagaaaattaactttaaaatatgtccctaattttaaaatgtaaaatattgtacattttaaatacmtgttatgttaatcacaccaaaatgttcattttaacatgtagccttgacaatagctctagaagcaataaaagaatttatgaacttgctaaggagtcttttctgctattaatcttcattgctacttggtcttcatacatgtataatacacatataatacagcca

SEQ ID NO: 381678 - DNA, 498 bp, Homo sapiens
gatgtgaaaccatgtaacacatctactcctaggtacacattttacatattcttgcaatgacctgaaaagaatggcctttggcctttatatctcatgtcttcctcattattattctagttatatgggggtgagaggagtgaaggatgttcctgtctgtgatagtgtagagaaagatctgctagcttcctttacttcttttaagccttggtgaagactggttgggcatctaggggaamtgtaatcccaaatacaaggctgaaataagaacaatttcaattcaaatcctcagtgttagaccaaaaccaaaatttgagtctatgagggtccaaagcaagaccagcttaactcttctcacttagctcttggcctgtgaacacaatagtgaatggtttgtaaggactaatattggactccatgagttagggctggtgaagtaaatttattaagaaaatttcagattcatctctccattgtggatattctctccaaagacattct

SEQ ID NO: 381679 - DNA, 498 bp, Homo sapiens
gatgtgaaaccatgtaacacatctactcctaggtacacattttacatattcttgcaatgacctgaaaagaatggcctttggcctttatatctcatgtcttcctcattattattctagttatatgggggtgagaggagtgaaggatgttcctgtctgtgatagtgtagagaaagatctgctagcttcctttacttcttttaagccttggtgaagactggttgggcatctaggggaactgtaatcccaaatacaaggctgaaataagaacaatttcaattcaaatcctcagtgttagaccaaaaccaaaatttgagtctatgagggtccaaagcaagaccagcttaactcttctyacttagctcttggcctgtgaacacaatagtgaatggtttgtaaggactaatattggactccatgagttagggctggtgaagtaaatttattaagaaaatttcagattcatctctccattgtggatattctctccaaagacattct

SEQ ID NO: 381680 - DNA, 498 bp, Homo sapiens
gatgtgaaaccatgtaacacatctactcctaggtacacattttacatattcttgcaatgacctgaaaagaatggcctttggcctttatatctcatgtcttcctcattattattctagttatatgggggtgagaggagtgaaggatgttcctgtctgtgatagtgtagagaaagatctgctagcttcctttacttcttttaagccttggtgaagactggttgggcatctaggggaactgtaatcccaaatacaaggctgaaataagaacaatttcaattcaaatcctcagtgttagaccaaaaccaaaatttgagtctatgagggtccaaagcaagaccagcttaactcttctcrcttagctcttggcctgtgaacacaatagtgaatggtttgtaaggactaatattggactccatgagttagggctggtgaagtaaatttattaagaaaatttcagattcatctctccattgtggatattctctccaaagacattct

SEQ ID NO: 381681 - DNA, 579 bp, Homo sapiens
aggaaagagaagagggagattttacaaagtgagcctgaaaaagaaaagggcctggcagagagggggcagagacagaggaccagggtgggggctaaatgtgaaggcagcatctgcagagatcagacatgcccttggagaacccttcttattcctgatccatccttccagagcttcctctacagggcaaactcacttatttccatggaagcccaaagagtcttgattccttttaaagcaagtaaaagtaggctagttgctgkttctaagtggctgaattctgaccattctgtcagtgagacaggcaaccccagctccatcaaccatgtatctgccttctgaaagtatttcagtagatgccacaaagtcaacactgagtgcaggatgacccagggcaagaacagggcaggggcacaggtagctccatattgatctgggctcagcctcagcctaaattgagttttctcttgtgacatcacaaaacaaggtagcaaaacccagtgataaaatactttgccaaagctcaggtgtggtccttcaggcatccgctcagatcctagagatacatacagaaaggagcat

SEQ ID NO: 381682 - DNA, 519 bp, Homo sapiens
ctgttgctattgtcttgtaaggtcaccagttattggatttagggcccactctaatccagtatcctcatcttaattacatcttcaaagaccctatttccacataaggtcacattttgaggttctcagtagagaggaattttgggggacactgctacatagtcataaaaaacaaaataagaatataggcataaaaataaaattctaaacatacctgtctgatgaaagattctaattagattggtcatgaccaatgtaggttttatctggagtagctatggaacctttccaagggatgtattttrttgacaaattccagttttcaagtttttttcaatctttgggtaggtctgtagggccctagaaaactggataattcatgagaaaaatcctgtttttctgcctcacccagtttatggtttagtcttatcctcgctcatctcagtatgagatgccatatctttattcagcaccatcagagaaatagagggttttggccaaagtctcttgttggtgagagta

SEQ ID NO: 381683 - DNA, 519 bp, Homo sapiens
ctgttgctattgtcttgtaaggtcaccagttattggatttagggcccactctaatccagtatcctcatcttaattacatcttcaaagaccctatttccacataaggtcacattttgaggttctcagtagagaggaattttgggggacactgctacatagtcataaaaaacaaaataagaatataggcataaaaataaaattctaaacatacctgtctgatgaaagattctaattagattggtcatgaccaatgtaggttttatctggagtagctatggaacctttccaagggatgtattttgttgacaaattccagttttcaagtttttttcaatctttgggtaggtctgtagggcyctagaaaactggataattcatgagaaaaatcctgtttttctgcctcacccagtttatggtttagtcttatcctcgctcatctcagtatgagatgccatatctttattcagcaccatcagagaaatagagggttttggccaaagtctcttgttggtgagagta

SEQ ID NO: 381684 - DNA, 519 bp, Homo sapiens
ctgttgctattgtcttgtaaggtcaccagttattggatttagggcccactctaatccagtatcctcatcttaattacatcttcaaagaccctatttccacataaggtcacattttgaggttctcagtagagaggaattttgggggacactgctacatagtcataaaaaacaaaataagaatataggcataaaaataaaattctaaacatacctgtctgatgaaagattctaattagattggtcatgaccaatgtaggttttatctggagtagctatggaacctttccaagggatgtattttgttgacaaattccagttttcaagtttttttcaatctttgggtaggtctgtagggccctagaaaactggataattcatgagaaaaatcctgtttttctgcctcacccagtttatggtttagtcttatcctcgctcatctcagtrtgagatgccatatctttattcagcaccatcagagaaatagagggttttggccaaagtctcttgttggtgagagta

SEQ ID NO: 381685 - DNA, 573 bp, Homo sapiens
tcatgatctccctcctgcgtgttcatcagccaacgaacaacaatctgaaagtaagaggatgtctgtcaatatggagtgggcaggcagcagcgtgccatcaaattgaaggcagygaatgctcacacagttgtactgggctccaaccttaaccaaaaatcaataatcaccaaagtattacaatatgaagtgactgaatcatgggaggcagtggtggagggagagaacatatgtgtgaagctttgtaaatgctaagaatgaggaacgtgggctatttctcaccatcttaagatttctaagataagtgtgttagagacaactaattgaatgaagtagagtcagagaatcccagacacaccccatttcattaatgtacagtgtggcagatttttaaaatgagcttccaacttctgtaaaatggagaaatgaagtcactcgcttcatttcaggctcaaattttgagtccaaggagtaacattaatttgtgtatatcttattatcattaacttagataatcggataaacagcaactgtgtcataggacaaatgatattcttatgacgaggtttcaaaaat

SEQ ID NO: 381686 - DNA, 573 bp, Homo sapiens
tcatgatctccctcctgcgtgttcatcagccaacgaacaacaatctgaaagtaagaggatgtctgtcaatatggagtgggcaggcagcagcgtgccatcaaattgaaggcagtgaatgctcacacagttgtactgggctccaaccttaaccaaaaatcaataatcaccaaagtattacaatatgaagtgactgaatcatgggaggcagtggtggagggagagaacatatgtgtgaagctttgtaaatgctaagaatgaggaacgtgggctatttctcaccatcttaagatttctaagataagtgtgttagagacaactaattgaatgaagtagagtcagagaatcccagacacaccccatttcattaatgtacagtgtggcagatttttaaaatgagcttccaacttctgtaaaatggagaaatgaagtcactcgcttcatttcaggctcaaattttgagtccaagsagtaacattaatttgtgtatatcttattatcattaacttagataatcggataaacagcaactgtgtcataggacaaatgatattcttatgacgaggtttcaaaaat

SEQ ID NO: 381687 - DNA, 590 bp, Homo sapiens
agagttaaataagaaaaagaacttgcatgattcctactagcaacagctaaccttaataaaattggacgtggcagttgagatgcccaggccactgggctagatattaccatgagcacttgggcagtttccacacagggctaaagtagggagtagctgcaggagtgggccccatactcctctggtccttggccttttcaagaccctagcagcattacccaggcaatggaaaattgagtccagttaattcaattgaatccaaggtcttggacaccacagaygtgctgattctgtcaatcttcattcaattttttgcctttatatttctcctgggtgtccacccattttccaaatggagatcctcctgtctattttttacacagtgtttctggcacctcagcctcttcttgcagcactccttccccattctggccctaaccatcacctgtctttcataggtcagaagatatgatctatgtctcatctgaagatgtcacttatctgtatccctctaaatagtaaagtagataaataaagtatataaataaagtattttataaataaaataaagtatctaaatagtaaagtctata

SEQ ID NO: 381688 - DNA, 590 bp, Homo sapiens
agagttaaataagaaaaagaacttgcatgattcctactagcaacagctaaccttaataaaattggacgtggcagttgagatgcccaggccactgggctagatattaccatgagcacttgggcagtttccacacagggctaaagtagggagtagctgcaggagtgggccccatactcctctggtccttggccttttcaagaccctagcagcattacccaggcaatggaaaattgagtccagttaattcaattgaatccaaggtcttggacaccacagacgtgctgattctgtcaatcttcattcaattttttgcctttatatttctcctgggtgtccacccattttccaaatggagatcctcctgtctattttttacacagtgtttctggcacctcagcctcttcttgcagcactccttccccattctggccctaaccatcacctgtctttcataggtcagaagatatgatctatgtctcatctgaagatgtcacttatctgtatccctctaaatagtaaagtagataaataaagtatatamataaagtattttataaataaaataaagtatctaaatagtaaagtctata

SEQ ID NO: 381689 - DNA, 438 bp, Homo sapiens
ccaacagacttcacaacgtgttagttcactggttctgggggtcagaggtagttcagctacttgctgggaaaattgcaaggaaaatcggaagactgcctggcttcaaatcctagcttcagcatgtaagacctcaggcaaaccatttaacttctctgacttcaatttcttcagttaaaatkggggtaacaatagcacctacctcaaagatctattggaaacactaaatgaattattacatatataacacttagaacagcgctatgcacatactatgggctcaataaatgttagctaacattatatagcagccactgccctgcctgtttcagggagagagaagagaagtttaagacctgatcttcatccacaagaagtgtgacgactattgagggaaagagaaaaaagaaaaatgcaaattatgtacaagggatatgtcca

SEQ ID NO: 381690 - DNA, 438 bp, Homo sapiens
ccaacagacttcacaacgtgttagttcactggttctgggggtcagaggtagttcagctacttgctgggaaaattgcaaggaaaatcggaagactgcctggcttcaaatcctagcttcagcatgtaagacctcaggcaaaccatttaacttctctgacttcaatttcttcagttaaaatgggggtaacaatagcacctacctcaaagatctattggaaacactaaatgaattattacatatataacacttagaacagcgctatgcacatactatgggctcaataaatgttagctaacattatatagcagccactgccctgcctgtttcrgggagagagaagagaagtttaagacctgatcttcatccacaagaagtgtgacgactattgagggaaagagaaaaaagaaaaatgcaaattatgtacaagggatatgtcca

SEQ ID NO: 381691 - DNA, 467 bp, Homo sapiens
aagtaatgaaaatctacagaatgaggtcccatgtacacactctaagaaggcagggtttatgaggattttcttattccaattggggattgtttaaagtggtggattctattgtaacccatatgggagagagacaggtttagagtaacgaaatttcatcctaattcagaaaatcagaacatgaaacaagcaggtcagcaaaacctgatgttggctaaggaagaataaaagaaacaaatgaagataaattcatgtgttaggccaagtttgtgctgtcaaaataaataggtgagaacaattctggggtaccaatattgtgagtaatgaacacaatcatgataatttaaatcaawcttttttgcctctcaggttcaagtgattctcatgcctcagcgtcctgagtagctggaattacaggtgcccaccactaagcccaggtaacttttgtatttttagtaaagacaaggttt

SEQ ID NO: 381692 - DNA, 467 bp, Homo sapiens
aagtaatgaaaatctacagaatgaggtcccatgtacacactctaagaaggcagggtttatgaggattttcttattccaattggggattgtttaaagtggtggattctattgtaacccatatgggagagagacaggtttagagtaacgaaatttcatcctaattcagaaaatcagaacatgaaacaagcaggtcagcaaaacctgatgttggctaaggaagaataaaagaaacaaatgaagataaattcatgtgttaggccaagtttgtgctgtcaaaataaataggtgagaacaattctggggtaccaatattgtgagtaatgaacacaatcatgataatttaaatcaaacttttttgcctctcaggttcaagtgattctyatgcctcagcgtcctgagtagctggaattacaggtgcccaccactaagcccaggtaacttttgtatttttagtaaagacaaggttt

SEQ ID NO: 381693 - DNA, 544 bp, Homo sapiens
atttcttttaatcagccaactggactaactcttctatcacaaattcacagagtaacctagccatgagggtcacttgggatcatctacttcattcttttcatkttgcaaagatgaaactatgacccgagaaagacaagtagtatccccaagttttcccagctactgatgagcagactgggcctagaactagtcttctaggctaatgctctttacactatactccagatcctctttcccaaagagaaacagctaccaacagttactgaagacttactatgtgccaacaactactccaagggctttccgaggatttactcttttaatactcacaataatgagttagttctgttactattcccattttacaaatggagaaactgagatttagattaagtaatttacccaatgatacacagctacactggcagagttaaaataaatattttttgcatattctaaatatgaattgtgaaccctaaatatgagttatatatacctggacaattctgacaagattggtagacatttaggctttttccagttt

SEQ ID NO: 381694 - DNA, 544 bp, Homo sapiens
atttcttttaatcagccaactggactaactcttctatcacaaattcacagagtaacctagccatgagggtcacttgggatcatctacttcattcttttcattttgcaaagatgaaactatgacccgagaaagacaagtagtatccccaagttttcccagctactgatgagcagactgggcctagaactagtcttctaggctaatgctctttacackatactccagatcctctttcccaaagagaaacagctaccaacagttactgaagacttactatgtgccaacaactactccaagggctttccgaggatttactcttttaatactcacaataatgagttagttctgttactattcccattttacaaatggagaaactgagatttagattaagtaatttacccaatgatacacagctacactggcagagttaaaataaatattttttgcatattctaaatatgaattgtgaaccctaaatatgagttatatatacctggacaattctgacaagattggtagacatttaggctttttccagttt

SEQ ID NO: 381695 - DNA, 534 bp, Homo sapiens
agtcttaaaacaaggaagttcaagtttaaggtgatttttgctcctgtctaatccaacaatcaggaaagatttctcaaacaaaaattaacatacacactctcatatatacaaaaatgtaaatcactgatacagcacccactgcagtagaatatgtgcaaagtgtatgtgctgaagcacaagtatcaacacagagtaaggactctgtaagtaaaaggtattgttgctacctttttagtagatgtatctactcccctcttttttgccctcctctaatttttaattttgtacctactcttagagctgcactatccagtagggtagccactagccacaaataggtatttgaattcatattaactagttaaatacaattaaaaagtcrgatcataagtcacactggccacattttagggtgctcaacagttccatatagatggcagtcacactgtcagacagtgtagacacgatttattttggaaagttccatttgatgctgctggtttacagaattatttctggtatgttcactaactt

SEQ ID NO: 381696 - DNA, 464 bp, Homo sapiens
ggtggcacacacctgtaattttagctactcaggaggttgagatgggaggattgcttgaacccaggaggtggaggttgcagtgagctgagattgcaccactgtactccagtgtaggtgacagagcaaggctccattagaaaaagaagaaggaagaagaagaagaagaaggagaagaaggagacaaaggagaagagaagaagaagaagaasaagaacaagaacaagaagaaggagaaggagaagaaggagaaggaggaggaggaggaggagaacaacaacaacaacaactaagaagtgagaaagatttcaaatgaacaatctaacatcacacctagacaaagtagaaaatcgagaacaaacttacccaaaaagctagcagaaggaaagaaataactaaaatcagagcaggatggaacaaaattgaaaccaaaaaaatctatataagggatcaataaaaccaaaagc

SEQ ID NO: 381697 - DNA, 633 bp, Homo sapiens
ttttcctcgcatagacataatgaagcaggttgctgcaggtagctctcttgagaccktgagacaagcttccacaggaaagaagccagagctggtaaaattgcagggaagtagccctggagcccagccttcatctgctgttcttgctatatggagttgtaaatcccttcattgtttatttcaatttgagcaggacttttcactccttgtagttgtaatgcctttactctgctaggtgtaattacaacaatcctactactttatcacagtttaaggaggtgcctattatagcaatgaaattcaatattatcctatagatagggtaatttaactgctgttcttgcctctagattataacaataatctcttattaacagaatctacccaccagaatatttattgcaaataattactccaccactaagatgtaaaaaaacaacttaaatagtttaagtttctacatccatgtgtatgtctatactcaattggtattgtccctataaaacatcgttgagagactgtaacaattctaaatcccttgctatgtggattacttggctttttaggagtgtagccactggactgagttgaaggaaagtgaagaaatgatctcctgcatgtgtctcagtttgtgta

SEQ ID NO: 381698 - DNA, 633 bp, Homo sapiens
ttttcctcgcatagacataatgaagcaggttgctgcaggtagctctcttgagaccgtgagacaagcttccacaggaaagaagccagagctggtaaaattgcagggaagtagccctggagcccagccttcatctgctgttcttgctatatggagttgtaaatcccttcattgtttatttcaatttgagcaggacttttcactccttgtagttgtaatgcctttactctgctaggtgtaattacaacaatcctactactttatcacagtttaaggaggtgcctattatagcaatgaaattcaatattatcctatagatagggtaatttaactgctgttcttgcctctagattataacaataatctcttattaacagaatctacccaccagaatatttattgcaaataattactccaccactaagatgtaaaaaaacaacttaaatmgtttaagtttctacatccatgtgtatgtctatactcaattggtattgtccctataaaacatcgttgagagactgtaacaattctaaatcccttgctatgtggattacttggctttttaggagtgtagccactggactgagttgaaggaaagtgaagaaatgatctcctgcatgtgtctcagtttgtgta

SEQ ID NO: 381699 - DNA, 589 bp, Homo sapiens
atgactttactaggaaccttgagagcataagtgtctaaattcctttctcttaatacagaagcagaccagctctgctataccaacattggcccatggattaaaactcccttggagccaggggccagtcacttagcctttctgtcccacctcagatggcctgcagccaacgagagacaaatttctttgcttctgtagcctttgcttggcttagggaaatctttgtttcttaccaaaagaagaagaacatctttagacttatgcaaaaagaaaagatgattaattggcacaatattatgtatactacacccaaataaattctagakggattaaaggcttttattttacaaataaaaataagccataaaattgatcttttttataaaataaagtaatacattgattttaggaatttataagcattaaaaacaccaagaacagtattgatgagttgaacataataaatttgaaaaagtcaaatcaaaataataccatcaacaagacgcaaatgcaaataaaaaactacagggaaatgtttgtaatatgtatgacaggcaatataccttaaacggacatatacacacaaacactc

SEQ ID NO: 381700 - DNA, 589 bp, Homo sapiens
atgactttactaggaaccttgagagcataagtgtctaaattcctttctcttaatacagaagcagaccagctctgctataccaacattggcccatggattaaaactcccttggagccaggggccagtcacttagcctttctgtcccacctcagatggcctgcagccaacgagagacaaatttctttgcttctgtagcctttgcttggcttagggaaatctttgtttcttaccaaaagaagaagaacatctttagacttatgcaaaaagaaaagatgattaattggcacaatattatgtatactacacccaaataaattctagatggattaaaggcttttattttacaaataaaaataagccataaaattgatcttttttataaaataaagtaatacattgattttaggaatttataagcattaaaaacaccaagaacagtattgatgagttgaacataataaatttgaaaaagtcawatcaaaataataccatcaacaagacgcaaatgcaaataaaaaactacagggaaatgtttgtaatatgtatgacaggcaatataccttaaacggacatatacacacaaacactc

SEQ ID NO: 381701 - DNA, 535 bp, Homo sapiens
ttatttaaaaataataactttcttttactgtcctcccaaatggcagaggtcttaatctctcttgctgtatagtgaggtatatttcattaccrtttcccataaccacgttataattatcttcttaaccagttcataacaggaagtgcaaagactcgcagtaaggcaaaataccagtaaaaatttcccaagggaaagaactaagtggtggagccaggaaatgtggtttgcattatcatatgtggcttcaagttttgcctccccatcctcagttctcctccgggcctgcccccaacccctgccagcacttcatctaagcaaatgtgctcaaatttggaaagggggtattgccatcccacaacctgctcatacttaataacttgaactttcactgccccaaacccaaggcactcatgggtgtaccccaaacataacattcggacaggcatgtgttcagaaaggccaagaagagttaattattttaaattctagaaccgcgcccccaaaaccaaaaaaaaaaaaaaaaccagaggtatca

SEQ ID NO: 381702 - DNA, 535 bp, Homo sapiens
ttatttaaaaataataactttcttttactgtcctcccaaatggcagaggtcttaatctctcttgctgtatagtgaggtatatttcattaccgtttcccataaccacgttataattatcttcttaaccagttcataacaggaagtgcaaagactcgcagtaaggcaaaataccagtaaaaatttcccaagggaaagaactaagtggtggagccaggaaatgtggtttgcattatcatatgtggcttcaagttttgcctccccatcctcagttctcctccgggsctgcccccaacccctgccagcacttcatctaagcaaatgtgctcaaatttggaaagggggtattgccatcccacaacctgctcatacttaataacttgaactttcactgccccaaacccaaggcactcatgggtgtaccccaaacataacattcggacaggcatgtgttcagaaaggccaagaagagttaattattttaaattctagaaccgcgcccccaaaaccaaaaaaaaaaaaaaaaccagaggtatca

SEQ ID NO: 381703 - DNA, 599 bp, Homo sapiens
aaaggttacaagaagtgaaattttttagccttaaaaagagaagtctgaaggggaagttaataactcttcaaaagaataaaggattgttatggaggggatggtaatcagagtttattcccactccacagaggataaagtaagagaaaaccagcttaaattgcagcaggaagacattaaaccagctataaggaagaacttccattaggtagcattctatcaattgtgaatttcaatttaaccagccctccttatttttccagttcaagcattattcctaatgaggtcaagaattcccttttgaatcacgaatgattaaattacactcaggacaatattagtttcaaatatgttttatttctcaattatttgataatcagacactcatacaaggctaatatgaaaattatcaaatgagaatatatgaytcctcagactatgtcattcccagaactatctgcttaggaagagtttacatgaccaacaactccaggtagatgtggcatcactttcttgagccctctgtgaatagaagcagacaccaatttgtctgtgcgcttttgatggagtccgtcccagaagcaaggaggtgaactgtgttg

SEQ ID NO: 381704 - DNA, 513 bp, Homo sapiens
aatggaagggagctcagcactcctggaccaggagggcaaaggtaaaaagaatccagatattgtcatccaggtaggacttcttgtctcacattcgctgtgtgagtccaggatgcatcttgtgtataggacaaggtttaaattgcatctgctgtcacagctatatatagataattaattaaaataaaaaatggataaaattagaagtttgatagrgctattttatttcttatctcttatttgaactgcctaccacttgagccaaaacacattcagtagattaaggatcctgaaaattttaattcacaataatttaaatgttccaggctttgtcttaaggaccatcttaaacattactcacatgtttctcactagtcatagtttattgcctgatgtaacatagctttctatatataatttttaaatagtgcaccatgctccatcctagtgaagttttccaagtaccttccttatttaccatactgcttctgctgggaattctcactgacacagagt

SEQ ID NO: 381705 - DNA, 513 bp, Homo sapiens
aatggaagggagctcagcactcctggaccaggagggcaaaggtaaaaagaatccagatattgtcatccaggtaggacttcttgtctcacattcgctgtgtgagtccaggatgcatcttgtgtataggacaaggtttaaattgcatctgctgtcacagctatatatagataattaattaaaataaaaaatggataaaattagaagtttgataggrctattttatttcttatctcttatttgaactgcctaccacttgagccaaaacacattcagtagattaaggatcctgaaaattttaattcacaataatttaaatgttccaggctttgtcttaaggaccatcttaaacattactcacatgtttctcactagtcatagtttattgcctgatgtaacatagctttctatatataatttttaaatagtgcaccatgctccatcctagtgaagttttccaagtaccttccttatttaccatactgcttctgctgggaattctcactgacacagagt

SEQ ID NO: 381706 - DNA, 563 bp, Homo sapiens
aatacgccatctgctattttccataccatcaacagtaacatagggggcagataatggaagggagctcagcactcctggaccaggagggcaaaggtaaaaagaatccagatattgtcatccaggtaggacttcttgtctcacattcgctgtgtgagtccaggatgcatcttgtgtataggacaaggtttaaattgcatctgctgtcacagctatatatagataattaattaaaataaaaaatggataaaattagaagtttgatagggctattttatttcttatctcttatttgaactgcctaccacttgagccaaaacacattcagtagattaaggatcctgaaaattttaattcacaataatttaaatgttccaggctttgtcttaaggaccatcttaaacattactcacatgtttctcactagtcatagtttattgcctgatgtaacatagctttctatatataatttttaaatagtgcrccatgctccatcctagtgaagttttccaagtaccttccttatttaccatactgcttctgctgggaattctcactgacacaga

SEQ ID NO: 381707 - DNA, 557 bp, Homo sapiens
tacttgtatttcttagcctccttgctctcacccagcccttagatctagatccagccataacaaaagtcccccmcagacaacccttcccagttcaacagtcctcactaaccattgtaagcaccctttgaaccagggcattagcctttctcagaaaagtccttctgccatcctagaagcccttttcgttaggctacccttccctttttctatctcattgagtgtatatatgtgtgattgtatgtgcacatatgtataagtcagctaggaacaactactggtttgcaggtcagagaagataagagaatcctccttccttagcgtaaggtcttaatagccaggtaattgtgtactcaggggccagcaaaatttgcaggtttctctccctctccacttagctttggaagtgtaacaaccactgagttcaaaggacaccctggcctcggaggacttaaggggtgccattaggaagctgatgacctcagctgctgtcagagctgaaaattggctgacttgtgcctcttggccagccccccacatctgtgaaagaaaccagtcat

SEQ ID NO: 381708 - DNA, 565 bp, Homo sapiens
ttcctgaaacatggccaattaaaatgtcattaatagaaggggtgggattaacaccttaatccacttgcatttagtagaactaggacatttgaaggaacaaggacatggcaagagaaaagaacattgaatgggcatgtagaaagtgatacagaatagctaaaaggggtaatatacaattcatatagtctgcctgtcataggtgagacaatgcagtttgtaaagcagcacttcctaaagtttgttcccaacaattgttgcccaggatcgaacacgctgtccttagttayagcattccaaggtcaaataaatttgggaaaccctagattaaacaaattcaataaatttctatcctttagggctcattagtgctcatatgcattgtgaattatgagccgaggaaaaggaggaatatatacagaacacagatccttatctgtgtagtaccttccgagattaattgctgtagaaaatctctagagagatgcaatggctcacccacggcagatgtgaaactagcacccagcttttctgactcccagtctaattatttttctgctctacagtg

SEQ ID NO: 381709 - DNA, 619 bp, Homo sapiens
aatcaaaagactcctaggttgaattttaaagagatatatcatctataaaaagcattttaaaacataaatgacaaagaaagttgaaaataragttaaaaatacactaagcaaatataaaccaaaagaaagccagaatgctaatttttgatatcagccaaaataaataatatgaaaaaacatcataacgaaaaaagaataaattaatcatggtaaaggaataatataacaagaatacttagcaatcataataaatatgtacttgtctcactcaatcccagctactataacaaaataaaatagactgggtggcttataaacaacataaacttatttctcacatttctggaggatgagaagttcaaaatcaagctgatggcagattcagtgtctggtgagagcccacttcctggttcatacatggcagtctttttgttaagtccacacaaggtgcgaagggcaagggacctctctcaggcctctttgataaggtcattaatcccatttgtgagggctttaccctgatgacctcatcacttcccaaaggccccaccttctaatatcatcaccttggaggttaggatttcaacatatgaatttttgcagggatgaggagggacaa

SEQ ID NO: 381710 - DNA, 583 bp, Homo sapiens
gagccctggggacatttgaaggacattgaagaccatttcagatagatgaaatttagcaaaggggtttccatccagctgggaagatgagacttactcaagcatcaccaacctggtcttcactatccatatttctatcacagttatcatagaaatatggacaatgaaggccaggctgatgaatgacaggcttgtttcagatggaaatgaggaattcattgggaactggagcaaaggtcatgcatgttacaccttagtgaaaaacatagctgtattgtgtccatgccctaaacatctgtggaagtttgaacttsagagtgatggcctagggtatctgatagaataaatgtctaagcagcaaagtgttcaagaagtggtttggctgcttcttaacaacctatgctcagatgcaggagcaaagaaatgacttaaagttgtattttatatttaaaagggaagcacagcataaaagtttggaaaatttgctgcctagtcatatggcaaagaaagaaaaagtttttttgggagaggaattcaagaaggctgtggagcaactacctgctagagatatttgcataactaaaag

SEQ ID NO: 381711 - DNA, 610 bp, Homo sapiens
agaaaaatttttgaggtgataagtgttctatatgttgatttgggtggttgttgcatgggctgtatcaattgccaatatccatcaatttttttttctttttctagacagagtctgactgtttcccaggctggagtgctgtggcacactcatagctctgcaaccttgaagtcctgggctcaagcgatcctcccacctcagcctcctgagtagctggggctacttttaaattccttgtagagaagaggtctcactatatttcccaggctggtctcaaactcacaggctcaagggatcctctagcctcaggttcccaaagtgctgggattacaggcgtgagccactgagccctgcccaaattgttcattttaattttacgtagcttaaacctcagtatcagaggaagaagggaggaagaagagagaaggaagcgagrcgagggaggaaagaaacgtaagagaaatcccaaccaaaagcaatatatgaaccttgtttatcacctgattcaaagcaatcaactgtaaaaacacattttgagccaatcaagaaaaattgatcatcaactgggtaatagaaggtattaaacaattgctgttatttttagtgggtatga

SEQ ID NO: 381712 - DNA, 494 bp, Homo sapiens
ctcttggccctgcatcttccctccaggcagtgtccatgcaagcccaagtgttcgctggtttgtgaacagggtgagggccggggactgtcatcacagccagggcacrccgcacagggtggcccttctaacttttcatcctagttcttgaggtttgggggcagtggctcagtgggtgagaggcggttgttgagagccctcctttctctttatttggtggggagctggccatgccttagaatagagatgggatgcatcacgagatgcagggactgttccagaagggagaattccaccctcgtagcagacccccagcagcccaaagtgctcacccgagtgggagagaagatgggaggttagagtctacaggagtcagggcttgttcctggcattcatgccttcatccatggatatttattaactgctgtatgctaagaagatagcagtgggcaagaaaccacggtctgctgtcagggagcatgcagactacagggaga

SEQ ID NO: 381713 - DNA, 547 bp, Homo sapiens
ttctaacttcattgctctacagacttttcaacaatggtatgatttccctgggcaggtggctcaccaattcttgtctcatctaggaccaggcccttatagagtccccagggcacctgatggcccttgctttggggtcttcatgtgtcccttcctgccccacgtccacacctgtgccatccacttgaggccaagatcccacccctcctgctgaagttaaggccaggtggccccctgtccctgcgcctcctgcgggaggggcttccctgtcagaagcagagaaagtctctgtgattgattcacttcctctctgcctttcttgtttgctggctttttgcgtgtcaggctgcccaggtcccctgctgctccgctcgtgttctctggctccgagagtgttttccagcatcgagccctctcctgcygtgtgtgtccctggaggcaagccttgcaaaggattgtgggaacgtggtcctaggcttggcagtgctgggtttgagtgttggagggggtgggattagggcatgaggtcctttcttatctgctttggggt

SEQ ID NO: 381714 - DNA, 575 bp, Homo sapiens
gcagtggagttgtagcaataagcgtgagcttgtgtgtgtagccataaagcatgtagatgcatgtactccttaaagccaacagtgaaaaagatgagaccccccccgccccagagccaggcctgcaacacgagggcagctggagctacaggctgtgggcggggcaatgagcagtgtgcagaggaggatgttattcagagggtgggggtgtttcacagcrtccccggggctcatgtccagaagacctggacttaattctgggctcaggaactgtcctgaagtgggtagcacttagcaggccacctgaggagcagtcttggacccctctctggaagcgtgccccacaggtggcagacgtagatgcagggcagcctgtgcaccaccagcagaaaaacaaacggactttttttctctctttttctgaccactgacttcaggcaggcatggaagaggtaaaattcagcgtcatcatctgcagaccttcagcctatgggctccaagcaaacagcaggctttatgcacgagtaatttgagggatcactgtttccatctcacacgcaggaacatgcagcagcctc

SEQ ID NO: 381715 - DNA, 529 bp, Homo sapiens
  misc_feature (1)...(529): n = A,T,C or G
aagagcccaaaatatggacaagaaataaaatgaggctcggcttggaaaacggcaggaggatgtaaccagaggatattaatccaaaacattggaattcaatgggcagtaacagccaggaaagtagaaatgctaaaaaaagcctatgggtaatgttggacaacaaattaattataattctactgtgcaactctgcagccaaatggtccagtgtcagtttgccccatacttacaggcctcattagcctgagatgggaactcataatccttctccgtctctgcacacayacacgtacgcatacacactcgtccacacacacacacgtccgcgagcacacacacgtctgcacacacacacgaacgcacacacatgtctgcacacacatgtacgtgcacacacacgtacgcacacacacatgtacgcacacatacacatgtacgcacacccatcaaccctccacatctgaaatgtttttgttcccggaatggctnnnnnnnnnnnnnnnnnnnnnnnnnnnnnnnnnnnnnnnnn

SEQ ID NO: 381716 - DNA, 620 bp, Homo sapiens
atctattatccttgttcaaagcatatctgatgtgggaggaaaggacccagggattctcacagtgctatctgaccttaccttgctccacctgtacctcacaataatttttatccataaaattattagttaagtttgcataagatctccgatgcatgtaagtctgatttgataatctaatactttgtgtatttttaaccacaataatgtgtttttatttttcaatttaatatgtattggaaatcttagtgattcaacacatgttaatctttatcatttctttaactcttagatatgtcatatttacttagccatttctctattggtggacatttaatctatttaatgggcttttggctatttttaaaaagctgtaattgacatcctattgcattttattgcacatatgttagtatttcgtaagacagakgatgagttaaggaaaattgtgcttataagttattcacattgtaaaatttaatagatatcaaaaattttcatctaaagtggtcttaaattatagatgtcaatttgatattattaaactttgaattattttgctaaacccatggattgaaagtataattttatgaaatcttaggtaccacaggaagaagtataaa

SEQ ID NO: 381717 - DNA, 334 bp, Homo sapiens
ctatctgcataaaaattaagatatttgataattgagacagktatctccatgtaaataaattgtcggcatacctctctagaagtctcatctttctgcctgggcaagggagtatctaatgatagaacccaggatctaaagaatcagattaagagatctaaataattctctgatttgcccatgcctaatgattacctgagttcgtgaaattactagtaaagctttattttgtgagatcttagattccgataagtctaatgtcacaatcaaatcagtttttcctatctcaagaaatcatgtccatataatggaattaatccagaaactctgaaaagtt

SEQ ID NO: 381718 - DNA, 334 bp, Homo sapiens
ctatctgcataaaaattaagatatttgataattgagacagttatctccatgtaaataaattgtcggcatacctctctagaagtctcatctwtctgcctgggcaagggagtatctaatgatagaacccaggatctaaagaatcagattaagagatctaaataattctctgatttgcccatgcctaatgattacctgagttcgtgaaattactagtaaagctttattttgtgagatcttagattccgataagtctaatgtcacaatcaaatcagtttttcctatctcaagaaatcatgtccatataatggaattaatccagaaactctgaaaagtt

SEQ ID NO: 381719 - DNA, 334 bp, Homo sapiens
ctatctgcataaaaattaagatatttgataattgagacagttatctccatgtaaataaattgtcggcatacctctctagaagtctcatctttctgcctgggcaagggagtatctaatgayagaacccaggatctaaagaatcagattaagagatctaaataattctctgatttgcccatgcctaatgattacctgagttcgtgaaattactagtaaagctttattttgtgagatcttagattccgataagtctaatgtcacaatcaaatcagtttttcctatctcaagaaatcatgtccatataatggaattaatccagaaactctgaaaagtt

SEQ ID NO: 381720 - DNA, 577 bp, Homo sapiens
cagtgaatgcgtgtataaacacgtgtagatttacctgtcctagatatgagcatttgctttgtgagtctgctttaagtcaagttctaagctatggctcagtttaaaacttctctttttctatttaataatataccttagaagtcatgccatgatattaagatgaataataatgaaattattaatattagtcaaatttaattagttgcttattacrtagtgggtacttggtgtgatacatggattatctcatttaatcatcatgacaagctaataaattggcaatgctattatctccactttacagaagagaaaaaagattgtaagtactttgctcaaggtcatttacagggagagcaaattattcaaatccagatattctgctctcagagattgtattattaactattatgccacaatagaggcattgtagtctgcatgatagtccaactatttttatttgtagttatatactgatgaatatttagagtttttttttaaaattacaacacaatactgcaattgacattctcgcatgattatctaccatatatttccaaaagtggaaaggcagacatat

SEQ ID NO: 381721 - DNA, 546 bp, Homo sapiens
agtgggctgagtaaatggggcacccctgtcacgagtcccatgaaggggtcagggaaatgccctgcttcaggaggatctcttgagcccaggaggtgaaggatgcagtgagccaagatcgtgcaactgaactctggcctgggtgacagagtgagactctgtctcaaaataaataaataaataatttaattaattaaatttagcttattcttttgaacatcgttcttcatagtgttataaaatacatgatttaagacagtgagaaacagagataagccaatgatggayttctaatagaattcagagtgggacttgtttgaacatttcaaccaaataacaaaagattcctgcaattagttgactcttcagtctacctcagttttaaacatgtctcaggttgcccttaacaaacgagtatagtttactttgggctgataaattctgtggatggcaagaggttgtgaatatccctttataaacccagaactaatgctacatatccctggcattagtgccttatttatctaaacttacaaatgtattgggcaa

SEQ ID NO: 381722 - DNA, 472 bp, Homo sapiens
agaaaaagggaatcctccttaactcattctatgaagccagtatcaccctgataccaaaaccagaaaaaggcatatcataaaaaaagaaaactacaaatgaayatctctgataaagacatatgcaaaaattcttaacagatactggcaaatcaaatccaaaagcatatcaaaaagacaattcactataatcaagtgagtctcatcccagggatgcaaggatgactcaacatacacaacgtaataaatgtgatgtatttcataaacagaattaaaaaccaaatacatatgatcatctcaatagatgcataaaatcattcagtaaaatccagctttgctttatgataaaaaccctaaacaaactagacatagaataaacatatctcaaaataataaaagctatatatgacaaacccatggccaacatcatattgaatggggaaaagttgaaagtattcccactgagggctagaac

SEQ ID NO: 381723 - DNA, 472 bp, Homo sapiens
agaaaaagggaatcctccttaactcattctatgaagccagtatcaccctgataccaaaaccagaaaaaggcatatcataaaaaaagaaaactacaaatgaatatctctgataaagacatatgcaaaaattcttaacagatactggcaaatcaaatccaaaagcatatcaaaaagacaattcactataatcaagtgagtctcatcccagggatgcaaggatgactcaacatacacaacgtaataaatgtgatgtatttcataaacagaattaaaaaccaaatacatatgatcatctcaatagatgcataaaawcattcagtaaaatccagctttgctttatgataaaaaccctaaacaaactagacatagaataaacatatctcaaaataataaaagctatatatgacaaacccatggccaacatcatattgaatggggaaaagttgaaagtattcccactgagggctagaac

SEQ ID NO: 381724 - DNA, 472 bp, Homo sapiens
agaaaaagggaatcctccttaactcattctatgaagccagtatcaccctgataccaaaaccagaaaaaggcatatcataaaaaaagaaaactacaaatgaatatctctgataaagacatatgcaaaaattcttaacagatactggcaaatcaaatccaaaagcatatcaaaaagacaattcactataatcaagtgagtctcatcccagggatgcaaggatgactcaacatacacaacgtaataaatgtgatgtatttcataaacagaattaaaaaccaaatacatatgatcatctcaatagatgcataaaatcattcagtaaaatccagcwttgctttatgataaaaaccctaaacaaactagacatagaataaacatatctcaaaataataaaagctatatatgacaaacccatggccaacatcatattgaatggggaaaagttgaaagtattcccactgagggctagaac

SEQ ID NO: 381725 - DNA, 243 bp, Homo sapiens
cttccttttcttctgactgctgagtgaattcaatgagttaaagtgaatgatttgtattctcaggaaagcagagagcaagatcaagtawttttaacactggcttcccacgggtgattggctttgtcccttaagcttaggtggttgctcttttcctgatgagtctactttatcctaaagttagtaaacttgctctgccactggccctttcaaactaggggtgataaaaatcactctaaccaaagg

SEQ ID NO: 381726 - DNA, 544 bp, Homo sapiens
tattctcaggaaagcagagagcaagatcaagtaattttaacactggcttcccacgggtgattggctttgtcccttaagcttaggtggttgctcttttcctgatgagtctactttatcctaaagttagtaaacttgctytgccactggccctttcaaactaggggtgataaaaatcactctaaccaaaggttactgcagtctcttgtgttctttctcatcccttcaacagctttgcaaagagtctccaaaccctctctgcattatccttattaaattgcactatcagtttctttatatgaccccaacaaatacatgaatctcctagttagggaaactgatagactaagagtacttttctttcatgttcaaagctagaaggtaagtattttctaataatgtgaagcagctgaaatgacaatttgggttagagctgtgctgtggactacagctatttgaaagtacagttttatttttatgacagtttgctctctgctgtctgggatatttacattttcttttcctatggagaaggtcagagtatgat

SEQ ID NO: 381727 - DNA, 544 bp, Homo sapiens
tattctcaggaaagcagagagcaagatcaagtaattttaacactggcttcccacgggtgattggctttgtcccttaagcttaggtggttgctcttttcctgatgagtctactttatcctaaagttagtaaacttgctctgccactggccctttcaaactaggggtgataaaaatcactctaaccaaaggttactgcagtctcttgtgttctttctcatcccttcaacagctttgcaaagagtctccaaaccctctctgcattatccttattaaattgcactatcagtttctttatatgaccccaacaaatacatgaatctcctagttagggaaactgatagactaagagtacttttctttcatgttcaaagctagaaggtaagtattttctaataatgtgaagcagctgaaatgacaatttgggttagagctgtgctgtggactacagctatttgaaagtacagttttatttttatgacagtttgctctctgctgtctgggatatttacattttcytttcctatggagaaggtcagagtatgat

SEQ ID NO: 381728 - DNA, 433 bp, Homo sapiens
cttaataggtatttgttaaaaaaaataaatgagcacatataatgagttaaaaaatgcttgggaccagaggtatttcagatttcaaattattttcagatttcagaatatttacattatacttacaaattcagtagtgctaatccagaaatccaaaatctgtaatgcttaagtgaacatttccttgagcatcacgtcagctctcaaaaagtttcagcttttagagcatttcagatttcagatatctggataaggaacactcaacatgcactttyctatattaaccttatttgctataaatttcatatatatatatattatttagttctagtagcttttgaaatgtattccttagtttttttccataatcatctcattttcaagtaaagacaattttgtttttcctattcaatcattatgccctttatttttcttt

SEQ ID NO: 381729 - DNA, 433 bp, Homo sapiens
cttaataggtatttgttaaaaaaaataaatgagcacatataatgagttaaaaaatgcttgggaccagaggtatttcagatttcaaattattttcagatttcagaatatttacattatacttacaaattcagtagtgctaatccagaaatccaaaatctgtaatgcttaagtgaacatttccttgagcatcacgtcagctctcaaaaagtttcagcttttagagcatttcagatttcagatatctggataaggaacactcaacatgcacttttmtatattaaccttatttgctataaatttcatatatatatatattatttagttctagtagcttttgaaatgtattccttagtttttttccataatcatctcattttcaagtaaagacaattttgtttttcctattcaatcattatgccctttatttttcttt

SEQ ID NO: 381730 - DNA, 433 bp, Homo sapiens
cttaataggtatttgttaaaaaaaataaatgagcacatataatgagttaaaaaatgcttgggaccagaggtatttcagatttcaaattattttcagatttcagaatatttacattatacttacaaattcagtagtgctaatccagaaatccaaaatctgtaatgcttaagtgaacatttccttgagcatcacgtcagctctcaaaaagtttcagcttttagagcatttcagatttcagatatctggataaggaacactcaacatgcacttttctatattaaccttrtttgctataaatttcatatatatatatattatttagttctagtagcttttgaaatgtattccttagtttttttccataatcatctcattttcaagtaaagacaattttgtttttcctattcaatcattatgccctttatttttcttt

SEQ ID NO: 381731 - DNA, 430 bp, Homo sapiens
ttcagcttttagagcatttcagatttcagatatctggataaggaacactcaacatgcacttttctatattaaccttatttgctataaatttcatatatatatatattatttagttctagtagcttttgaaatgtattccttaktttttttccataatcatctcattttcaagtaaagacaattttgtttttcctattcaatcattatgccctttatttttcttttataatggttagtgcttacagtaatgtgtagaagaatagtagtgagatgaacattctttcttttttcctgattttatgtggaatttttcaatattgcacctttaaatagtaccctgcctgaagattttttgtaggttgtggaaataaataacacctaataataacagagagaatctatatttattcagacgttttataacaagaaa

SEQ ID NO: 381732 - DNA, 435 bp, Homo sapiens
cagttttctcacggaagtttcgtatctgactktctctccactggaaatttctgttgctattcaaatagttctacaatgtgcctccagaaaatatgtcaataagattaaaaagtcaacatttcataaattgaaattgctattttgacctcctaaaaatatataacttttattaaaatgaattactattaaaatatattccacataggtatggtaattgcttttattagaaaacttgaaagaagtgagataatctgagtaatatggtttacaacagatatgtaaaaacaaagaacacatatctgtcatctatatttattcagttttatgtgttataattaaatgaatttgggttcttgcttctctcaattatgacataataaatgatagaaaatatacatgtttttccagaagtcattttataaacataatattgag

SEQ ID NO: 381733 - DNA, 435 bp, Homo sapiens
cagttttctcacggaagtttcgtatctgactttctctccactggaaatttctgttgctattcaaatagttctacaatktgcctccagaaaatatgtcaataagattaaaaagtcaacatttcataaattgaaattgctattttgacctcctaaaaatatataacttttattaaaatgaattactattaaaatatattccacataggtatggtaattgcttttattagaaaacttgaaagaagtgagataatctgagtaatatggtttacaacagatatgtaaaaacaaagaacacatatctgtcatctatatttattcagttttatgtgttataattaaatgaatttgggttcttgcttctctcaattatgacataataaatgatagaaaatatacatgtttttccagaagtcattttataaacataatattgag

SEQ ID NO: 381734 - DNA, 435 bp, Homo sapiens
cagttttctcacggaagtttcgtatctgactttctctccactggaaatttctgttgctattcaaatagttctacaatgtgcctccagaaaatatgtcaataagattaaaaagtcaacatttcataaattgaaattgctattttgacctcctaaaaatatataacttttattaaaatgaattactattaaaatayattccacataggtatggtaattgcttttattagaaaacttgaaagaagtgagataatctgagtaatatggtttacaacagatatgtaaaaacaaagaacacatatctgtcatctatatttattcagttttatgtgttataattaaatgaatttgggttcttgcttctctcaattatgacataataaatgatagaaaatatacatgtttttccagaagtcattttataaacataatattgag

SEQ ID NO: 381735 - DNA, 348 bp, Homo sapiens
  misc_feature (1)...(348): n = A,T,C or G
nnnnnnnnnnnnatagttcgctaacacaaaattaacaaaatttaacatttgtgtctatgaataacattgataatattgtagccacatccatttgtttgcatattgtctactttcttgttacaacagggttyagcagttgtgacagagacttctacaatgttcccaaagcctaaaatatttactgtcttgccctttatagaaataaatactttgctgacactgtgactcataataatgtttgcaactactttttgaataagctcaaaagtttacgcacacacagacacacactcctaaaatatttgttatattgctctttatagaaataatttgcttatccctgtgaat

SEQ ID NO: 381736 - DNA, 348 bp, Homo sapiens
  misc_feature (1)...(348): n = A,T,C or G
nnnnnnnnnnnnatagttcgctaacacaaaattaacaaaatttaacatttgtgtctatgaataacattgataatattgtagccacatccatttgtttgcatattgtctactttcttgttacaacagggttcagcagttgtgrcagagacttctacaatgttcccaaagcctaaaatatttactgtcttgccctttatagaaataaatactttgctgacactgtgactcataataatgtttgcaactactttttgaataagctcaaaagtttacgcacacacagacacacactcctaaaatatttgttatattgctctttatagaaataatttgcttatccctgtgaat

SEQ ID NO: 381737 - DNA, 348 bp, Homo sapiens
  misc_feature (1)...(348): n = A,T,C or G
nnnnnnnnnnnnatagttcgctaacacaaaattaacaaaatttaacatttgtgtctatgaataacattgataatattgtagccacatccatttgtttgcatattgtctactttcttgttacaacagggttcagcagttgtgacagagacttctacaatgttcccaaagcctaaaatatttactgtcttrccctttatagaaataaatactttgctgacactgtgactcataataatgtttgcaactactttttgaataagctcaaaagtttacgcacacacagacacacactcctaaaatatttgttatattgctctttatagaaataatttgcttatccctgtgaat

SEQ ID NO: 381738 - DNA, 348 bp, Homo sapiens
  misc_feature (1)...(348): n = A,T,C or G
nnnnnnnnnnnnatagttcgctaacacaaaattaacaaaatttaacatttgtgtctatgaataacattgataatattgtagccacatccatttgtttgcatattgtctactttcttgttacaacagggttcagcagttgtgacagagacttctacaatgttcccaaagcctaaaatatttactgtcttgccctttatagaaataaatactttgctgacactgtgactcataataatgtttgcaactactttttgaataagctcaraagtttacgcacacacagacacacactcctaaaatatttgttatattgctctttatagaaataatttgcttatccctgtgaat

SEQ ID NO: 381739 - DNA, 396 bp, Homo sapiens
gctgtttttctttctctagaaatgttctaagaataaattagctgatatactaagaaaggttcacaaaatgagtccttcacctatacagcacctcttctaaataacagagagattacaaatccaatgtattyaaactctgagttgtctatatgtgtagtgttaaaaaatgtagctgtcagttttaacagcttttctcctgagatttcagtggctagctaatgatctcttttaaggattaggacaatttctagatagtgaaatggcaggaaaacatatcaaatacatatttttccattattagtattctgaggactgtaaagtcttactcaatgtatatcacttttaatttttaggatacatagaaatatttgctagtagaaataaatggcaagtgtt

SEQ ID NO: 381740 - DNA, 396 bp, Homo sapiens
gctgtttttctttctctagaaatgttctaagaataaattagctgatatactaagaaaggttcacaaaatgagtccttcacctatacagcacctcttctaaataacagagagattacaaatccaatgtattcaaactctgagttgtctatatgtgtagtgttaaaaaatgtagctgtcagttttaacagcttttcycctgagatttcagtggctagctaatgatctcttttaaggattaggacaatttctagatagtgaaatggcaggaaaacatatcaaatacatatttttccattattagtattctgaggactgtaaagtcttactcaatgtatatcacttttaatttttaggatacatagaaatatttgctagtagaaataaatggcaagtgtt

SEQ ID NO: 381741 - DNA, 482 bp, Homo sapiens
acaaaaacttaatacaaattcatctacctgatttttttgtggcaatgtcactaataatagaaatatggtctcatctttcctaaatattttgctcatgctctttgacaatactgtaaaatgtacttaaactacataagaatcttctagtaaaataaaatgcaacatttcacttagaagtaaaacatttttaaaatagtgtccaacaattgcttcaagatggtgacaacctatgaacacccttttytaagtgtttccaccctaattggctttttttttttttttttttttttttttgacacaaaaccttgctctgttacccaggctgcagtgcagtggtgtgatcttggctcactgcaacctctgcctcctgggtccaacggattctcctgcctcagccaaccaagtagctgggattagaagcaactgccacaatgccccgttaatttttgtgttttttgtttgtttgtttgtttgtttgtttt

SEQ ID NO: 381742 - DNA, 482 bp, Homo sapiens
atgggtgacatcaccaactaaaacaggtgacaaataatcagcataaaacccagaatacaagagtaattgtcctaaycattggcagcatagggccagtaccagctggagttaatggcaaagataaaatgaagataaaaggaagtattgtaagatcttaatatcaataaactacaacaagaaatcatcaataatgctcactcccaaaagaaaaatacttaccctgaagaaaaacaattggaacaaaatcaaaattaatcagagaatcagataatctgagacaagtaagataatttttggaaaacaatttttagaaaaaataatttgaaggtacataaaatcaaatagaagtggtacaaactatagtcagagatacagagtataaaaataagagtaaaaaacagaaattaagagattaaaaacatctaaaaattttctaaacatagaacttaggcaaagaatagtaatacccatgtaatggttat

SEQ ID NO: 381743 - DNA, 573 bp, Homo sapiens
actatgtatattctaggcccatttctagggactggggaaaaaatagtgaaaataacattcagaatgtcttggcttcataragctgttgttccagtgttgggagaaaaacagtaattaataccacaaagtatcatgtgttgtatgccagatggtttaagttctattctaaaaaatgtggcaaaggaggggaatagagagttctgggcacaagaggtgctggatactgaacaagatggttgctgcaagtctcactgggtggtatcatctgaatacaatgaatggttatgagagaatgagccaagagcataattgagagaacatattttcagggagcagaaatagcaaatgaggccttggtgtatgaatgctcccatgaggttccactaaggatgccagtgtgatacagcagaggagatgaggtcacactccatggggagatggtcacataaagcttcttagaaaatggtaagaacttttgtttatttaattggcagaaaatgaagggttttaaatggaaaagcaatcgcctctttaaagaattagcagtaacagtttgactgatttgtgaaaata

SEQ ID NO: 381744 - DNA, 312 bp, Homo sapiens
caaactcttcccacagaccccccaaagaaaaamccaaccctggcagtatcttggttttaccatggtgtgatcaagtcagatttctgtcttacagaactgtaacataataaatctgtattgtttaagctactaagtttgaagtaattttactaaaacttgaaaggaatttacattttgcttttaaagttttgaaactttagacagagatcaacaaatcctcacaaaagatagctcaaattttacctttgaaaaaggaattatgttacatatctataagaatgaataactacagcacagaaaaatactcataag

SEQ ID NO: 381745 - DNA, 312 bp, Homo sapiens
caaactcttcccacagaccccccaaagaaaaacccaaccctggcagtatcttggttttaccatggtgtgatcaagtcagatttctgtcttacagaactgtaacataataaatctgtattgtttaagctactaagtttgaagtaattttactaaaacttgaaaggaatttacattttgcttttaaagttttgaaactttagacagagatcaacaaatcctcacaaaagatagctcaawttttacctttgaaaaaggaattatgttacatatctataagaatgaataactacagcacagaaaaatactcataag

SEQ ID NO: 381746 - DNA, 429 bp, Homo sapiens
ctgtctaaaatagagaagaaatgttattaacatgcatggtggtcaagaaactgacaggtaagatttgaaagtgttaccagtttgaggtaagcacaatagagaataacgacagagtttataatggagagaatgtctttgaaagccaaaagcaaaagttgtcttaatagagaaagaaaccaaacaaaggtttgaaaaagcatttgaatggaaagtttggtgtagacktacgttatgaaccataaactgtcaaagtttattggtgatgcttgttggtttatttacttgttggttttcagaaggaaagaactataatagactgataactacaaattaactgaaattgtatataccccgcatcctcatcattaggcaggtgaagatggggtgagcaaaatagtagcaacccattgaaagggctgttgaaggggt

SEQ ID NO: 381747 - DNA, 429 bp, Homo sapiens
ctgtctaaaatagagaagaaatgttattaacatgcatggtggtcaagaaactgacaggtaagatttgaaagtgttaccagtttgaggtaagcacaatagagaataacgacagagtttataatggagagaatgtctttgaaagccaaaagcaaaagttgtcttaatagagaaagaaaccaaacaaaggtttgaaaaagcatttgaatggaaagtttggtgtagacttacgttatgaaccataaactgtcaaagtttattggtgatgcttgytggtttatttacttgttggttttcagaaggaaagaactataatagactgataactacaaattaactgaaattgtatataccccgcatcctcatcattaggcaggtgaagatggggtgagcaaaatagtagcaacccattgaaagggctgttgaaggggt

SEQ ID NO: 381748 - DNA, 429 bp, Homo sapiens
ctgtctaaaatagagaagaaatgttattaacatgcatggtggtcaagaaactgacaggtaagatttgaaagtgttaccagtttgaggtaagcacaatagagaataacgacagagtttataatggagagaatgtctttgaaagccaaaagcaaaagttgtcttaatagagaaagaaaccaaacaaaggtttgaaaaagcatttgaatggaaagtttggtgtagacttacgttatgaaccataaactgtcaaagtttattggtgatgcttgttggtttatttacttgttggttttcagaaggaaagaactataatagactgataactacaaattaactgaaattgtatataccccgcmtcctcatcattaggcaggtgaagatggggtgagcaaaatagtagcaacccattgaaagggctgttgaaggggt

SEQ ID NO: 381749 - DNA, 429 bp, Homo sapiens
ctgtctaaaatagagaagaaatgttattaacatgcatggtggtcaagaaactgacaggtaagatttgaaagtgttaccagtttgaggtaagcacaatagagaataacgacagagtttataatggagagaatgtctttgaaagccaaaagcaaaagttgtcttaatagagaaagaaaccaaacaaaggtttgaaaaagcatttgaatggaaagtttggtgtagacttacgttatgaaccataaactgtcaaagtttattggtgatgcttgttggtttatttacttgttggttttcagaaggaaagaactataatagactgataactacaaattaactgaaattgtatataccccgcatcctcatsattaggcaggtgaagatggggtgagcaaaatagtagcaacccattgaaagggctgttgaaggggt

SEQ ID NO: 381750 - DNA, 325 bp, Homo sapiens
ttttccactatgggcatgtttaggcaagctcccttagcaagtacccttatctgcacaaaatatttggtataagcacctagggggtgggtaggaggttctccaggggaycctttcctgactgtctccctaaagcaagttggctgactcctttcattcctcccttcaggagtggagaccccaaattctgttggggaaagtgtacaactactgctcttaactgcttcctgccgacaaggggtgctgttttgggaaagtggcagttaaggctcctcctgaggtcagtttaagggtccccaaagagaacggtgtgttcatgagtggttct

SEQ ID NO: 381751 - DNA, 325 bp, Homo sapiens
ttttccactatgggcatgtttaggcaagctcccttagcaagtacccttatctgcacaaaatatttggtataagcacctagggggtgggtaggaggttctccaggggatcctttcctgactgtctccctaaagcaagttggctgactcctttcattcctcccttcaggagtggagaccccaaattctgttggggaaagtgtacaackactgctcttaactgcttcctgccgacaaggggtgctgttttgggaaagtggcagttaaggctcctcctgaggtcagtttaagggtccccaaagagaacggtgtgttcatgagtggttct

SEQ ID NO: 381752 - DNA, 325 bp, Homo sapiens
ttttccactatgggcatgtttaggcaagctcccttagcaagtacccttatctgcacaaaatatttggtataagcacctagggggtgggtaggaggttctccaggggatcctttcctgactgtctccctaaagcaagttggctgactcctttcattcctcccttcaggagtggagaccccaaattctgttggggaaagtgtacaactactgctcttaactgcttcctgcygacaaggggtgctgttttgggaaagtggcagttaaggctcctcctgaggtcagtttaagggtccccaaagagaacggtgtgttcatgagtggttct

SEQ ID NO: 381753 - DNA, 535 bp, Homo sapiens
agacaattatatctaatcttatctaggttgaccatgaggtgagatttttttaaacttttataaccctttacaaattgttgttaaagagcgtatcagtgcctttagaaaaccttgttgtgcttttatttcaatgctcaatttacaaaaacaaaatacttttttgaaattagtcaatatgttcacacaatttcttttgcaagattaatttttacaaacctttcaccawttgtttaaaccttcagctttatcttatctaattcaaaacaatcctttaacccaaggcaaaaatttacattttcatgcattcttataatcttttactaaaaatatattttactttccttacttatgttatatgtaaatctattttcattgtctctattacaggttattatggtaactgttagcaatttttaactttaatgtaaaacctggcaagttgctttaattatgtagtaggcataaataaattctgattccttcctgcataattaagggtgtggttaattccatatgtccctggacttattaattg

SEQ ID NO: 381754 - DNA, 535 bp, Homo sapiens
agacaattatatctaatcttatctaggttgaccatgaggtgagatttttttaaacttttataaccctttacaaattgttgttaaagagcgtatcagtgcctttagaaaaccttgttgtgcttttatttcaatgctcaatttacaaaaacaaaatacttttttgaaattagtcaatatgttcacacaatttcttttgcaagattaatttttacaaacctttcaccaattgtttaaaccttcagctttatcttatctaattcaaaacaatcctttaacccaaggcaaaaatttacattttcatgcattcttataatcttttactaaaaatatattttactttccttacttaygttatatgtaaatctattttcattgtctctattacaggttattatggtaactgttagcaatttttaactttaatgtaaaacctggcaagttgctttaattatgtagtaggcataaataaattctgattccttcctgcataattaagggtgtggttaattccatatgtccctggacttattaattg

SEQ ID NO: 381755 - DNA, 508 bp, Homo sapiens
aatacttgtggagcaggtagcaggttctctggggggaactttcccttactgtctgcctaaagcaagctggctaacttttcagaaagagacagagaaaatgaagtagctaccaaagtattctaggtctacaagtgatattattttcmacaagtattcaaatgccattctagtctaaactaattcattataaatcagctaatattaagtaaatattttacaaattaaaaactagttacaaaaggtagagacctcaaagaaaggcagaaattaggcaaatgggaaaaagttatggtgacttaaagcctatatattgtgatctggagaattagaatttaatttgtctatacaaagtaggtcatgatcctgataagtttagcaattagagtatttataaaaagtaagagctaaataatttgtttcagggatgcacttttatttcaattatctagacctgaaattatattttttgagatcgttcaggaagaagaaattacatgaggagagcttt

SEQ ID NO: 381756 - DNA, 508 bp, Homo sapiens
aatacttgtggagcaggtagcaggttctctggggggaactttcccttactgtctgcctaaagcaagctggctaacttttcagaaagagacagagaaaatgaagtagctaccaaagtattctaggtctacaagtgatattattttccacaagtattcaaatgccattctagtctaaactaattcattataaatcagctaatattaagtaaatattttacaaattaaaaactagttacaaaaggtagagacctcaaagaaaggcagaaatkaggcaaatgggaaaaagttatggtgacttaaagcctatatattgtgatctggagaattagaatttaatttgtctatacaaagtaggtcatgatcctgataagtttagcaattagagtatttataaaaagtaagagctaaataatttgtttcagggatgcacttttatttcaattatctagacctgaaattatattttttgagatcgttcaggaagaagaaattacatgaggagagcttt

SEQ ID NO: 381757 - DNA, 508 bp, Homo sapiens
aatacttgtggagcaggtagcaggttctctggggggaactttcccttactgtctgcctaaagcaagctggctaacttttcagaaagagacagagaaaatgaagtagctaccaaagtattctaggtctacaagtgatattattttccacaagtattcaaatgccattctagtctaaactaattcattataaatcagctaatattaagtaaatattttacaaattaaaaactagttacaaaaggtagagacctcaaagaaaggcagaaattaggcaaatgggaaaaarttatggtgacttaaagcctatatattgtgatctggagaattagaatttaatttgtctatacaaagtaggtcatgatcctgataagtttagcaattagagtatttataaaaagtaagagctaaataatttgtttcagggatgcacttttatttcaattatctagacctgaaattatattttttgagatcgttcaggaagaagaaattacatgaggagagcttt

SEQ ID NO: 381758 - DNA, 554 bp, Homo sapiens
aaaattggctctatttttttctcaaaattctagttcctatgaattttccaaacaaattttggaaacagcttgtgaatttctctcaaaatgtttgccacaatttactacagagttgyagtaaatagatatagaattcattgtagtcaataaattacaaactatatagattgcattgatgctttttttttttttttttttttttgagacagaatctcaccttgtcatccaggttggagtgcagtggcacaatctcggctcactgcaacctcagcctcccagattcaagcaattatcctgcctcagcctcctgagtagctgggactacaggcccatgccaccatgcctggctaatttttttgtattttttttagtagaggcagggttttatcgtgttagccagtataatcttgatctcctgaccttgtgatccgcccaccttggcctcccaaagtgctgggattacaggcatgagcaaccgcgcccagcccctactgcattgattctaaagattaacttccagagaattcacatcaaacaatgttgcatcttcaaat

SEQ ID NO: 381759 - DNA, 554 bp, Homo sapiens
aaaattggctctatttttttctcaaaattctagttcctatgaattttccaaacaaattttggaaacagcttgtgaatttctctcaaaatgtttgccacaatttactacagagttgtagtaaatagatatagaattcattgtagtcaataaattacaaactatatagattgcattgatgctttttttttttttttttttttttgagacagaatctcaccttgtcayccaggttggagtgcagtggcacaatctcggctcactgcaacctcagcctcccagattcaagcaattatcctgcctcagcctcctgagtagctgggactacaggcccatgccaccatgcctggctaatttttttgtattttttttagtagaggcagggttttatcgtgttagccagtataatcttgatctcctgaccttgtgatccgcccaccttggcctcccaaagtgctgggattacaggcatgagcaaccgcgcccagcccctactgcattgattctaaagattaacttccagagaattcacatcaaacaatgttgcatcttcaaat

SEQ ID NO: 381760 - DNA, 554 bp, Homo sapiens
aaaattggctctatttttttctcaaaattctagttcctatgaattttccaaacaaattttggaaacagcttgtgaatttctctcaaaatgtttgccacaatttactacagagttgtagtaaatagatatagaattcattgtagtcaataaattacaaactatatagattgcattgatgctttttttttttttttttttttttgagacagaatctcaccttgtcatycaggttggagtgcagtggcacaatctcggctcactgcaacctcagcctcccagattcaagcaattatcctgcctcagcctcctgagtagctgggactacaggcccatgccaccatgcctggctaatttttttgtattttttttagtagaggcagggttttatcgtgttagccagtataatcttgatctcctgaccttgtgatccgcccaccttggcctcccaaagtgctgggattacaggcatgagcaaccgcgcccagcccctactgcattgattctaaagattaacttccagagaattcacatcaaacaatgttgcatcttcaaat

SEQ ID NO: 381761 - DNA, 554 bp, Homo sapiens
aaaattggctctatttttttctcaaaattctagttcctatgaattttccaaacaaattttggaaacagcttgtgaatttctctcaaaatgtttgccacaatttactacagagttgtagtaaatagatatagaattcattgtagtcaataaattacaaactatatagattgcattgatgctttttttttttttttttttttttgagacagaatctcaccttgtcatccaggttggagtgcagtggcacaatctcggctcactgcaacctcagcctcccagattcaagcaattatcctgcctcagcctcctgagtagctgggactacaggcccrtgccaccatgcctggctaatttttttgtattttttttagtagaggcagggttttatcgtgttagccagtataatcttgatctcctgaccttgtgatccgcccaccttggcctcccaaagtgctgggattacaggcatgagcaaccgcgcccagcccctactgcattgattctaaagattaacttccagagaattcacatcaaacaatgttgcatcttcaaat

SEQ ID NO: 381762 - DNA, 565 bp, Homo sapiens
tgccaacgcactccagcctgcgtgacagagcaagaacccatctcaaaaaagaaaaaaagaggccaggtgtggtggctcacacctgtaatcgcagcactctgggaggtcaagagatcgagaccagcctgaccaacatggtgaaaccccatctccactaaaaatacaaaacttagcggggcatagtgatgcgcgcctatatcccagctacttgggaggctgaggcaggagaactgtttgaatcccggaggtgtagattgcagtgagccgagatcgcgccattgcactccagcctgggcaacaagagtgaaacttcgtctcaaaaaaaaaaaagaaagaaagaaaaaagaatggctaaagttaaaaaggctggccatgccaagtgttggcaaaactatagaggacaaccaacatacatgcactgctaatggtaatggaaattagtacaatgactctggaaaaagscttgtcagtttttaaaatattttgacgtatgcacctatcatatgactgccaatcaatttgtagggaaatgaaagtatatgtacataaaaaacttgtaccaaaa

SEQ ID NO: 381763 - DNA, 646 bp, Homo sapiens
taattaattctattgttgtggcataaattgacaatatgtcaatgaatgagcatgacagtgttgtattaatactttatttataagtactgtctggcttattggccacaatttattgagttttgttataaaaaatacaaatatcaagaaggtaaattagtgtagtatgaaaacgtttaattcaataaatttggaaatatatgtaaaatgtgtacaattacttgaaacatgcatttttccaaaagtaacctaaagtgaaaagaaaaatctgagttgtgctacaacaaatgcatttaatcagtagtcagaaatcatctcataaagataatttcaagccatgatgactttactggcaagttgtatcaaacatgaaacaaaacaataattccaatcttacatagaattctttctgagcatgaaacaggaaagaayatactctatttcattttattatgctattatgactctgatattataacctgaccaggatagtaaagggaaaggaaattaaacaccaatgtaatttatgaaaataatgaaggaaaacttaaaaaactaccatgcagaaataagcaatgcattaaaatgtaagacatcacagccaatgtttattctaagaaaccctgggaagcaataatggcctcatata

SEQ ID NO: 381764 - DNA, 620 bp, Homo sapiens
atctattatccttgttcaaagcatatctgatgtgggaggaaaggacccagggattctcacagtgctatctgaccttaccttgctccacctgtacctcacaataatttttatccataaaattattagttaagtttgcataagatctccgatgcatgtaagtctgatttgataatctaatactttgtgtatttttaaccacaataatgtgtttttatttttcaatttaatatgtattggaaatcttagtgattcaacacatgttaatctttatcatttctttaactcttagatatgtcatatttacttagccatttctctattggtggacatttaatctatttaatgggcttttgrctatttttaaaaagctgtaattgacatcctattgcattttattgcacatatgttagtatttcgtaagacagaggatgagttaaggaaaattgtgcttataagttattcacattgtaaaatttaatagatatcaaaaattttcatctaaagtggtcttaaattatagatgtcaatttgatattattaaactttgaattattttgctaaacccatggattgaaagtataattttatgaaatcttaggtaccacaggaagaagtataaa

SEQ ID NO: 381765 - DNA, 298 bp, Homo sapiens
gaatagtaagaataaaaataatgggattataatagtttgcttctacttctgggatgaatgtagtagttgtataagactactgttattaaaatgacaagaaaaagctggataaattataaaagccacatattttttaaagcatgagggaactgtagaagcaatgatgaatagatgaactaagagtacagacatacctgagtgttcsaaatgggcgaaagagcatgatgtattcatagcatctactagtcaattctggcacaaattaggaagtagaaggcatgttcaatggaggcaaaac

SEQ ID NO: 381766 - DNA, 298 bp, Homo sapiens
gaatagtaagaataaaaataatgggattataatagtttgcttctacttctgggatgaatgtagtagttgtataagactactgttattaaaatgacaagaaaaagctggataaattataaaagccacatattttttaaagcatgagggaactgtagaagcaatgatgaatagatgaactaagagtacagacatacctgagtgttccaaatgggcgaaagagcatgatgyattcatagcatctactagtcaattctggcacaaattaggaagtagaaggcatgttcaatggaggcaaaac

SEQ ID NO: 381767 - DNA, 561 bp, Homo sapiens
cagctcaacactaatgcaggctgctttgctgctccgccttcctcccctctgctatctgtcttctttgatgcttagataaacyagggcaagatcaggaattccactgtctaagctgacatacctcaggaaatggagcgccattctctccccagtctctgtgaattgtcctcttggagtctcttcttggcctggcttgtggcaagaggggccaggagacttgcgcctcataggagtctgctctcccagaagactcgtggctcctccttcctccctccttctcatagcggggtgctgattgttgtccttagtgggaccattttcacctcctcttcataatccctggaagagaggtgtgatttaaattcttgacaactttctttaggaatatgaggtacttagcatttttgcttgtttatttttggaattttgttgtgtgttttctgtttgtttgttttttgtctccagctttgagccttagctgtcattaccaggcaaaaggaagagccccactcagcacccgtttccggttttacggcccaggcactgttgagcagaccacta

SEQ ID NO: 381768 - DNA, 463 bp, Homo sapiens
tcccaaactctcagtgacttaaaacaaagatttaaaacttactcatgttatatactcataatgggttggcaggtatgctatgctccctgaagtgactcagggwctcaaccagcatcttggagttgccatttttcaagaacaagggaaaataagagaactctggagcaaaattaaatgctaagcccaaaagtgatacatatcacttctgctcacatcttatcagccagaaaaagtcacatggaactgggaacccaggaaatatacacagggaacccaggaaatataatattaccttgcaccaaaggaagcagctagaaatattggtgaacagcacttatgataatcactggaactggcaggggaaatgtgaactattcatataatagactaccatggagtgattaaaacgagcaaactgtatctatacacataaagaaaataagctgcctactagtatgcaagc

SEQ ID NO: 381769 - DNA, 427 bp, Homo sapiens
cttatgcaaaatgcaatcttgtgcaataaaggggggaataaaaatatatacttagattttctaacattcacatattaaatactggaaagatcctcaataamttataaaactagttaactatagaggagggggagggaagttggagtgaaagcggatatactcagagtgtaccttttgcattactttgactttttaagccatataaatgtattccctattcaaaaaataaacaaataaacagcttcttaaaaacataaatgttcttaaaaaagaataaggagtgataatagagttataatctttgtagacttgcttggtattttagcattcataacgttcaaagaagtcttcaaaaactgtatttaatttttatttatttagtattatttagctttgggtctttcaagaaaaagtcctatttgggaat

SEQ ID NO: 381770 - DNA, 427 bp, Homo sapiens
cttatgcaaaatgcaatcttgtgcaataaaggggggaataaaaatatatacttagattttctaacattcacatattaaatactggaaagatcctcaataaattataaaactagttaactatagaggagggggagggaagttggagtgaaagcrgatatactcagagtgtaccttttgcattactttgactttttaagccatataaatgtattccctattcaaaaaataaacaaataaacagcttcttaaaaacataaatgttcttaaaaaagaataaggagtgataatagagttataatctttgtagacttgcttggtattttagcattcataacgttcaaagaagtcttcaaaaactgtatttaatttttatttatttagtattatttagctttgggtctttcaagaaaaagtcctatttgggaat

SEQ ID NO: 381771 - DNA, 516 bp, Homo sapiens
gtattggaatgcaagaagttaagaatattttgtgcctaataagcctgaattttttaaatgtaatacatgacaacaccatttattgtgaaaggcagttgtaggattgagattggcatcttaaagagaatggtgacagtttggaaatgatgctgtaagtaatggaagaatgagctgataaaagacataccaaaagtttgcatggrtctaggggtccatatatttatataattagctccatcatagcaagcttctgcatgctaccaaagtttagctatgaagagaagggataaataggcagccagttctaaatgtttgatagatgtaactgagcagagatggggctgcttttggtaaggcttatgtctttttattttgaggatcacaacttcattacatcttttatcaattctaggaacttcacaactattttaaaaaaattttacctgcctcttatttcttactggagctcccattaaacccattgtattctccattctcttctttagtgttttccgt

SEQ ID NO: 381772 - DNA, 646 bp, Homo sapiens
acaaaatacagaatatttgaaaatacatgtataaccagacaaaagaaatactcagctagtattaagctaaactaaagggtatgctgtgttaacatcaggatataaggtcaaataataaaacagaaaaagagcagcatctaatcaaactaagagtgaaaatgatcaagtttgcaaaggaatgaattaagcaatccactcaagaaactggatgcattaacatcaaaggaaacaatgaaaataaagacacaagcagaaaccattgcaaaaggaaacagaacctccaataggaatgatgacaaaaagctaaaacttgacttttyaaaaagatggtgagaagtaaaaagccataggcatgaagagaaaagaaaatacaaatgaaacaattgagataacttagggggcatagctaaaaatcttgctgagatgttttaaaaattttaactgaaacttatgagcaacttgagtgagaataattttctcagtaggacaaatatcaaaaagtgctccaacagagaaataaaatgacctaacttccaccaaaaactcacaattcctgatgaaaatactccaggacccagagagaaggtttcctcttggtagctgaactccaaatgcagccccacgttgcaaagaccctggctttata

SEQ ID NO: 381773 - DNA, 621 bp, Homo sapiens
ctttctctagaatattacgtttaacctttcaccttacctcctatcccctgccccaacctcacccccctgcaacctgtctctattaaccttcttctcacaatctcacccttgcaggtccaccccaagctgagcaaaattactatctactgctcagggtcatcctttccttgtgttcttaaattcatctgtgttcttggtgccttaagaatgatttgtgctaactttagattgtattcatgaaaactcgtgtttcttaaagtgtggtccctggactagcaccatcagagtcaactggaaacttagaattgcaaacccatgccccacctccgacctgagtgcagcccagtgctcagggttctaacaagttctgcaggtgattccgatgctcactcaagtttgagaacattgatataaactatatataattaaatagttacataaaaatggtgaaygaaaagtattcaacttgaaccattgtagtgaggatctgaagctatttgatacccctaagataaagggtttataaacaataatgaatttgcaggggcaggggcagcatgagcagtagaatgagaaggaaagaggcagaaaagcagggtcagaaatcaccttccaagcagc

SEQ ID NO: 381774 - DNA, 585 bp, Homo sapiens
tatcctgtgttgtcttaattttcagtaaggttttccctaagtcatagaaaaactgccactagcagctccagcttaacaaactcacagaaggcaaaacttcttcaatagttgcaataagaatactatggcccctccaaagatggttgtgaccctttagtccattttcatgctgtacctgagactgggcagtttacaaaagaaagaggtttaatggacttaagttccaygtggctggggaagcctcacaatcatggtggaaggcaaggaggagctagtcatgtcttgcatggatgccagcaggcaaaaaaagacagagcttgcgcagagaaactcctgtttttaaaaccaacagatctcataagactcattacctatcacaagaacggcacaggaaaaccccacccccataattcaatcacctcccaccaggatcctcccatgacatgtgggaattatgagagttacaattcaagatgagatttgggtggggacacagccaaaccatatcactggccacgcttatgttacatgcccataactgagtcagcagggtcacctcctctaactacatagggtgaaaatgaa

SEQ ID NO: 381775 - DNA, 524 bp, Homo sapiens
tcagacttggaatgtatactttagagataactgaccttttttctattatattctcaaaccaacaaaacagtatcacttagttcattttgacagtgagagtaataatctctgaataaaactgaaaagtatagagtgatcaaatgaactcttccttaatggaccagataaccaggtatctaaattgaactgaatctcacaagttgatcaccagggattatcaggtacatgtgatagattacaacccggtgcttatctccattccctcccaaaaccacccctaaatgacagtaagtgagaggcagagataagttcatgagaagagagaatggaagaggacaaaattcatggaaaacatttttggaaaatggcccaatgatgagtgaattttcaaagcaggggcagacaaaacatmaacgtctatagacagaattgtcaggaagtaacaaaccagtatgcggcaaagaacttgaggaaagtgtaagttaagacacagttaagtggggtttggatgagaagacaggatg

SEQ ID NO: 381776 - DNA, 572 bp, Homo sapiens
aaagtgtaagttaagacacagttaagtggggtttggatgagaagacaggatggaggcagcactgaaaactgggggatggcttgcaagtcattttaaggagtaaaactccatatctttgctaaaccatgaagcttgctatgcccctcctcccacctcagcaaaggttaagcttgagaagatctgcactcggggacactaggaacagtgaccaggtggagggactgactgaaaaagagaaggactaagtggaactatgcactccacagccccttcctctgctgggttcccagagcactggccagtaggagattggtactggagacttttctggagaaactaacctgcccaagaaaagagatctacagataccaaaactggaagacaaggtgacttctgaaaagaggtggtcatcttatgcgaggccaccaattgacaaagccttgctttgtgcctcctcatgaataaagatgacaagatgaacaccaagcaygtgaaatagggtccagcatgacagacaggaacttcaggagggaacagggtcaatgcagggagaagacttcaaatatacataa

SEQ ID NO: 381777 - DNA, 607 bp, Homo sapiens
caattaaagaatgagagtatactctggtacactttatctgtgttctcagatgaacagggcatgtgtatatcaggaatctcagagcctcccccaacagcttccttatcccagcaggktcagccagatccttggagggctattgccttgatcttagcaggaacattccttctttaatccaagcagtcgcaaactctaccaagggaatactattccttttgaggccgcagaccacacccattcttatctgtaggtgcaaccgaagatgtctctacagctagtgattgtgccaagagctcccagtgaaaggcaatccatttggtgcagggatctgctcccataataccaggggctgtatcttacattagtaattcataggcttggctcttgttaagttgacatccatgcattgtgacagcctcaccttgaaaatttatatttattgatttaagaaagagcacctgggatgatgatattttttatcacctgagcaaaaggtgagaactcattttccctttatagtttttaaggcactggacatatactgcccacagcttatgctttggggggcaataataacttcctgtatcttaacttttgtttgagtgca

SEQ ID NO: 381778 - DNA, 615 bp, Homo sapiens
gtgaaaggcaatccatttggtgcagggatctgctcccataataccaggggctgtatcttacattagtaattcataggcttggctcttgttaagttgacatccatgcattgtgacagcctcaccttgaaaatttatatttattgatttaagaaagagcacctgggatgatgatattttttatcacctgagcaaaaggtgagaactcattttccctttatagyttttaaggcactggacatatactgcccacagcttatgctttggggggcaataataacttcctgtatcttaacttttgtttgagtgcagcaccccactcacataacattgaaaatattttgtaatattcatgtataatttttattctgatttttacctgaataaactactcagacatcatagattatcatttcaatatttaggaattaaaactttcctattatgcagctattatgtatgtgtaaagttcatattagatgttatggaaatgaagacaaacaacacaaaacactggttataaggattttataatctttatttatataagattcaattatgtcaaaactactatgaaatataatatatcctaatagataagaggaacgagtgcagcat

SEQ ID NO: 381779 - DNA, 566 bp, Homo sapiens
tgcagctttgttacataggtatccatgtgccatgataatttgctgtacccacatggtccttttctttacataaatcaattatgcatgactttagtgcataaaagcatttttcttcctatggtgtgaatatattaaggatccagggtcatttcaaaatayagtttttttgtgtgtgataaaaggaaatgttttcaaatattaaaaagaataaaatcaacaaaaacccatttattttgatattaatcaaatacctttaccccccatagccaaaggtaatttttaaagaaactcgtggaattataacatatgggcagaaaatgttgcattttacaaattttaaaaagcagtgcataatatcaaacccaaaataaatgtaactatacagaaaggattgaataacaggtacatctgtcaaacaagagggtctacatttatccaagggttagtattgctttgtgagtattgtgaagagaatatgcattaatagtataaaagttctattgtatacatttacttgttgtcaaatgagtttttgttgttatattattgaatgaatattatgtttt

SEQ ID NO: 381780 - DNA, 569 bp, Homo sapiens
aaaatgtggatgaaggaaaaatggtgatagaatttattttaacagtatagccaagtttcccatgtccagcatgaataagaacagayaagcctttactgaattctgtctaaataaaaataaattctggctaggtgtatgatttgttatacttctattactcagcttttaactcatcatgctactgtgattaaatacaaattaagcataacaattgatatttcatataatttcaattcaaatgttataaaatcatgctagctattgcctaatatttaaacatttttattctatattttaaattgacacatagtaattacaaatatttatgcagtacaaggtgctgtttagatatatgtatatattgtataatgctcaagtcagggtaattaacataccacctcaaacatttgtcatttctttgtagtgggaacattcaaatcctttctcataggtattttgagatatacaatacctattaccgattttttttacaaaagaatggtttaaaggctcccactaggtagaagatgtaaatgaaaactcatttgcaaaggcattaacctcaatat

SEQ ID NO: 381781 - DNA, 569 bp, Homo sapiens
aaaatgtggatgaaggaaaaatggtgatagaatttattttaacagtatagccaagtttcccatgtccagcatgaataagaacagacaagcctttactgaattctgtctaaataaaaataaattctggctaggtgtatgatttgttatacttctattactcagcttttaactcatcatgctactgtgattaaatacaaattaagcataacaattgatatttcatataatttcaattcaaatgttataaaatcatgctagctattgcctaatatttaaacatttttattctatattttaaattgacacatagtaattacaaatatttatgcagtacaaggtgctgtttagatatatgtatatattgtataatgctcaagtcagggtaattaacataccacctcaaacatttgtcatttctttgtagtgggaacattcaaatcctttctcmtaggtattttgagatatacaatacctattaccgattttttttacaaaagaatggtttaaaggctcccactaggtagaagatgtaaatgaaaactcatttgcaaaggcattaacctcaatat

SEQ ID NO: 381782 - DNA, 569 bp, Homo sapiens
aaaatgtggatgaaggaaaaatggtgatagaatttattttaacagtatagccaagtttcccatgtccagcatgaataagaacagacaagcctttactgaattctgtctaaataaaaataaattctggctaggtgtatgatttgttatacttctattactcagcttttaactcatcatgctactgtgattaaatacaaattaagcataacaattgatatttcatataatttcaattcaaatgttataaaatcatgctagctattgcctaatatttaaacatttttattctatattttaaattgacacatagtaattacaaatatttatgcagtacaaggtgctgtttagatatatgtatatattgtataatgctcaagtcagggtaattaacataccacctcaaacatttgtcatttctttgtagtgggaacattcaaatcctttctcataggtattttgagatatacaatacctattaccgattttttttacaaaagaatggtttaaaggctcccactakgtagaagatgtaaatgaaaactcatttgcaaaggcattaacctcaatat

SEQ ID NO: 381783 - DNA, 560 bp, Homo sapiens
taattatatcataaaacagcttcaagccctctgtaagcatgtctacatatatttatttgctaatttttgcaaatattgctgaaaatattttggactaatgaatgaaagccctgtttccacaattacctaaggataaaagttaaaatttggatgtcttgggaatttaatggtttctagtaaatcttttatagtttcaaggcaatttaaatttaattactaaatctttctgtatgagctgaagctgtatcattttaacagcttttaaaaacccactgagttttctttctaaacctctaaaatgcagaagaagtaatttgtttttcagacaaccttctgggccacatctttctcaatgaaggagcaatcgccccacctggtatccatgcattctataattatattgtagaccaacatttttaaaaattgcagtgactatatgagaatagaataatagaaaaatgggacaaaaagcagaccccrgaatgagaatgaattccaaatcgatggggagaattggatatgcaagtgaaaaatggtaaatttagaaccttacctcatac

SEQ ID NO: 381784 - DNA, 456 bp, Homo sapiens
acttgctggtaatgattctgttgtttactaatgccctcaaagatcgaagctatttttctgttcttgaatctttcactggaggacattttactgatatatttcttgcctctgtcatatgaaagcaatcacagctctagacatcatgttcacctattaaaagaaggaaaaggtgagatttgatggtatgagtcacawctatccctttaaaaaatttttggtatttatttatttatttatggagacatggttttgccatgttgctcaggctggtctcaaactcctgagctcaagtgtccctcccaccttgaccttccaaagtgctgggattacagccatgaaccacccactgcacctgacccacaactatccctttgacctggaccacaaaagccacagtggaagccttttaaaaatctctagttctgtttttcattgtctagaagttggttgcatggc

SEQ ID NO: 381785 - DNA, 520 bp, Homo sapiens
tatcttcatccatttattcatgtggtaacagtaattaaacacctaatattttcacggtgtcagtattaggggtactggggtctargccttgggttgacatcaagaaatagaaagaatagtagagtaggcaactataacagactacattaaattaaaataaattgaaagccacagagataccaagagtcataaaggcgttctagaggaaaaaaaatagttctaatatggcatatggaaattatagaagggggaatttcattttaatgctgtaagctttggataattgaagacaaggcaatatgtattctagacatttacatgtgagggaatagtttaaactgagttattaaaaaaggaaaagtatatggtgcattcagaatataatgtagttggacaagtctagaatataaagtatattgataggatgaagaatgaggtgaaacgtcttcagacatagtttgggaaccatgtgcagaattggaattttattgtatttgtacaatggtgaatcaatattttc

SEQ ID NO: 381786 - DNA, 553 bp, Homo sapiens
accactctgtgagctatttgatagattctccgaagcttcttactggttgtctaattgcttgctgctttatggatgccctgttttagggtcaggaatatttcgatttactcaaaatcaatggtgaatataccattacttttgatcattagctatcttcatccatttattcatgtggtaacagtaattaaacacctaatattttcacggtgtcagtattaggggtactggggtctaggccttgggttgacatcaagaaatagaaagaatagtagagtaggcaactataacagactacattaaattaaaataaattgraagccacagagataccaagagtcataaaggcgttctagaggaaaaaaaatagttctaatatggcatatggaaattatagaagggggaatttcattttaatgctgtaagctttggataattgaagacaaggcaatatgtattctagacatttacatgtgagggaatagtttaaactgagttattaaaaaaggaaaagtatatggtgcattcagaatataatgtagttggacaagtctag

SEQ ID NO: 381787 - DNA, 520 bp, Homo sapiens
tatcttcatccatttattcatgtggtaacagtaattaaacacctaatattttcacggtgtcagtattaggggtactggggtctaggccttgggttgacatcaagaaatagaaagaatagtagagtaggcaactataacagactacattaaattaaaataaattgaaagcmacagagataccaagagtcataaaggcgttctagaggaaaaaaaatagttctaatatggcatatggaaattatagaagggggaatttcattttaatgctgtaagctttggataattgaagacaaggcaatatgtattctagacatttacatgtgagggaatagtttaaactgagttattaaaaaaggaaaagtatatggtgcattcagaatataatgtagttggacaagtctagaatataaagtatattgataggatgaagaatgaggtgaaacgtcttcagacatagtttgggaaccatgtgcagaattggaattttattgtatttgtacaatggtgaatcaatattttc

SEQ ID NO: 381788 - DNA, 633 bp, Homo sapiens
ctgttttctgaattatgattgtggcaaaccatttatctggtaacttcscagaacacagtagccttattgaactgcaggcatgaggccaaatggatcctttgaataagaacgtgtaatctaggagtgtaaaattttccaatgataagactcattggttttgaagaagcctttgggactagataagaattcagggaaaggttagcatagttcctctcaacaccgtttatatggtggattgttaaatatgtatgtttcctgtagtggtacattagaaatatttaattatatgataaatatgtgagtaggaaagaagctaggttcacagtgagccacatctaggccagctaaagaggatggcaatgaaaaatatctgtagtcaatgggtgtctaaaaatcgaatttaagagggaattgtttctgagcaaagaatgatacctgcaattagaacagatttcttcttccccgcaccttgctccccttcatacaactttggcataaccatgttcctcaaggttgtgatttttatggaagaataaaagagactgtatgacagagatatcttcaatctcaatctgaacctgtcataaccacaatccatttcactacaaaatctagaatgtttacaatactctt

SEQ ID NO: 381789 - DNA, 633 bp, Homo sapiens
ctgttttctgaattatgattgtggcaaaccatttatctggtaacttcccagaacacagtagccttattgaactgcaggcatgaggccaaatggatcctttgaataagaacgtgtaatctaggagtgtaaaattttccaatgataagactcattggttttgaagaagcctttggractagataagaattcagggaaaggttagcatagttcctctcaacaccgtttatatggtggattgttaaatatgtatgtttcctgtagtggtacattagaaatatttaattatatgataaatatgtgagtaggaaagaagctaggttcacagtgagccacatctaggccagctaaagaggatggcaatgaaaaatatctgtagtcaatgggtgtctaaaaatcgaatttaagagggaattgtttctgagcaaagaatgatacctgcaattagaacagatttcttcttccccgcaccttgctccccttcatacaactttggcataaccatgttcctcaaggttgtgatttttatggaagaataaaagagactgtatgacagagatatcttcaatctcaatctgaacctgtcataaccacaatccatttcactacaaaatctagaatgtttacaatactctt

SEQ ID NO: 381790 - DNA, 633 bp, Homo sapiens
ctgttttctgaattatgattgtggcaaaccatttatctggtaacttcccagaacacagtagccttattgaactgcaggcatgaggccaaatggatcctttgaataagaacgtgtaatctaggagtgtaaaattttccaatgataagactcattggttttgaagaagcctttgggactagataagaattcagggaaaggttagcatagttcctctcaacaccgtttatatggtggattgttaaatatgtatgtttcctgtagtggtacattagaaatatttaattatatgataaatatgtgagtaggaaagaagctaggttcacagtgagccacatctaggccagctaaagaggatggcaatgaaaaatatctgtagtcaatgggtgtctaaaaatcgaatttaagagggaattgtttctgagcaaagaatgatacctgcaattagaacagatttcttcttccccgcaccttgctccccttcatacaactttggcataacyatgttcctcaaggttgtgatttttatggaagaataaaagagactgtatgacagagatatcttcaatctcaatctgaacctgtcataaccacaatccatttcactacaaaatctagaatgtttacaatactctt

SEQ ID NO: 381791 - DNA, 630 bp, Homo sapiens
cacttttaataaattcccaaaccaaatcaaatcaaaatccaggtctatggaagaaagaaatgaagactgtgcaagtcataacagcaatagtgaagccccaatgcaaatattgggtaagctttaactcatctaatgaacatttatttagtgtcttgtagttttgctaggtaaggtgaggaatagtattaacaggaatacagttcattctctcaagaagctgacttgctcaggagaaataaacccatcacatggaacgtgaaacatcagaaaagaagcgcagtttacctctgaaacacttggggatcaagtcagcagcatatctgaggagraagagagagagaatattccaaaatcctggctactggaggactattagaagtgagtctatgaatgtcaaagcaaaagacagtcattacatgagaaaattattgacctaggagtctttttattcatcctgctaataaaagaagattgtttacagaatctacaatggggttgaacctacaagtatgaattaaatggattagaggcagagtatgacgtctagataaaacaatgcagatgacaaagacaatagttgtattggcatatatacaagcaatgacagtgaattaattaaaaaactcagca

SEQ ID NO: 381792 - DNA, 607 bp, Homo sapiens
agtatttatattgtaccaatggttgctatgtatcactccaaatggttctctcaggtggtcttgtttggatgcaatagcagtcaaaatcttcagatttcctgaagggaaattcaggagatgatccctctctaggaatttctcatgattagcccagaacagtatatgcaaatatatgctgtagaggtttggtcaaaaatctccttttgactaasgggacaaatccaactttacttcacaggtctgttttttaagcattctcattttaacgacatgaatccctgttgtgaaatcgaaaattttagaggctattggaaattataaatctatttctatgacaaattttgacttccaaaaactaactgaacaattttagagaatgtttacaaggtatacataaatactaaatgtaatattattttatagattttataaattcgattataaatgcaaatttttagagttgtgttaatttacaaaattttaacttaaaccctaaagcctttcaatgacaattgtaaattcctctttcatttatttaagatttggactacatttaatgaataaatgcaaatacttgcagatttgatatgtcccaaatttgcaaatt

SEQ ID NO: 381793 - DNA, 607 bp, Homo sapiens
agtatttatattgtaccaatggttgctatgtatcactccaaatggttctctcaggtggtcttgtttggatgcaatagcagtcaaaatcttcagatttcctgaagggaaattcaggagatgatccctctctaggaatttctcatgattagcccagaacagtatatgcaaatatatgctgtagaggtttggtcaaaaatctccttttgactaaggggacaaatccaactttacttcacaggtctgttttttaagcattctcattttaacgacatgaatccctsttgtgaaatcgaaaattttagaggctattggaaattataaatctatttctatgacaaattttgacttccaaaaactaactgaacaattttagagaatgtttacaaggtatacataaatactaaatgtaatattattttatagattttataaattcgattataaatgcaaatttttagagttgtgttaatttacaaaattttaacttaaaccctaaagcctttcaatgacaattgtaaattcctctttcatttatttaagatttggactacatttaatgaataaatgcaaatacttgcagatttgatatgtcccaaatttgcaaatt

SEQ ID NO: 381794 - DNA, 569 bp, Homo sapiens
aaatacttccaaatttgttgattatttttggcccattttaccatctccaattttgatttaaaaaaatattacttgcaattattcattctttatagtttctaattcatgcctatattttaaggctgccattttatttatcttatatattaaacatagtgtatagttatcatataatctgtctggtaatgccaacatatagaaatatttttgattttactcatactatcccatatgaaaatacaaataaataaatgtttgagggcttttgtttcacttttgctttaaaagtagattcatatgaactggtttatatctgccttattcattgactaatatccacaaaatcccttttaagtccattagtgaaactataaaaatcattatttttactggttgtataacattccactaaattagagcawtagctatccaataattttcagattttcccactacagacaatgttgtactaaatataattttatgtataagataaatacatgatataaatatattttatatatcatatacatattatatgatatatttatattatgtatgatacataa

SEQ ID NO: 381795 - DNA, 567 bp, Homo sapiens
ttttgaaatgaatttctccctggtagactacaaacagcatgagggaagaatcatacctatttcgtttgcttttgcatccttaatgacataaataatgccaggcatggtgttgactttcaacaaatacttacagaaaaaaatgaatattattttatattgaaaaaaagctatcagaattgtagctgaaattacattggatttattcagagttttgagataatttacattgatatgattttaggtttctgcatccrtgggatgtttttcatttgtttatatcttttttgttaatagtagttttaacttttatacaggtacaggacgctgttaacagtattgttaagtatgtcataattgacattgtcactgtgttgaagtacatttttctcttttctattttcaaactagtcattcgacaaaatatttcaatccaatacatttttatctcttgaattttaagtagaaattatattagataaactaatttatgtctatagttgttattttgttttcttatcttatttttttttacaatctcccaaatattttgataatgatgctaaccag

SEQ ID NO: 381796 - DNA, 623 bp, Homo sapiens
atctaaatcagttaacttcaaatatacaattttaagtgaataccaatatgttgcaaaaattgggcagtacctgtttgctagtgcctatataagtaccagtaacaacatgtatttttttaggaaagcatgtttgtaaaatatgtataaaatcccaaatggagagaaacatattcactcagcatctcaggtaaaagatagaagacataagatggaaatmaaaataattgggtgggaatctctgcagtacatctgcaaagcttttctgtttttcttttctttcattttttgtttgtttgtttttgtttttcttgagacagagtctcattctgccacccaggttggaatgcagtgacacgatcttggcaaacttttcctaatagatgaaaatatatgagagtatacattatagtggttaaattagggttatcattatatggctgtctgctatattagtctctatgtgtttttatctgtgcaatcacaattaaaacaaaaaagatgatattaagacattatcgtaacagaagcagatatttatagctactaattagggatatttacatccaattgtaccttctacaaagtaaagcagcaacaagcagttgtattttattttaaatcag

SEQ ID NO: 381797 - DNA, 397 bp, Homo sapiens
cctttaatatttttctgggcattaaaatgaatggagggctggctatcaacttgaacatacttgcaatgaaccattccrtacgaaagaaagcctccaacccatgtcgaaactgaaacacatcactaaaccacgctcgaatcttatgacactggggcaacattttctatcaagacttacataaaaatagtaatacaaaatcctctagagctactctttactagtaaaattcttctaatcatttctgagagaaaagaactcaccatcccatgtttgaacttcttgtcactaggttagaagcccatttttctatctatttcctgtctgtgcctatcctgtgacacctcaccttaacaattaaactctctgatatggaacacaactaaaattcattttagaa

SEQ ID NO: 381798 - DNA, 630 bp, Homo sapiens
tacaatgaaatctccctttttatattagttgtaaasctactatgaattaggctttagaatatttttatattctaataaattcaatgaattttcagggcaacaaaaacagtaaaattgctattactatattctctagaacttaaagaaatttaaagaaaatgtattatttttaaataaacattcttattctctaatatagatttaagtcttgaaattggaagtaaaactctacaaactgtgaaacataaaagcaatataatctgaagctattaaatctgtttatcaattaaaaatcacattgaaataacttaattatcaatttacagattaaactatagagtcactattaaaaattaatcatttctacaagcttaaaagaatttagtcatcatatttagtaattttttggaatacaaaggcgacagtattaattttcacatcactgataaaagcaatttaaattacactagcattgaaatttcagttttaagttgtaacgttagtgattattaatcataatcaatgtaaatttgttaatgccaattgagtaggttgatgacgatgctcatttatgaatgatatacaatacttttcagatgtaataaaatatattaaggttttttttacttt

SEQ ID NO: 381799 - DNA, 570 bp, Homo sapiens
gttgctcttcattccctccgtgtgtcttagattccatacggtataattttctatatgtccaaaatattctttttagtatttccctaatataaaaatactgatggtgaactttctattttctctcaaacagccttcagttcacctttattataaaaactacttttatttgaaattatcttccagttttctggtttcattatgaaaatagctcttaaacccagtattgctcttatgaaggtaaaatttatctttctgtggatggttttaatattttattatattttagaaggtttaaaygtttcgtccagctgtggtttactttatatttattatttagttaatatttagcttcattttgtatttcaacagtctctggaaattctccaccattatgttttcaaatattgtttcaaatctactctttcttctctttcttcctgggactccatttgcattcgtattaaacctttccatcacatctcctgggcttcaaattattttctatattattttttcttttggctctttgtggtggagtgcagacagattctctgaactatcttctagctc

SEQ ID NO: 381800 - DNA, 570 bp, Homo sapiens
gttgctcttcattccctccgtgtgtcttagattccatacggtataattttctatatgtccaaaatattctttttagtatttccctaatataaaaatactgatggtgaactttctattttctctcaaacagccttcagttcacctttattataaaaactacttttatttgaaattatcttccagttttctggtttcattatgaaaatagctcttaaacccagtattgctcttatgaaggtaaaatttatctttctgtggatggttttaatattttattatattttagaaggtttaaacgtttcgtccagctgtggtttactttatatttattatttagttaatatttagcttcattttgtatttcaacagtctctggaaattctccaccattatgtwttcaaatattgtttcaaatctactctttcttctctttcttcctgggactccatttgcattcgtattaaacctttccatcacatctcctgggcttcaaattattttctatattattttttcttttggctctttgtggtggagtgcagacagattctctgaactatcttctagctc

SEQ ID NO: 381801 - DNA, 574 bp, Homo sapiens
aaattgttgaattgattaaatatgaagtcattagaaattcaggtgtcagattatgtcaaacttagggaagctattttaaaactatatacacaaacatatatttcaaattatatctgtagtttataagcatataggtttcatataaataatatatgcttttaaatcatagatatatagtttgcctatagattaaaacatgcatagttttaaaactcacatgtgcacagtatttgagataagttatttatatttttctttcaaaatcaatttatgaaacytacgtttctgaaaatagaaatattggaaactaaagtacttacaaactaataaatccttatagaaaattttagaattattatttttttcaatagaatccctttaacccttttattttgcatattgagcttcatgaataacatcatgctgcagaagcagcgaccaggaaaagttatctcctacgaagcatagcaacagaggaagatgttatacagtgttttcattttcaattttcctactgagctttaagattttcatgtaattttcttcaataaactgaagagtctttctttaacat

SEQ ID NO: 381802 - DNA, 638 bp, Homo sapiens
agctgctgactgtgaaattttactatacctacatctacacctgtgaaattttactactacctttcttcaggtgaacatgtaggcattaagaaaggtaatcgttttattataatatggagtctgtttttatgtttttcttttttaactcattttaggttcaagggtacatatgaaggtttgttacatagataaacatgtgtcaagggtgttcatttacaaatttcttcatcacctgggtattaagctcagtacctaagagttctcttttctgcttctctccctccycccaccctccaccctcaagtagaccccagtgtttgttgtttccttctttgtgttcatatgttcttatcatttagctcccacttataagtaagactatgtggtatttggttttctgtttctgcattagtttgttaagaataatagcctccagctccatccatgttcccgcaaaagacatgatctcattcttttctatggctgcatagtattccatggtgtatatacaccacattttctttatccactttgttatgattggcttattcatgatatgcagtcttgttccaacatctcggagaacgttgcccacagcatgaagttctgaacgtcttgtcctggtttgcagttgaaaa

SEQ ID NO: 381803 - DNA, 638 bp, Homo sapiens
agctgctgactgtgaaattttactatacctacatctacacctgtgaaattttactactacctttcttcaggtgaacatgtaggcattaagaaaggtaatcgttttattataatatggagtctgtttttatgtttttcttttttaactcattttaggttcaagggtacatatgaaggtttgttacatagataaacatgtgtcaagggtgttcatttacaaatttcttcatcacctgggtattaagctcagtacctaagagttctcttttctgcttctctccctccccccaccctccrccctcaagtagaccccagtgtttgttgtttccttctttgtgttcatatgttcttatcatttagctcccacttataagtaagactatgtggtatttggttttctgtttctgcattagtttgttaagaataatagcctccagctccatccatgttcccgcaaaagacatgatctcattcttttctatggctgcatagtattccatggtgtatatacaccacattttctttatccactttgttatgattggcttattcatgatatgcagtcttgttccaacatctcggagaacgttgcccacagcatgaagttctgaacgtcttgtcctggtttgcagttgaaaa

SEQ ID NO: 381804 - DNA, 638 bp, Homo sapiens
agctgctgactgtgaaattttactatacctacatctacacctgtgaaattttactactacctttcttcaggtgaacatgtaggcattaagaaaggtaatcgttttattataatatggagtctgtttttatgtttttcttttttaactcattttaggttcaagggtacatatgaaggtttgttacatagataaacatgtgtcaagggtgttcatttacaaatttcttcatcacctgggtattaagctcagtacctaagagttctcttttctgcttctctccctccccccaccctccaccctcaastagaccccagtgtttgttgtttccttctttgtgttcatatgttcttatcatttagctcccacttataagtaagactatgtggtatttggttttctgtttctgcattagtttgttaagaataatagcctccagctccatccatgttcccgcaaaagacatgatctcattcttttctatggctgcatagtattccatggtgtatatacaccacattttctttatccactttgttatgattggcttattcatgatatgcagtcttgttccaacatctcggagaacgttgcccacagcatgaagttctgaacgtcttgtcctggtttgcagttgaaaa

SEQ ID NO: 381805 - DNA, 638 bp, Homo sapiens
agctgctgactgtgaaattttactatacctacatctacacctgtgaaattttactactacctttcttcaggtgaacatgtaggcattaagaaaggtaatcgttttattataatatggagtctgtttttatgtttttcttttttaactcattttaggttcaagggtacatatgaaggtttgttacatagataaacatgtgtcaagggtgttcatttacaaatttcttcatcacctgggtattaagctcagtacctaagagttctcttttctgcttctctccctccccccaccctccaccctcaagtagaccccagtgtttgttgtttccttctttgtgttcatatgttcttatcatttagctcccacttataagtaagactatgtggtatttggtttyctgtttctgcattagtttgttaagaataatagcctccagctccatccatgttcccgcaaaagacatgatctcattcttttctatggctgcatagtattccatggtgtatatacaccacattttctttatccactttgttatgattggcttattcatgatatgcagtcttgttccaacatctcggagaacgttgcccacagcatgaagttctgaacgtcttgtcctggtttgcagttgaaaa

SEQ ID NO: 381806 - DNA, 398 bp, Homo sapiens
ggttacaatctaataacggctcttttatggcttttccttagaaacatcattttttttcctccacagtcatcctgatttctaccggagataatcaaagaaagacagattttttgtaaagtaaatagagttttattagatttgacctgatcttttacataagtgcaatgagactagtaactgaccacataagaatctcaggttgaacttttaaaaatatgcagggcaagaaatccaaattaaagtagacttcagactttgtgggcagtacctayaaacaatttaaaatatggcatcccattcaaagccttggtaatacaactaatgtttccaattgtatcctactataaagagaacttatagcttaagataaaaattatttgtaaatctgaaaaacttat

SEQ ID NO: 381807 - DNA, 553 bp, Homo sapiens
acagaaaaatcaaatggatagtgcattcagtttcctattattaacatcttcttggttagtatggtacatctgctacaattaaccaagtaatactgatgcatttttattaactaaagtccatgttttattcagatgtctttcatttttaaccaatgatcttcttctgttccagtatttcatccagtatgcatgacatttagtcctcttggctccttaggctcctcttggctgtgacagtttctcaggttttcttggttgtggtcattttgaaagctatgaggagtactggtcaggtgttttgcaggaygcccttttattggaacttgtctgagattttgctcaggattagactagggttacctattttgggaggaagaccacatggataaaatgccatttttatcacatcatatcaagggtacatactattcacatgatttaccattgttgatgttgaccttgaccacatggttaaggcaacgtttgtcagatttctgcactgcaaagttactcttcctctggccctgccttgctgaactctttggaaggaagt

SEQ ID NO: 381808 - DNA, 601 bp, Homo sapiens
gtgcagccccagctgtgcctccttgctacagctggcatgatggcagtggccgctccagatggcccctgctgccatcagtatcactaataaaggaacatttttttcgttgatttttcagcttggaatttctcacatcatgcagagtatggatactcatttctggaatttttaaaaggtaacttttttctaccctaactcagaaagaaaacatttccctgagtttagtgaactgtttttctcagccacaaaagtgcagccctcgatgagagggcrcttgtgtgtatgtaaatatcaatgcccacccattttctagtctaataatgctccaccagtctctgcataattagcttctgtactaactgctcatattctttcttcatagtactaacttctttgtttattgccttaagcatattgataattatttattaggattgatcagaattctgctttgtgtattatatgtagttcaacttgttgtctttcttttatagtatttgtatccatctggtatttagatattttagctcacaaagtcatattctgatacatgataatatgatgtatcagctactatgtctggcaaagtttcttgaggaag

SEQ ID NO: 381809 - DNA, 652 bp, Homo sapiens
tgaacagtgaatgctattttatactgaaactgcagcaaatattgttaaaatttgctttaggctatctatcatcaaaatgaacttataccgctaggcttagataaaataccaagaaatactactgctagaggcaaacggcagctagtaggaaccggtccwtttggaagttagtcatattgtcggaactacaaatagatatttcaggattcagtaaacaatttggtggatgaaaatttggagagacaatatgtgaatagttcatgctgtcattgtcggttcatgtttatctcttgacatccctcagaattctctctttctttcccagagaagataagaagttccccattattcatggcaaccaagggcttggctctgaatgtaacagagaaatgtgcagagaaagcattactaggcctggcctctcactgcatttcagagctcagcatgtgtgtgtgtgccattgtggatggcatgaccaagtgtggaaagcagagtaactaaagaaagtcaaattctatattctgactgtgcagttgcttcaaaacattatagaataatccagagctagggccaaacagtactgccacttaggggcggagtgtcaagcagggcacttgagggacggtgatagaattctaaatttacaatttta

SEQ ID NO: 381810 - DNA, 652 bp, Homo sapiens
tgaacagtgaatgctattttatactgaaactgcagcaaatattgttaaaatttgctttaggctatctatcatcaaaatgaacttataccgctaggcttagataaaataccaagaaatactactgctagaggcaaacggcagctagtaggaaccggtccttttggaagttagtcatattgtcggaactacaaatagatatttcaggattcagtaaacaatttggtggatgaaaatttggagagacaataygtgaatagttcatgctgtcattgtcggttcatgtttatctcttgacatccctcagaattctctctttctttcccagagaagataagaagttccccattattcatggcaaccaagggcttggctctgaatgtaacagagaaatgtgcagagaaagcattactaggcctggcctctcactgcatttcagagctcagcatgtgtgtgtgtgccattgtggatggcatgaccaagtgtggaaagcagagtaactaaagaaagtcaaattctatattctgactgtgcagttgcttcaaaacattatagaataatccagagctagggccaaacagtactgccacttaggggcggagtgtcaagcagggcacttgagggacggtgatagaattctaaatttacaatttta

SEQ ID NO: 381811 - DNA, 652 bp, Homo sapiens
tgaacagtgaatgctattttatactgaaactgcagcaaatattgttaaaatttgctttaggctatctatcatcaaaatgaacttataccgctaggcttagataaaataccaagaaatactactgctagaggcaaacggcagctagtaggaaccggtccttttggaagttagtcatattgtcggaactacaaatagatatttcaggattcagtaaacaatttggtggatgaaaatttggagagacaatatgtgaatagttcatgctgtcattgtcggttcatgtttatctcttgacatccctcagaattctctctttctttcccagagaagataagaagttccccattattcatggcaaccaagggcttggctctgaatgtaacagagaaatgtgcagagaaagcattactaggcctggcctctcactgcatttcagagctcagcatgtgtgtgtgtgccattgtggatggcatgaccaagtgtggaaagcagagtaactaaagaaagtcaaattctatattctgactgtgcagttgcttcaaaacattatagaataatccagagctagggccaaacagtactgccacttaggggyggagtgtcaagcagggcacttgagggacggtgatagaattctaaatttacaatttta

SEQ ID NO: 381812 - DNA, 544 bp, Homo sapiens
tttttaataaactttcactcctgctctaaaatttgcctcagtctctcactctctgccttatgccccttggtcaaattctttctcctgaggaggcaagaactgaggttgcagcagacctgtatggctacaccaccagtaacatggggaccccaacttgaagctcatcagtcagaagttctggaggctcagaattaagactggtgtgtggggaggagcagttagggactgagccctcaatctgtgagatctgacactgtctctgrgcaaatactgtcagaactgaattagaggacacccagtctgtgtccactacttggtgtctggggaaaaaaaacccacacattttgttacagaagtcttctgtgttgatgattgttacgctgtgagagtagagaaaaaacagagtttttttctacacaaggtcatataagtcttctgtgttgattgctgtggtataagagcagtggagaacagcttgaaggttttttcaaaacagtatgtcttgtttttttttgccaaattttacaataatatttatgttaat

SEQ ID NO: 381813 - DNA, 321 bp, Homo sapiens
aattgcttgatatacaccacagattgaggtctgtaactgtggctgcctgctatctcaagataaatgaatacagcgtaagaataattgtggraaaaaaaaaacaagaaaactcatgaagccattgctgaagctacacaccaacaggtgcaaaaaccttaacactttttaatgaaatacctttttatctcatattgaaaatgcagctattatgtgggtataaaactgctacatgcctaaagactgtagtatgattcaagaaaaaatgaagtcatatgacaactttaaaaaaaaggaaggtgaagaatctaaagctggattatt

SEQ ID NO: 381814 - DNA, 321 bp, Homo sapiens
aattgcttgatatacaccacagattgaggtctgtaactgtggctgcctgctatctcaagataaatgaatacagcgtaagaataattgtgggaaaaaaaaaacaagaaaactcatgaagccattgctgaagctacacaccaacaggtgcaaaaaccttaacactttttaatgaaatacctttttatctcatattgaaaatgcagctattatgtgggtataaaaytgctacatgcctaaagactgtagtatgattcaagaaaaaatgaagtcatatgacaactttaaaaaaaaggaaggtgaagaatctaaagctggattatt

SEQ ID NO: 381815 - DNA, 616 bp, Homo sapiens
catgggtgtccaccaccactctccccacctactacctctctctcccccctttacaggcacctccccataagtgttttgcgtgttttgaaattctgccttaatgtctgtttctcagaggacctaagctgwtacattacattatgtcttcaccaaaccaaaactcttgaaaaaccaactctagcacagagtgaagcaaatcattaatctcttccttctatggcatactagaaaggaatcccatgcacttagagaaaaataatttgaaaacaaacaaataaaaaccaaaagctaaactcatcttaaggccaaccatattttgataagccaacacatatgcaattagaaaatgacatatcaaaaattttaatgtcattaaaaggtaaattatttactctggtatgtagatcaaggtattaaatctatagtatatctaaatctagaaacacaagaaattgaggggagaagctaaaatttactttggtctttataatcccctgctttcggtgggcaagagaaaaagttggggttacatgtcatcctgttaattctgaatgatctttgttttgggagctgtctgagatagtgttattatctcccatagaagcaaagttttcgc

SEQ ID NO: 381816 - DNA, 616 bp, Homo sapiens
catgggtgtccaccaccactctccccacctactacctctctctcccccctttacaggcacctccccataagtgttttgcgtgttttgaaattctgccttaatgtctgtttctcagaggacctaagctgttacattacattatgtcttcaccaaaccaaaactcttgaaaaaccaactctagcacagmgtgaagcaaatcattaatctcttccttctatggcatactagaaaggaatcccatgcacttagagaaaaataatttgaaaacaaacaaataaaaaccaaaagctaaactcatcttaaggccaaccatattttgataagccaacacatatgcaattagaaaatgacatatcaaaaattttaatgtcattaaaaggtaaattatttactctggtatgtagatcaaggtattaaatctatagtatatctaaatctagaaacacaagaaattgaggggagaagctaaaatttactttggtctttataatcccctgctttcggtgggcaagagaaaaagttggggttacatgtcatcctgttaattctgaatgatctttgttttgggagctgtctgagatagtgttattatctcccatagaagcaaagttttcgc

SEQ ID NO: 381817 - DNA, 562 bp, Homo sapiens
tttttctactagagagtaagccttattacattcagggagtgtctgtcttgtttactgctataactccagtgtcccaagcagtacctggttgtaacaagagccaaataaatgatgaatgaagaaataaaactgcaaaagagaactaaaataatccaacaggggcaagaaaataattgcaagttaaaggtttataaagaaaacttctacataatataattcattcactcctctgagtgatgagttagaagccaaggttctggatttccatgtaatcaaaagcacagcttcctctggcaaggataggtgaggctgccytgcatttcctgctcgcctagttagagagatgcccctgacaccatacgacaccaatatttatcagtttagatgccttttcatggtaaatttcaggacagagcctgacacattggacacactgattaccattccattgtaatcagcagaagcatgtaaaagaattccagatcatttagtttatgaacttaaatttactgaaagccaccctctctctgtaaatgctagacctgtgcattctctaatgtgt

SEQ ID NO: 381818 - DNA, 562 bp, Homo sapiens
tttttctactagagagtaagccttattacattcagggagtgtctgtcttgtttactgctataactccagtgtcccaagcagtacctggttgtaacaagagccaaataaatgatgaatgaagaaataaaactgcaaaagagaactaaaataatccaacaggggcaagaaaataattgcaagttaaaggtttataaagaaaacttctacataatataattcattcactcctctgagtgatgagttagaagccaaggttctggatttccatgtaatcaaaagcacagcttcctctggcaaggataggtgaggctgccctgcatttcctgctcgcctagttagagagatgcccctgacaccatasgacaccaatatttatcagtttagatgccttttcatggtaaatttcaggacagagcctgacacattggacacactgattaccattccattgtaatcagcagaagcatgtaaaagaattccagatcatttagtttatgaacttaaatttactgaaagccaccctctctctgtaaatgctagacctgtgcattctctaatgtgt

SEQ ID NO: 381819 - DNA, 562 bp, Homo sapiens
tttttctactagagagtaagccttattacattcagggagtgtctgtcttgtttactgctataactccagtgtcccaagcagtacctggttgtaacaagagccaaataaatgatgaatgaagaaataaaactgcaaaagagaactaaaataatccaacaggggcaagaaaataattgcaagttaaaggtttataaagaaaacttctacataatataattcattcactcctctgagtgatgagttagaagccaaggttctggatttccatgtaatcaaaagcacagcttcctctggcaaggataggtgaggctgccctgcatttcctgctcgcctagttagagagatgcccctgacaccatacgacaccaatatttatcagtttagatgccttttcatggtaaatttcaggacagagcctgacacattggacacactgattacyattccattgtaatcagcagaagcatgtaaaagaattccagatcatttagtttatgaacttaaatttactgaaagccaccctctctctgtaaatgctagacctgtgcattctctaatgtgt

SEQ ID NO: 381820 - DNA, 562 bp, Homo sapiens
tttttctactagagagtaagccttattacattcagggagtgtctgtcttgtttactgctataactccagtgtcccaagcagtacctggttgtaacaagagccaaataaatgatgaatgaagaaataaaactgcaaaagagaactaaaataatccaacaggggcaagaaaataattgcaagttaaaggtttataaagaaaacttctacataatataattcattcactcctctgagtgatgagttagaagccaaggttctggatttccatgtaatcaaaagcacagcttcctctggcaaggataggtgaggctgccctgcatttcctgctcgcctagttagagagatgcccctgacaccatacgacaccaatatttatcagtttagatgccttttcatggtaaatttcaggacagagcctgacacattggacacactgattaccattccattgtaatcagcagargcatgtaaaagaattccagatcatttagtttatgaacttaaatttactgaaagccaccctctctctgtaaatgctagacctgtgcattctctaatgtgt

SEQ ID NO: 381821 - DNA, 481 bp, Homo sapiens
agtcttaatgatgtattaaagatttgggatgaaagtcaacttgattttctaaagaagtcataatgctgtcaacatgatacaatagagctgaatgatatatamtataggttttataaaatgtagagtaaagaaaaacaatttaccttaatttcccctagcatttggaatctttccaaaattgtatatacaaacctttttaccacagtgaaaaaaaaaagaaattgaaagtttggggaatattcattgtaaaaaaataaagaagtaatacaggatgggccacataaactatgaaaatgtgataaattagaatttctaccatcttggagaagtagcaagtaaagaagtgtgtttgtgtgtgtgtgtgtgtgtgtgtgtgtgtgtgtgtgctttaggtgtgggtattagtctagcaccaatccaaatatctgggatattttttaccttttggatctgtccttatattagcattgaggccaatctc

SEQ ID NO: 381822 - DNA, 442 bp, Homo sapiens
tgttgtccatctgaaactctttcttggtgccaaattctgtatcaattcaaattcaatcagaaaagcaaaaccactaggaatatatattatgtacatttatataaaagtatatataaaaggacgggcaaggtggctcatgcctgtaatcccagcactttgggaggccgaggtgggcagattgcctgaggtcaggagttygagaccagcctggccaacatggtgaaaccccatctctttagtagatatatttttagtaaatataaaaattagccaggcgtggtggcaggcacctgtaatcccaggtacttgggaggttgaggcaggagaatcgctaacctgggaggtggagggtcacagtgagccaagatagcgccattggactccagcctgggcaacaggaacgatacttcatctcaaaaaaaaaaaaaattatatatacaat

SEQ ID NO: 381823 - DNA, 475 bp, Homo sapiens
ggaattatcttgctatgtgggtgtgtgtgtgttcacatcctcctgccccctccagaatgcaactccctgagagcagggctgtctttcctgttcacttctgtacactcagtactagcctgactcgttgccttgtgttgccccagggctgacttaggcggggtgggctaagtatcctttggtgctacggatggcatgacacagaacaaattggcctatgagagagtgagctccttgtcacagaaagcattcaaatagagacagaacaaacaccgttacttctcacacctacagtgccatattgtgggawacaatgattgtcaagactggtcccatttggcctctccggcctcactgttttctgattgtgtcctgttcattgacacctccctgtctgcttgtgctgttattatgcctggaaggccctccctttatcccttgcttggaaactcattctcacctgtatttgaaaagtcat

SEQ ID NO: 381824 - DNA, 473 bp, Homo sapiens
atgattgattgaatcaacggccttgtgattgaactcaatctccagtctttctcccctccctagagctgggggctggggctgaaagttccaactctaatcccacgcttggtctttctagcatggccagcctctcccttgaaactttctaagggctcaccattagcatttatacactttactgtggtcaaaaagggcttgttatgaataacaaaatacattcctatcaggaaattccaagagtttttgaagctgtgtgccaggaactggggacaaagatatcacagcttccaagttgtagttttcttcagaatcactacagagcatgttaaaagttcagcttccagggtcctggtcctccagatggttttgatacagtagggctgggytgggactcacaattctccatttctaccattcccccaggtgatgttggtatgggtgggctatgagtcactcactgaggaatgctgaca

SEQ ID NO: 381825 - DNA, 565 bp, Homo sapiens
aggcagccttgtctctaacttgtagacagtccagtgcaagctggcaagggttagtgtactgtctggcaggtggtgggctgtcgtggaagttgatggaatggatgagagtatcaataaattcaagcttccttctctccaacgtaaagttcttttgtgtctttgtgtttctactccccattccacgtcctgaccaaggccccagtggggcttctggccttgtccaagatcctgctctcagttagcctctctctcctgtgtcttcagtgtctttctttccacccatctctccgcatggacaggtatccccaggcctcctttcaagatacccttctgttttctctttctctgtgtctctaatcaatactggttactttccctcttagwtcagtggcatcaccattctctcaacttcctgcactcctcacctctctctccctctttgctacatcagtctgtggctgagtcctcctattttacctctgctttttgtgttgtatccagtttcttctttccctccccagtttcctccctacactgggccttccttttctcacttgaagtctta

SEQ ID NO: 381826 - DNA, 588 bp, Homo sapiens
atataaatttggagaggagcccaagatgatcaggaggcagtgactgagggcagagcggaagtacctgggtgcagagtcggggaaagacacacagyacaccatggatagttagtgtgacttaccctcccgagggctgctgtgtgcagactctgccctcagctcttccctgcattttctcacttgatttgcacacacatccaaggaggaagtgtgaaccctctggttcaggtcacttggcttgtgagtaatggagccacaattctaaggcaggtccgtttgtcatgggtgatgaaatgattacccattacaatattacccagacgattacccaagacaacctcctccggggccagtagaatgcaaggaggctggaaaatattgagaacaaaagaacaaagaggagccaagagcaatgagcttaagagggggaaaggagtgaggcccaggggtgctcacacttgccacgttggctgctggaatcttctaaggctaatatttgtcaagctcctactgtgtgagaggcatgtgctgagaaggattgcaggtgccagctcgtttaatcatcacggtaactgcacgtggttgttg

SEQ ID NO: 381827 - DNA, 588 bp, Homo sapiens
atataaatttggagaggagcccaagatgatcaggaggcagtgactgagggcagagcggaagtacctgggtgcagagtcggggaaagacacacagtacaccatggatagttagtgtgacttaccctcccgagggctgctgtgtgcagactctgccctcagctcttccctgcattttctcacttgatttgcacacacatccaaggaggaagtgtgaaccctctggttcaggtcacttggcttgtgagtaatggagccacaattctaaggcaggtccgtttgtcatgggtgatgaaatgattacccattacaatattacccagacgattacccaagacaacctcctccggggccagtagaatgcaaggaggctggaaaatattgagaacaaaagaacaaagaggagccaagagcaatgagcttaagagggggaaaggagtgaggcccaggggtgctcacacttgccacgttggctgctggaakcttctaaggctaatatttgtcaagctcctactgtgtgagaggcatgtgctgagaaggattgcaggtgccagctcgtttaatcatcacggtaactgcacgtggttgttg

SEQ ID NO: 381828 - DNA, 621 bp, Homo sapiens
cagtagccttgtttccaaaccatggagtgtgttcaataaagcaagagttagagagagcagctcagggaagctgacccaggccgcatgcccagaaaggggactgttggagagscttctgggcatgaagagcaggcgggaagcacagccaggttaggggctgcctgggagagtagttttggcttcagtcttggctatgcgcagtatctgccagaaaagatcatacgctctcaaaaaccagagacaaggaacaaactaatgtgatcatttctcttccttgctcagtaaccttcaatgtctccccgttgtatcctgaataaaccccataagccttaccgtgacattcaaagctcagcacaacctggtcccaatttacttttctaatcttatctcccactaatctccccacataaacttcatgcttaagtttaactggtccagtttttattccatgaacccaattctcagtcttgggtcttgggctgtatcttttctctttccttcctttcccctccaaatctacctagtagattcctgctcattcttcaagttcctttccaaggtaacctcctccatgaagtcttctctgattgcccatgtagaagcaaactctccctcaggtca

SEQ ID NO: 381829 - DNA, 621 bp, Homo sapiens
cagtagccttgtttccaaaccatggagtgtgttcaataaagcaagagttagagagagcagctcagggaagctgacccaggccgcatgcccagaaaggggactgttggagagccttctgggcatgaagagcaggcgggaagcacagccaggttaggggctgcctgggagagtagttttggcttcagtcttggctatgcgcagtatctgccagaaaagatcatacgctctcaaaaaccagagacaaggaacaaactaatgtgatcatttctcttccttgctcagtaaccttcaatgtctccccgttgtatcctgaataaaccccataagccttaccgtgacattcaaagctcagcacaacctggtcccaatttacttttctaatcttatctcccactaatctccccacataaacttcatgcttaagtttaactggtccagtttttattccatgaacccaattctcagtcttgggtcttgggctgtatcttttctctttccttcctttcccctccaaatctacctagtagattcctgctcattcttcaagttcctttccaaggtaacctcctscatgaagtcttctctgattgcccatgtagaagcaaactctccctcaggtca

SEQ ID NO: 381830 - DNA, 525 bp, Homo sapiens
cagcatttagcacagtgctgtggttacacaggtgttccccacctttttgaccaaaaaatctggatcatgtggtttgaactaagtcttatacttgaagtctcargaagcttcccaaaggaagcaaagccatgtttctgcaagtagggatgatgcagccccgttggaggcctgaggcaaagagagcgacctccagagcccaagccccatgagggcaggggtctgtgcctgccttgtccactcctctgtcctgtgcctggcatctaacaggtgctcagaacgtacttgcaaaaagaaatgtggtcatgcgcagaaagccacctcgacaactgtaaacagcgtataaaggtttcttgtgataaccgtctggatacaggaaactaaagagagaagaatgcctgaaaaacagaatgctgggggtggagcggggagcagtggtttgtgggagaagatgctgaatttggttctagacattttatggtgacagcaagacatttaagaagagatgtcctgcagggtgctggattt

SEQ ID NO: 381831 - DNA, 525 bp, Homo sapiens
cagcatttagcacagtgctgtggttacacaggtgttccccacctttttgaccaaaaaatctggatcatgtggtttgaactaagtcttatacttgaagtctcaggaagcttcccaaaggaagcaaagccatgtttctgcaagtagggatgatgcagccccgttggaggcctgaggcaaagagagcgacctccrgagcccaagccccatgagggcaggggtctgtgcctgccttgtccactcctctgtcctgtgcctggcatctaacaggtgctcagaacgtacttgcaaaaagaaatgtggtcatgcgcagaaagccacctcgacaactgtaaacagcgtataaaggtttcttgtgataaccgtctggatacaggaaactaaagagagaagaatgcctgaaaaacagaatgctgggggtggagcggggagcagtggtttgtgggagaagatgctgaatttggttctagacattttatggtgacagcaagacatttaagaagagatgtcctgcagggtgctggattt

SEQ ID NO: 381832 - DNA, 405 bp, Homo sapiens
acactgttgttcaaataaacttgctttgtttcactgtcagcttgctcttgaattctttcctaagcaaagccaagaaccctcctgggctaagccccaatttttgggtttgcctgcatcacttggagttcatgcttatttggcatgcctttgaaagtcattgtaggggyaggttttaaagccatccctaagtcaccttttggattacctatcagtgcatgtatcagctgaactttggggaaatatgcctaacttttctagatgcatagattaagttctggccattctggtataggatactactaaggtttacacacagcatagtgaaaaatacatcagaatcacaagccttaagccctggcttctagttctagatctatctgcctgtggctggctgtgtgactttga

SEQ ID NO: 381833 - DNA, 405 bp, Homo sapiens
acactgttgttcaaataaacttgctttgtttcactgtcagcttgctcttgaattctttcctaagcaaagccaagaaccctcctgggctaagccccaatttttgggtttgcctgcatcacttggagttcatgcttatttggcatgcctttgaaagtcattgtaggggcaggttttaaagccatccytaagtcaccttttggattacctatcagtgcatgtatcagctgaactttggggaaatatgcctaacttttctagatgcatagattaagttctggccattctggtataggatactactaaggtttacacacagcatagtgaaaaatacatcagaatcacaagccttaagccctggcttctagttctagatctatctgcctgtggctggctgtgtgactttga

SEQ ID NO: 381834 - DNA, 546 bp, Homo sapiens
aggagttctgggctgcccttcctgatagtctgtcctacagatttcagacttgcctagccagacatcacttatatattattataggacaattccttgcaacatatcttttaatgtatatctcctactggctctgctgctttagttgaactgtgacaaatgtagattttggtaccaagagtggggtgaatacattttcattttgcttgtaggttggaatgtgtctttggggatcagagagaagactggtaggcagagtgatgctcctttcaaggatgtccacgtcctaatcactgaggcctgtgaatatgtcacctttatatagcaaaggggaatcaagcttgccattgaattaaggctgctaatcagctggccttaaaatagggagattatcctgggttattcagatggacycaatataatcacaaggacccttacaggtaaaaggaggaggcaagaagagagggaaccagagagatggtagtgggagcaggactcggtccaatgttgctgctggctttgaagataaaggagctgaggaaagtggac

SEQ ID NO: 381835 - DNA, 546 bp, Homo sapiens
aggagttctgggctgcccttcctgatagtctgtcctacagatttcagacttgcctagccagacatcacttatatattattataggacaattccttgcaacatatcttttaatgtatatctcctactggctctgctgctttagttgaactgtgacaaatgtagattttggtaccaagagtggggtgaatacattttcattttgcttgtaggttggaatgtgtctttggggatcagagagaagactggtaggcagagtgatgctcctttcaaggatgtccacgtcctaatcactgaggcctgtgaatatgtcacctttatatagcaaaggggaatcaagcttgccattgaattaaggctgctaatcagctggccttaaaatagggagattatcctgggttattcagatggactcaatataatcacaaggacccttasaggtaaaaggaggaggcaagaagagagggaaccagagagatggtagtgggagcaggactcggtccaatgttgctgctggctttgaagataaaggagctgaggaaagtggac

SEQ ID NO: 381836 - DNA, 540 bp, Homo sapiens
tctctgcagggtcccctaccctaagggcaatgcatagagaaagcccyagctataattcaaatagtgaggcggagaagtgagaaggttaaaggaattggaaaggtgctgagcctaatatcaaaattttactgtgcagcatttataaaatgctgaggtatgtttcgccaaggctcaactaggtgtggttttcatgactcattccagccaaagtattaataaaagcaaagcaatcgtgcctttataaatattgacacaaatagttgacaggtaagtttattatgtttctttatgagcataactttttaaaaattatctaagaatttcttcaatgtgcagttttaaatacattacttgttttataattgaaagagtacataaaagtatttctaacatccacacatatatggtacaagggcaaaggcaatttttccctccccctctgaaagttcaagcctgctgaaatgaactaatagacagattatcaagtgaaaagacaaacaaatgtgttaatgtgcatgagaacagaagccatacataata

SEQ ID NO: 381837 - DNA, 540 bp, Homo sapiens
tctctgcagggtcccctaccctaagggcaatgcatagagaaagccctagctataattcaaatagtgaggcggagaagtgagarggttaaaggaattggaaaggtgctgagcctaatatcaaaattttactgtgcagcatttataaaatgctgaggtatgtttcgccaaggctcaactaggtgtggttttcatgactcattccagccaaagtattaataaaagcaaagcaatcgtgcctttataaatattgacacaaatagttgacaggtaagtttattatgtttctttatgagcataactttttaaaaattatctaagaatttcttcaatgtgcagttttaaatacattacttgttttataattgaaagagtacataaaagtatttctaacatccacacatatatggtacaagggcaaaggcaatttttccctccccctctgaaagttcaagcctgctgaaatgaactaatagacagattatcaagtgaaaagacaaacaaatgtgttaatgtgcatgagaacagaagccatacataata

SEQ ID NO: 381838 - DNA, 540 bp, Homo sapiens
tctctgcagggtcccctaccctaagggcaatgcatagagaaagccctagctataattcaaatagtgaggcggagaagtgagaaggttaaaggaattggaaaggtgctgagcctaatatcaaaattttactgtgcagcatttataaaatgctgaggtatgtttcgccaaggctcaactaggtgtggttttcatgactcattccagccaaagtattaataaaagcaaagcaatcrtgcctttataaatattgacacaaatagttgacaggtaagtttattatgtttctttatgagcataactttttaaaaattatctaagaatttcttcaatgtgcagttttaaatacattacttgttttataattgaaagagtacataaaagtatttctaacatccacacatatatggtacaagggcaaaggcaatttttccctccccctctgaaagttcaagcctgctgaaatgaactaatagacagattatcaagtgaaaagacaaacaaatgtgttaatgtgcatgagaacagaagccatacataata

SEQ ID NO: 381839 - DNA, 597 bp, Homo sapiens
gtttcttggcttgatcttatgttatctttcctgcttctgtcgctattctaaatgtatctttttcttcctctatgtcttctaactgcttgttgtttatatatatatttcagtatgttaattttataaccagccaacttaataaacgttcttattgtttgtaayttttttagttgattatcttgacttctccaagtaagcaatcatgtcaccttaaaatgatgaaaatttttaccttctcctttccgattttcaaaccactggaacaatgttaaataatagtggcagttttgtacatcctgaccttgtttctggctttaatgagaatgttcacaatgtttccccattaaacattattgtgattattgcacaaacttatcttttatcatattttaattttactatatttttattgttttttttttttttatttttgtagagacagggtctcactatgttgctgaggctgaacttcaactctggggctcaagtgatcctcctggcttggcttcccaaaatcttttatcatattaaggaagtatccattcattactattttatgaggcctaacaaaatcaagcatgggtgtgaatttttcaa

SEQ ID NO: 381840 - DNA, 578 bp, Homo sapiens
ggtctttataccaccctgacatctcctcctcctccttttccttcttcatcaacatcatgtttatcacrtctatgtcgttatctttgtcaatattatcaccactattatcactatgtatttatcgctgtggcaagcacttcacatgcattcactaacttgcgctccacaatagctatgtgagaccagtactatcagccccgcttcatccaggaagaaactgaggcctgaaaaggtgagttagcttgcccagggtctcacagctggtatgtggcagagcaggactctgaacacaggccatctgggtccacggctgttatgctacctgcctacaactggagcctgttgttctttttcactcggcctacctgaaaaggttgccagtaagcccctcgggacacagaacaggaggaatagtaaggcagggtggaaaggacaaacagccgagtgaaaggcagacctggcatctcactccagcgagcttgactacgaggcaaaactgggtacggatatccatgcaggtgtgagcatgtgcagatagatgcatttttaaaaggtagatttgggtgtggttgtcaata

SEQ ID NO: 381841 - DNA, 578 bp, Homo sapiens
ggtctttataccaccctgacatctcctcctcctccttttccttcttcatcaacatcatgtttatcacgtctatgtcgttatctttgtcaatattatcaccactattatcactatgtatttatcgctgtggcaagcacttcacatgcattcactaacttgcgctccacaatagctatgtgagaccagtactatcagccccgcttcatccaggaagaaactgaggcctgaaaaggtgagttagcttgcccagggtctcacagctggtatgtggcagagcaggactctgaacacaggccatctgggtccacggctgttatgctacctgcctacaactggagcctgttgttctttttcactcggcctacctgaaaaggttgccagtaagcccctcgggacacagaacaggaggaatagtaaggcagggtggaaaggacaaacagccgagtgaaaggcagacctggcatctcactccagcgwgcttgactacgaggcaaaactgggtacggatatccatgcaggtgtgagcatgtgcagatagatgcatttttaaaaggtagatttgggtgtggttgtcaata

SEQ ID NO: 381842 - DNA, 570 bp, Homo sapiens
aaattgcttcacaagcttctaatccataaggcctggattgggtgggaagaaaagtctactaccaggatggagaattccatgtggctgaggaattctgcataaaacagcaaagcaacactctttagagctcttgtccctaggttttgttgtggctgatgggaggcagatgcaggatttcttagttctctagggagataccagctggcaaaggctagaggtcccttaggatcctcttcaactccagcaccctgggagcaagagaggctgatgtccagaaggaggaggcctctgtaagcagccatacgtcagcaggagctcccatgagttgccattactgcctcraagggcccgccatgtggaaccttgtcatccccttgagtaacatatgcataggaaagtcatttgtgatgagaaaggagagagggagaagagggagaggatgcaatcaaattaattctaatggcattgataaggagatgtggaagcacagccaatgactccattaaaataatgactttgggtcccttctgtcatcacctaaggtcttctccccctcccttgcccactata

SEQ ID NO: 381843 - DNA, 600 bp, Homo sapiens
acccagacttggctgggtgactgactacctcacaattgcaatggaattatcctcatattcactttaaatttctgcttagctgaagttgtaggggttttctcattcagaattggaccaaactagtcagtcttctttggaaaaactatacaacatggtgtacagaaaacttaaggatgagatttgcagaaataataaagrtacctcttcaggaagtagagctctaaaaacagttgagaattctgaaactttttgactggcagaatagttctgcattagatcatactggcatgctaatggtttttgtttaggggctttatagataatctttctttctgacagctctctctcaactggtagagagcacagttgtaccgatggttttacaaagccttagagatcaagtcactgaagattaaacagggagaagaaaattgtcaaatctaacttatcccaattgccatggctcctagatttgttcagtaatgacacaggttgtctttacattatttctttctctcatgtaggtaacctattattttcctttgtgataaaacatgatgcaatcagacatatctagtaatatgtaccccaaacaagttc

SEQ ID NO: 381844 - DNA, 600 bp, Homo sapiens
acccagacttggctgggtgactgactacctcacaattgcaatggaattatcctcatattcactttaaatttctgcttagctgaagttgtaggggttttctcattcagaattggaccaaactagtcagtcttctttggaaaaactatacaacatggtgtacagaaaacttaaggatgagatttgcagaaataataaagatacctcttcaggaagtagagctctaaaaacagttgagaattctgaaactttttgactggcagaatagttctgcattagatcatactggcatgctaatggtttttstttaggggctttatagataatctttctttctgacagctctctctcaactggtagagagcacagttgtaccgatggttttacaaagccttagagatcaagtcactgaagattaaacagggagaagaaaattgtcaaatctaacttatcccaattgccatggctcctagatttgttcagtaatgacacaggttgtctttacattatttctttctctcatgtaggtaacctattattttcctttgtgataaaacatgatgcaatcagacatatctagtaatatgtaccccaaacaagttc

SEQ ID NO: 381845 - DNA, 596 bp, Homo sapiens
ctttctaaccccatgctgtgaatatggtccaaagtaattcagtttctttctgtatcctatgtgctgattttctttagttccctgatgttgaaagccaccatatcatcattgttgattttgtttattcctttggggctatttttttttctaggaagkattatattaacatcatgctgaactttgtgaccaaaagctgtgatgtgccttgatacaatacagggtatgtcaaaaaagaaactagaaaaatggtaaagagtgaattggaaacaatgactagtgttgaattttttaatgttgtaaattactcagtttgaacacataacttttctttcatgggaaaaaagatctcactggagaagtccctaaattactttatggactcaggttaccagttagtttggatgaccttatcttcaacagtccaagaactttctgagataaagtgaaaatttcattgtgaataatctatactttttgcataatacactattttcttttaatacttaattcatcattcattcatctgatctacatttatttaatacctgctatgcaaaagcactcttctaggaacttggaatacagtgatgaccaag

SEQ ID NO: 381846 - DNA, 504 bp, Homo sapiens
cccaatatgggaaatgtttcaatatttcacaataartgatattagctataagtgatagtagctataaattttcataggtgcactttatcaaattgattttcacaacttatataagtaatcataaatcggtgttaaattttgtcaagggcttttcttctttttattaagatgatcacagatctcttttaacctgttaatatggcaaattacaatgttttttagaaatattaactatagaataaacactacttgtttatgatgcattatcctttttgtaaattgctggattcaagtttttaatattttgtgtttggtattttgtgcctgtatttataaaatgtattagtctgtaatctttttttggtaacaattttgttttggtatcagtggcatgctgacatcaataacgcatgttggaaaatgttccttcccatctattttctgaaggagattgaataagattaatgtcatttctttcttaaagatgtgatagaattcacaaga

SEQ ID NO: 381847 - DNA, 504 bp, Homo sapiens
cccaatatgggaaatgtttcaatatttcacaataaatgatattagctataagtgataktagctataaattttcataggtgcactttatcaaattgattttcacaacttatataagtaatcataaatcggtgttaaattttgtcaagggcttttcttctttttattaagatgatcacagatctcttttaacctgttaatatggcaaattacaatgttttttagaaatattaactatagaataaacactacttgtttatgatgcattatcctttttgtaaattgctggattcaagtttttaatattttgtgtttggtattttgtgcctgtatttataaaatgtattagtctgtaatctttttttggtaacaattttgttttggtatcagtggcatgctgacatcaataacgcatgttggaaaatgttccttcccatctattttctgaaggagattgaataagattaatgtcatttctttcttaaagatgtgatagaattcacaaga

SEQ ID NO: 381848 - DNA, 391 bp, Homo sapiens
taaagaatggacaacccagccagatgtaatattgtgcaactgtttttcttagtacatagggtagtgttcttctccatagaaatacttcaatatttgtgctttttcacaataatttaagctatacaaaggttttaaaatatttgttttrtatctgaatggtgctctaataactgttttacaagcattgttttaccccaatatacagtaagaaatttaataacaagacataatgcatgtattcaagttattactattaagtaatactagaaaatagatattctctattttctagtctgttctactgtattcatttctacttatatttaaaataatattttttgctacccataaaggggtcatgggttctatgttttattatattcttgtactg

SEQ ID NO: 381849 - DNA, 398 bp, Homo sapiens
ctgttcttgtgatagtgagtgagctctcatgagatctgatggtcttttaagggtctttttcctctttactcagcacttgtccatctgctgtcatgtgakgaaggatatgtttgcttccccttctgcaatgattgtcagtttcttttttctttttcttttttttttttcgagatggagtctcactctgtcacccatgctggagtgcagtggcataatctctgctcactgcaatctctgcctcccaggttcaagtgatcctcctgtcttagcctcccaagtagctgggattgcaagcgtgtgccaccaggcctggctaattttggtatttttagtagagacggggtttcaccaagttggccaggctggttttaaactcctgatctccaggtgatccaccc

SEQ ID NO: 381850 - DNA, 606 bp, Homo sapiens
aatacagtagttttcatatatgtgtaaaatgtaattgctgtcagtgatttcagtggctcaaggaaagaccattttctattctcaaacttcctctctttgacagtgatgcctaaaatttccattataatggataaaataaggtattccacacagaaatacaggtttaaaggcaataactttgacaccagctatataatatcttatattcattcacatcaaaatgtgaatatctgccattagactttcctgaggctgagagaaagcaagagtgagcagaaggtaatggaaaagctctacaattagctaaccttgtctacaaatattaagccttgtcatctaacaaggtatgcataaagaatattgaccagatttcttatgcaacagtatttcggtcttctcctcaagtgtcccactgtactgtgtacctgaatagaggtgaaatgcaggcagtgtgtttttattttaaaagtcaagcagcagcagcatgcagcactgatggttttaaaaactacttttaggactttcaagatgttgcaaagtcaaacagcaacataaaacaytgattttttttttaaataaagtttttccaaaacattaaagagattc

SEQ ID NO: 381851 - DNA, 550 bp, Homo sapiens
aaatagaaaacctcaaagagcacccaagaaatgcattagatgtaataagagggcatggcgattttgatggttataaaatcaataatataaaattaattgcatttgtatatgctagaaaaaatcattggtgagaaaaatttaataaaagctaatataccaataacattacaaataaaatgtggctaataaatctaaaaaatatatacaagactttyataaggaaattataaaatttattatttttgaaaagatctatatcatgttattatgctaacgatagaaactattcagttatcaccagttgacctatatgggaaatgtaatgtcaatcaagattctaacagggtgttttgtgaaacttgagagatgatttttaactttatgtggaagaggagaagtaaaattggtcaaaacattcctaagaaagaagaacaatttggggttccttgccttatcaaatatccaacattattttatggttataggaactaaatctgcatgacatgatgaatatataaaatatagatcattgtaagagtgaaagagttca

SEQ ID NO: 381852 - DNA, 612 bp, Homo sapiens
attatcttttccttctcaaatattgcaatgatactacttaacagtacaatcttgaggtattgtttttaagtaacatactggaaattgctcttttctgcaaaaattcgtaattatttaaaagttattgtaagcaaagtcatgctttgtaattgtggaataaggtagaaacattcaacagaaaagaacataattaatgataacataagtaattcttaaaatcacgtacaattctactgattatagttaatgttcttgttgctgtggtatgaattgccaaactttaaatttttatttaaaacccatctagtttttagttagaaaaataaggtacaaagacagccaatacagctctgcctaaaggttgtaaataaaatgaagattcaaatatgactccattaaacttaatagtgattgaraatccttgatcctagatgggaaaattaaaaaagcagctttcctggaaagggaaatagaaattaatctgtaagatcaaaagttgaatatgaaatgacttaaggcaatatgatcaactgatttacattctgtgcaatactaacaaatataagtcttgtacattatcttgttgttatctgtaacaccagatctctataa

SEQ ID NO: 381853 - DNA, 546 bp, Homo sapiens
ctggatattaatctcctgtcagataaatagtttgcaagagagagcaagaagatattttccccaattctgtcagttacctttccatcctgttgtttcctttgttgtgcagaaactttttagtttratataatttcatttgtttattttgacttttttgctgtgattttgaggtcttgtttataaaatcttttcccaatgtcctaaagtgtttcctctatgttttcttctagtagttttatagttttaggtcttacatttaggtctttattttgagttgatttttgtataggttgaaagacgagggtctagttttattcttctgctatggatatccagttttcccagcaccatgtatttaaggtggcgtcctttcccccaatgaatcttcttgatgtctttgtcaaaagtaagttggcagtagatagatggattaatttctgcattctctattctgttctatttggtctatgtgtctgtttttatgccagaaccatgctgttttgtatactatggccttgcagtgtattttgaagtctggtagtgatg

SEQ ID NO: 381854 - DNA, 558 bp, Homo sapiens
gtaagcctgggatagggccccagattcagtgtcactcaaagtgcgaaccaggatcagtgcttgtcctcaaacacgcctcccagtccataacaatgagatgaggggctggtaccagaatgtcaatcaacacactgattccttcccaaaaaaaakgtctgactatgaaaaaatgtcagctgtataaaacagggtatttggtgatgcggttaatttccatctggctgaagctccttatccctgtgtgaactgggaaacaattagttctgtcagacactttgagtagcactgttctagactgatggtgggaggaaaggatttaaaatatctgttttttatttgttgtgatatcactgcctaactaaagtaatgatgtttgggggaaagagtgctattggggaatattaactagcattgccattggtcaatcagcaaaatgttgacgctgatatatctgagtcaaaattcctgttctggacttattagcaacatgagttttaggcaaattatcgtcttcatttgggccatttggagttgaattgtgaagggtaattacaatgt

SEQ ID NO: 381855 - DNA, 558 bp, Homo sapiens
gtaagcctgggatagggccccagattcagtgtcactcaaagtgcgaaccaggatcagtgcttgtcctcaaacacgcctcccagtccataacaatgagatgaggggctggtaccagaatgtcaatcaacacactgattccttcccaaaaaaaatgtctgactatgaaaaaatgtcagctgtataaaacagggtatttggtgatgcggttaatttccatctggctgaagctccttatccctgtgtgaactgggaaacaattagttctgtcagacactttgagtagcactgttctagactgatggtgggaggaaaggatttaaaatatctgtttttyatttgttgtgatatcactgcctaactaaagtaatgatgtttgggggaaagagtgctattggggaatattaactagcattgccattggtcaatcagcaaaatgttgacgctgatatatctgagtcaaaattcctgttctggacttattagcaacatgagttttaggcaaattatcgtcttcatttgggccatttggagttgaattgtgaagggtaattacaatgt

SEQ ID NO: 381856 - DNA, 542 bp, Homo sapiens
ccatacccttactatctgcctaagtaatttcttcttaactcttgtatcatcgacactcaaacctggacttctcctgacttgtactcatcctttagatcccagtttggcaggcacttcccccaggaagtcttcagtgctaggagtccatggaaccctgttgtactcctgccatagaagagcacagcattgtgggtgatttttcacttgcctaacaccctttttgataattagctcttsgagttagaaaatgttcctgcctctgtagtacatatagtcacagcaatgtttcctatcccacatgttcttcaagaatgtttccatctcctcatccagaagtcaagtctttgtcttcctttcttaatgggtgagcttttttgactgctccaactaatagaatacaatggaacttacttctatgtggatgagaggaaggggaaagaggatggagggagaaaaggaaaggggaaggaagagaggaaggaagggaggaaggaagggaggaagggagggagggtaaatgtttttggagacctagaaacttc

SEQ ID NO: 381857 - DNA, 542 bp, Homo sapiens
ccatacccttactatctgcctaagtaatttcttcttaactcttgtatcatcgacactcaaacctggacttctcctgacttgtactcatcctttagatcccagtttggcaggcacttcccccaggaagtcttcagtgctaggagtccatggaaccctgttgtactcctgccatagaagagcacagcattgtgggtgatttttcacttgcctaacaccctttttgataattagctcttggagttagaaaatgttcctgcctctgtagtacrtatagtcacagcaatgtttcctatcccacatgttcttcaagaatgtttccatctcctcatccagaagtcaagtctttgtcttcctttcttaatgggtgagcttttttgactgctccaactaatagaatacaatggaacttacttctatgtggatgagaggaaggggaaagaggatggagggagaaaaggaaaggggaaggaagagaggaaggaagggaggaaggaagggaggaagggagggagggtaaatgtttttggagacctagaaacttc

SEQ ID NO: 381858 - DNA, 542 bp, Homo sapiens
ccatacccttactatctgcctaagtaatttcttcttaactcttgtatcatcgacactcaaacctggacttctcctgacttgtactcatcctttagatcccagtttggcaggcacttcccccaggaagtcttcagtgctaggagtccatggaaccctgttgtactcctgccatagaagagcacagcattgtgggtgatttttcacttgcctaacaccctttttgataattagctcttggagttagaaaatgttcctgcctctgtagtacatatagtcacagcaatgtttcctatcccacatgytcttcaagaatgtttccatctcctcatccagaagtcaagtctttgtcttcctttcttaatgggtgagcttttttgactgctccaactaatagaatacaatggaacttacttctatgtggatgagaggaaggggaaagaggatggagggagaaaaggaaaggggaaggaagagaggaaggaagggaggaaggaagggaggaagggagggagggtaaatgtttttggagacctagaaacttc

SEQ ID NO: 381859 - DNA, 579 bp, Homo sapiens
tggcagttggaactagctactagtaattttcctcatcaatagttcttggatctattaaattataccttttctcatttgctytgtcattttaaaatcaatataaacatattccaactgttttattaaattggaaaattactgaaattgagtctccaaagttgacccagaaaccagctgttctaaaatagtattttctgttttaggtagatcccacaaaaatgccatgaatgacatagcacagaaaagccaaggggagaagagctaagagaaagtctgagatattcttcctaggaagcagaaagtataagtttaacatggacattctctagaaaatgttgaacaagagggggcttccccactgtatccgtaaatatcctagccctcagaatcatcactaccaccctcaaaataattatgcagtattcctgtatatttttacaatttaattgttacaattgtgcaaagtattttcacatacataaactgtccctcagtttacagaaaatagcactattagcctagtgtagctccaggattcaagcccattctttcacttcacagcaacctagtgtctcctcc

SEQ ID NO: 381860 - DNA, 598 bp, Homo sapiens
tatcaactattcataagccaaatataccaagataagataaaattgctatttggtaccaatatgtgttcactatttttatatatatatatataaaacaataaaaagggctggaaaggttttcttctccttagcagagatgcaaatgagtagtctctacaaagacctgcctggaaggctgcagcaaccctatggttataaaccgcattgcctagacgtggaagtcagctctagaacccagaactgttcagataactgaagaattctgggtctgtagcagttctgtgttacttggtattgtacttcatagagaamtgagagagtgcaaaaccctgtgatatgcttctttctttagtcttatgcagtatttgtttgattgccatcacaaataatcagagtactacctttctcagagagaagagacaatctcaaatttggtcattcctaaaaaacgaaaacctggtgccttagaaaataacagaagagaggaaatggctttcttaacaggcatggtcaatttgggacatactgagcatactgtaactttaggaaaaataaaaaataagcagagtgaaaaatagaacctaagctcaggagagaa

SEQ ID NO: 381861 - DNA, 549 bp, Homo sapiens
gcatcaaggtcatgaaaagcaggaaagactgagaaaccgtcacaaatcagaggcgtttaagaagatatgtcaattaagtgtagtatcctggcttgtagcctgaaaaataaagaggacataagtgaaaacactggtgaaatcagaacaaaatctgcagttcactttttacaacttgtatatccttctagatattttcaactgattcataayagtttatagcatgctttttgttaatattatatgaacatatttctatgtcattatcatctccataattttaatacttgagtagatttgcattttctgtatatgcattatatatataagaattaatttagacaatcattactatgagaaatgttgtatttttcagtaatataaataatactgtaatgaagtattatcacacgttttagtccaagaatgaaatatgatagcaaaatattattgcatattgtaaacatttctttgggatacatttctttaaggaggatttttgagcctaagattaggcacatttctaaagctttggtcaaattgccattcaga

SEQ ID NO: 381862 - DNA, 566 bp, Homo sapiens
aatactgcagagcaaaccaagctccctttagtttctgccttggagtcacttctgcttttattagttgtaaaaggtcaagtgttacatggttagacatgtagataacctggcccaaattatgtrcaaatactttatttgaggctttaattccgtactttttaaatgctgatcaactgtaaaccatatctcattttttcgtactgttctgctttaaactttctgttagtaataatttttatcgagcaatatttgacaaagattgtataaatttaaggggtacagtttgatgagttgtcagagacataccctgcaaaataatcatttcatactaattaacatatctgtaacctcagacagtactttccttctttttctgtgtgtgtgtggcgtagacacttaagatctactctattagtaaatttcaagtatacgataaagtcttgttaattatagtcacatggttgtacattacatctccagaacttattcatcatgcataactgaaactctgagccccttgaccaacatctccctattttcccttccccattccctggcaagcacca

SEQ ID NO: 381863 - DNA, 541 bp, Homo sapiens
tctgacatcaaaaaaatcacctcttgggcattttcccaagcccagttgaagggtcactggtctgaaatggttcaagctggacaagagctgccccaacgttcctgaaaaacaacttgagccattgtaactgacttgatgtatacaccagaggtgacatctgtaaggaagctaggagaggctaagtcaacaagaaacaagcaactaaaagcattagcccctcagtttcaaaaacagaccattttatacatgtaataataaaggctgatttaatcatagtttgtatttattttgagatgatgtatgaccatcttattgcatataggtagaatgttaatgaacttaattcctaagaaaatgctgcagctgctgcttagaatagaatctaggaggactgttgggwtcagtatccagtgacacttatattaaagccagcatgtgttgctaccagagccagtaagaagtggtacctaggggagagaatgaggtcttccataatttctatcagttctttcaatgccaagcaattctaaatctgtataaa

SEQ ID NO: 381864 - DNA, 596 bp, Homo sapiens
ctgggtcaaaatttcgggctaccgtaggtcaagacttttgggcaatggtagattgaagtaattcaataggcattctcttttgttattgcaaagatatatttataaaatgacttttttgatgaagtcatgtaaggttattttaccactgatatttcacaactgagtcttaaaagattcattgtctccacagtggattttcttcattcaactctcaaagtttcttttttaattaaagttattttatcaaataataaaaatgtacatatctttgcaatgcagttgttcattggaagygttaaaccttgagaacaatgacaagtaaataagccaatttggtgagcctctcaatcactaagttaaacagagaacattaatgcttacatatggttgtggctgctccttcggtatttagttcaactatatgaaattgctgatattcatttatctttgaactataaatttttatcttttatcatgatacttctttcccatcatgaaaaaatattataaaagtcaactttgaaaattctgaacagcaaatatacccagctatgctggcatatgattgagtagacaaatttgcagaatcattatac

SEQ ID NO: 381865 - DNA, 590 bp, Homo sapiens
gtgggggaagtgttcattgttatcagctcgattcctgttttgattcttaatttctgcacattctggagatcaacaatgttctaaatttttgctgtttagtaagtacgtatgttttggcagagtagtatgaatccattatcctgcaaatcacaggagatctaatgattttagtctcccagagctttatcttttcaaagccttaagttagagaaagcagctctgtaagtcatccccctgttttatggactatatgaaattaaagtagcttcccactttggttaagtttcttccaaataacccagaagctgaccatggctgaaaaayaaataaaatataaaggaagaagaaggaaattcacatttgcaatcactgttactatcacattttttaaaaagcctcattgcagattttacaaccttttttagataaataatgcagcaggataggatagaaagccacaacagtctttctatcctagcttaaataaactcttgaaatatttttatccttctttatttgttggtttcgttttgtattggtaccatactatccattatagttaaataatagattttaagtaccaggagttt

SEQ ID NO: 381866 - DNA, 590 bp, Homo sapiens
gtgggggaagtgttcattgttatcagctcgattcctgttttgattcttaatttctgcacattctggagatcaacaatgttctaaatttttgctgtttagtaagtacgtatgttttggcagagtagtatgaatccattatcctgcaaatcacaggagatctaatgattttagtctcccagagctttatcttttcaaagccttaagttagagaaagcagctctgtaagtcatccccctgttttatggactatatgaaattaaagtagcttcccactttggttaagtttcttccaaataacccagaagctgaccatggctgaaaaataaakaaaatataaaggaagaagaaggaaattcacatttgcaatcactgttactatcacattttttaaaaagcctcattgcagattttacaaccttttttagataaataatgcagcaggataggatagaaagccacaacagtctttctatcctagcttaaataaactcttgaaatatttttatccttctttatttgttggtttcgttttgtattggtaccatactatccattatagttaaataatagattttaagtaccaggagttt

SEQ ID NO: 381867 - DNA, 579 bp, Homo sapiens
actaagttagtttaatcatcaaggtgcttaactatgtcatagatttatttcattatatccttgctctaaactgtgtccctcatttagatagagtgatctttaatattttccacccggctgctttagtaaagacytacacttaggttgaaaaaattttaattggagaaatgcaaaggagcagtgtgaatagtaaaagagggcaaaattttatatttaattagcatagaaagaagatgtaggcaggtacaatatctgtgggaggtgaatctgaagccaggggtcaataatttgcatcaaacattggagacaagcacaaggtgcaatctttagcaaagatagaagggattaaaatgactaaaagcagaattacactggctatatggatacaagctccaagtgagaggcacaggtttcagaaacagaagacatcaatgaatccaccaagggattattcgttaaagcttctaagcaaaaccagttgtgacattggtgctgaacccaggaactttctaagttttctaggtgggttgatcattctgaaggtaattataaaattacctgcctttctaagcctgaacc

SEQ ID NO: 381868 - DNA, 604 bp, Homo sapiens
ttcagaaacagaagacatcaatgaatccaccaagggattattcgttaaagcttctaagcaaaaccagttgtgacattggtgctgaacccaggaactttctaagttttctaggtgggttgatcattctgaaggtaattataaaattacctgcctttctaagcctgaaccagatcagaaatcaaaatcaaggtagtatgccatattcatgcctttgctttgtgtttcrtcagttttgagttctagcttgcatagatccagaaatgttttctgaatgaagctcatggatcaggctatccaaggaaaagtttcagaatttataactgcactgaagtgaggtcctttaaggcggaactcagaacatcagacacatggctcctggcccagaaaacagtttcaatcactgaaagatatctatatacatatcatttctccttcaattccaggcttcatcagatgtgcctattccctctcttacttaaatagtagtctagtcccacaatgtggcattaataaagcctgggccttaacccacactgcagattgtgagcactgctcagcctgagtagtgagcttcctactttcttcattttccagtggtctccat

SEQ ID NO: 381869 - DNA, 604 bp, Homo sapiens
ttcagaaacagaagacatcaatgaatccaccaagggattattcgttaaagcttctaagcaaaaccagttgtgacattggtgctgaacccaggaactttctaagttttctaggtgggttgatcattctgaaggtaattataaaattacctgcctttctaagcctgaaccagatcagaaatcaaaatcaaggtagtatgccatattcatgcctttgctttgtgtttcatcagttttgagttctagcttgcatagatccagaaatgttttctgaatgaagctcatggatcaggctatccaaggaaaagtttcagaatttataactgcactgaagtgaggtcctttaaggcggaactcagaacatcagacayatggctcctggcccagaaaacagtttcaatcactgaaagatatctatatacatatcatttctccttcaattccaggcttcatcagatgtgcctattccctctcttacttaaatagtagtctagtcccacaatgtggcattaataaagcctgggccttaacccacactgcagattgtgagcactgctcagcctgagtagtgagcttcctactttcttcattttccagtggtctccat

SEQ ID NO: 381870 - DNA, 462 bp, Homo sapiens
caagtaacaaaagaatgaataattggacttctcaaaattaagaacttagtgctgcaaatgataccctcagaaggtgaaaattgtgggtgaatgtgtgtgcacatgctattggtcatatttttcatattgtcatatttttaatgacatattggtagtttgaaactgtccatggtggcaaatgaaaatcaggccttttctttcttttctggatatctagttgctaaacatttactaraatattcttcgacatatatacatacatacacatacacacaaattcaattatgtgtgtatgtgtgtatgtccatgaatattccttatcactatgcatgccaaagtctgaggaatttaaagtagtgagaagggttgaaagagactggactagatttttttatatgatagtgatgaaagagctataaaatatacccaagatatatatacacccaaaacttgaacagtatt

SEQ ID NO: 381871 - DNA, 512 bp, Homo sapiens
gctttcctgggctgcttttattatcgttactaaaagcttctacctttatgataccttggagaaagctttattggaatcacatgtaatattattttgggggtcagatcattggtaacttggttgaccattacaacattgatgccttaaaggaaatggyattgccactaatgattttatgtttccatactccatagtatgcaaatattcctgggagacagaatcaagtcctcacttcttcatcactcattggaaattagacagtgtgcagaaagcaccataagccttcagaggtagaagataagtgggaagccaagggtgccagaaatagctgaaggtgctgaaatgggagttggggcctgcaaaaaccaactttctcgtccattctagttttggctgcttggacagtggacaatcaaattaacaatgatgctaaatggagggttaggggagtcagtatcatacaaagggaccacttcagtatttggtgtgtgtctgtgtctgtgtgtgtgctt

SEQ ID NO: 381872 - DNA, 599 bp, Homo sapiens
ttctcagaaaaaggaggaaaacggaactcctccagaccaaccattcattcaatcgtataaactacattttgaaactattaaaaatagtagacaatgatatacatgttataggtacaaatttgaaagatagaacatttaagtttcatcctgaatcaatgagttggttaacagctttctttgttactgtggtataaaaatttagtagatgacaggtcctatttgccagtctcgtagggcaaccttgtaagtgctttaaatgaaattaattagcctatcaacacagtcttatgtcacttaatgataggggtcccttctgagaaataccttgttgggtgattttgtccttgtatgaacattatagaggttacatrtccaaacctagatggtagagcctactacacacctaggctatattgtgtggactattgctcctaggctgcaaacctgtacacgtgttacagtactgaatactgtaggcaattttaacgcaatagtatttgtctatctaaacatagaaaaggtacagtaaaaatagtatgtaaaagataaaaaaagatacacacctatatagggcagctccatttataatttaatgggat

SEQ ID NO: 381873 - DNA, 586 bp, Homo sapiens
ttgggcaagttactatactcttcatgcctgagttcccccaactgtaatggaatagttggtataaacccctattgcatggatttcctgttaagattaaatgagttgaygtgtcagggttggaacagggcctgcctagcacattgtcaacactatttaaggttagctattattattattgctattattatcattaatgggagagcatttcaaaagctgaaatcacgtctccccctctctctatatataatctgctactcaaggtcaaaatatactttctgaccatgcggactctttcctggctctatatatatttgatgtcctggtgcatctcagaggcatgtcctgccctttccctttacaggtattaatattttggataatttgttggggactgaatttttatatcctttaccttaaatttggttagtttgcccagaaagttaaagtcataccttcttactctcaattcaaaatgattttgggctgcctgagtacggaaaaatgtattgcattttctgcccagatgtttgaactggggaataaccttggttttgtaagtcatcttctttttactgtattgactatt

SEQ ID NO: 381874 - DNA, 586 bp, Homo sapiens
ttgggcaagttactatactcttcatgcctgagttcccccaactgtaatggaatagttggtataaacccctattgcatggatttcctgttaagattaaatgagttgatgtgtcagggttggaacagggcctgcctrgcacattgtcaacactatttaaggttagctattattattattgctattattatcattaatgggagagcatttcaaaagctgaaatcacgtctccccctctctctatatataatctgctactcaaggtcaaaatatactttctgaccatgcggactctttcctggctctatatatatttgatgtcctggtgcatctcagaggcatgtcctgccctttccctttacaggtattaatattttggataatttgttggggactgaatttttatatcctttaccttaaatttggttagtttgcccagaaagttaaagtcataccttcttactctcaattcaaaatgattttgggctgcctgagtacggaaaaatgtattgcattttctgcccagatgtttgaactggggaataaccttggttttgtaagtcatcttctttttactgtattgactatt

SEQ ID NO: 381875 - DNA, 607 bp, Homo sapiens
actttcgtaagtattccccacacaaatcctctaaacctggagaaaatgctgatgtagttagtgggtgattttaatgcaaaaagctttgttatccatagtttctgggtttcagttggttgactacacatgkaagagtacaaggtttttgcatctttttcttagttgagaatcaaagtaggtgatagactgtattcattcattgagcttttattgaatacctgttgtgtgctgggcaatatagataagtagacccaataataaaaagaaaaccttgagtgttataaagtcttacaggacagatcaataagtaaacagacaaataaaattcagtctgataagtgctataatataggtatgcaaaagatgttgtagaaactcataggggaaccatcagtcttgaagagcttgggaatggtgtatgagtgagtgagacacagaatatttaaagccagggagtgacatgaactgagttttatttaagttcacttttgctgccagctagggaacagattgggaaggagtgaggctggaggaagggaaaccagctaggtggctgcttcctgctaataaacagttcacacttcctgagtgctcactataagccagg

SEQ ID NO: 381876 - DNA, 635 bp, Homo sapiens
ggtttcagttggttgactacacatggaagagtacaaggtttttgcatctttttcttagttgagaatcaaagtaggtgatagactgtattcattcattgagcttttattgaatacctgttgtgtgctgggcaatatagataagtagacccaataataaaaagaaaaccttgagtgttataaagtcttacaggacagatcaataagtaaacagacaaataaaattcagtctgataagtgctataatataggtatgcaaaagatgttgtagaaactcataggggaaccatcagtcttgaagagcttgggaatggtgtatgagtgagtgagacacagaatatttaaagccagggagtgacatgaactgagttttatttaagttyacttttgctgccagctagggaacagattgggaaggagtgaggctggaggaagggaaaccagctaggtggctgcttcctgctaataaacagttcacacttcctgagtgctcactataagccaggcatactcccaagcactttacatatgttaatccatttaatcctcacagcaatcttatgaggtggggtgctatttccttttattatcttgatttatagataagatacagagagattaagtagttgcccaagatc

SEQ ID NO: 381877 - DNA, 607 bp, Homo sapiens
actttcgtaagtattccccacacaaatcctctaaacctggagaaaatgctgatgtagttagtgggtgattttaatgcaaaaagctttgttatccatagtttctgggtttcagttggttgactacacatggaagagtacaaggtttttgcatctttttcttagttgagaatcaaagtaggtgatagactgtattcattcattgagcttttattgaatacctgttgtgtgctgggcaatatagataagtagacccaataataaaaagaaaaccttgagtgttataaagtcttacaggacagatcaataagtaaacagacaaataaaattcagtctgataagtgctataatataggtatgcaaaagatgttgtagaaactcataggggaaccatcagtcttgaagagcttgggaatggtgtatgagtgagtgagacacagaatatttaaagccagggagtgacatgaactgagttttatttaagttcacttttgctgccagctagggaacagattgggaaggagtgaggctggaggaarggaaaccagctaggtggctgcttcctgctaataaacagttcacacttcctgagtgctcactataagccagg

SEQ ID NO: 381878 - DNA, 399 bp, Homo sapiens
ttcttttttctttacatatatcagtatcaaaaataacccaaatgaaagggttggggaccagagactagaaatagtgctaatkcaagagcattctcacctattgtgtatttaaacaattttctctaattgtataatttaatattttaagtgagtacaatgaattcttaaaaacacacatggaaagctttaactagtgcatgttaagactgataaaaaatcagattaatgtgtcataatgaaactcacggcccagaggataaagaaactcaatacaacatggttggtgatggttacggtgaatgtaaaatttgttttacatttatactgtgtgatttgagattgctcaatttcaagaattacagttctgctcagtgagccctgcaggaggtggatagcccc

SEQ ID NO: 381879 - DNA, 574 bp, Homo sapiens
ttataaatgtatattttcacattatactctaatctgtgctccagattatttacatctrttgtagttgtatacagaaaagttatataatgatgattcaggagacagaaactatttaggcagagagtaagggcaacatagtcctcagtggaacttcccttttaacaaaaatcagcccccaaattacttcttttctaacaaagagcagcctgaaaattcaagcttcaaacagataagcaagctggaagcttgtatggattaatgctgggagctgtgccaacagaaaggcactatctgggggccaggtaagttcaacatggtggctctattttcccctttctttgtcaccatgtgtacagtaaaggaacaggaaacatggcacaagccaggcagagaacctatctgcataataaaagattaggatggggcaagccagatttatgtgctctatgcaaatggcacacctagccctaacgagtttttcctgccctatgcaaatgacacacctggtccaagcaatctttcatgccctgggtaaatcagacaccacctcttcaagctcatctataaagcctgc

SEQ ID NO: 381880 - DNA, 573 bp, Homo sapiens
caatctctaagcactaggccagtctggatccatcttaaggatcccacttcttttcctaatcagaaacaatatcccctaaaggcaaaggctgggaaagggctagacgccattagtaataaccggaatatgcagggcctcctcawaccctgtaacagtccctgaaacaccccaatattaggagtgcagaaaccaaagggggaatacagactagttcaggacctccacctcagtaatcaggccacagtcccaattcatctggtggtccctaatccctatacgttgctaatgtctgagggaactaaatggttcacagtcctagatctagaggatgcctttttctgcataacattatatcctgactctcaatacctgtttgccgtcaaagattcctccagccgaattgcccagttaacactgagagttctgtctcagggattttgagacagtcgtcacttatttggacaggcactgtcagaggatctctctgagttttctcatcctcagatcagggtcttgcagtatgtagatgacatacttctctgtgccccaattgaggaagcttctcaggaaggc

SEQ ID NO: 381881 - DNA, 555 bp, Homo sapiens
cagtggcaaggaagtctcaggggctcaacacactcaaagcccctctattctgggaaggctccataagagaaattaagccccattactcctctacagagactgaatgggccatctctcaagggtacacttttcagccctccagatggctacagttagaggatggcaagctccacttttacttgcaaaaggataaaacttatcagtgtgcccagacattgttttcaacagagaacttataagcagtcaaagaggttgttattkcctctgaagtctgtcttaaaaataatcccctcaacaggtggctccttcctcttcaaacccaaaggatgggaagctatccaggggaggactggcagataaaactcagccatatgccaaagatgaagggcatccaatacatcctggtatgggtagatactttcactaactgggtagaaatagaagcatttccatgccatacagaaaaagcttctgaggtaataaaagtattaatgaaatagctccccactttggtctacttaattacctccaaagtgacaatggcctctcatttaa

SEQ ID NO: 381882 - DNA, 555 bp, Homo sapiens
cagtggcaaggaagtctcaggggctcaacacactcaaagcccctctattctgggaaggctccataagagaaattaagccccattactcctctacagagactgaatgggccatctctcaagggtacacttttcagccctccagatggctacagttagaggatggcaagctccacttttacttgcaaaaggataaaacttatcagtgtgcccagacattgttttcaacagagaacttataagcagtcaaagaggttgttattgcctstgaagtctgtcttaaaaataatcccctcaacaggtggctccttcctcttcaaacccaaaggatgggaagctatccaggggaggactggcagataaaactcagccatatgccaaagatgaagggcatccaatacatcctggtatgggtagatactttcactaactgggtagaaatagaagcatttccatgccatacagaaaaagcttctgaggtaataaaagtattaatgaaatagctccccactttggtctacttaattacctccaaagtgacaatggcctctcatttaa

SEQ ID NO: 381883 - DNA, 588 bp, Homo sapiens
taaaactcagccatatgccaaagatgaagggcatccaatacatcctggtatgggtagatactttcactaactgggtagaaatagaagcatttccatgccatacagaaaaagcttctgaggtaataaaagtattaatgaaatagctccccactttggtctacttaattacctccaaagtgacaatggcctctcatttaaggcagccatcacacagggagtttcaaaggcactaggcatacagtatcatctccattgtgcttggagacctcagtcctcaggaaagctagagaaaacaaatgatattatcaaaaggtacctcagaaaactgtcccaagaaattgaacttcctcgggtcacactttcctcccatggctttactgcaagtaagaaatacccctacaaaattaggtctgagccctttcaagattctgtatggatggcctttcattacaaataatttcctattaaaccaggaaacctctgaattggttaagcrtgtaacctctctggctcactttccacaggaactaatacaactaccagaagcccaaccccaaggaataggaccaccattatttaacccagaag

SEQ ID NO: 381884 - DNA, 614 bp, Homo sapiens
tccaaccaatctttcatgcactgtgtaaattagacaacacttcctcaagcttatctataaaacccgcagcatttccccacagaaccagcaacccatttctctagggcccttctctgctgtagagctctttttttgtgtgagacagagtctcactctgtcaccctggctggagtgcagtgatgtgatctcagctcactgcaagctccacctccccagttcacgccattctcctgcctcagcctcccgagtagctgggactacaggcacccaccactacgcccagctaattttttgtattttaagtagagacagggtttcactgtgttagccaggatagtcttgatctcctgacatcgtgatctgcccacctcaccctcccaaagtgctgggattacaggcwtgagccactgtgcctgtctgagctcatctctttctttcacctatttaacttcagctttgaaccttactctttgtgtgtccacatcctacttttccatggccatgagacaacaaatctcaggtatttaccccagacaatgataccgcttcaatggtgtgctactgcacatctcttccccacttccccatacaatgacatcatgttggtagcctaa

SEQ ID NO: 381885 - DNA, 424 bp, Homo sapiens
attttcaacttttaactcattaaaatcttttcactttctattaatgaaataaacataataaaatggtatgacatttttatggcagtatttccaacttcatggtgtgaaatatgattaacaaaaatctcgacgaagaaaatgcaccaaatttgcaacttaaaaataacatgcaaataataaaacactaaacagaataatcacagggaatctctaacttaaaaaatactattaataataggtaacttttattatgtacaaaaatgctttcacatatgttatatcaattgatctcasctaatctcttcagcaaacttaaatttattacataccaatgagctaagtaagatctgattctcagagaatggggctggccatttgtaataaaggcaaattggaaaagtgaggtattattcctatttctgag

SEQ ID NO: 381886 - DNA, 539 bp, Homo sapiens
tcaaaaatggttagaaaataagtgttataagccactaaatttggggggttgttacacagaaataggaaactattatactctgccacttcacttcatatctgcaattactttgcaggggtataaatattttggattataastacaaatataaatatttcatacatattaatctaatattcagcaattctataacaatagtttaagcttatttctttgggattcttgaatttcttttagaaactttaagtttattcttctcagttttcttgtttagcaaataaaatctttctgtaaagataaaaggatatgtaacttttttacttttgacttctttgatggcaagtctcaatagtttgctagatggcaagttagactagtacaaactttgttttactttaaaggcccatgacttccttgagattaccagactttaaccccaaattggctttgaatgtagcccataattacaatatatgtttttacttacaacacttttaataaaatattttcaacatttttttctctgatgctgtccaaaa

SEQ ID NO: 381887 - DNA, 539 bp, Homo sapiens
tcaaaaatggttagaaaataagtgttataagccactaaatttggggggttgttacacagaaataggaaactattatactctgccacttcacttcatatctgcaattactttgcaggggtataaatattttggattataagtacaaatataaayatttcatacatattaatctaatattcagcaattctataacaatagtttaagcttatttctttgggattcttgaatttcttttagaaactttaagtttattcttctcagttttcttgtttagcaaataaaatctttctgtaaagataaaaggatatgtaacttttttacttttgacttctttgatggcaagtctcaatagtttgctagatggcaagttagactagtacaaactttgttttactttaaaggcccatgacttccttgagattaccagactttaaccccaaattggctttgaatgtagcccataattacaatatatgtttttacttacaacacttttaataaaatattttcaacatttttttctctgatgctgtccaaaa

SEQ ID NO: 381888 - DNA, 539 bp, Homo sapiens
tcaaaaatggttagaaaataagtgttataagccactaaatttggggggttgttacacagaaataggaaactattatactctgccacttcacttcatatctgcaattactttgcaggggtataaatattttggattataagtacaaatataaatatttcatacatattaatctaatattcagcaattctataacaatagtttaagcttatttctttgggattcttgaatttcttttagaaactttaagtttattcttctcagttttcttgtttagcaaataaaatctttctgtaaagataaaaggatatgtaacttttttacttttgacttctttgatggcaagtctcaatrgtttgctagatggcaagttagactagtacaaactttgttttactttaaaggcccatgacttccttgagattaccagactttaaccccaaattggctttgaatgtagcccataattacaatatatgtttttacttacaacacttttaataaaatattttcaacatttttttctctgatgctgtccaaaa

SEQ ID NO: 381889 - DNA, 449 bp, Homo sapiens
atactcaaagctaatgaagttgtggtgccatacctgttggcaccctgtgttcaatccatttttccagaatgaactgctgtttcctctctgtatgttagttactcaaggcacagaccaagcctaggttcttatcaaaagcttttgaatactttccactcttccattatctctgatttcctcctgtttgtggatcttttcctgtggaactgtacctttatttgttcatgaattatttcaaacagaagagttttcgttttctaacttatcagacccrttggagtcagggcccatgccttttttacttcattattttctctagactaaaagtgacaagtaatttgtggttgtattttaggccttgggaagttagcaaaatggatattttggggtcaggatatgtgtccagttcccttgaataacttctcaaggataaaattacacatgggtgc

SEQ ID NO: 381890 - DNA, 538 bp, Homo sapiens
ttgcactccccctgccgcccctcttctcttactgttaagccttatcaagttcctcagtttgggtgtcmaataaactcagtcacagttaactttggagcattattaaataatatttccatatgtagggagctcacacagaacctctggtcttggagtctcaccagtttactttattaaaatgtttacttgcactttttgagcaggatagggtttagcccatttgcaaagtgttttgcacttgctttggagtatcatttttattctgatggattaaaagcaatatatatgtatacaaatgtatatatatataagcattatatattataagcataatataatatataatatatattgtttttaatatataatatttagtacatcaattatttttactcctgggcattttgtcattattattgttatcatggactataagtcaacactgtgggagtcagatgtgtaaagaaagaaaatagaatctgaaaaataaacttggaatttttaaggaatttttgggtattgatgaggatgctgatga

SEQ ID NO: 381891 - DNA, 538 bp, Homo sapiens
ttgcactccccctgccgcccctcttctcttactgttaagccttatcaagttcctcagtttgggtgtcaaataaactcagtcacagttaactttggagcattattaaataatatttccatatgtagggagctcacacagaacctctggtcttggagtctcaccagtttactttattaaaatgtttacttgcactttttgagcaggatagggtttagcccatttgcaaagtgttttgcacttgctttggagtatcatttttattctgatggattaaaagcaatatatatgtatacaaatgtatatatatataagcattatatattataagmataatataatatataatatatattgtttttaatatataatatttagtacatcaattatttttactcctgggcattttgtcattattattgttatcatggactataagtcaacactgtgggagtcagatgtgtaaagaaagaaaatagaatctgaaaaataaacttggaatttttaaggaatttttgggtattgatgaggatgctgatga

SEQ ID NO: 381892 - DNA, 558 bp, Homo sapiens
agttgtaaggctagtacaggggatcccgcataccgttctcctccttttccccgttgtgaggacagtgcactgtattcactttcaacatccaaggtctgtgttgagagggtgagttgtgcggcccagcttgccccaagcccgtcttgccatcacgaaggatttcctgactcagctgaatctagctcaacaaagcaaaggacyaactaagctgcagattttctctccgctgggcttagcctacattatttacacctgttttcagctggatgggaccaaactggggccttgacttctggggtttccacgtgatccccaaagaggagacatccattcattcactcaggtatttgcttgtgcacctactgtgcgccaggtgccagatccaggaattgaagcccaggaacaactcttgcagtgagctccccgggtttttgttttctgaacggtgggaagacaggtcagcaaatagccatgcacgtctgcacatgtgtggctggtgtctgcaggagtaccgagaagacggtgagctctgccctggatggcaacaggaaagggcat

SEQ ID NO: 381893 - DNA, 558 bp, Homo sapiens
agttgtaaggctagtacaggggatcccgcataccgttctcctccttttccccgttgtgaggacagtgcactgtattcactttcaacatccaaggtctgtgttgagagggtgagttgtgcggcccagcttgccccaagcccgtcttgccatcacgaaggatttcctgactcagctgaatctagctcaacaaagcaaaggactaactaagctgcagattttctctccrctgggcttagcctacattatttacacctgttttcagctggatgggaccaaactggggccttgacttctggggtttccacgtgatccccaaagaggagacatccattcattcactcaggtatttgcttgtgcacctactgtgcgccaggtgccagatccaggaattgaagcccaggaacaactcttgcagtgagctccccgggtttttgttttctgaacggtgggaagacaggtcagcaaatagccatgcacgtctgcacatgtgtggctggtgtctgcaggagtaccgagaagacggtgagctctgccctggatggcaacaggaaagggcat

SEQ ID NO: 381894 - DNA, 572 bp, Homo sapiens
ctatttctcttcactgatgatatgactctatacttagaaaatgctaaagactctgccaaaagactcctagagctgatagaaactttagcaaagtttcaggatacaaactcaatgtacaaaaatcagtagcatttctatataccaataacactcaagccgagaaccaaattaagaatgtaatcttacwtacaatggccacagaaagaataaattgcctaggaatatgtataggtaaaaaatatataggtaaaagatctctactaggaaaattgcaaaacactactgaaagagattatagatgacacaaacaaatgcaaaaatatcccatactcatgggttggaagcatcaacatagttaaaatagccatactgccctaagcaatatacaaatgcaatgttatttctaccaaactaccaatgtttattttacagaattagaaaaaaatattctaaagtacatgtggaaccaaaaaacagcccaatagccacagcaattctaagtgaaaagaataaagccagaggaatcgcattacccaatttcaaactatactacaaggctacagtaaccataa

SEQ ID NO: 381895 - DNA, 573 bp, Homo sapiens
atttgcaaactacccatctgacaagggattaataaccagaatatataaggagctcaaataactctatagaaaaaaaatctaataatccaatttaaaaatgggcagaagatttgaatagacacttctctaaagaagacatacacatggaaaataggtgctgaacgtcactgatcatcagagaaatgcaaatcaaaaccacaattaatatcatctcaccctagtgaaaatggcttttatccaaaaatcaggcaataacaaatgctgggaggatgtggaaaaaagggaactctcattcactgttggtgggaatgtaaattagcacgaccactatcaagaacagtttgaaggttcctcaaaaaactaaaaattgagctgccatatgatccagcaatcccactgctgggtatatacccaaaagaaaggaaatcagtatattgaatcaatatctgcacctcatgtttgttgcagcactgttcacagtagacaagatttggaagcaacctaagtgtccaacaacagatgaatagtaaggaaaatgtggtactgttcagccrtaaaagagaatgaggtcct

SEQ ID NO: 381896 - DNA, 550 bp, Homo sapiens
tttgtgatttgccttattttctttgtatttattgactttaatcctcaggagagacaatatgaatttatttaagacagattagatcctagctctgggtcagatactcagcctttatccaataagattcccttcctctagtgacctggacctgctgggtaatggcatcacatgtgcagattgtagctgtttctttagcagaggctatgggcagagtcatttccactagaaggggmtgcaggcatttcaggcgatgtgctaaaacaaaggcagtttctgcaaaagagcacattctatttattctaccttctggatgtggcatgagtccatctatctctctctatccccactgtagctgttccagttcaggtcaccataccttatgtcttgactatagtaatagctttcataaatatatatatatatatatatatatatatatatatatatatatatatatatatatatatatatatattcctgccttctgtggtgtccaattcaaagcattttcaattctacagtcagagagaaaacataaattaatctgatt

SEQ ID NO: 381897 - DNA, 594 bp, Homo sapiens
tagtcacacatagggcaaccattccttagcagctagtgtgaaacaactatgtctgttatttctgtgttttcctctctgatccctgaggaccaggattcctccatccaggggaatcctgggctgactactgggcttaaaggtcttgaattacatcaagactaactccctgatgcttttccctctaccaggatctttaatcaaaggtaacaggagaggcaggattagacatgagcaatgatctcagtgttcccmgtgtctctcttctaggatatattctctccaaatgggggcaatttaagctagaagacctaaagaaaaagaaagtaatctccctttgtaacatcacctggccccagaacccattgggagattaggagcaatgaacattatatgagtctcctaggtataatgctactttacagctaaacttgttttataagcagtcacagaggtgggaagaaatctcttacgtgtgaacttttatgaagttgtatcaagatcctggattattggactcatgtcacatatgcatgatggcatctatcattcccagcttattgcctggggttgagaagcaagtgctggagctaccca

SEQ ID NO: 381898 - DNA, 594 bp, Homo sapiens
tagtcacacatagggcaaccattccttagcagctagtgtgaaacaactatgtctgttatttctgtgttttcctctctgatccctgaggaccaggattcctccatccaggggaatcctgggctgactactgggcttaaaggtcttgaattacatcaagactaactccctgatgcttttccctctaccaggatctttaatcaaaggtaacaggagaggcaggattagacatgagcaatgatctcagtgttcccagtgwctctcttctaggatatattctctccaaatgggggcaatttaagctagaagacctaaagaaaaagaaagtaatctccctttgtaacatcacctggccccagaacccattgggagattaggagcaatgaacattatatgagtctcctaggtataatgctactttacagctaaacttgttttataagcagtcacagaggtgggaagaaatctcttacgtgtgaacttttatgaagttgtatcaagatcctggattattggactcatgtcacatatgcatgatggcatctatcattcccagcttattgcctggggttgagaagcaagtgctggagctaccca

SEQ ID NO: 381899 - DNA, 416 bp, Homo sapiens
ctctcctaatttagctgaccaggctgagttcctaatcataaaaggaagaatctaaccatttatctcttcragtagtgccttctgaagtccctgaagcaagactccagcatccctgataagaacctgaccaggcgtggtggctcagtcctgtaattccagcattttgggcagccaaggctgactgaccgcttgaggtcaggagttcgagatcagccttggcaacatgatgacaccctgtctcaataaaaaatacaaaaaattagtcgggtgaggcagcacatgcctgtgatcccagtattctggaggctgaggcacgagaactgctcgaaccctggaggcagaggttgcagtgtgccgagatggtgccactgcacttcagcctgagtgacagaggtagactgtgtccaagaacctga

SEQ ID NO: 381900 - DNA, 416 bp, Homo sapiens
ctctcctaatttagctgaccaggctgagttcctaatcataaaaggaagaatctaaccatttatctcttcgagtagtgccttctgaagtccctgaagcaagactccagcatccctgataagaacctgaccaggcgtggtggctcagtcctgtaattccagcattttgggcagccaaggctgactgaccgcttgaggtcaggagttcgagatcagccttggcaacatgatgacaccctgtctcaataaaaaatacaaaaaattagtcgggtgaggcagcacatgcctgtgatcccagtattcyggaggctgaggcacgagaactgctcgaaccctggaggcagaggttgcagtgtgccgagatggtgccactgcacttcagcctgagtgacagaggtagactgtgtccaagaacctga

SEQ ID NO: 381901 - DNA, 521 bp, Homo sapiens
ggatggtattttgtttttgtgcctaaattaatctaataacatgctcaaaaaaatgacaattcaaatgactttgaagcagaagacatattttgcaatttttattgtcaaacttgagaacacagtcgyttccccaaaatgtggctcattaaattgatttcaaagcatctttgtttcttttaattatacatgtccatctactttctaagcccttttatttggcttaaaacattccccattttctgacaagtctctaatctcttgtaagctcctcagagaaatttagtgacactctctgtcacagaatgccacatgtccacagccccagcacccctgctgaacttgcaaagctgctgattctctggtttgtgtcagacctcggcacctaaatttccttttccaggctgctgacagccatttccactgagtgctttgcctctgacttttctctctagacattcaggtcaactggggttctggtgatggcagaatttctcctgtctccttccttgcagctaaggtca

SEQ ID NO: 381902 - DNA, 561 bp, Homo sapiens
tggcagcccaatctgcacctaggcccttttgagccgtggctagatctggaacagctgggtggggagcaacgtcctgaagctgcctagggcagcagggstttgggcctggcccccaaaaccattcagtcctcctaggcctctgggcctgtgatgggaggggctgctcttagatctataaaatgccttccaggcctttttcccattgccttggctatcagcaactggctctctcttaatgacgcaaatctccctagcaagtggttattttgcagcccacttggattcctctcctgaaatagctttttatttgccacatggctaagctgcaaatttttcaaacttttatgctctgcttcccctttaaatataacttccaactttgagtaatatctttgccccaacatctaagcataggctgttacaagcagccaggacacttcttgaatgctttgctgcttagaaatttctcccaccagatacccagttcatcactcttaagttcaaacttccacaggtccccagggaacaaacaaaatgaagccacgctctttgctaaggcat

SEQ ID NO: 381903 - DNA, 567 bp, Homo sapiens
taatatctttgccccaacatctaagcataggctgttacaagcagccaggacacttcttgaatgctttgctgcttagaaatttctcccaccagatacccagttcatcactcttaagttcaaacttccacaggtccccagggaacaaacaaaatgaagccacrctctttgctaaggcataacacaagtaatcttccctacagttcccattaagttcctcattttcatcttagacctcctcagtctggacttcactgtcaatattttggtcacaacaatttaaccactctctaagaagttccaaactttccctcatctctctcttcctgtcttcagagccttccaaactcttacaacctctacctgttacccagttccagagctgcttccacacatttaagtatctttatagcaatgccccacttctcagtaccagttttccgtgttaggccattcttgcactgctgtaaaggaatacctgatgctgggtaatttataaagaaaagaggtttaaatggctcacagttcttcaggctgtacaagcatggttctggcatctgcttggcttct

SEQ ID NO: 381904 - DNA, 550 bp, Homo sapiens
aagaactaaataacaacttatgccaggaaactggttttactctttcatgcaaggtttgacatcttgtctgtctgtccatcattgcagttatgccctgaggaggaaggacatggacaggtacagaatgaggctatcatagcaaggcagaacagtatctcaacttaacactatgtatttgtaagccattttatagcttgtacagcacattcttattgttttgtactcaggaatctttttataaggttctgtgtgcaaaaaatagtatgccctaggtgattcccagcatcacacattctaggcttctagaatgctggccggaagccaaaagtccagtctgtgcctctctctgattccagtcttcatgtttctgtctaggggtcccctaagactttcatgtgcaatcttagcatgccaactaactggttactgccgagaggcactgccttctaggtgctaatctaggcatataatrtttaatgcagaaatttggccaaagtctccccctccatcggtggtcataggtgcgaaggtggcatcaatcccagcagtg

SEQ ID NO: 381905 - DNA, 590 bp, Homo sapiens
aagctcatctggtaatcacagtggaacctcctacctcactccaaaaacttaaaccttcaaaagctagtgaaacagaagtctccacccagcgacacatgggaaaactctaaaagaacagaggcttggctgaccgaccagaaataggtccttttttatctgctatctcaagaaggaggaatcaagaatatacacggtccctgagcaaaggcaggactgacatgaagcaagagccatgtcctacatattgcccacaaaccagaagaatggtcccacgtttggacttgtatgatcaactgggtgccagtcactcctcccaagcagaggaacaagcgagagccaaatgtcactgcttatatttgagaagagtggaaaaccttcatgaaatgagaacaaggagtacagattgctcacaacagttttcactgtactaatagccatgtatccagcttctgtagactatcgcaagcctttataatagagcccgaagttaacatcatgctgcatagatgatagaagcagcatagaaccacrtagcgtgggggaaacaacgataggaacattcttcattgtggcacttgcattcaacacat

SEQ ID NO: 381906 - DNA, 600 bp, Homo sapiens
actaatattcttctttaggctctaggtcacaaatattcagtaacggcctacttgggtacaaaggaaaagcaaaaataataaaatggaaaggaaaactatcaatttcaatgtccttaaggtaatattcaaaaatttcttaaaaaatataatacagaaataaaagaatcccctaaaaggtaaaacaatctccaaattaaaagggtatatacattgttctaggaagtattagtagaaacaactaacaagacacaccctaatgagttgccaaactttaaaattgcaaaatcaattcttcaggcaaccagaagaaaatagtaagaggagaaaaaaatcaggctacccacagactactaggtgggaacaygtaatgccagaaaatgatgaaagactgtatacacaatttaaaataagaaaaatatgactcatgaatatataaatgagcaaatttttgttcaagttctaaagtagcagacatacattttcaaacataaaataagtcaggtaataaggcacccaacagttaaaacatagactttcttattatgctgactcaggttaactataatctcctattttttaagacaaccagcctgtttcaaa

SEQ ID NO: 381907 - DNA, 600 bp, Homo sapiens
actaatattcttctttaggctctaggtcacaaatattcagtaacggcctacttgggtacaaaggaaaagcaaaaataataaaatggaaaggaaaactatcaatttcaatgtccttaaggtaatattcaaaaatttcttaaaaaatataatacagaaataaaagaatcccctaaaaggtaaaacaatctccaaattaaaagggtatatacattgttctaggaagtattagtagaaacaactaacaagacacaccctaatgagttgccaaactttaaaattgcaaaatcaattcttcaggcaaccagaagaaaatagtaagaggagaaaaaaatcaggctacccacagactactaggtgggaacacgtaatgccagaaaatgatgaaagactgtatacacaatttaaaataagaaaaatatgactcatgaatatataaatgagcaaatttttgttcaagttctaargtagcagacatacattttcaaacataaaataagtcaggtaataaggcacccaacagttaaaacatagactttcttattatgctgactcaggttaactataatctcctattttttaagacaaccagcctgtttcaaa

SEQ ID NO: 381908 - DNA, 601 bp, Homo sapiens
tctctctgaacttctccatattttgtagctaaaactttattccaagttttaaagaaatacacacatatatacattttgactgctttaggacagacacttargtaactatctacttcatcactcttcttcccattatggcctgaccacttggaaaaccagtttactcatgacctccaccctccaattccccattcattaacccaacacaccactgaaattactcttttcaaggacaccaatccattttactcatgtatactttgtagctaattaacgtggacctagtttcattcttagtctacttatttacctaaataaaaatgtcctctttaatgctctatcttccctttgagtccattgtgccatggcatctaggtgcttttcctgcctcttttttttttcttgatcttcatagttacattcttttgctttactttcccacataaatgttggtggtacccaacattctcttctgtgccaacttttcactttaataatctccctgggcaacctcattcaagtgcagggacttaactattacctccaccttgatgatcttcaaataatatacattgctactcagcagatctctttcctgata

SEQ ID NO: 381909 - DNA, 612 bp, Homo sapiens
catttagtcttccaaacacatattaatatgggcaataaaacattctgtatgggattatgttgtgtaagctcaggggttcatagccattttcaggttaaaaaaagttatcagsaatggtatctttagaataaacctgtatattgcaggaatagataaatagtccttgctgattatcatcatgatatctgtgagttgggagattgctgcacattggtaggtatattttcaaagtgttatcatctcttattttgtatcctataaaatagttatgaaaatgccaaaaccaggagaaatgctctagccatagtatcttaattctaatgatataaatgtactgacaagtaattgctggctgggcatggtggctcacacctgtaatcccagcactttgggagaccgaggcaggcagatcatgaggtcaggagatcaagatcatcctggctaacatggtgaaaccccatctctactaaaaatacaaaaaattagccgggaatggtggcacttgcctatagtcccagctactcaggaggccgaggcaggagaaccacttgaacccaggaagcggaggttgcagtgagctgagatcatgccactgcactccagcctgggtga

SEQ ID NO: 381910 - DNA, 571 bp, Homo sapiens
  misc_feature (1)...(571): n = A,T,C or G
tatgactacccaaaaaaacttcttatttcttgcagctatagggctggtataattttaaaattayatgaagagttgtatctggaattgctaagctacaatgtaagtggaatttacagccttgccaagtctcgtatgtgaaaagtgagacaattattgtaaaagaatggaaatctgtgattaaggtaaatctagatgaatctgaatatcccaaactttcaaaagccaaagaattcccccttgtcagcagaaacaactccttgtcccctatgtgaatagcatggtcttatcctgcttgaaaactctgtaaggacctcacctatgatcattatcttgccttangatgtcaattgtccttatgcctaaaaattactaccctttattgtctccagttgtatatccagagtgagatgaaaacgtaccttagaagagcaaatgcagagttcattcgtgggggacaatgatacggtttggctctgtggccacacccaaatctcatgttgaattgtgatccccaatgtcaggggagggacctggtgggaagtgattcgatcatgagcgtggatttcccctt

SEQ ID NO: 381911 - DNA, 572 bp, Homo sapiens
ttaggtatcttagccactcttctctattattcatctttttgtctcgtaatgcttcattttagatatttccttctgacctattatcccatttgatcccttgcacttcatctgtttctaatcttctggtgtacccctagcttcaatcatatatatatatatatatatatatatatatatatatatatatatrtatgtatgtatatagttgggtttttttttttttttgagacagtcttgctctgtcacccaggctggagtgcagtggtgcaatcttggctcaccgcaatgtccgcctcccggtttcaagtgattctcatgcctcagcctcccaagtagctgggattacaggcacgtgccaccacgcccagctaatttttgtatttttagtagagatggggtttcaccatgttgtccaggctggtcttgaactccttacctaaagtgatctgcccatctcggcctcccaaagtgctgggattacagtactgagccactgtgcccaaccaaatttaatatatttttaaagcctaggatctaacattgcctttgtttctaattctgtgctccaattc

SEQ ID NO: 381912 - DNA, 582 bp, Homo sapiens
gataagtctaccctgccatctaaagacttatagccacagcaataaaagttgcaaacaactagcaataatatattctgtaaagtgtaagataaagtgtaataaaaatatatatataaataaataaatttctcargcaagaaaagatataattatagatacacaaattagtttattttttaaggagaacagagatatctagatttagaagaaacagaacaattgtaacagatatggaatatgagaaataacattcagaagtaataggctggtgtatttaaggtgcagccaataagaagctcacattgactatttctcccacattttgtgcagggtttcatctgggccattacccaatagctgctattttaacttctctgattccgtacttgtcctatctaccacagatgtttcaaagtggtttttctaaaatgcagttctgatgcactgttttataaagacagttcaataaaaactcatacaattgaagtccatatcatggtgtataaggctgtttataattcaaccattggtttattttccaggttcattttgagtcacctttttctcaatttatgcaccaga

SEQ ID NO: 381913 - DNA, 582 bp, Homo sapiens
gataagtctaccctgccatctaaagacttatagccacagcaataaaagttgcaaacaactagcaataatatattctgtaaagtgtaagataaagtgtaataaaaatatatatataaataaataaatttctcaggcaagaaaagatataattatagatacacaaattagtttattttttaaggagaacagagatatctagatttagaagaaacagaacaattgtaacagatatggaatatgagaaataacattcagaagtaataggctggtgtatttaargtgcagccaataagaagctcacattgactatttctcccacattttgtgcagggtttcatctgggccattacccaatagctgctattttaacttctctgattccgtacttgtcctatctaccacagatgtttcaaagtggtttttctaaaatgcagttctgatgcactgttttataaagacagttcaataaaaactcatacaattgaagtccatatcatggtgtataaggctgtttataattcaaccattggtttattttccaggttcattttgagtcacctttttctcaatttatgcaccaga

SEQ ID NO: 381914 - DNA, 582 bp, Homo sapiens
gataagtctaccctgccatctaaagacttatagccacagcaataaaagttgcaaacaactagcaataatatattctgtaaagtgtaagataaagtgtaataaaaatatatatataaataaataaatttctcaggcaagaaaagatataattatagatacacaaattagtttattttttaaggagaacagagatatctagatttagaagaaacagaacaattgtaacagatatggaatatgagaaataacattcagaagtaataggctggtgtatttaaggtgcagccaataagaagctcacattgactatttctcccacattttgtgcagggtttcatctgggccattacccaatagctgctattttaacttctctgattccgtacttgtcctatctaccacagatgtttcaaagtggtttttctaaaatgcagttctgatgcactgttttataaagacagttcaataaaaactcatacaattgaagtccatatcatggtgtataargctgtttataattcaaccattggtttattttccaggttcattttgagtcacctttttctcaatttatgcaccaga

SEQ ID NO: 381915 - DNA, 555 bp, Homo sapiens
tatgaatgagctatattttttcaatctcagtagccatttcttcatttatccatctacatagttactaaaaccctatcatatgcctattagttattaaaagccttctaagtatcaatgacctcaaacccacattcttcaaggtttgattttccctattatgtactgagaattcataggaggaggagttttatgtgtcacttgagttctctgcttagcaaaggtcccacaaaatgtctgtgtctctctgattccattgtgagccatttcttccttggctgcctttcacagtctaaaacccctgggcatgatcttctttgggttatttctgaactccaaattctattccatttgtctctctatatatatccttctgttggtatcactctcttttcattactgtcccttwgtgcagtagtttcaaaatcaggaagtatgagtgtccaaatttgttctttttcaagattgttttggctggttgggggcccttaaaatttcatatgaattcgagcatcaaattttcttcttttataaaatatacctgttggaattttaata

SEQ ID NO: 381916 - DNA, 497 bp, Homo sapiens
ggactgtatgaaagatgcaataaaatttagtcacgtgacatttggttatggagaagtctctcggcagatagtcaaaccccagttaagcagctaagtattgaatcaaagctaggagattgtgatactaagaatattaagtaggcatggccagtgttgacggaattggacttcttggcatacagttaagacagagactaaggacaaagttctaggaaccaaagctctatgaggcagtgaccaagaattggcttgacaccaaagcagacttcacagctagattggaagcagcagattttataaaaatgagaagttgggttttaacttaagattctcctacctaaggtaagtaacagttctaataaaagtggctctaggcaagtggcttcagacttgaagagacrgctccagagaagtagaacctgaaagcttccaatcgaggtgccagcttagaacattgttttcctttcttttcctagaacaccggcatacttatattt

SEQ ID NO: 381917 - DNA, 504 bp, Homo sapiens
aagatcaatttcacattataatccaacagtgatagtgtagtttgaatgctgtgctaaggtgactggagactacttttaaaaatcagtataggcaataaataatttgtgttaaaaacaagcttgagaaacttgaagctaaatttaaagatttaaggaagccaacttgagggaagggrcaaagaaaattaggaaaacattagagttgacacctatgagaactttgctattacttttccttaaaaatgtctacaggaatctcattttcacctcctatttgtcactgttctatcctttctttctcgctttctccctccttgcttcctcactctctttattctttcctgctctctacaaatattaacttagtcttaagataatccaagcagtgagtggatacacatacaaaaaataaatattcataaactgaaattctgtctatttactctcctgtttaattggttttctatttaaaatatattagttatatttccttttatattctta

SEQ ID NO: 381918 - DNA, 596 bp, Homo sapiens
aaatattagataaaagataagattcataaaattcttaagtattttgaaacacttgtctttgaatatttaaagcttttatgtgcaataaagcataatcatattatgtattactttataaaacaaacattcaaaaatggggaaaattttcaatacaataacaaataactttgtttctaataacaaaactttcacaaaacaaatagtcttcagagacaaaataattttttaagcctagaaatgttcacgatttaaccaattctgygctattttgagaaaggtagtatatcatcagattaaggtcggattatgttgtcttctccgttcgtgagattctagtatattatgaatgatctttcatgcaagcccatcagattcaacagataaattcaatgtgcaagcaaaaatgtctatggggaacttcctgtagatttttcaaagaaagtgagcttcattttgatttgggaaattatgatttttttcaattgtgtaagcaaaagttttaaaacaaacacaacaaaaatcaagttacttataaaacaagaacattgactttgagaggcagcttgtatttgagtacgatttctgctacttgcatt

SEQ ID NO: 381919 - DNA, 647 bp, Homo sapiens
taattagtagaatgtttttaaaayttttacatagcttaatatatacaacattttgtatgtatatacatgtggcaaaatatatttctggtttatgccattttattattaaaattctaatttttttcattttaaagttattaagaatgacccactaacttgacttaatgacttaatatataatcatcattcacagtagtgcacagagctttagaaaaaaaatgatagtagtccctatggatgaaacccagagtacattgttttggagtagtgatagcagatacaagaaatgaaggaaagggttcatttatagaatctgataaacagattatatagggttggttacccccaccccaaaggcaatgggaaacgccacaaaggtttaaacagagaaatgtcaggttcccttgtgggttttaggaaaatgtatttggctgctgtgtgaaggctgaattggagaagtgctgaatggaagacagagagcaaaatgaggaggttgtagccatgctcaagattaaatttaatggtggacagagttagaggagtgcaatttagagaatcaagagacatttatgaagttacataaacagaacttgatgattgattgaatgtgggcaggtaaagagtttaaaattactcccaagtttctt

SEQ ID NO: 381920 - DNA, 584 bp, Homo sapiens
tgggcatttaattgttgaaactagatttttatttttactaaaagtgcccggagaacttttaataatcttggactaaataaaagtatttggcttgctatacatatatatttacttgcactctaatacttttagctctctctaaactgcatgaggttgtggtgagataactgcatgagggtgaagtaggcaggggttacctcaaactaaaacatttctgtgtagcaaagagaacaaccaatacagtgaagagacaatttaccgaataagaaaacatatttttcaaacctcacatctgataagaggttaatatccaaaatatataaataactcaaacaactaaataataataaaacaaataacytgaatttaaaatgggcaaaggacctgaatagacatatctcaaaagaagacatacaaatggccaataagtatatgaaaaaaatgctcaatgttattaatcatcagagagatgcaaattaaaaccacaatgagatttcatctcatatcattagaacgaatattatcaaaaaggtgaaatataacaagtgttcaataggatatgaagaaaacagaacctttactca

SEQ ID NO: 381921 - DNA, 591 bp, Homo sapiens
tagcatgagtgaatccattttggtttggtttggtccactggagcccaggcaggcacacagttcaaaacaatgggatcacataattttgtttaatacattttttttcagaaagatgatttttgattttatactaggaaacatgatttttatatacagtgtatattttgatatatagtaaattattttcccagtagaaaaatagtaataaaaaaactaaaataaaatatatatttagtacctgtagaattaacrtaagtacatatccttaacaatcaccaaatagaaacccttttgttctttaatgtcacactttgaactgacatggataattgaaaaagttcattctttctagaaataataatgtagttattatgcatattcttacaccttccctatagttaaagtacatacaatttatttccctaagtagactataaattttccaagaatacagaaactactacatatgttactacatccatgacagacttgatcatcatcatcactgttagggatggacaggctttggtgtggtccaagtgaacaccaaaatctcagtggctttctggtataaaggtttattttcagagg

SEQ ID NO: 381922 - DNA, 595 bp, Homo sapiens
ttttagctatctaatggtttattatgcaataaatccatctgactgctctrtagaaatttgggtgagggtagtgtaacttaaaatcagatagtctaccaatatagatggctcttaaactttgtcttgacattttctaagaaaatacgtagatgtttttacattattggaaattcaattcggaattcattcacacatctcacgtctcacacatttcagaaaatcagaaatttgtattgatgaaaaaaaaaagttgttcttggccaaaaacatcaatcagcctcatctccagagtgatcctccaaactcagggagaattggtaagtgtttttgactttcatgatagatctgaaaattgtcacctaaattttttaaaaagcaacacacgaccagtgttgccaatctcttgtatttagcttgaattgactcggtacagttctttttccaagtctatataaaaatggcctcaggggatatcatttaattgtgtggtatgttcgttgtactgttcattccatcttttctgttatttgctatcattataaatcaactaccatgtaaacccatttgatcaaatgatgtgcattaataaatttta

SEQ ID NO: 381923 - DNA, 595 bp, Homo sapiens
ttttagctatctaatggtttattatgcaataaatccatctgactgctctatagraatttgggtgagggtagtgtaacttaaaatcagatagtctaccaatatagatggctcttaaactttgtcttgacattttctaagaaaatacgtagatgtttttacattattggaaattcaattcggaattcattcacacatctcacgtctcacacatttcagaaaatcagaaatttgtattgatgaaaaaaaaaagttgttcttggccaaaaacatcaatcagcctcatctccagagtgatcctccaaactcagggagaattggtaagtgtttttgactttcatgatagatctgaaaattgtcacctaaattttttaaaaagcaacacacgaccagtgttgccaatctcttgtatttagcttgaattgactcggtacagttctttttccaagtctatataaaaatggcctcaggggatatcatttaattgtgtggtatgttcgttgtactgttcattccatcttttctgttatttgctatcattataaatcaactaccatgtaaacccatttgatcaaatgatgtgcattaataaatttta

SEQ ID NO: 381924 - DNA, 595 bp, Homo sapiens
ttttagctatctaatggtttattatgcaataaatccatctgactgctctatagaaatttgggtgagggtagtgtaacttaaaatcagatagtctaccaatatagatggctcttaaactttgtcttgacattttctaagaaaatacgtagatgtttttacattattggaaattcaattcrgaattcattcacacatctcacgtctcacacatttcagaaaatcagaaatttgtattgatgaaaaaaaaaagttgttcttggccaaaaacatcaatcagcctcatctccagagtgatcctccaaactcagggagaattggtaagtgtttttgactttcatgatagatctgaaaattgtcacctaaattttttaaaaagcaacacacgaccagtgttgccaatctcttgtatttagcttgaattgactcggtacagttctttttccaagtctatataaaaatggcctcaggggatatcatttaattgtgtggtatgttcgttgtactgttcattccatcttttctgttatttgctatcattataaatcaactaccatgtaaacccatttgatcaaatgatgtgcattaataaatttta

SEQ ID NO: 381925 - DNA, 595 bp, Homo sapiens
ttttagctatctaatggtttattatgcaataaatccatctgactgctctatagaaatttgggtgagggtagtgtaacttaaaatcagatagtctaccaatatagatggctcttaaactttgtcttgacattttctaagaaaatacgtagatgtttttacattattggaaattcaattcggaattcattcacacatctcacgtctcacacatttcagaaaatcagaaatttgtattgatgaaaaaaaaaagttgttcttggccaaaaacatcaatcagcctcatctccagagtgatcctccaaactcagggagaattggtaagtgtttttgactttcatgatagatctgaaaattgtcacctaaattttttaaaaagcaacacacraccagtgttgccaatctcttgtatttagcttgaattgactcggtacagttctttttccaagtctatataaaaatggcctcaggggatatcatttaattgtgtggtatgttcgttgtactgttcattccatcttttctgttatttgctatcattataaatcaactaccatgtaaacccatttgatcaaatgatgtgcattaataaatttta

SEQ ID NO: 381926 - DNA, 558 bp, Homo sapiens
gattgacttatttcacttagcaatgtgcatttaagtttctttcctgtattttcacatcttaataactcagttctttttactgttgaataatattccattgtctggatttactgcggtttctttatccmttcacccactgaagtacattttgatttcttccacagttttgttaattatgaacaaaactgccataaacatttgtgtgcaggtttgtgtggaagttttcagctcctttaggtaaatgccaaggagtacgattggtggatcatgtggtaaggatatgtttagtcttgtaagaaattgccaaactgccttcttaagtaactgtcccattttgtattcccaccagcagtgaatgacagttcctatttctcaacatcattgtcagcatttgatgccgtcagtgtcctagattttgaccattataataggtgggtagtggtatcttgttgttttaactggcctttcctttatgacatacgatatggagcatcttttcctatgctaatttgccatgcatgtgtcttctttgatgaagtgtctgttaaggttattgag

SEQ ID NO: 381927 - DNA, 560 bp, Homo sapiens
actatatttatgcaggtctatttgttggttatctattctgttccatgggtctatttgtctctttttgccaatatcagactgtcatgattactgtacctttatagtaagccttagagatgggtatagacagtccttcaatttattcttatcaatcaatattgctttggctattctgtgttttttgccgctccatataaactttagaattagcttgctastgtccacaacatacattactggaatgtgattggaattttgttgaatctatagaccaaattgggaagaaatgacatattgccaatattgagtcttctgatttatgagcatgggatgtttccatttatttggtccttttctgtttaactcatcagaattttatagttttttttgtataaagcttgtacatattttgttcaatttatacctaaagtattccattttgggggaagctgatataaaagtaatgttatttctgtttttttttatttcaaatttaactgttcatggctggtctataaaaaataaactgacatttgtacattagacttgtaatcagcaac

SEQ ID NO: 381928 - DNA, 476 bp, Homo sapiens
tgagttttctctattgagaaaactcagtagagaatacctaattaatttataggtattctctgcatcttctcgatatgagacatttattgcctatatatgctacaaatagcttctgttacatgttactggcagaacacaacaagatagaaatccagaaacagatttccacagagctggtcattggatttatgacaaagaacagtggaaaagctttgacttttcaataatggtgctgagtcttttggattctataagaaaaagaaaaacaaaaagaaacttgactcttatatacaccaaaaataaaaatcaatctaggtaaaatggtaaaataataacacttctgaaagataacatyggggaatatctgctgacttggactaaggatcggttacttaaacaatattataaagtagaaaattgatatgcatggctacattacaatcaagaatgcttctcacatctaaatgcaaatggaa

SEQ ID NO: 381929 - DNA, 587 bp, Homo sapiens
tgtaagggggatgagaaatgaaatattacctaatggatacaatgtacattatttaggtgatcctgacactaaaagcccagatttcaatcattatgcattatattcacataacaaaactgcacttgcatcctttaaatttatacaagtaataacttttaataaaacaggaaaaaaatgctgggtgcagtggttcatacttgtaatcccagcactttgggatgccaaagcgggcagatcacctgaggtcaggagttcgagaccagcctggccaacatgatgaaacctcatctctattaaaaatacaaaaatyagctgggcatggtggtgtgtgcctgtaatcccagctactagggaggctgaggcaggagaatatgaacctaggagatggaggttgcagtgagccaagatcgcatcattgcactccagcctgggcaacagagcaagactccatctcaaaaaacaaacaaacaaacaaacaaaaacagaaaaaaataaataaaactaatatctatgatgagcacagatataaatagtcttaacaaaatagtagtaaaagaaattcaataacacattaaaaagaccattca

SEQ ID NO: 381930 - DNA, 655 bp, Homo sapiens
aaatgtctcaaataattataataagagatgggcattcctgaagtaaaaataatttctacaaattaataaaaatagtatatgaacaagtaatgacagaagataaagacaggagtccaaaaatattgttagtcactgatgattacccatattcaaattaatatattgttatactgcttttgttttgatttataaaagtcaatttattgagaacatttaataatagactagcattaaaaaacattctcatgcactgcatgtagatgtgaaaattagaataatctttttagaatgtattcttctgtatttgaaaattaaatatgcattactgttcagccaaggatgccactcaacagagtattttatatcatgtattagattcaaatccagtaatgagtttaatagcaaaaatattttggaattgaagttacttttttcatgaaactgcatctaatgattatctttatgacatttaattcgttcattatatttagtttcccagcactatggagtttcacagacccatttgttatatttgargagaaaatttaagattttgaaaaacataattacattagtatacattgaaagcaagaataaaagagcaataaatgaggagaaagtataaaatactatacttatttattcagagacaaaa

SEQ ID NO: 381931 - DNA, 458 bp, Homo sapiens
tttatcaggataattttattggtgcttcagggtctaatgttctttcgcattaattaaaatctgatgtcaaatgaatatcctgctactcctactttttctgcgagaatgtccattaaaaartgtgaggtttacatttgagtatagtgagaattgaaaacaatttttcaaaaaacattcatatttatagtgtgtttttttctgtgaatttacagttaacccaattaacttacttagcaaagataacttgttgctgtcatggatatttcataaacataaatcatatttcaaatataaatgatatgtaaaaatcaaggataaaattgtagttaagataagaaacaagttttcaaatttattccataaacttctcaaaatcagtgcttaaatgcatggaaacacagaacagaaaccaaagtccggatgcaaaaatatagagtttaaagtatattttctaatgt

SEQ ID NO: 381932 - DNA, 490 bp, Homo sapiens
gcagtatataatgtcttctcgagtattttatggaacatatgtgggtgcttcctaatgctacccccacagatccttacttacaacctcattacattttctgcctcctttttccctacctgcatttactatagtgacagctgttccttgttttggcttctgcttctggattcactcccggtacatggtcacacatccttggttttcaggaggcttaattcctgctttctggcatcagccactgcattcattcatattctgccataggttcccascagggctttattctccatcatttcaaatcagcttacatctattcagacaagccattccagtcaattacccagctatagccatggactgtacccctggttggccccatggattacagcacatgcaaatcctcttctagtcaaaatctatattcacagttcctgttttcacaccaaaactggatctttgccctagcaacaatctgtatgactggaacctt

SEQ ID NO: 381933 - DNA, 585 bp, Homo sapiens
ttgtcaagctgaataaaatattttaacaaactgtgataaaaacaacttgttattggtcacagactawtaagttgaagtaaggctctgtctactgaaaaaaggtacctgcggatatcttcagattgtactaaataaatcattaaatttccacttataagttgatatcccctttaaatacattatagtcaacatacagatatcctgaaatacctattttaatattgtatggtgcatagtagtaatgggaaacatttggcaagccctattagttgtgatatttaaaaaaacagctccaagaattatatactgtatcctttctaattaatgactaaacaaatgtcagtgtggtattaaattcaattaccatttattagtcattttcaatctgggaaaacacgtttttatacagtctcctgaatgtgcatagaatgttattataacttacgaagtctgttttaagtaaaatcctctttgtattattaataatagagccagagtttagtttacctgttggtatctgaacagtttttactttcctcctccaatagcacaaacaatatggtcttttattgacatctcaagatc

SEQ ID NO: 381934 - DNA, 483 bp, Homo sapiens
ttgttatgctgatatagattaaaccaagttttagttaagtcttcccacatcacttccaacttcataaaagtctagcttagagaacaaagccacacagtctcaactcagctgagatgggagtcaagaaaaagtcactaaagctgtgtcagatgaaatagtcatatggtgaaactgattcattttracatcaactaaaataaaaagaaattaactcacaatcaatttgaaatttaaaaaatgaactcagcctgcaaaagattatcgaaggaactattttgggacagattgaaacattgtataaatgtttcaggtgtaagaactgcttaggtggaatatgaagtcaatttaaaaaaaagaaacctcaataatgtaatgtcataataatataattagccaaaaatagatattggtgagccaaggaggggaaatgagtattcaaacaatgcttttaggcatttacgaatgcattaaaaataggaacaa

SEQ ID NO: 381935 - DNA, 483 bp, Homo sapiens
ttgttatgctgatatagattaaaccaagttttagttaagtcttcccacatcacttccaacttcataaaagtctagcttagagaacaaagccacacagtctcaactcagctgagatgggagtcaagaaaaagtcactaaagctgtgtcagatgaaatagtcatatggtgaaactgattcattttamcatcaactaaaataaaaagaaattaactcacaatcaatttgaaatttaaaaaatgaactcagcctgcaaaagattatcgaaggaactattttgggacagattgaaacattgtataaatgtttcaggtgtaagaactgcttaggtggaatatgaagtcaatttaaaaaaaagaaacctcaataatgtaatgtcataataatataattagccaaaaatagatattggtgagccaaggaggggaaatgagtattcaaacaatgcttttaggcatttacgaatgcattaaaaataggaacaa

SEQ ID NO: 381936 - DNA, 404 bp, Homo sapiens
aggaaataggttcttaaaactgtttttctaccagtgatcattaaattttattgatgaagaatcacaaacctatattttaatccacccaaatatattacagaagaattgcagagaattaaataacataaggaaagtcacccaattataaaaatagagactattaacatgatataaaggtatatgttttagttatatttgcaatctcattttgtttctaaaatatatttgaattgttttggacatatcaaaagaaatatgaggaacagaaggtataaccaaagaaaaaatggatatgatatgtatcgacatcttttatatgttaatacagagcattaattcwcattaacttgattaaatattctaactcacgattttcttggagaaagataattttgaggagatgg

SEQ ID NO: 381937 - DNA, 377 bp, Homo sapiens
atatgattgatttttcccctcagggacatttggcaatgtcaggagacattggcacgactgttcaggggaaagattgttattggtatctggtgagtaggagccagggatgctggtaaacatcatgcaggrtacagggctgccctcaaaacaaggaattgtctgttaatagtttcactgtgaaggtaccttgcttatagaggaaatggagagcttctaagcctctgagccctttaagaggaatacatattggaaatgttattgtttcaactactagggtttgttcgcatccagaggcaagttgaaaagtcgtattttcttcaacctttcatattccatagcaaaataaatattaggttgtacatagaaagtacttgata

SEQ ID NO: 381938 - DNA, 543 bp, Homo sapiens
acatttattttaaatttcttttatctaatacctactgaaacagaatagtattttttttaaagatgaaattgagattttttaagttgaaggtagtaagccagatactgaactgagaactaaagttttaagaatacaagaaaaataaatcccagcataggtaacagaatgatttgaaaagtgcaaaaataaatgtaaaaaaccattgtgcagaggcaattgaagtaaaagtaaccattagaatcacaaaaatgaaaaggactttaagtcatcattaccaaacctactcasaaggaagcctttttaaagtaacatagcacaaagaatgttataaattgagaatgtgcagagtgccatggacaaaaacagtataagcaaaatagcagattctgatacaatgctactttttctagaagcttccaaggagtacatgctgaaagattgctctatgtaaaaataaaaatattctgaggtattttgaatctttgtcctaagcataataaaagagtccactggtgaactgtgggagggtataggatgttttca

SEQ ID NO: 381939 - DNA, 384 bp, Homo sapiens
tgaacccctgtactaagaatcttgaataaagttatacttgatgttttttgaacaggtgccagtgcaaattttattttacaataagtgcataagtaygacaccctggcactaggtctttggagcccccatcataatcagtgacctaattctttatttcctttttatttatttattttttctgagatggagtttcactctgtcatccaggctgtagtgcagtggcacaatctcagctcactacaacctccgcctctggggttcaagtgattctcctgcctcagcctgtcaagtagctggtattacaagtgcataccaagacaccaggctaatttttgtatttttagtagcaaaggggtttcaccatgttggccagactggtctcga

SEQ ID NO: 381940 - DNA, 552 bp, Homo sapiens
ataaattacaaataattatttcctaattattaggcacaattcagtcctaagaaaggtgacgctaatgagttcatttttttgaaattaaaatacacatattcttgattagataataggataaagtaaaaagattagcttccttttactttaagatacttaaattgtaaatcataaaataagctatatagaaaacctgatccttaattattaattaattacttttctacaataccaattgtattcatcagggttctctagagggacaggaataacaggatagatataaaggggggtttcttaagtagtattaactcacatgatcacaaggtcccacagtaggccatctgcaagctgaggaaaaaggaagccagtccaactcccaaagctgaagaacctaaagtctgatgttcgagggcaggaagcatccagcaggggagaaatatgtaggttgggaggcaaagccagtcttggtcttttcacttccttctgcctgcttttattmgggctgcgctggcagcagattagatggtgctcacccagattaagggtgtg

SEQ ID NO: 381941 - DNA, 517 bp, Homo sapiens
ataaaagccactaaatgttgaagtggtttgttttgcacataattgatacacatatccatcacgtatgtatatataattattctctttgattataaattaatatatttttaattctatattgcaggtttaaggaacatcgattggctagattattcaaggataaaattagctaacaaaagtattaaaagtgaagtgaagtgataatttggaaaaagtatgaaataagtgaaaaaataaaatgatttgtggatagcacaaccagtatatgaaacgatctataattgacatggaagtacttgccctcattattctatttgtccaagaataaaatgaatggaatctgtgagcattttaaatatgtgtttattgcctaataatattcatttctytcatagggaaaatgaaacgcacaccatcagtatgtttgcaaaaaataaccatttgtgaaatagaccatatgaaataatttgaaaaaggcatgcattataagaaaactacagcagggcaaagcaacagg

SEQ ID NO: 381942 - DNA, 626 bp, Homo sapiens
ctgctatatatcatcagggacaaaattatttgaaagaatatcatagtgtatcacttttattctatatgtaaataggtagggtaygtactttttatgaacactcatttaacatttcttccataaaatagttatagtatatataaaagcacatccaattgactgtaaaatatgtcatcactatattttaagttccagattaaaaacacagaagtaatcatgggtaatttttattttatcaaatagagtaattcttaaataagtaagcatacacccaaaaaattacacacagaatgcataatatttggtaaattttaaaaaatattcttttatgaaactactcaggcatgtaaaaaagttataaattaatttttaaagttatatttaaatactaacataaaacttaagagcaaagtacatttttatgacacatacattaagaacgtattttagaaatggaaaaaaaacttcctaaaactggaaaatttaattaagaagccacccatattgatcaagttgctgattaatctcattgtttttcagtgtccaagatggaagctgttattttgagggagtttctgaaaggtctaagagaaaaattcccctgggttgatgggacaggtatccaa

SEQ ID NO: 381943 - DNA, 549 bp, Homo sapiens
aaactttcccccctcagattatacaatgaataacccgctgttttctattttctattatgtattctttttgtttgttttgggtggtaaggagaataagggacaaggagatttgccacaatgaatttcaaatatgtccatctgtagattatttcactggactcctgaagatgccccagtgattttgacggcagaggtgaccaaatttctttgtcagtagtgtttttgactataactactctaggacattttgacattcacagaaaattgttgtcttgttttgatcctcctcaaaagatggattatastactccattgcatgcttctgataactttggaaattgtgaaaaagtattgactgggtggactgaactagtggaagacagaagtaatcttttttgacttttgactttttgtttggaacattgctgatcctttgttttgtttttcagagtcagagaaccttttttttttgagccatttacagcttttgtcaattgtgaggtgaaccaaccagtgacccctgactgcagctcagaagaaacaaaaggg

SEQ ID NO: 381944 - DNA, 540 bp, Homo sapiens
tgactgctgttttccccaaaaacaacgccctttgtcagcatgaagcagttaagagttgtaattgtccttattctaatggcagttagatgtacctcttgagagaggggcttgatggcagtggcagctggtctgaagtggtcactggcatgacaccagctgcagtgggttacaggcacaggctgtgggtcctcaggtacagatgttgagggaggcagttcctggatcctgcccctgggagccgcccygaaacccaccaccctgggaacctgcccctgagagctgctacaatggtgccaggccaagccgcctgccagcaaaagagcaggatggtcaggcatggaggagtaggcagagaggggccccaaagtggagctggcctggggcagagccgggcttgcaaatgcagcatggggactgggcccaagatgcagatctgggcccatgcttcagaggcccatggcaggaagtagcagtggtgcctgctttgaggacccagccagtgatgctgccactgcacccaccccaccagctgagccacat

SEQ ID NO: 381945 - DNA, 540 bp, Homo sapiens
tgactgctgttttccccaaaaacaacgccctttgtcagcatgaagcagttaagagttgtaattgtccttattctaatggcagttagatgtacctcttgagagaggggcttgatggcagtggcagctggtctgaagtggtcactggcatgacaccagctgcagtgggttacaggcacaggctgtgggtcctcaggtacagatgttgagggaggcagttcctggatcctgcccctgggagccgccctgaaacccaccaccctgggaacctgcccctgagagctgctacaatggtgccaggccaagccgcctgccagcaaaagagcaggatggtcaggcatggaggagtaggcagagaggggccccaaagtggagctggcctggggcagagccgggcttgcaaatgsagcatggggactgggcccaagatgcagatctgggcccatgcttcagaggcccatggcaggaagtagcagtggtgcctgctttgaggacccagccagtgatgctgccactgcacccaccccaccagctgagccacat

SEQ ID NO: 381946 - DNA, 640 bp, Homo sapiens
ctattcacagtagcctaggtgtggaatcaacctaaatgtccatcgatggattaatgaatttttaaaatgtggtataaaataaggagtaccattcagccataaaaaacgatgaaattctgttatatgcagcaacatggctggaactagaggctattatgctaagtgaaataagcaaggcatagaaggacaaaatttgcatattctcactgatatctgggacctaaaamaattaatctggatgtagagagtagtacgatgatagttaccagaggctgggaaggatgaaggggtgggatgaatagatgctagttaatggatacaaacataccgatagataagatttaattcttgtgttcaatagcacagtagggtgactacagttaacaataatatattacatatttcaaagtagctagaagatttaaaatgtttttgtcacaaaggaataataaatgtttgacgtaatgaatgttccagtaactcagatttaattcctacacatggtatgcatgtatcaaaatatcaccataacccataaatatgtagaattatgtattaataaaaataaactattaatcaaaagttcccacatatacaaagaataaaaaacaattataccacaaatgatatttacaagttt

SEQ ID NO: 381947 - DNA, 643 bp, Homo sapiens
ttttattgtctcttagaactaagtctcatgaccatcagttttcagatgctaggaaggttgtagttggtcctttatgctaaaaaataaactctcggaacctatttactgttacctggggatgggagtcacaggtaaatggcaaatttccctctcatgtcacttacttgcataaataacatctcttgagctagagtaggaaatttgaacttaaagttcctccttgcactttccaatttggagggcatgttactactcaggaaataccccaataagaatggggagtgtaatctctggaagtcactggtcaaagagacaatatttcctgatggaataatcatcaatcttattaccaaaatatgggtagaacattgtggtagatattggcccattcaatayccaatttattctatttctagtgtctgccatctgtacttcagatgctggaaagtaagaatcccctcaatgctagggctcaggatgtgacatgaaatctcccaattagatgtaccttcatgggacttgaattggaatctgttgagtctgggataaccctggaaaaataagtatggttccggagctagtggctatcctggcaacatcttaattacaggggcagcttctgattgtagcaaatgtagaagtt

SEQ ID NO: 381948 - DNA, 602 bp, Homo sapiens
tattgtttatttgtggaggagttgtgtgaattttcattcaagaggttatggaagaagataagtaatcaaggcaatcagacacctgtagaaagaatatggaatgagtaccaggtgccccggcatgaggagtagtggagagaaggaactagaccaggctaatgtccagtgcacagtatgatataaatttgattgatgaagaaagtactgatgttgaataaattgtccrtaaggaaaggttatgctccaatgaatgggcaggatattttctctgatgatggtaaatgctcctccatcagttatccaagaaagagacataacttggcacaggaaattagggtttaagagcctgagcatcaacactacaatagaaagggtactatgatctggtttctacataccatttactaaaaggaaccaggactctggaaaacgtttgtctccagggctaggagaaagaaaggtataagatgagcctggggattttgttttgttagaaagcaagaattgctcaaagaatgatacggacatgtcaaagaacagagaagccaggttcaaggggctctcagtggccaaatattacaaaatttgagcaccaaaaaaaa

SEQ ID NO: 381949 - DNA, 614 bp, Homo sapiens
agggctaggagaaagaaaggtataagatgagcctggggattttgttttgttagaaagcaagaattgctcaaagaatgatacggacatgtcaaagaacagagaagccaggttcaaggggctctcagtggccaaatattacaaaatttgagcaccaaaaaaaaatgatggtagtacagatcataactaattttataaaataggaatacattagcttatattgatataagtaagtgacatttgttcatcaatgggatataatatagtcaaaaaatacctcccaataaaacactgattgattataaaaagagtaacttcactgtggctaagccagagagataccaccttaatcaagagattaaaggtgacatcaccagtgatgggaaaaattaaaatcatgtaccacctggcagatgcaataagggcacagcatcatcacttctgtgataatcctgcccaagatgcatagcctgaatygaatcatgaggaaatagaaagataaactcaaactgaggaacattctaaaaaatagcctgtaatcttcaaaagtgtcaagtccttgaaagccaaggcaagacaaattgtttcagatgaactaagactaaagagaaatgaca

SEQ ID NO: 381950 - DNA, 566 bp, Homo sapiens
ctcatttcatcttcaatggttattaagacctatttatgttagaaaatggtaatctatactcattgcttagttttttaccgctcrttgttgctgtagcataatgtaatttttccacttgttttccttcactccattttaacagttcactaaggactccagtaaaatcttggttgaccaaccttgtgccacttagtgtctgtgtaaccctagaaacttaatttactttgtcagctgaaaaatatcacaagatatatacatttagacaagaagactttctttttgttttcaacttttaagttcaggggtacatgtgcaggatgtccaggtttgtaacacaggtaaatgtgtgccatggtggtttactgcacaggtcaacccatcagctagatatacttttctgtcaggcagatttctctgcctataagatctgaactttctagaagcttcaggatcctacctatatgaaaacatcttttaactcatgaaatatataaattattattttattataatttttcagctaatccatttttagcatgtatggcagtggtattgaaatagttctc

SEQ ID NO: 381951 - DNA, 473 bp, Homo sapiens
atttatgttttgcaattcaatttcctcatctgtaaaatggttataaaataatctacctcaatagcagatgytgagtttgtcttctacttattttcaaactagaatgagagtggtggagttccagtgggtagaaggaagtaggaaacaactttttttctccctatccctatattatatgaactaccctcagtcctacacagctgccttagaatgatctggaagagacctttgaacctgaggcactttaatatataacaaagacagattaatggcagtattaaagaaaaatgaaattccatagttctggttatgcaggtattaagtcaattccaatggttctagatattaattacatagaaacattgtttgagttcaagctgttacgacaaaatagtatcctaggtgacttatcaacaacagaaatttatgtctcacagttctagaagttggaagtgtgagattggagtgccagc

SEQ ID NO: 381952 - DNA, 452 bp, Homo sapiens
taaactcagcctgctcattccccactaatttatgatattctaagctcatacgtttactcttacttttattttaatgtttttttcagttgctttgctcagattcagaggatgtcatttacaggagtcctcacttgtaggaaacaattatctatagattgacaaatgaatgtttaaaagaaccatgtattttctttctctccttttttgaattgccttcagttacgtctacgctcatttttactgatgttatagagtgatagatgaaagaagagggttgtcagttccttttcctagaggaccaaaattatgtcattcattcatattctctattgaggtttgaatatcagatatttcatgattttatrtatcccccagcagaatgcaagctctattaggatgcagagcagtgtctacacggagcccacagtgcctggcacatactgttggtctct

SEQ ID NO: 381953 - DNA, 646 bp, Homo sapiens
gtgctgacacctttttttcagactactagccttcagaattgtgaaataataaatgaccattgtttaagcctctttgttaagcagccctagaaaatcaattcaaaaattataaagtaggtgatatggtttggctttctgtcctcacccaaatctcatcttgaattgtaatccwcatgtgtggagggagggacctagtaggaaacagttggatcatgggggccgtttccccgatgctgttcttgtgatagggagtgagttctcatgagatctgatggcttttgtagtgtttggcagttccccctccccatctctctctcctgctaccatgtatgatatgccgtgcttctgctttacattccaccatgattataagcttcctgaggcctccccagccatgcagaactgtgagtcaattaaacttcgtttgtttataaattaaccagtctcaaggagttctttaaagcagtgtgaaaactgactactatagtaggtatgctaaaaatgagtaaagagatgcagaaatgttaaaaaaaaaatacaagaaaaaaagacattgcaaaaaaatagatgttgcataaggataaatatagatgttctcaattaaaatctccataagcaggttaaccattatgtcaagcacaactaa

SEQ ID NO: 381954 - DNA, 596 bp, Homo sapiens
ttcacatcaattgttctgagttcattacatttttaattacaacaaaagaggtttaattggctcacagttctgcagacattacaggaagcctgcagatagtggcatctgcttctgggaggccttaggaagcttctaatcatagtagaaggcaaagrgaaagcaggcacatcatgtggtgaaagcaggagcaaggattggcagggaaggtgctgcacacttctacataaacagatcctgtgtgaactcagagctagagttcacttaccactgaggggatggcctaagccattcataagtaatcagccctcatgatcaaaacacctcccaccaggccccacctccaatattggggattacatttaaacatgagatttgggtggggacaaacatacaaactatataattctgcctctggtcccaaaaatcttatgtccatctcaattgcaaaatacactcatgccttctcaacagtaccccaaagtcttaacgcattccagcgtcaactcaatcaaaattcccaagttcaaggtccaaagtcatagatggagatgagtttcttccacaaatgaatctttaaaatcaagacaaattattta

SEQ ID NO: 381955 - DNA, 569 bp, Homo sapiens
agatattgggtaagcatccccatttcaaaagggagaaattggccaaaagaaaggggctacaggccccatgcaaatccaaaacccagaagggcmgtcattaaatcttaaaattccaaaatcatctcctttgactccatgtcccatgtccagggcacactggtgtacagggaagaataacaaggccttgggatagattccatgcaaggagtagactccatgtcccatgtccagtgcacactggtgcaaggggtagaatcccaaggccttggtagattcccaagaatccacccttgtggcttttccatgctgaggttgcaaactactggttattctaccattctggggtctggaggatggtggcccctatcccacagctccactaggcagtgcaccagtgggaactctatgtggagcttccaaccacacagttcccttccacactgccctagtagaggttctctctatgggtgccacccctgcagcaggcttctgtctggacaccaaggctttcttatacatcctctgaaatctaggcagtgtctggcctcctttactttcacactcagcat

SEQ ID NO: 381956 - DNA, 569 bp, Homo sapiens
agatattgggtaagcatccccatttcaaaagggagaaattggccaaaagaaaggggctacaggccccatgcaaatccaaaacccagaagggccgtcattaaatcttaaaattccaaaatcatctcctttgactccatgtcccatgtccagggcacactggtgtacagggaagaataacaaggccttgggatagattccatgcaaggagtagactccatgtcccatgtccagtgcacactggtgcaaggggtagaatcccaaggccttggtagattcccaagaatccacccttgtggcttttccatgctgaggttgcaaactactggttattctaccattctggggtctggaggatggtggcccctatcccacagctccactaggcagtgcaccagtgggaactctatgtggagcytccaaccacacagttcccttccacactgccctagtagaggttctctctatgggtgccacccctgcagcaggcttctgtctggacaccaaggctttcttatacatcctctgaaatctaggcagtgtctggcctcctttactttcacactcagcat

SEQ ID NO: 381957 - DNA, 575 bp, Homo sapiens
tgctctgggtctctgattctccataactagtaaatacccctaaatacctgcaakttagtagggaaaaatagcaaaacttcccatttcctttcctttagcatttctttttcttctttcatctatttttattttcctccaggaaaataaattttaaaaattgccttacactgttcatggaagccactagcaaacactgcagtactcttaatggtgatgattctcagttgaaatatttaattatcccctttcaccccatacacacacaatacaggccaatgaatctctacaactatgttgtgttacagaagtgatgtgagctgccctggcagacggacaagaaagaaagtgaatactatttcaggtacctttatttccttccctaaacctgttaaaagtgttatgtataagactttaaaaactatatgagttacttatttcacatgtttattgctgacttttgttgccttctcttaagctaaagttctgtcttatgaggcgaatcatataaacagtgaagttttaagagttcttctatgaataaaccctgtaaaaccaccaagaaattagcattactc

SEQ ID NO: 381958 - DNA, 519 bp, Homo sapiens
atatttctcccaagaatatgtccatattccttccaaggtgtgttgatgggtatggcttccttcaggtttctgggagggctcctgatgggtcactggatggatccccgggatgtctgtatggctccagtttgtgcctgagacaggctgtaactgaatccctagattcgcacaaacagatttttgttgtgggtaggtgcagaaggagggaagatgagcaggtgacctcctattccaccatctgcccaaagtcatctctcattgatttttaaatttgtgctttctccaaactctttttctaaaattcagttcatgtttctttctaacaaccccaaaccttaatactctatcaattccctttttctcctcttgtattatctatctctgtgaacygcctccttcaccacacccaaaccccatgtcaaggtaggaatgtaggagccatcctagactcattagtcatcagagaggtgcaaactaaaactaacaagttataaaaacactcgaatgtttaatcatgcc

SEQ ID NO: 381959 - DNA, 565 bp, Homo sapiens
caccttaacaagtgcttacttatataataagtgatgaaaggaagtagcacatattttgaatccaataatacaacgtaattytgggacaccacagaagaaccaatcttgagtttagcccggaaagcatgacacctttatttggaaggccctcaaagcaccctggagatgtggatcttcatgcacataagctataaatatcttattatattgactaaaaacattaacatttctccagggaaacatgaatttggggataaataaagacttgaaattgcctcttgtaagttcaggtcaggatttttttttttttttttttttttttttttgagacggagtctcactctgtcgcccaggctggagtgcagtggtgccatctcggctcactgcaagctccgcctcccaggttcatgccattctcctgcctctgcctcccgagtagctgggactacaggcacccaacaccacacctggctaatttttgtatttttagtagagacggggtttcaccgtgttagccaggagggtctctatagccaggtcaggattttttacaaaaagagtttgc

SEQ ID NO: 381960 - DNA, 565 bp, Homo sapiens
caccttaacaagtgcttacttatataataagtgatgaaaggaagtagcacatattttgaatccaataatacaacgtaattctgggacaccacagaagaaccaatcttgagtttagcccggaaagcatgacacctttatttggaaggccctcaaagcaccctggagatgtggatcttcatgcacataagctataaatatcttattatattgactaaaaacattaacatttytccagggaaacatgaatttggggataaataaagacttgaaattgcctcttgtaagttcaggtcaggatttttttttttttttttttttttttttttgagacggagtctcactctgtcgcccaggctggagtgcagtggtgccatctcggctcactgcaagctccgcctcccaggttcatgccattctcctgcctctgcctcccgagtagctgggactacaggcacccaacaccacacctggctaatttttgtatttttagtagagacggggtttcaccgtgttagccaggagggtctctatagccaggtcaggattttttacaaaaagagtttgc

SEQ ID NO: 381961 - DNA, 579 bp, Homo sapiens
aaaaacatgttcagaatccaaaggggaatgatttagtaaaatacagaccacagatttgaatccagattacagagtgatctgacaactcctaatctgatcatatatcttaatttagtatcaaataagaactcaagtgagcttgatattcttatatttaagttatttaatttctgagtaagcattatgttcagtggtctttaagaagattatatggataatagtggataatatatcttccctcctcaatctttgcatacctattgatacttccttttgcctttacatataaaagacaatcactataggttaaatcatccccattctctcccccaaatttaactttttccaaatattctgttttatttattattatgcawgtcacattgcagaagagcagtctaaggtccaccggatttgtttgttacgtcgtagacagtaataatctaactcaataaaggcttaatttttttcttaatctttcctaaaaacttttagtggtataggtttagagatgtatctctttccttagatttttacattagttatgggaagtcttttaagtttgcatcctcagatatt

SEQ ID NO: 381962 - DNA, 579 bp, Homo sapiens
aaaaacatgttcagaatccaaaggggaatgatttagtaaaatacagaccacagatttgaatccagattacagagtgatctgacaactcctaatctgatcatatatcttaatttagtatcaaataagaactcaagtgagcttgatattcttatatttaagttatttaatttctgagtaagcattatgttcagtggtctttaagaagattatatggataatagtggataatatatcttccctcctcaatctttgcatacctattgatacttccttttgcctttacatataaaagacaatcactataggttaaatcatccccattctctcccccaaatttaactttttccaaatattctgttttatttattattatgcaagtcacattgcagaagagcagtctaaggtccaccggatttgtttgttacgtcgtagacartaataatctaactcaataaaggcttaatttttttcttaatctttcctaaaaacttttagtggtataggtttagagatgtatctctttccttagatttttacattagttatgggaagtcttttaagtttgcatcctcagatatt

SEQ ID NO: 381963 - DNA, 580 bp, Homo sapiens
tatacaggcacaaacatattcttaataaaataaggagaaaatgctcgagacaattatagtccttgtttctgcaactggtcacgtggttgtagctggtattgattaataccttccactactacccattctgtattctctttgccttcagcaagcacctcagctggtcgtggttttacctggtggagtgactcaaatcttccttgttgaagggtctgggccatttgtagttctacctggattgggttgttgtagtttcccattgaccttaatcacaggacatggtaatactaagagacaccctaagggatctccagtattccacacgtactcttctttacctccattgtggagtagtagactgatttcatcttgatagtccaggtcaatcaccccagccaacactgtaactcccttcttagcctgttgacttagaggtaggaggagcccraagtggccaggtggcaatgttaacttccagcttaatggaatcattgttgtgtctcctggtggcagcattcctccttctggaactgagacctctaggccagcagaacataatgtcatgagaacagaaagcaaa

SEQ ID NO: 381964 - DNA, 587 bp, Homo sapiens
gtgggagaatcacttgagcccaggaagtcaaggctacagtgagccatcttcatgtcattggactccagcctggtgacagagtgagaccctgtctcaaaaaaataaagtgagagatgtgtaattcyttctttcacttgaacccttaggggctattgttgggctattaattggcttaatttcaatattgttgtatctcagaaaatagggaggtctgcagagaatgagagaggccaacagttggtcagtggagcagtcagaacatacacaacattgatcaatgaatctcaccgtcttatatggtcatagtttatggtgcccaaaacaattataatagttacatcaaagattactgatcacaaatcaccaaaacagatataataattaaaaagtttgaaatattgtgagaattaccaaaatgtgacacagagacataaggtgagcaaatgctgttggaaaaatggtgccaatagacttgcttgacaaagggttgccacaaaccttcaatgtgtaaaaatgacaatgcccaataaagtgaagtacaataaaatgaggcatgactctgtgtgtgtgtgtatgtgtgtgtatac

SEQ ID NO: 381965 - DNA, 587 bp, Homo sapiens
gtgggagaatcacttgagcccaggaagtcaaggctacagtgagccatcttcatgtcattggactccagcctggtgacagagtgagaccctgtctcaaaaaaataaagtgagagatgtgtaattccttctttcacttgaacccttaggggctattgttgggctattaattggcttaatttcaatattgttgtatctcagaaaatagggaggtctgcrgagaatgagagaggccaacagttggtcagtggagcagtcagaacatacacaacattgatcaatgaatctcaccgtcttatatggtcatagtttatggtgcccaaaacaattataatagttacatcaaagattactgatcacaaatcaccaaaacagatataataattaaaaagtttgaaatattgtgagaattaccaaaatgtgacacagagacataaggtgagcaaatgctgttggaaaaatggtgccaatagacttgcttgacaaagggttgccacaaaccttcaatgtgtaaaaatgacaatgcccaataaagtgaagtacaataaaatgaggcatgactctgtgtgtgtgtgtatgtgtgtgtatac

SEQ ID NO: 381966 - DNA, 633 bp, Homo sapiens
agcctggcaccagcatctgctcagcttctagtgaggcctcaggaagcttttactcagagtggacracagaggaggaggaggcatggcacatggcaagagagggaacaagagaaagacaggaggaagtgccaggctcttttaaacaacccagctctggttctaactaatagagcaagaactcattcattagagaaaaaacacatttatgagggatccacctccacaacccaaacaccttccaccaggccccatctccaacactggggatcacatttcaatgtgagattgggaggagacaaacatccaaactgtatcagtagggactgcctaaacctcaatatggagaataattctgatgctacatctaggttcattaggaacacatgccgtaacctcttagcaaagtacgtacaagacacaagagtggggcacgttatttattcaccattcctgtgtagcactgatctaggtaaccactgttaacaataacaaacgtcatcaatacacaatattaataaattaataccatatgtattctaagcactttacatgtatcatcttgttttatcttaacagccctctgaaagatgtgctgttattatccctcttctgtatgtagagaaactgaggaat

SEQ ID NO: 381967 - DNA, 491 bp, Homo sapiens
gaatacctccgactgggtaatttataaataaaaaaaggtttatttggctcacggttctgcagactgtgcaagcctggcaccagcatctgctcagcttctagtgaggcctcaggaagcttttactcagagtggacgacagaggaggaggaggcatggcacatggcaagagagggaacaagagaaagacaggaggaagtgccaggctctttyaaacaacccagctctggttctaactaatagagcaagaactcattcattagagaaaaaacacatttatgagggatccacctccacaacccaaacaccttccaccaggccccatctccaacactggggatcacatttcaatgtgagattgggaggagacaaacatccaaactgtatcagtagggactgcctaaacctcaatatggagaataattctgatgctacatctaggttcattaggaacacatgccgtaacctcttagcaaagtacgtacaagacacaa

SEQ ID NO: 381968 - DNA, 633 bp, Homo sapiens
agcctggcaccagcatctgctcagcttctagtgaggcctcaggaagcttttactcagagtggacgacagaggaggaggaggcatggcacatggcaagagagggaacaagagaaagacaggaggaagtgccaggctcttttaaacaacccagctctggttctaactaatagagcaagaactcattcattagagaaaaaacacatttatgagggatccacctccacaacccaaacaccttccaccaggccccatctccaacactggggatcacatttcaaygtgagattgggaggagacaaacatccaaactgtatcagtagggactgcctaaacctcaatatggagaataattctgatgctacatctaggttcattaggaacacatgccgtaacctcttagcaaagtacgtacaagacacaagagtggggcacgttatttattcaccattcctgtgtagcactgatctaggtaaccactgttaacaataacaaacgtcatcaatacacaatattaataaattaataccatatgtattctaagcactttacatgtatcatcttgttttatcttaacagccctctgaaagatgtgctgttattatccctcttctgtatgtagagaaactgaggaat

SEQ ID NO: 381969 - DNA, 578 bp, Homo sapiens
ctgagtcaaggccagggtatcgtcttagaacacagagagttgacaattaaataaacacgaagaataccaggcttctccccggggcctgggcagggttagacagtgaaataagcacaagcccgggcttgtcagcctggaacaaggaggcatctgcctagagttagcctaatatttgctgagtaacwcctgcattctctcaccaggaggcacaacatctagagacagcaccagacaaaactgagatgtcaatagagatcttcaaagtcagcgaatgtctccttctctccaccctttgtcctacttagtgaattatctgagatcaggagttaaacagacttgggctgaaatccaaactctgctatttaccaacaatggacaagtcatttaaactctttgagccttaacttctcaacctgtaaaatggatatgatgcctatctcacagcaatgttgtaaagattaaatgttactagcatgtttggcaccctgtaggatttcagtaaaagttattataattcttctttccttatcccctgcttcagcccaaccctttagtaccagagatcttcctactgtctt

SEQ ID NO: 381970 - DNA, 438 bp, Homo sapiens
tctcactcagcctcttcccagggctgcaaacacttttagggaatccatgatgaattaaagagaaaattgaattgatcctgaggacattctgcagggcaggctacaacgtttgcagggcccagaatacaatgaaattgtgggtcttcttgttcaaaagtagaaaaaaagtgctactaatgatgctaaagtataaagcttttgcttttcttccttttctcttggtttgtcatggtgttttgtttgctgttgaatgtcattcaaattttttwaaaaaataagttttcaattattagcatgaattttaccattcctctttatattgcataatccctatttcaaatacaaatacatgagcattcaaactcatgcagaatccaccaaaattaccatagctagtgcatgcacaggcatgttgttcttagcaaaacagtggaaata

SEQ ID NO: 381971 - DNA, 582 bp, Homo sapiens
ggttttggcctgaaggaacatcatgacccacagcacatggtggggaaactgagcacagcctggggatctcactgaactcactaggcagagatcaaggtttgggtttgctgaggccaccrgaatttgccaggcaaaatacaaaaaggaataagatacagagagggagacttccagaaactttcatggggtttggggggggtcctacaatctgtttctaaatactaagctgtgaaacataggattggatttcaaaggccaagcaaagagccaatagagagctataaaatgaacaattcccagagatcaaactggactggaaggcactcaagtattaatcagccagaatggagaaacctcttcagagtacagtagaagtaaagctaaactaagaaagcatactctagatagaaatgaaaaattcactgaacaaacttaataggagattcaacaaggctaaaaagaaatcagtacatatgaccacatagcaatagaaaatatccaaaccgaagcacagagaggaaatggctaaaggggaaataaacaaatccatggtgacctttgggacaattttaaatggtctaa

SEQ ID NO: 381972 - DNA, 582 bp, Homo sapiens
ggttttggcctgaaggaacatcatgacccacagcacatggtggggaaactgagcacagcctggggatctcactgaactcactaggcagagatcaaggtttgggtttgctgaggccaccggaatttgccrggcaaaatacaaaaaggaataagatacagagagggagacttccagaaactttcatggggtttggggggggtcctacaatctgtttctaaatactaagctgtgaaacataggattggatttcaaaggccaagcaaagagccaatagagagctataaaatgaacaattcccagagatcaaactggactggaaggcactcaagtattaatcagccagaatggagaaacctcttcagagtacagtagaagtaaagctaaactaagaaagcatactctagatagaaatgaaaaattcactgaacaaacttaataggagattcaacaaggctaaaaagaaatcagtacatatgaccacatagcaatagaaaatatccaaaccgaagcacagagaggaaatggctaaaggggaaataaacaaatccatggtgacctttgggacaattttaaatggtctaa

SEQ ID NO: 381973 - DNA, 546 bp, Homo sapiens
gaaagtggtaaggatgaaatgaatggatacaaacaagagctcagtggggataaacacctttcctgctcatgagagagctacagttctggttttcaaagacactagctgcaaaagaatcacctggagaacttaattaaaaataatcaaaaagctttctcagcccacacctactaaataagcatctctggggttgtaggccaggaagttgtatgttttaaagactccctcaagtgattctaaaacttagccagggttgggaaccagtgactgtgcaaaagtgtatgggaggagcagagaccttttagtgggtcaacttctcacctscaatgtaaagctgctccgcctcagcagagattagatactacagcgtgaatagaatcagattaaagacagcacttctttctcttagacagctggcttaagaaacacagatactgacatgaacacaggtttggatatgcttaacaaactatattttgtggcatttagctttaatgggtgactgagattttggaagctgaagattggtttaggattagcaaaagt

SEQ ID NO: 381974 - DNA, 546 bp, Homo sapiens
gaaagtggtaaggatgaaatgaatggatacaaacaagagctcagtggggataaacacctttcctgctcatgagagagctacagttctggttttcaaagacactagctgcaaaagaatcacctggagaacttaattaaaaataatcaaaaagctttctcagcccacacctactaaataagcatctctggggttgtaggccaggaagttgtatgttttaaagactccctcaagtgattctaaaacttagccagggttgggaaccagtgactgtgcaaaagtgtatgggaggagcagagaccttttagtgggtcaacttctcacctgcartgtaaagctgctccgcctcagcagagattagatactacagcgtgaatagaatcagattaaagacagcacttctttctcttagacagctggcttaagaaacacagatactgacatgaacacaggtttggatatgcttaacaaactatattttgtggcatttagctttaatgggtgactgagattttggaagctgaagattggtttaggattagcaaaagt

SEQ ID NO: 381975 - DNA, 580 bp, Homo sapiens
cataccacattttctttattcagttcactgttgatgggcatctaggttgattccatgtctttgctattgtgaatactactaagatgaacatatgagtgcatgtgtctttttggtagaataatttatattcctttgggtatatacccagtaaaggggttgctgagtcaaacggtagttctgttttaagttctttgagaaacctccaaagtgctttccacagtggctgaactaatttacattcccatcagcagtgtgtgagcgttttcttttctctgcaaccwcgccaacatttgttattttttgacttttaaaaaatagcattctggctggtgtgagatggtatctcactgtggttttaattttcatttttctgatgattggtgatgtggagcattttttcatacacatgttgggcacatgtatgtcttcttttgagaagtgtctgttaatgtcctttgcccattttttaatggagttatttttttgcttgttgatttaagtttcttgtagattctggatattagacctttagtttgcatttttttccccattctgtaggtggtctctttactctgttgat

SEQ ID NO: 381976 - DNA, 539 bp, Homo sapiens
gctggtgtgagatggtatctcactgtggttttaattttcatttttctgatgattggtgatgtggagcattttttcatacacatgttgggcacatgtatgtcttcttttgagaagtgtctgttaatgtcctttgcccattttttaatggagttatttttttgcttgttgatttaagtttcttgtagattctggatattagacctttagtttgcatttttttcccyattctgtaggtggtctctttactctgttgatagtttcttttgctatgcagaagctctttagcttaattaggtcccacttgtttatttttgtttttgttgcaattgcttttggagacttcatcataaaatctttttgccaaggaatatgtccagaatggtatttcctaggttttcttctagagatttcatagttttgggccttatatttagatctttaactcatcttgagttgatttttcatatgctgaatggaaggggttcagtttcaatcttctggatatggctagccagttatccctgcaccatttattgaat

SEQ ID NO: 381977 - DNA, 539 bp, Homo sapiens
gctggtgtgagatggtatctcactgtggttttaattttcatttttctgatgattggtgatgtggagcattttttcatacacatgttgggcacatgtatgtcttcttttgagaagtgtctgttaatgtcctttgcccattttttaatggagttatttttttgcttgttgatttaagtttcttgtagattctggatattagacctttagtttgcatttttttccccattctgtaggtggtctctttactctgttgatagtttcttttgctatgcagaagctctttagcttaattaggtcccacttgtttatttttgtttttgttgcaattgcttttggagacttmatcataaaatctttttgccaaggaatatgtccagaatggtatttcctaggttttcttctagagatttcatagttttgggccttatatttagatctttaactcatcttgagttgatttttcatatgctgaatggaaggggttcagtttcaatcttctggatatggctagccagttatccctgcaccatttattgaat

SEQ ID NO: 381978 - DNA, 493 bp, Homo sapiens
taagtttcttgtagattctggatattagacctttagtttgcatttttttccccattctgtaggtggtctctttactctgttgatagtttcttttgctatgcagaagctctttagcttaattaggtcccacttgtttatttttgtttttgttgcaattgcttttggagacttcatcataaaatctttttgccaaggaatatgtccagaatggtatttcctaggttttcttctagagatttcatagttttgggccttatatttagatctttaactcatcttgagttgatttttcatatgctgaatggaaggggttcagtttcaatcttctggatatggctagccagttatccctgcaccatttattgaattagggagtcctttctctattgcttattttagataactttgttgaagataaratggttgtaggtgtatggctttatctctgggttctctgacctcttccactggtctatatctctgttttcataca

SEQ ID NO: 381979 - DNA, 598 bp, Homo sapiens
gaatctgtaattgctttgttctgtatgactgttttaacaatattgattcttcctaaccatgaacatggaatgtttttccacttgtttgtgttatctctgatttccttcagcagtgttttgtagttctccttgtagagatctttcacatccctggttagctgtattgctagatatttcattcttttggtggctaatgtgaatgggattgcattcctgatttggttctcagcttggatgctgtaggtgtatagaaatgctactggtttttagacattgattttgcatccttgaactactgaagttgtttatcagttctaggagcccttcaggcagagactatggcattttctaggtatagaattatatcgtttgtgaagagagatagttagacttcctctattactatttcgatgccttttacttctttctcttgcctgattgctctggctagacttttcagtgctatcttgaaaaggagtgrtgagagtggacatccttgtctcagaaatcacaaaggtgacattaccactgacctcatagaaatataaaaaccctcggaaactattacagacacctctatgcccacaaactagaaaac

SEQ ID NO: 381980 - DNA, 572 bp, Homo sapiens
tgcaaaatgctcaataaaatattaccaaatcaaattcatcagcacacaaaaagcaaatccaccaggatcaagcaggctttattcctgggatgcaaggttggttcagtatacacaaatgaataaatgtgatttatcccataagcagaactaaaaacaataacaactatgatcatctckatagatatggaaaataccttcaataaaattcagcattccttcatgtttaaaacccccaacaaactaggcatcgaagcaacatacttcaaaataataagaggcatctatgacaaacccacagctaccatcatactgaataggcaaaagctggaaacattccccttaaaaactagccaaaattcttttcaagataatgataacttgaactcatggatccaagaagctcaaagaatcgcaagcctagtaaaaatgcatatggctacacaaaggcacaaaataagcaaaattttttaaaaaatgtgatagtggcaaaatcttaaaagtagccagaaaatatacctgtaaaatgaaggcaatattactgtaaaatgaaggcaaaataaagatctttttca

SEQ ID NO: 381981 - DNA, 583 bp, Homo sapiens
gacaaacccacagctaccatcatactgaataggcaaaagctggaaacattccccttaaaaactagccaaaattcttttcaagataatgataacttgaactcatggatccaagaagctcaaagaatcgcaagcctagtaaaaatgcatatggctacacaaaggcacaaaataagcaaaattttttaaaaaatgtgatagtggsaaaatcttaaaagtagccagaaaatatacctgtaaaatgaaggcaatattactgtaaaatgaaggcaaaataaagatctttttcaaacaattggaagctcaaagaattatttgctagcagacctgcacttcaatgaatgttagaggaattttctcaggcagaagaaaattggtatcagataaaatttgggtggatgacaataaagattgttttaaattcatggtagaaatctcttaaaagataaaaaaattaaaagcaaaaataggattgtattgtggggtttataacacatgtagaagtaaaatttatggaacacttcacccaacagcagcacagtcacattgttataatacacatgtaaatcagtgcatgtggaaaaag

SEQ ID NO: 381982 - DNA, 583 bp, Homo sapiens
gacaaacccacagctaccatcatactgaataggcaaaagctggaaacattccccttaaaaactagccaaaattcttttcaagataatgataacttgaactcatggatccaagaagctcaaagaatcgcaagcctagtaaaaatgcatatggctacacaaaggcacaaaataagcaaaattttttaaaaaatgtgatagtggcaaaatcttaaaagtagccagaaaatatacytgtaaaatgaaggcaatattactgtaaaatgaaggcaaaataaagatctttttcaaacaattggaagctcaaagaattatttgctagcagacctgcacttcaatgaatgttagaggaattttctcaggcagaagaaaattggtatcagataaaatttgggtggatgacaataaagattgttttaaattcatggtagaaatctcttaaaagataaaaaaattaaaagcaaaaataggattgtattgtggggtttataacacatgtagaagtaaaatttatggaacacttcacccaacagcagcacagtcacattgttataatacacatgtaaatcagtgcatgtggaaaaag

SEQ ID NO: 381983 - DNA, 577 bp, Homo sapiens
tatattcaaccgattttgaacagggatacgaagccaattcaatggaaaaaaggataatcttttcaacaaatggtgtgaaacaactggacagcatattcacaaaaatgaacctcaaaatttcctttatattacattcaagctgaggygggcagatcatgaggtcaggagatagagaccatcctggccaacatggtgaaaccccgtctgtattaaaaatacaaaaattagctgggcgtggtggtgtgcacctgtagtcccagctacttgggaggctaaggcgggagaatggcttgaacccagtaggtggaggttgcagtgagccgagattgcgccacggcactccagcctggggacagagcgagactccatctcaaaaaaaaaaaaaaaattaactcaaaatttatcagagatttaaacataggagataaaaccctagatagaaacatagataaaactttgtgaccttgggttaggctaaggtcttttagaaagaactcagaaaaaacatgaaacataaaaagaaaaaaaaagataaatcatccaaacttttgctctttgaaagaaaatgaaaggacga

SEQ ID NO: 381984 - DNA, 535 bp, Homo sapiens
actccagcctggggacagagcgagactccatctcaaaaaaaaaaaaaaaattaactcaaaatttatcagagatttaaacataggagataaaaccctagatagaaacatagataaaactttgtgaccttgggttaggctaaggtcttttagaaagaactcagaaaaarcatgaaacataaaaagaaaaaaaaagataaatcatccaaacttttgctctttgaaagaaaatgaaaggacgaaccatagactggagcaaaatatttgtcaatcatttatataacaaaggacgcctatctagaatatataatcaacattttcagaagaatactaagaagacaaataacatgataaaaatgaacataacatttgaacagatacgtcacacaaaaagttatgtgaccgacatatgaaaatgccataaaaattcgtcatcataaatcactaggaaattgcaaattaaattggaacatatcacacactgactagcttgaataggggaagaattacaatatcaagttctgctaaggatataaag

SEQ ID NO: 381985 - DNA, 647 bp, Homo sapiens
tgtgctttgggcctgctattttcactgcctcttctcttctatatcctcactacttgatgagactttgttttttaaggccacggaaatttgaaaaacagtgactccacttatcatggacaagtctcacaattcctggggcatcattcacttggtattttatgtgaacgatatactgcacagcccctgcaagcaagctcttcatttagacttcaatgcaaatgataacccctggaagactgaaactgggtggctgtgaagataatgtgtgcagttatatgctgaaaaaatttctaattgtttataaatgtaggagcataggggaatcttgttatagtgcccctatgttctcccctcccctcccctttcaagaagtaactactattacttgttgggttatgttrttttagacatatgcctaaatgtattttcatatgtataaatacatacttatgtaagtgtacacatgaagtacaatatttttcttacgggagaaagaacataatacacattttgttctgtaacttgcctttcatgctgttcagtatgccttggacaatgttgctggtcaatatatatagatctgcctcatttctttttaagttgaactcatttgtcaggattcagttcaaattgagtctatgtttttg

SEQ ID NO: 381986 - DNA, 647 bp, Homo sapiens
tgtgctttgggcctgctattttcactgcctcttctcttctatatcctcactacttgatgagactttgttttttaaggccacggaaatttgaaaaacagtgactccacttatcatggacaagtctcacaattcctggggcatcattcacttggtattttatgtgaacgatatactgcacagcccctgcaagcaagctcttcatttagacttcaatgcaaatgataacccctggaagactgaaactgggtggctgtgaagataatgtgtgcagttatatgctgaaaaaatttctaattgtttataaatgtaggagcataggggaatcttgttatagtgcccctatgttctcccctcccctcccctttcaagaagtaactactattacttgttgggttatgttattttagacatatgcctaaatgtattttcatatgtataaatacatacttatgtaagtgtacacatgaagtamaatatttttcttacgggagaaagaacataatacacattttgttctgtaacttgcctttcatgctgttcagtatgccttggacaatgttgctggtcaatatatatagatctgcctcatttctttttaagttgaactcatttgtcaggattcagttcaaattgagtctatgtttttg

SEQ ID NO: 381987 - DNA, 577 bp, Homo sapiens
ggcattcaaaagcagctgcatacatggkgaaattagaaagtgacctcaaaaactgtaaggcatatagaaaacaaacagcaaaatgacagaagtaagtcccttcttagaagtgattactttaaatgtaaatacattaaactctccaatcaagagacagattggcaagatggataaaaaatattccaactatattctgtctacaagagattcattttagatccaaagacacaaatagattgaaagtaaaagaatggaaaaagatatttggcacagttggtaaccgagagagcaagggtggctatacatcggacaagatagattttaaatcagcaaagattacaagacataatgaaggatattatatattaataaatatattaataaaacagtaagaaggtataaaaattataaacatgtatgtaatataagccttcatatatatatataaagcatatatatctatatatacacatatataaagcaaaaactgacagactgaagggagaaatagacagttctacatagtagttggagactccagcaccctgttgttaatgatggatagaacaaccagaca

SEQ ID NO: 381988 - DNA, 457 bp, Homo sapiens
ataatggtgcgatctcagctcactgcaacctccacctcctgaattcaagtgattctcctgcctcagcctcccaagtagctgggattacaggtaccctccaccatgcccggctaatttttgtatttttagtagaagacggggttttgccatgttggccaggctaatctcgaacccctgaccatccgctcgcctcrgcctcccaaagtgctggcattgcaggtgtgagccactgtgcctggccggtagtaggattttttaaacatctcaggtgattccagtgtggccaggcctgaaaagcctgctccagactgagtccctcctttacacagggagactgaggttcagagggaggccgtgggctgccggaggtcacacagccaatgcctgaaaggcctgggacggggccaggtgctcctggttcctggacacagggggccgtctcctcttttgcatcaag

SEQ ID NO: 381989 - DNA, 598 bp, Homo sapiens
acagcgtttagcacagctgggcacacagtctctccattgccttagccatgcgtattattacgtttatattttatttacataggaacatgttacggttgatcacgctccagactgtcatttcaacaaggccctgagaacttgggagccsctcaggcctcctggaacccgtccgggctcccccagacatgcccagcccccgcgcagcatgcggcccgccccccccataaatcaggccccgcgacctgtaattaacaagccgcggtccccatcccaggggcttcctgcgccccccccccgcctctccaggagtggggcgggggcggggagctggggggtccctccaccgcccctgatttatgggcctctgtgtgaaggagatttatgagctaagaccggggccgggacgcgtcgggaggcgccccaggggagggactcgggggtcgccgccgcctgaatcccgccgcaagtgggggtcgcgggaggggccgaggctgcggaccccgctcctggcgcttccctcggctccagcctcccagggtcgggctctgagctggggcgcccgcgttgggggattcttcacggtccttgttatccgtcg

SEQ ID NO: 381990 - DNA, 613 bp, Homo sapiens
gcgtcctccttcggtttttgttctttccataatcaaattatgtcacatgaattgaggtggctgaatgctactggttggagaggggaaggggaagcaaattctgttcctcctttttctccctcttcttcttcccctttaccatcacctcctcctccttctccctctcctttttctcctccttcttctacctttccccctttccttctccctcctccctcctttttcttatttttatttttaaaacacaatgtattgaacatttaatatgtgtcaggcactatgttaagcattttacatatatttatctcagttaattcccccaacaagcttatgaggtagattccattattatccccattttgcagtggaagagttgaagctggagaagaaaaatcatgtgctcagggttgcacagccaggatgtgggagccaggactggctgactttagagccccagttctttttttaaactcttaaaaaattcacttatttttcatgttraaagggtggtgtgatgagcacctctctgccccctggccaggtttgctggctgaacatcttggcactcctgttccatgtgtctcttcttttcaatatatacagacacttcctt

SEQ ID NO: 381991 - DNA, 566 bp, Homo sapiens
tgctgaaaattaaataaaatcaggtgtacttgctcaataagaaagaaaacaagttcagaatcagaatcaaagttaaaactttagttccaacatcaaaatcatggtccaaagtcaaaataaaaggtctagatccatgtccaatttctcgtgtataaggtctggtctaacgtccaatgcaaagccaaatccaaagttcaaagtcctggctcacagtctagatccagtttgaagttctaggtgtgaggtccaagtccaaggtycacatcaaagttctcatagccatatccagagccatgtcaggttctggtcaaggtcctattctaaggtccagagctgagtttgggtccaagtttccaggttgactttgaagtcctaatcccaagtccagttccaagttggaggtccacattcaaatgcaagctcaatgcaggtcaaggttcatgtcctggtagaaggcccagatacatgtacaggcccatcatccatgtgcaagtccaatttccatgtttaagctcaggtccaatgtctagatcaaaacaaggtcaaagatccaggccaaaggtcta

SEQ ID NO: 381992 - DNA, 566 bp, Homo sapiens
tgctgaaaattaaataaaatcaggtgtacttgctcaataagaaagaaaacaagttcagaatcagaatcaaagttaaaactttagttccaacatcaaaatcatggtccaaagtcaaaataaaaggtctagatccatgtccaatttctcgtgtataaggtctggtctaacgtccaatgcaaagccaaatccaaagttcaaagtcctggctcacagtctagatccagtttgaagttctaggtgtgaggtccaagtccaaggtccacatcaaagttctcatagccatatccagagccatgtcaggttctggtcaargtcctattctaaggtccagagctgagtttgggtccaagtttccaggttgactttgaagtcctaatcccaagtccagttccaagttggaggtccacattcaaatgcaagctcaatgcaggtcaaggttcatgtcctggtagaaggcccagatacatgtacaggcccatcatccatgtgcaagtccaatttccatgtttaagctcaggtccaatgtctagatcaaaacaaggtcaaagatccaggccaaaggtcta

SEQ ID NO: 381993 - DNA, 566 bp, Homo sapiens
tgctgaaaattaaataaaatcaggtgtacttgctcaataagaaagaaaacaagttcagaatcagaatcaaagttaaaactttagttccaacatcaaaatcatggtccaaagtcaaaataaaaggtctagatccatgtccaatttctcgtgtataaggtctggtctaacgtccaatgcaaagccaaatccaaagttcaaagtcctggctcacagtctagatccagtttgaagttctaggtgtgaggtccaagtccaaggtccacatcaaagttctcatagccatatccagagccatgtcaggttctggtcaaggtcctattctaaggtccagagctgagtttgggtccaagtttccaggttgactttgaagtcctaatcccaagtccagttccaagttrgaggtccacattcaaatgcaagctcaatgcaggtcaaggttcatgtcctggtagaaggcccagatacatgtacaggcccatcatccatgtgcaagtccaatttccatgtttaagctcaggtccaatgtctagatcaaaacaaggtcaaagatccaggccaaaggtcta

SEQ ID NO: 381994 - DNA, 566 bp, Homo sapiens
acaatgtttttcaagtcttctatatccctgttaatttcttttattgagagaaggatgctgtgatagacagaatagtaggctccaaacatgcccatgccctgcttcccagaacttttgaatgtattactttacatggcaaaagtgactttgcagatgtcattaaggttacagaccttgagatagggagattatcctggattgtccaggtgggcccagtgtaatcacatgagctctgagaagagcccttctcagatgtggtcagaggaaaaggtcagagaaatgcaacattgctggctttgaagatggaggagggggagcatgagccaaggaatactaatggcctctataaactgggaaagacaaggaaataaattctcccccagagtctccagaaggtaatgaggtccagaaaactttcattttaacccagagagacctrtatcatacttctgacttaaagaacgttataagatcagtaaatatacgttttttcaagccactaagtttgtggcgatttgtttctgcagcaatagaaaactaatacagttacaatctctatcgttgtg

SEQ ID NO: 381995 - DNA, 540 bp, Homo sapiens
gtgggcccagtgtaatcacatgagctctgagaagagcccttctcagatgtggtcagaggaaaaggtcagagaaatgcaacattgctggctttgaagatggaggagggggagcatgagccaaggaatactaatggcctctataaactgggaaagacaaggaaataaattctcccccagagtctccagaaggtaatgaggtccagaaaactttcattttaacccagagagacctgtatcatacttctgacttaaagaacgttataagatcagtaaatatacgttttttcaagccactaagtttgtggcgatttgtttctgcagcaatagaaaactaatacagttacaatctctatcgttgtggatttgtctatttctctttgcagttctctcagtttttgcttcatgcattttgaagctctattattaggagtataaattcttaggatcatttgacctctttgtcataaaaaaagatcttccttatycctgttattagtctttgctctgaactcaaattcatctgatattacttcaattatt

SEQ ID NO: 381996 - DNA, 593 bp, Homo sapiens
tgtggggtggggagtagggggtagataccacctgttccagccacccttccctgaggcggtggtagctcagtgggaggcaacagtgggaatggagggagggagactggtgaggccccaatccctcctataacatayacccctagtctgacttcttgaccttggagggctccttatcactccccatgaaggttggctagtcccagcaaagagagctagttccagaggagctgggaactccagggtccttgggttgaaatgaaagagactaggaaggttagtcatttctggaacagccccaccccaatccccttcctggcaggataccccctttcccaagttatagtgccaacacttctccccagataagggaggagccaagctttctgcacagggaagtagtagtgtgggcacacacatacacacacaatgtacacacgaacacgtacacattggtcctgctggctcaggaatctatagttgggtttccttgcaggaagtatttcaggtggccccatctatcccacgtgcccataagtgtttgtgcagactttgtgtctgtgcttggaaggctacagtgttagaggtagcccagt

SEQ ID NO: 381997 - DNA, 583 bp, Homo sapiens
gaattctgcctccagactgcctttggactcaaactacaacatcaactctttcccgtgtctccagcctgccaggctaccttgcagatttttggacttgacatctcatacaattgtatgagccaattccttaaagtaaaaatctatctcacacatcatattggttctgcttctttgaggaattctaattaatacttgcccatatcccagaaagtggttttcctattatggtagttattcctgacctccctgaccarctaaaatcttcatgctatactctgtcaaaatacctttataacccaggcatagaaatagtacatacatttatacaattgttgacaggtgtctgtttctctgctagaagaagatgtttttgatttactatagtaggtgcttattaaatatttaccaaatgaataaatgcactctgaatgagctacaatgtgtatcttgggtcaatagacactgaaaaacactgatttattccaccccctttattttatggatgggaaactgaggcccataaactcaagcatgtgctgggaccacatcaattggttttgcaattatatccaattattacttt

SEQ ID NO: 381998 - DNA, 567 bp, Homo sapiens
ttaaaacaataattacagggtatctactatatggcaggcactttactaggtaccacgagggaaagggcagaaatgaattaggtgagtaccgccttcaaattgcttataatctcttaaaaatgataatatgttcccaaggcaacatagagtagcacattacaattaagcttccaacttttgtatagaagagaaaattcacttcctgcaggatgttttgaaaaggcatgatgcaggatgaggttttggaatgaggctttgaaggatgagagggattttgaaatgtagacctacagaaaagatcatttaaggttgaaataccaagcaaaacagcaaacacaaaagcctgaaggctagaaaaaaacactagatctgattcgattttgttttgtcgcctagagtataggtgaatttttatctttactaatttgttcatattttccattcatcatttacctattcattcattcaaaaaaatgtctattgagtgctccctctgtgacagtccccaatttaggtcctarttacagacagaggaaatcacaattattttggtcccacttttgggag

SEQ ID NO: 381999 - DNA, 593 bp, Homo sapiens
actggtccccaaagtgggcaaagtaagcccctgtggtgaaagtctttagctgctgaaactaggctaggctagattaggttaagaagtcactggcaaaatgatatacattgaagcacaagctcaatagatatgtcctcatgcctcaaataactaccagagaagagaaagacaaacaaacaaacaaacaaacaaacaaayaaaagagcaatgtgtttacaaggagaagctgtgcaattaaccatgcttgcacttcatttgtatggccttctgctttggggaaaaaacggctgtgagtctagagatggctaggggtagaagtgtctgtgcctaattgaggagaagttccaaagaagctgtgaggcaaagtgtagtgacagcgtccacctcactctgagtagtgaagttcttaggaggagaataaatacattagtgtcattttagaggtgttcattctctccattcagctgcataatgcaattatttagtagttcaggattcttttaattctgtttgaagaacttaagaggttaagggcttgaaatgataaatgcattattaatattgcctcacagaaacatccaagattataattt

SEQ ID NO: 382000 - DNA, 591 bp, Homo sapiens
caacctctgtctccgggttcaagcgattctcgtgcctcagcctcctgagtagctggggctacaggtatgagccaccacgcccggctaatttttatatttttagtagagatggagtttcaccatgttggccaggctggtctygaactcccaacctcaggtgatccacccacctcagccccgcaaagtgctgggattacaggcatgaaccaccacgcccagttgctccagggaaactcttgagtgctaagtccctgccgctccctgagctaggtaatacaagagccaaaccctcaagtagcaacctcaaatgttggggcactatatgcacaaacccttcactgttcaggaagaagctgggagttggaccttcctttacactttaaggctttgtgctcaggagtgggtggtgtgtaagtgtgtctccacttttcctacctgtttcaatgtggacattttctcagttgcccattgtgcaggtatctcgcaactagtttctgactttttctcagagagaatttatccatctctaaatgtttatttggtgcatccacgggaggagggctagtcaggagcctcctattccaccatgtt

SEQ ID NO: 382001 - DNA, 589 bp, Homo sapiens
gcaaggttggggaaaattttcatggacaatatactcaattatgttttccaagttttttgctctctctcccctcttttagggacaccagtcagccatagatttagtctctttacataatcccatattttctggacatttattcatttttagaaattctttttctttatttttgtctgactaaattaatttgaagaaccagtctttgagctgagattctttcctcagcttggtctattctgctattaatatttccaattgtgttatgaacttattgtagtgagtttttcagctctaacagttcagtttgatgctatggctttgcacatatgcttcattgtttaataggtagtttaggctgggcacagtggctcatgtctgtaatcccagcactttgggaggccgaggtgggtggatcacctgaggtcaggagttcaagaccagccaggccaacttggtgaaaccctgtctctattaaaaatacaaaaattagccaggygtggtggtgcgtgcctgtaatcccagctactcaggagactgaggcaggagaatcgcttgaactgaggcagaggttgcagtgagcccagattgt

SEQ ID NO: 382002 - DNA, 568 bp, Homo sapiens
gaagtattccaaatatctgaggtgaatagtcctccaatcaagtaggtgaagtttaaacactcatragttgattgtggcctgagcttagacacatggaaaaaataaccactatttggtattctataatgagacttcagatataatgccaaaaacatcatctatgaatgaatacaattttacatgtttttgaatctaaatttgtacaaacacacacatacacacacagacacatgcacacacacacgtatgtttctgcaatacacactgataagggagtaaagacagccacagacttggaaaaaatacttccaagtcacatatttgtcaaatgaattcttttaatttgttaagtgacttttataaacaatatgcaagtaaacttacaatgaatcaaaacaaagcaatgcagttaaaatgaaccaaatatcaggagaggcatctcaacaaaagttattggaaaattgttaaatatgaactttttgagggacatgtgcatttaaataaaaattagatcccattattcacctactagattggttaaaacacacaactctcataaggatacatg

SEQ ID NO: 382003 - DNA, 568 bp, Homo sapiens
gaagtattccaaatatctgaggtgaatagtcctccaatcaagtaggtgaagtttaaacactcatgagttgattgtggcctgagsttagacacatggaaaaaataaccactatttggtattctataatgagacttcagatataatgccaaaaacatcatctatgaatgaatacaattttacatgtttttgaatctaaatttgtacaaacacacacatacacacacagacacatgcacacacacacgtatgtttctgcaatacacactgataagggagtaaagacagccacagacttggaaaaaatacttccaagtcacatatttgtcaaatgaattcttttaatttgttaagtgacttttataaacaatatgcaagtaaacttacaatgaatcaaaacaaagcaatgcagttaaaatgaaccaaatatcaggagaggcatctcaacaaaagttattggaaaattgttaaatatgaactttttgagggacatgtgcatttaaataaaaattagatcccattattcacctactagattggttaaaacacacaactctcataaggatacatg

SEQ ID NO: 382004 - DNA, 568 bp, Homo sapiens
gaagtattccaaatatctgaggtgaatagtcctccaatcaagtaggtgaagtttaaacactcatgagttgattgtggcctgagcttagacacatggaaaaaataaccactatttggtattctataatgagacttcagatataatgccaaaaacatcatctatgaatgaatacaattttacatgtttttgaatctaaatttgtacaaacacacacatacacacacagacacatgcacacacacacgtatgtttctgcaatacacactgataagggagtaaagacagccacagacttggaaaaaatacttccaagtcacatatttgtcaaatgaattcttttaatttgttaagtgacttttataaacaatatgcaagtaaacttacaatgaatcaaaacaaagcaatgcakttaaaatgaaccaaatatcaggagaggcatctcaacaaaagttattggaaaattgttaaatatgaactttttgagggacatgtgcatttaaataaaaattagatcccattattcacctactagattggttaaaacacacaactctcataaggatacatg

SEQ ID NO: 382005 - DNA, 568 bp, Homo sapiens
gaagtattccaaatatctgaggtgaatagtcctccaatcaagtaggtgaagtttaaacactcatgagttgattgtggcctgagcttagacacatggaaaaaataaccactatttggtattctataatgagacttcagatataatgccaaaaacatcatctatgaatgaatacaattttacatgtttttgaatctaaatttgtacaaacacacacatacacacacagacacatgcacacacacacgtatgtttctgcaatacacactgataagggagtaaagacagccacagacttggaaaaaatacttccaagtcacatatttgtcaaatgaattcttttaatttgttaagtgacttttataaacaatatgcaagtaaacttacaatgaatcaaaacaaagcaatgcagttaaaatgaaccaaatatcaggagaggcatctcaacaaaagttattggaaaattgttaaatatgaactttttgagggacatgtgcatttaaataaaaattagatcccattaytcacctactagattggttaaaacacacaactctcataaggatacatg

SEQ ID NO: 382006 - DNA, 581 bp, Homo sapiens
ccaggcagggtttggggagccatttgctcatgggaaagttacctccttggttctcaaagacccagagactaatggggcctgggacatttaggtttcttccaaaccaggggtagcggatagtcaagagtgaggggagttgaaggaatgatgggtcaagttggttcatgctccagtgtttgttatcaaatcactggaaaggtaaaactggaaatggtttgagctgaagctgaaacctaacaggagaaccactgagacacccccactgcacaccagcaaagggcatttctccctctgcggttgctagggtgatgtgcatctttggcagtctacagagggagatgattcccatgaagtcttgtctcatttgtctcttgcaagcagaaccagaggacaaaaactcagctcaaagtagaacagaagaagtgcagcattggggtccagctttccttctggtctctgaaagggagtgtgtgaggtttcttaaaaytggactcaggtgtgttctgcctccagcctcagctaaagagccagctctgcctttctaaaagggacaactgatcccttgagaaagttgtagcctt

SEQ ID NO: 382007 - DNA, 620 bp, Homo sapiens
ttgccagcacaccatttggctaacaaatgctactacaagctagtatgatgcgcttttggcatttggctcwgctgtctaaggggtgctggctcccaactccctgccctcaagaggaatgggttccattgtgattgctggtggcaatggtgatggcatcacccaattgggtgagtagctaagataagaagcattgttacagggactctttgctttcaaggaacattcaactccattcaagttaatttaagcaaaaagagaaagccatcagaaggatacgtgtgtctgtcaaagaacccaaggatacatttctgggtcttatgaatggctggaaccagcaattagaaagccctcagacaggaagactttctctccattctctctctccctctctctctgacctgtgcatattctcatctgcttctctctggctatctgcttcatttttgctttctgcagaccccatttctcagttctacttccatgtggacccgatatagtcttcccagtcttgataagtttccagcttaagtactcccaggaggccagctagaactcctgtatttcaataatcacttcttaaaaaagaatctgattggcccagcttggatcaggtagtcatc

SEQ ID NO: 382008 - DNA, 595 bp, Homo sapiens
catttctaagtgtacagttcagtggcactaggtacattcatgtggttgtgcaatcatcaccccccagtgtctctagaactttttgcatctacccagactgaaacttggtatttcttaacaataactcattttctttccttcctttcaacccctggcaaccaccattctttttttttttttttttttttgagatggagtcttgctctgtcacccaggctgaagtttagtggcatggtcttgcttcactgcaatctctgcctcccagactcaagagattctcctgcctcagcctcctgaatagtggggattacaggtgctcgccaccacacctggctaatttttgtaatttcttagtagagaccgggtttcactatgttggccaggctggtcttgaactcctgacctcaggcgatccacccccccccscctcctttggcctcccgaagtgctggaattacaggtgtgagccaccgtgcccggcccttggcaaccaccattctactttctttcttttttaatttttttttgagacggggtctcgctctggcccccaggctggagtgtagtggcagaatgtcagctcattgcaacctct

SEQ ID NO: 382009 - DNA, 595 bp, Homo sapiens
catttctaagtgtacagttcagtggcactaggtacattcatgtggttgtgcaatcatcaccccccagtgtctctagaactttttgcatctacccagactgaaacttggtatttcttaacaataactcattttctttccttcctttcaacccctggcaaccaccattctttttttttttttttttttttgagatggagtcttgctctgtcacccaggctgaagtttagtggcatggtcttgcttcactgcaatctctgcctcccagactcaagagattctcctgcctcagcctcctgaatagtggggattacaggtgctcgccaccacacctggctaatttttgtaatttcttagtagagaccgggtttcactatgttggccaggctggtcttgaactcctgacctcaggcgatccaccccccccccsctcctttggcctcccgaagtgctggaattacaggtgtgagccaccgtgcccggcccttggcaaccaccattctactttctttcttttttaatttttttttgagacggggtctcgctctggcccccaggctggagtgtagtggcagaatgtcagctcattgcaacctct

SEQ ID NO: 382010 - DNA, 391 bp, Homo sapiens
tctttgacaaatcataaaaaaaaaaaaacaaaaaaaaaacctggggagaggactgtattcaatgacgccgctgggaaaattgtatagccacatgtaraaaaataaaaatggattcctatctctcattatataaaaaaaaatcaacccaagatggactaaagacttaaatctaagacctgaaattattttaaaattctagaagaaaacctaggaaaaaagctcttctagacattggcaggcaaataatttatgacgaagaccccaaaagcaaatgcaacaaaaacaaaaatagacaaataggtcctaattaaactaaaaagcttctacacagccaaaagaaataatcagagtaaacagacaacctatacagttggagaaagtatttgcaaac

SEQ ID NO: 382011 - DNA, 391 bp, Homo sapiens
tctttgacaaatcataaaaaaaaaaaaacaaaaaaaaaacctggggagaggactgtattcaatgacgccgctgggaaaattgtatagccacatgtaaaaraataaaaatggattcctatctctcattatataaaaaaaaatcaacccaagatggactaaagacttaaatctaagacctgaaattattttaaaattctagaagaaaacctaggaaaaaagctcttctagacattggcaggcaaataatttatgacgaagaccccaaaagcaaatgcaacaaaaacaaaaatagacaaataggtcctaattaaactaaaaagcttctacacagccaaaagaaataatcagagtaaacagacaacctatacagttggagaaagtatttgcaaac

SEQ ID NO: 382012 - DNA, 576 bp, Homo sapiens
  misc_feature (1)...(576): n = A,T,C or G
tctaatgaatacgattctgccacaaagaatggagtcaacatagtctggtgctgactgcattgctgatggagaagttgcacttgaaaagaggctgtcttttcaactctgtgtttatttgtattaaattaaaagaaaaccagcctttagggcaaacacacatcttacaggagaactcaagtagcttttttttctagagttgctgttggtcatagcaaaaagtagyttaattctctccatcttttagcttggaaaacatttgcctgaatgcccaacctacagtcgtagagactagacacaacaatattgcttgagaacaaagagggaaccattaatgtatcacttcatgatcctctgaattttgctattcccgttcctacctgtttatttagcattttattaacacagggcaaccaacgcccaaagaagtgatgagggaaggaacaggggccaagaaagttattaacggataagatgaagaccctcacaacatactaatcctccctctagttttaaaagatttgaagatataaccaatgtagaaaggaacagaaannnnnnnnnnnnnnnnnnnnnnnn

SEQ ID NO: 382013 - DNA, 576 bp, Homo sapiens
  misc_feature (1)...(576): n = A,T,C or G
tctaatgaatacgattctgccacaaagaatggagtcaacatagtctggtgctgactgcattgctgatggagaagttgcacttgaaaagaggctgtcttttcaactctgtgtttatttgtattaaattaaaagaaaaccagcctttagggcaaacacacatcttacaggagaactcaagtagcttttttttctagagttgctgttggtcatagcaaaaagtagcttaattctctccatcttttagcttggaaaacatttgcctgaatgcccaacctacagtcgtagagactagacacaacaatattgcttgagaacaaagagggaaccattaatgtatcacttcatgatcctctgaattttgctattcccgttcctacctgtttatttagcattttattaacacagggcaaccaacgcccaaagaagtgatgaggraaggaacaggggccaagaaagttattaacggataagatgaagaccctcacaacatactaatcctccctctagttttaaaagatttgaagatataaccaatgtagaaaggaacagaaannnnnnnnnnnnnnnnnnnnnnnn

SEQ ID NO: 382014 - DNA, 576 bp, Homo sapiens
  misc_feature (1)...(576): n = A,T,C or G
tctaatgaatacgattctgccacaaagaatggagtcaacatagtctggtgctgactgcattgctgatggagaagttgcacttgaaaagaggctgtcttttcaactctgtgtttatttgtattaaattaaaagaaaaccagcctttagggcaaacacacatcttacaggagaactcaagtagcttttttttctagagttgctgttggtcatagcaaaaagtagcttaattctctccatcttttagcttggaaaacatttgcctgaatgcccaacctacagtcgtagagactagacacaacaatattgcttgagaacaaagagggaaccattaatgtatcacttcatgatcctctgaattttgctattcccgttcctacctgtttatttagcattttattaacacagggcaaccaacgcccaaagaagtgatgagggaaggaacaggggccaagaargttattaacggataagatgaagaccctcacaacatactaatcctccctctagttttaaaagatttgaagatataaccaatgtagaaaggaacagaaannnnnnnnnnnnnnnnnnnnnnnn

SEQ ID NO: 382015 - DNA, 510 bp, Homo sapiens
gggtaatttataaaggcaagaggtttaattgactcaacagttcagcacggttggggaggcctcaagaaacttacaatcatggtggaaggtgaagcaaacacatccttcttcacatgatgtcaggaaggagaagtgcagagtgaagtgtgttgggggaagccccttataaaaccatcagatctcatgagatgtcactcactatcataggaacaacatggaggtaactgcccccatgcttaaattacctcccaccaggtccctctcatgacacatggggattatgcgaacaacaattcaagacaagacttgggtggggacacagccaaaccacatcactaagctaccagaagcaactcccmaagtcacagcacagaactgtaccaccaagtttcctgccacaatcaagaaattcctggtcaaatcaggaagctaccactacaaccaatgaatccaaagcaacaccacattgctgcagtccagtcccctgcccttctcggctccaaattcaag

SEQ ID NO: 382016 - DNA, 670 bp, Homo sapiens
tactgaatgttttaagcctactgttgagagctactttacagaaaaaaagatttctttcaaaatgttactgttcactgacaaaacaactggtcactcgagctctgaaagagacatataaggagattaatgtggttttcatgttcatcagtacaacatccattctgcagcctttggatgaaggagtaattttgatcttcaagtcttattatttaagagatacattttgtaaggctatagctgtcatagatagttattcctcttgatggatctgagcgaagtaaattgaaagccttctgaagagaatacttcattctagatttcattaagaaaagtcatgatttatgggaagagttcaaatatcaacattaataggagtttgaagaacttgattccaaccttcacagattcctttgagtggttcaagacttcagtggaggaagtcactatagatgtggtgaaaataggaagaaactagaattataaacagagcytgaggtgtatctgaattgctgcaatatatggataaaacataaatggatgaaaagttgcttcttatgtatgagcaatgaaagtgattttttgagatggaaactactcctggtgaagatactgtgaacactgttgaaatgacacaaagaacttggaatattacataaacttagttgacaaa

SEQ ID NO: 382017 - DNA, 405 bp, Homo sapiens
tatttagtgttctctatattgtttttaggatagttgtgcagatatggtkgtttatactgctgtattctttcttcaactgttatggtttgggcatcgtctctcatggattgaaactccaaattccttgtcttttctatattctatttatttcattttcttctgatttctgggagaaatcctcaattctatgttctcaccaatccattgagtttttcatttctgctgtcatatgtttaatttctaaggtgccttttctctaattttcctttttatagtatcctgatcttctttcattactgcattttttctcttaagccccgagaacaaataaagttttcttcaccctgttgctttttgtttgttttattccctgtctttcatattaattgcttttatcaaatgtct

SEQ ID NO: 382018 - DNA, 593 bp, Homo sapiens
cttggtacagttgttccagtctgcactggaaagtttcagaaagaaaatcataagctcaggactgtaccttctcagtttaagacacagaaccagagcatttctatgatggtttgagtaggattttgcaaactttttctgtaaatgtccagataataaatattttaagctttgtagacaatgtggtggtctctatcacaactactcaactctgctattattacttgaaagcagccactgataaggaaagccactgataaagggatgggtatgacagtgttccartaaaattttatttacaaaaacaggtagcaaggtaaattctatattatctcatacctcaaaacttgggtccaaaatgtgatctcatgctttatgaacacagcgtgctgccctcttcagtgtagtctgtatcctcaataagttcttagcatgtaaaatttgatctctatgttcacgccagtttattccaaagactgttggtataccaacaccaagtatggggcactcttacaaagagggtattgtccatagtgtcaaaagtattattgtgagagaatgtcttataccatggcggtctcagcagagggattgca

SEQ ID NO: 382019 - DNA, 593 bp, Homo sapiens
cttggtacagttgttccagtctgcactggaaagtttcagaaagaaaatcataagctcaggactgtaccttctcagtttaagacacagaaccagagcatttctatgatggtttgagtaggattttgcaaactttttctgtaaatgtccagataataaatattttaagctttgtagacaatgtggtggtctctatcacaactactcaactctgctattattacttgaaagcagccactgataaggaaagccactgataaagggatgggtatgacagtgttccaataaaattttatttacaaaaacaggtagcaaggtaaattctatattatctcatacctcaaaacttgggtccaaaatgtgatctcatgctttatgaacacagcrtgctgccctcttcagtgtagtctgtatcctcaataagttcttagcatgtaaaatttgatctctatgttcacgccagtttattccaaagactgttggtataccaacaccaagtatggggcactcttacaaagagggtattgtccatagtgtcaaaagtattattgtgagagaatgtcttataccatggcggtctcagcagagggattgca

SEQ ID NO: 382020 - DNA, 593 bp, Homo sapiens
cttggtacagttgttccagtctgcactggaaagtttcagaaagaaaatcataagctcaggactgtaccttctcagtttaagacacagaaccagagcatttctatgatggtttgagtaggattttgcaaactttttctgtaaatgtccagataataaatattttaagctttgtagacaatgtggtggtctctatcacaactactcaactctgctattattacttgaaagcagccactgataaggaaagccactgataaagggatgggtatgacagtgttccaataaaattttatttacaaaaacaggtagcaaggtaaattctatattatctcatacctcaaaacttgggtccaaaatgtgatctcatgctttatgaacacagcgtgctgccctcttcagtgtagtctgtatcctcaataagttcttagcatgtaaaatttgatctctatgttcacgccagtttattccaaagactgttggtataccaacaccaagtatggggcactcttacaaagagggtattgtccatagtgtcaaaagtattattgtgagagaatrtcttataccatggcggtctcagcagagggattgca

SEQ ID NO: 382021 - DNA, 491 bp, Homo sapiens
tatatatttattgggtacaatgtgaaattttgatatgtttacattgtgaaatgattaaaccaagtatgtgaagtgatggctttgttaattaccctgattcaatttccagaatcttagtagcttttgatagacaaatacgttaccaatgtaatccacatcttcattcaccctgagatcattaaaacaatttgtattcttctcaaagttgccaataaaaaaataatgatgctagtgttcacaaaaagaaataaaggttaaaaagtagtttcaaataaatgatcagaatttagacctgtctacatgatctgcttcatggtttatatccactacttgtgtraaattctatttgtcacttttttttgatattttctagtttctgtcacttcgttttccttttcctctcctttttttctcttcacctcttgtctctttttctttttcaagaaaattggtgctggaataattatgatacagattcctgggccattacc

SEQ ID NO: 382022 - DNA, 587 bp, Homo sapiens
ttcttttgggatttgcaagaggctgttcctggggacactggaccggggcataggtgtgtctagtgaagctctcagagttacgaccagtggggcagaggaaacttcttctggcccaaacatgtgctacatttcctaagcatgggcatggtgctggtggtgggtacggggttctgctgaagcctgttgctcttgatgaattaaagcatggttttattctacagtaaagatgagtgcgtgctcctgtgagggtggtcgctttaggttatcagtttacacatatattttaagacatagtcttactctattgcccaggctggagtgcagtggtgcaatcatggctccccgtagcctcaacctctgggctcaagtgatcatctcacctcagctcctgaatagctggaattgcaggtatgcgccaccaygcctggctaatttttgtattttttgcaaccgtggggtcttgctgtgttgcccaggctgctcctggcctcaagcaatcctcttgtctcagcctcccaaagtgctaggattacaggcataggccacagtgccctgagagttttatacactttaatgtgaataggttc

SEQ ID NO: 382023 - DNA, 587 bp, Homo sapiens
ttcttttgggatttgcaagaggctgttcctggggacactggaccggggcataggtgtgtctagtgaagctctcagagttacgaccagtggggcagaggaaacttcttctggcccaaacatgtgctacatttcctaagcatgggcatggtgctggtggtgggtacggggttctgctgaagcctgttgctcttgatgaattaaagcatggttttattctacagtaaagatgagtgcgtgctcctgtgagggtggtcgctttaggttatcagtttacacatatattttaagacatagtcttactctattgcccaggctggagtgcagtggtgcaatcatggctccccgtagcctcaacctctgggctcaagtgatcatctcacctcagctcctgaatagctggaattgcaggtatgcgccaccatgcctggctaatttttgtattttttgyaaccgtggggtcttgctgtgttgcccaggctgctcctggcctcaagcaatcctcttgtctcagcctcccaaagtgctaggattacaggcataggccacagtgccctgagagttttatacactttaatgtgaataggttc

SEQ ID NO: 382024 - DNA, 491 bp, Homo sapiens
gaatgtcagtgaaggacacgtcttcttgggttgggaggaaggtagtgatgatggggaggatgtaagcaggtgagaatgagttcactgtggtcaatttgaagtattcataagacaattatgtgaaggtattcagctgttagttgtatagtgttaagatgggagataaaggctaagatactgttctgggagagtcctcagcatagacatagyagaagaaactagaggagttgatatgcattgtgatattgtcatgagcacttagcacagtgcatggcaagctgtaggatctaaatacgtgttgtatgaacaaattgattttgacaagtgctctcaaatcaagcatccaaaaatctcaaagtactttaataacattccttgtatataaaaagttaccatcctgtctcaatttaaacaatcttccagaataaaaattttaaactaaataaccaaggtgcactctgttcagaaaggtttcctcctgccaggacatg

SEQ ID NO: 382025 - DNA, 557 bp, Homo sapiens
acaccacacattcactccatagaaacactttgcattttaggagctaaccatattgactttagtggaagctcaagttgcttttgaaattatgaaatataaaatcactaaaacaagaaaacaattatgtcttagagatggcrtatgtgttatttattacagtatcttggtaagtgcttcaaggtttttgacatgcaaacaatgttgtcactaggaaatgaagtgagacatcaagatcagtccagaaaccataaatgtgaatgtccacacacaagcatgcttgatggcacagtagagagagaaagtatgtggaaaacattatgtgtgtgtatgtaggtatatggatatgcagaattctccccttttgagctcaaaaggacatttactgtggtcctccttgcaagtgttcaataaccagctatttggaagacaaatttgttctgtgacattgtcttttatcttcattccaggtcctgttcccttgcaggttggtgtgtgcctgagataaagaagtgatgctatacaaacattaccaactgtttgtgggaatgaagtacttc

SEQ ID NO: 382026 - DNA, 603 bp, Homo sapiens
ttgtaaccactcaacaagttcttcctgcctgctgcacaaagaccacagcattgcagtaaagaaagtttaattgacctgaggccagccatcccatgcagaagacaaagttattactcacatcaatctccctgaaaattcagagaccagagttttttaaggataatttggtaggtagggggcctgggagtggagagtattgattggttggatcagagatgaaatcatagggagtcaaagctgtcttcttgcactgagtctgctcctgggtggggaccacaaaatcagacgagccagtttcatcgatcktggtgatgccagagtctgaaaaatatcttgagcaccaatcttaggttttctaacagtgttattatccctaggagcaattgaggaggttttgaatcttgtggcctgtagctgcatgattcctaaaccataatttctaatcttacagctaatttatttgtcctacaaaggcagcctggtccccaggcaagaagagggcttgtttcaggaaaggggtgttatcatctttgtttcaaagttaaactataaactaagttcctcccaaagttagtttggcctacacccaggaatgaacaatga

SEQ ID NO: 382027 - DNA, 577 bp, Homo sapiens
aaaagtaagtcaaaatatataggatcaaataaaacccatctgatgagaatatatggtttgtagggcatgactccctagactccttaggtaggaatttgggcaagataaaaaatcagagcttagtcctcaaaaatattctaaaaataagcaatattttattcctttgtcgaaggaccattttcacattataacaatataaatcttattgcaaggatatttcattttgagatttaaacattacttccttagaaatgattaaatgtgyaaacatttcaaattctaaaatgtaggtgggacctttgagaggtaattatttggtgagggcaaaagtaattgcagtttttgcactgttggaatttgccatttgatattgaaatacattcttaaataaatatggttatgttatacatcattttaatgggcatttctcgctttatttattttttgctacttattacttgctgtttattttatgtttattttagactatggaaatgatgttagacaaaaagcaaatttaagcgattttcttatttgagttcaaaatgggtcataaagcagtggagacaacttgcag

SEQ ID NO: 382028 - DNA, 645 bp, Homo sapiens
accctacagtaaatatttttttttctgttaatgggcacaattgctgaaatttcacacaacacttcaatcttgcrtggcagtgcaatttccgtcccacattcaatagctgaccttttaaaatacacatttgcagagttaaatttgctttagcaagtttttaaaagtccaacaaatgggtggaaacatggtttggcttggtttgggctgtgaattgcttcccttttccactttgtttttcccacatgttcctgtcctagtttaggaaatgtgttgagggcagggaaacaggtggggtttggaggcaggaatagggaagagggatttatctatattatctggaatgtcttaggatgaaatctgcttggggagtagccacagcatttcacattccagttgacatgtatttactgtaatatctgtattcaattatcttctttatttctaccacacttatttctaccaagaaagatttgaggagattgtaattaaaaccgtatacaatgaataggataataaaattaataggtaaaattgaaagccatatactgcaagcaaagaaaatacaccattaattatattcagatctttatagtaaccaaaacaaacaaagaaatctaaacatgtatttattgagttctcacagtt

SEQ ID NO: 382029 - DNA, 533 bp, Homo sapiens
tgcacctgcttaagtattccgtgaataaacctgaactattgaaaaagcgtgctctgtctaccggcatttggaaaacctaatgaggagagaatagagattgtcttgagtttctattaaggtctgaacaattctaaagtgatccagcatcacaatccyacttaagcaagcaactctcaggtgattaataaaacaggttaaactactggctcatcagagatcagacatatcacttgcaccttcttccatgaaattgcatgctgtgtgaattttctacttgcttctttcttatctcacttttattcctcacccttgacagtatccactctggtctctgcctcacagatacaaacatgtggcagattaaggcattttaaaaaaatagctttgcattctatagtaacagatgcacaagtatttacgggaatcgctttctttctattttttccacttaagaatttacattgaccctccatctttggaagcaaaagacttaatccaaaaacctctggtttttaaaaatttcttcttcaatg

SEQ ID NO: 382030 - DNA, 483 bp, Homo sapiens
atgttaagacctggtgtgttttctcaaacaggaaaggtttcagaaaatgcagcattaggccaattgcagaaccaagagagatgaattgtgcaattttttgtagattagattttcctaacttggccactgtcggcttcatccctgtggggtcaaagctactttgtgcgcagcaaatgaaacttgattttcagggaaacatgtttgccttcagtaaaatgcagccaccgtaacaatctagtccatccagagatgaaggttgtagcattgcttccctcttagatatattgttagcagtgtcaacagtgtagaactgtttaaacctgctggacgctgtgcattttggtgactccattccatgtaccacatgtgagaggtagaaagtgtggaaggggcggtgcttctcagagtgtgggcatttgcatggmggtattcacatttgcttatgaaatagccccctctgagttccagaagtggaaacaagaa

SEQ ID NO: 382031 - DNA, 559 bp, Homo sapiens
ctccttctgcctcatctcactcaggcaaattctttcttctgaggaggcaagaatcgaggttgctgcagacccatttggatttgccgccactaagatactttgtggtaccacgtgacttggataacactactagactgatgtcctatcaacttggtattcacaacatctagcacattacctggcactcagaagcgctcaacaaatgcagactgactatggtcacctgctgaaatttwaaaaaagtacacaaaaaacttcccagcacacccatagactcccagtggcaaagtaaatataagttgatgatcaggtcaacaactaaatctgagaagctgaaacgtctacctatggaaaattgagcattgagtgtatatggacagtgccctgacagaaactcacaaacacatacacagcacactatggctctacagagacacagaaaagtattattggattcttcaggtggcctaatcccataccattttgtaccttaaaagtaaaggtcagagcagtgaactgaatcagcaatgaatgtgaaaagcaatgctgttaatatcca

SEQ ID NO: 382032 - DNA, 592 bp, Homo sapiens
gttaataaatattataaacacttttcacgaaaaatgctgtttgctgagaagtaagctattattgttattctmcatttccctctacttaattacacattacattttaaagttgatcttatcaaaactagttacgctcttatttaaaatgttttttcttcagaaaaaaaaacttttgctttttaaatcaacatttagacaaaatgtttttaaggtacccatttttaatagacatgaaaaggatacaaattaattaaggcaaagtttcacaaggacacctgtgatttttagcttgggtagcttatttggaaatatttcttcctttgctttcttgtggtacgtatatactataaaaatatgaaaagtaaaaacaaaaatccattttacaaagtaacaggaaaactggagatgcaaactgtaaaaaccgtgataggaaaagagacacacattagataaagatttcctttacactaggtttacaagtagtaacttggaaaactacaagttcttaacatgccctatcagtactagttccagtagttgattcagaatgataagatcttttgatatgcttgccaaagcaggtagttttaat

SEQ ID NO: 382033 - DNA, 592 bp, Homo sapiens
gttaataaatattataaacacttttcacgaaaaatgctgtttgctgagaagtaagctattattgttattctccatttccctctacttaattacacattacattttaaagttgatcttatcaaaactagttacgctcttatttaaaatgttttttcttcagaaaaaaaaacttttgctttttaaatcaacatttagacaaaatgtttttaaggtacccatttttaatagacatgaaaaggatacaaattaattaaggcaaagtttcacaaggacacctgtgatttttagcttgggtagcttatttggaaatatttcttcctttgctttcttgtggtacrtatatactataaaaatatgaaaagtaaaaacaaaaatccattttacaaagtaacaggaaaactggagatgcaaactgtaaaaaccgtgataggaaaagagacacacattagataaagatttcctttacactaggtttacaagtagtaacttggaaaactacaagttcttaacatgccctatcagtactagttccagtagttgattcagaatgataagatcttttgatatgcttgccaaagcaggtagttttaat

SEQ ID NO: 382034 - DNA, 592 bp, Homo sapiens
gttaataaatattataaacacttttcacgaaaaatgctgtttgctgagaagtaagctattattgttattctccatttccctctacttaattacacattacattttaaagttgatcttatcaaaactagttacgctcttatttaaaatgttttttcttcagaaaaaaaaacttttgctttttaaatcaacatttagacaaaatgtttttaaggtacccatttttaatagacatgaaaaggatacaaattaattaaggcaaagtttcacaaggacacctgtgatttttagcttgggtagcttatttggaaatatttcttcctttgctttcttgtggtacgtatatactataaaaatatgaaaagtaaaaacaaaaatccattttacaaagtaacaggaaaactggagatgcaaactgtaaaaaccgtgataggaaaagagacacacattasataaagatttcctttacactaggtttacaagtagtaacttggaaaactacaagttcttaacatgccctatcagtactagttccagtagttgattcagaatgataagatcttttgatatgcttgccaaagcaggtagttttaat

SEQ ID NO: 382035 - DNA, 635 bp, Homo sapiens
gtttcaaggatgtaagcaaaagcagtgtgtgtgatttctgggacagttgggtaggatgcatgcctttcctgtcctcttaatttttcctgatatattaagtgtagagaaacggctggaggatttgctcatgaggtaggctgagagacggtacatctatgacatagatgagcctgtgttcttgaaatcatggcgagctatgtttgttctagactgtctgtctcaggatcttttgaacagagagacatgcttttatcttgtttaagcctttgttattctggcttatcctattattagttgaatctaagcctaactaattatgctgaccatctgccttctttacaattatatatttaaatgccacagtttcctcttctgtaaaatgaaaataataatggtacccaacttatgaacttgtggtgaagatcaatgatttgatagtccctagtacataacaaacattaaaaatgttggttatcattagcattacccagatacaacccagtgatgctggggaaaactgcaaaaccattaggattggtaataytgagccttcagtgagagtagtatcatttcatttgcttccattgatcatctaatccaattccttcagtgactattctacagattaacactct

SEQ ID NO: 382036 - DNA, 386 bp, Homo sapiens
tgatactaccccctaactatcttaaaagtcatccttctttctgtattctcactgctattttctttctccaagccctcttcatatgctatctgaatttgtgaagtaatctccggagtggttttccagtctttttaccccttgaaatccatcccacacatggttctgagtgctctttctgaactataacttgaattctgttactattttrcaaaacaaaatagagctctatggtacggtgtgcaagacttttcattatggagaatctagttagagtccctctttcatctcctaaggccatcatcttgcactatcaaattaatgatgtgacatgcaatttcatccttcttggaaccaaagtttatccctcaaacctcactcaaacgtca

SEQ ID NO: 382037 - DNA, 581 bp, Homo sapiens
agctcatgtatgaatacagatggcaaaagcctaaacaaaatgcagataaacttaacgggatcttaagagatttatccactaatcttaaggagagcttatgactagtgtatatattatttttaaaaattcacatcagtatgatcattttactagatgataaaatgacattttaaaatactccaaaatccactcaatacttaacagcaaaaactcttaggaaataaaaaatagaagtatgtaattccttaacatgataacagctttctgtcttaatacaacaggctagcaaaacacatgaatccctaaaaatacattataccactaatatcagtaaaaagacaaagttgccaggtttcaatattgttagttaacttttttggttgttgttaatgctattccaataataatcccaatggagatttttggatattttataatgtgtctaaagttcaccaagttaaaaaaaaaaaaaaaaggtagggggagaaacatcttgaataagatttattaagaagctatatsgactgaattaatgatggtactggtgcaagaatcaataatcagatcaatttaataaaaac

SEQ ID NO: 382038 - DNA, 535 bp, Homo sapiens
gatgggttctgcccaaggaacgtgaggatcagaaaatatagatctgacctgttttgaacaggtttcagcaggtgyaaattgtgtatcactctctgcttaagagattgtcagactgagtcccacacccatagaaaattctcctgaaagtggaattcagggctggcaggaaatgataaaggcggggaaagtgggcgtttgctgttcacctctgaggagccagggaagccaggcacaagttgggtgatgcctgcaccgccagctctgatctggagataaagaagacgagacctggcacagcagttcaaagcttgctgtaatgtttttagaatgccagcagcaaagtgactccaaaaggacaaatgggcaatggccctcaatctatgattctgccaccgaagtgtggactggggtcatgcaaagattgttatttccataaaaaaagcagagagcgctctggccactttgacaagagaaaaaatttcttacactttcccatgaccataaggaagtgcaatcaatcttcttcaggctttgc

SEQ ID NO: 382039 - DNA, 341 bp, Homo sapiens
gcattttcctctcacatccaagatagccaaaacccagagaggggagagaaaggggcaaaaacatccttttggagacaaaccccaagtaagaaggtaggtggggatgatagccacccttctactcctacccctaaatgtgaacawatgtcacaaatgcccaaatcccagcttgagtgcccagactaagggcaaggcagctactatgagaaaggagagaacacagctggagacactgggcagcctgttccctccaccaaattatataatgtccatcaccttctgccaaggaccaatgctcaccttccaaaaactacacgatgattaaagatggtggctgagca

SEQ ID NO: 382040 - DNA, 589 bp, Homo sapiens
gaccattccttggtagtgtttctcactgagggctaaacatatgaccgcactcaatcaatggagcacagctgccattcttttcatgaggtctgggatttaggtgatgtggatgaggaaattgaaagaactcttcagtaaatgtttggagacctgaattctaattctgcctggtgatcttgactcacagtgtgccctgtgagtttatttttctctgtaagaagaggtttggaccaaatgtctgactcatgtacttgttgctatgcatagtttcygaggaacagcccggtgacttgaaagacataaaccacccaacttaattccagtaaaagccttactaaatcagaaatgttcttttacattttctatttgggggaaaattgtctacagcaactaaactcattttaaagaatggtggtttcccgattgttgtaaaaaaattacaaagtgcagtcagtaccccccaaaattcattaaacatgtaaacaagtaatgttatgccagctttgcaatctcttccaaagatcaggcctgggaagagtgaagtgtggttttgatggtttgggtatgcagtggtgagcttgtagtcagg

SEQ ID NO: 382041 - DNA, 570 bp, Homo sapiens
aatttttaatttttttgtaggaatgggatctcactgtgttgcctaggctggtctcaaactcctgagctcaagcaatcttccctccttggcctcccaaagtactaagattacaggtgtgagccactgtgcctggttgaaaatattctaarttgttaccttttttataatccaactaatttggttggcctcaagcaatcaatatatgtaggtaactttcattagatctctgtggaaaggatttttggaaacatgcagaattcccacacatcatttgggttagaataagttatgaaactgtgcagacaaccctaaaatttcatctacaaggtttgttgtgggttcaggtgactctgcagatcagttatcttacatatgatggctcagctttctagactttttcgatacctgcttccatgatctcccaggctggggaagagacggctgcagagttgagcactgggaattaaatgctttattccagaagtgacaaacatcacttctcatatttttttgatagaattactcatatggtccctcctaatttccttgggatgggaaatgtagaagaga

SEQ ID NO: 382042 - DNA, 575 bp, Homo sapiens
tttaataataaaggtaatatttcacataaccagacattaaagatggggcagattattgggctggccttttccaawggtttcagctccttatctctgcaattcctaatttctgttctcctctgtatatcagcaatattcttgaattggatgcagatagcatctgcagttccaggtctgatgaccacagagtttgggaaagagaccatctcttccagtggctctctttaacagtaaggcaatgttttccagaagcaaatctcattcctgtttccttggcccacatagtgtcgtatgcccattcctggatccaaacctcatttccaagtgaatgctatttatagagtggcttaggcctggatttacaaccaatcactggcaaggaggatgggattaccatggttgccttaaactttgcagaatctacttcagggtttggagtcagtccctcaaactgcatagctcttacatactgaggaaggaatgaaagggatattgaggagaaaaccacaatattatctattacactatgtcttagggctcatttgtgaatgtatttttatttgtttggctgtagc

SEQ ID NO: 382043 - DNA, 611 bp, Homo sapiens
atggacttgtttctgtaggtatatacttcaggtcttaactgaaaggaataataaaagaattttgccatctggaataaaatagtgacaaatactacaagactcaaattatgttcatatacataaagccatgtttccaaatcactataataattcctatctcccacctaggaggcactaaagaattgtttttaaaaggaaaatatcaaaacaatccgataattctcctaaatataatccccattgaagctgaacatattttatccttttttagctaagctatcattatcattatccagtaaatgcctgcaggaactttatagctaacagtttacccttttccttttgcatgatttaaatatgttgttttattacacattgtttaaatatgccctacgtgaagccgaccacacacacacacagcatatttagataggaatataggtcaaaagcaccaaaaaaatgcaaaccacaagtcatatgaataacaccaccaaactcaagttgacactattttagtagcttcaggaacatttgaacccyggcataatttataccttgaattcaggcagaaattcattttctagccaatggtatgatggtgatagattgga

SEQ ID NO: 382044 - DNA, 487 bp, Homo sapiens
ccttaaattcactccatcaatactgtgagagccccactggcttcccctttggggttttagacrtttagggtattcactgaatactttacgttgaagtgtttttctataacattagaaccaggttcaacttaaaaaaaaaaaaaaagctcttagccatatgtagaaaactgttcatccgtgtgagttctaggtgaagtatggtgggaaagctgggtctctaaagcagacattcttattttttgttttgttgtttttttaaattatactttaagttttagggtacatgtgcacaacgtgcaggtttgttacaaaagtagacgttatttttaaaagatgcttttatgcccaagacttctgaaacacagagtgctctgaatatacagaatgacagctgaagagcccaaacctgaaatttccttccttatatagatagtccgagctttacttgatctctcttcctctataaaaatggaagccatactgtaag

SEQ ID NO: 382045 - DNA, 493 bp, Homo sapiens
tatgtgaaataaaaccactgttgaaactggctgtcactttaaaaactatccatattgatgcgctgtgaaaacatgacaagtcaccacaggaaacaaaatagaggggtcactaaagcccagagctcctgcatggcccccttagtcctgaaacttaaaaatggaagcatgtttcaggctgaggttcacacctcagcaaacagctgactctaattcttaaaggaccctgtctaataggacttcaaactggctccaaatggttgggacagtcccatccaacatcaaattacaacctcactaatccagactgattaggattgtgcatgggcctcaactgaagacttccttggctttgacaattctttcctcctcacgaggactgcaggctgcagccttatcaaaatgtttccttgaaattttataacttttcacacacttgaaaagcataatttaccttaatgcarcaggtagaaatgggggaaattaataaacttgt

SEQ ID NO: 382046 - DNA, 562 bp, Homo sapiens
aagaacataaaaaacatatacatattctatttgtttgagttctaatgttgctttcaggtcagacattctggattttcatggttttggcttcagaaaattctaagtctagaaagcagctgtttctatgggtatcccaaagaagaaaactgctacatgaaacaagagcaaactgtggtctcatctgcacatttgcagagtagcatcagatccatggagatgctgctcactgaaaaagtaacacccattgtgttggacctcacctacgtgacctttccrgggcatagtctggaaggacatggaaaattaaaagagaagttaaacactgcacaattaagtgagaagaactttgaatctcagtgaataactcaggcaagacaataggaagagaatggagataaggagaaggtatgagctacaagaaggaaggtcagccctccgccaaaccagcaagatattccctgtggtgaagaatggctgatgaatttcagcacaaagctatctaatgttcagtttcaagttgctatctacatgatgctatgccatcatccctccattactgcaa

SEQ ID NO: 382047 - DNA, 562 bp, Homo sapiens
tcttcttttacttctttgtatacatacattctacctagcctctttaccctcagcttactaatgagaaagaaagaatgaaataagaaactatagatttccttatctttcccttttcttgaatgtcatcattaaagaatgaaataagaaactatagatttccttttctttcccttttcttgaatgtcatcaytttcagcatcagtgattgactaatccaaggaagtaacatgagtaagaaggaatatgatggagttccttgatcattcctgtttccgaaaatgctattgccttccttctgcatttgaagcaagttctgattagagtggaaagtgtgatctattacaattgtcatatctgccccttagtaattgctgtggtttctatctgtgtctctgcctaaatttcaggtcaaattgtaatccccagtgttggagaaggggcctagtgtgaggtaataagatcatgggggcagagttctcactaatgggttagcaccatcctctctgtactattcttatgatagtgagtgagtgagttatcatgagatctggttgtttaaaag

SEQ ID NO: 382048 - DNA, 551 bp, Homo sapiens
attgaaccatgggttggatctttcctgtgctgttctaatgataatgaataagtctcacaaaatctgatggttttgtgaagaggagtttcttcrcacaagttctctctctttgcctgctgccatctgcataagctgtgacttgctcctccttgccttctgccatgatcgtgaggcctccccagccatgtggaactgtaagtgcaataaatctctttcttttgtaaattgcccagtcttgggtatgcctttatcagcagcatgaaaacagagtaatacacttgggtatgtctttatcagcagcatgaaaattgactaatacagtaagtttcctggtgcctccccagaagctgagtagatgccaacttaatgcttcctatacatcttgtagaacttctctcttttataaattatccagtctgttaggtattttttatagcagtgcaagaatggactaatacaaaaaattggtaccagtagtggggcattgctataaagatacctgaaaatgggaaagtggctttggaactgggtaatggatagaaactggaaga

SEQ ID NO: 382049 - DNA, 551 bp, Homo sapiens
attgaaccatgggttggatctttcctgtgctgttctaatgataatgaataagtctcacaaaatctgatggttttgtgaagaggagtttcttcgcacaagttctctctctttgcctgctgccatctgcataagctgtgacttgctcctccttgccttctgccatgatcgtgaggcctccccagccatgtggaactgtaagtgcaataaatctctttcttttgtaaattgcccagtcttgggtatgcctttatcagcagcatgaaaacagagtaatacacttgggtatgtctttatcagcagcatgaaaattgactaatacagtaagtttcctggtgcctccccagaagctgagtagatgccaacttaatgcttcctatacatcttgtagaacttctctcttttataaattatccagtctgttaggtattttttatagcagtgcaagaatggactaatacaaaaaattggtaccagtagtgggrcattgctataaagatacctgaaaatgggaaagtggctttggaactgggtaatggatagaaactggaaga

SEQ ID NO: 382050 - DNA, 581 bp, Homo sapiens
aaaaggagccaagtgctaacatccaagaaaacggggaaaaggcctccaagacttttcagagacctgtgtacaaagcccctcccatcacaggcccagatgcctaggaggacaatgatttcatgagccattcccagggctctgctgccctgcacaaccttgggacatggctccctgcgttccagacattccagctccagctacggttccaaggggcccaggtacagctcaggtcactgcttcaaaagatgcaagccataagccttggtggttcccgtgtggtgttaagcctgaaggcacacagagtgcaagagttgaggcttgggagtctttgcctagatttcagaggatgtatagaagtgcttggatctccaggcaaaagcctgaagtaggagcagagccctcatgtaaaacctctactatggcagtgcagattggaaatctggggttgaagccccacacagagtcccctctggagcactgcctagtggagctgtgagaygagggccatagtcttccagacccaagaattgtaggtccactgacagcttgtacctcatgcctggaaaagcctcaaccactca

SEQ ID NO: 382051 - DNA, 603 bp, Homo sapiens
cctcaaccactcaacaccagctcttgaaagcacccttaggtggggaaccctgcaaaaccacagggcagtttcccaaggctctgggagcccacctcttgcatcagtgtgccctggataagagacatggagttaaaagagattattttggaactttaaaatttaatgactgccctgctgggtttcacacttgtaagcgctttgttttgataaatttctcttttttggaatgggagtatttacccaatgcctatatccccatttcatcttggaagtaactagttttttattttacaaactcataggtagaaaggacttgccttgtctcagataagactttgggctttggacttttgagttaatgctggaatgaggtaagaccttgggagacygttgggaaggcatgactgtattttgaaatgtgagaagtacatggtatttgagaaggaccaagagtggaatgatatggttagaatctgtgtcccagccgaaaacttatgtcacattttaatctccattgttggaagaggggcctggtggaaggtaattggatcatgggtgtggagttatcactaatggtttagcactatccccttgctgctgtta

SEQ ID NO: 382052 - DNA, 350 bp, Homo sapiens
catggtgtaatacgcagcttctttaactattagcagaagctagtttgagacttcatagctttaagcaggagaggcctaaaaactcagtgaccatccatggctgctttcctctgagaaaccttcccacccacagcaatgactctgcttcaagcagccatcacactgaggatactgactcgtatgtgaatggacaactgacccaagcttgcacaagtgctaagttatctgtgttggtagagccctgagatgaaacagatagcacacttgaataagataattgaggagagttcacrgaaaggactattgacatatgagtggacaaactatgtgcctcattattttgctcacaa

SEQ ID NO: 382053 - DNA, 576 bp, Homo sapiens
ttccatgccttcatcaggtacaccaccctttaggagcatcaatgtgttcagctacccatcttcatgagcctatgatgaagacttcattgcatgggcataattgaagcagggacaatagtatagaaatattattggacaaaaaggttattgttacaggtagttaggcataagcatggcaagagagggctctctccctatccacttgaatgtyaggtgatggtttggcaattatcacattgcctctctaaaaataattcagcagccatcaagctcctgatggtccacacctgttatcattaaacgtgttaaatgaatgcagaccccaaggaggaaaagcttcctggacatgagtgttaagagacaaaagggtgaaataaatgcgatcttccaggtatactccactgaaaaaaggaagaaagcctcagatggtcatgcatataactccctaaatacactgcgtgtgctcacttcccaggttaaagagggctctgcacctggggaaagcctaccctaaaggaagaattatggaaaagaggcaaacttataaaagtcctaggatcttggttaaatggggca

SEQ ID NO: 382054 - DNA, 595 bp, Homo sapiens
tagaagttggtcctaataaaattaaaacagaataatgtatatattccaaattactattgaaaagaagagcaaataataartaagaaaataatggcttactatgtgctagttgctgttctaagtactttatatgaactaactcacttagtactcacaaaatctgtactatctgcatttgactcatgagaaaactgaggcacacggtatgtaaataacttgtccaagatcacatacgattgaagcccagaaaatctgaatgtataacccgctcttgtaaggaaatgctgatgctgcttcctaagaaactgttaaggggagagaggagtatcaaataaaaataaaagacaagaagcataaaatcagaaaacctatcaagtatattgactatgattcagaaaccagaatgtattagttttctatttctaacagattgcctcaaatctagtagcttaaaacatcacatatttattatcttatagttctgttggtcagaaatctgccacagatctcactgggctaaaatcaacgtgttaggagggctgaattctctttttgggactcccagagagaatctgtttcctgctccttcgggctg

SEQ ID NO: 382055 - DNA, 589 bp, Homo sapiens
ctgaggcccccgtttccttgcaggaagtcarctgagggccattctgaactgctagaggctccctaatttcttgattaatggtctacctcctcaatttccaagccacagttgagtccatttcaatcttcaaattgtttttgcctcttcttagctttcatcttttgccttttaaccagatttcactgctatgtatctaggaattaggggctgattaaattatgctacatccacatgaggagatactaagtagccattaagaaattttggcccaaatttagttttttcccagtttttacaagcagtttttgtatttaagttctaaactacaatattgacataatttttaaaattctgagatgttttgaaaaatatgttcctaaatattgaatataattttaaataaataagctcacattaaatacaatgagtatggaaggataattttatatatatatatatatatatataaatgctaaaaaataataattagttcacttggcaattatttcaatttttctagaatggaaatttctttctttatataataagattatttaaagttataattttagaatgatggtgacaggaa

SEQ ID NO: 382056 - DNA, 567 bp, Homo sapiens
atttcaatcttcaaattgtttttgcctcttcttagctttcatcttttgccttttaaccagatttcactgctatgtatctaggaattaggggctgattaaattatgctacatccacatgaggagatactaagtagccattaagawattttggcccaaatttagttttttcccagtttttacaagcagtttttgtatttaagttctaaactacaatattgacataatttttaaaattctgagatgttttgaaaaatatgttcctaaatattgaatataattttaaataaataagctcacattaaatacaatgagtatggaaggataattttatatatatatatatatatatataaatgctaaaaaataataattagttcacttggcaattatttcaatttttctagaatggaaatttctttctttatataataagattatttaaagttataattttagaatgatggtgacaggaaatgctcataatataccatcaaaactcaaatcagaaaagaaaaatgggtcgttttattttgttacactgggtggtctttttggcatggatggtct

SEQ ID NO: 382057 - DNA, 487 bp, Homo sapiens
ttattttttttaatacagcagtctttccccaacccatgaaccaaagaattctggcctctctaaagctgatgtaaaaggaaaaagtttgaatgatattttattgacctactttattcagtttactaagaaaattttctggcatgatcacyattccaatgccttgggtgattgagaattaactttatccaaagtagatccataccaggtattgtgaaatctggtggagtgctgaaatctaggcccttgacctttcattcaggcctccagactctaagcccaaggcaatttctctactcttcatctctccagaagagttgagcagaagcattgtttctattctatcagcttcatttccaggtccttcctttttgttctaacactaacactctcaaaccttttgttttatgttacaagcctgttttgctttcctagataatatggtttggctgtccccacccaaatcttaccgtcagttgtaataatccca

SEQ ID NO: 382058 - DNA, 487 bp, Homo sapiens
ttattttttttaatacagcagtctttccccaacccatgaaccaaagaattctggcctctctaaagctgatgtaaaaggaaaaagtttgaatgatattttattgacctactttattcagtttactaagaaaattttctggcatgatcactattccaatgccttgggtgattgagaattaactttatccaaagtagatccataccaggtattgtgaaatctggtggagtgctgamatctaggcccttgacctttcattcaggcctccagactctaagcccaaggcaatttctctactcttcatctctccagaagagttgagcagaagcattgtttctattctatcagcttcatttccaggtccttcctttttgttctaacactaacactctcaaaccttttgttttatgttacaagcctgttttgctttcctagataatatggtttggctgtccccacccaaatcttaccgtcagttgtaataatccca

SEQ ID NO: 382059 - DNA, 487 bp, Homo sapiens
ttattttttttaatacagcagtctttccccaacccatgaaccaaagaattctggcctctctaaagctgatgtaaaaggaaaaagtttgaatgatattttattgacctactttattcagtttactaagaaaattttctggcatgatcactattccaatgccttgggtgattgagaattaactttatccaaagtagatccataccaggtattgtgaaatctggtggagtgctgaaatctaggcccttgacctttcattcaggcctccagactctaagcccaaggcaatttctctactyttcatctctccagaagagttgagcagaagcattgtttctattctatcagcttcatttccaggtccttcctttttgttctaacactaacactctcaaaccttttgttttatgttacaagcctgttttgctttcctagataatatggtttggctgtccccacccaaatcttaccgtcagttgtaataatccca

SEQ ID NO: 382060 - DNA, 580 bp, Homo sapiens
catggcacatgtatacctacawaacaaacctgcatgttctgcacgtgtatcccagaacttaaagtaaaattaaaaacaaaacaaagagactggtggcattttgccccactctaaagatctgtggaactttgaacttcagagagatgatttaggttatctggtggaagaaatttctaagcagcagtgtttaagaggaagaagagcataaacgtttggaaaatgtgcagcctgacaatgcacaataggaaagaaaaacccattattcaggggagaaattcgagcttgcttcagaaatttgtgtaagtaaaaaggagcccattgctaattactaagacaatggggaaaatatctccagggcatgtcagagaccttcctgctcttcccatcataggcccagaggcctaggaggaaaaaataatttagtaggccaggcccaggccctccctattgtgtgcagcctagggacttggtgccctgtgtcccagctgctccagctgtggctaaaaggggccaagatgcagctcagactttggcttcagagggtgcaggtcctaaaccttggcagcttccatgtggtgtt

SEQ ID NO: 382061 - DNA, 617 bp, Homo sapiens
aaaccaaacaccacatgttctcactcataagtgggagttgaacaatgaggacacatggacacagggaggggaacatcacacactggggtctgtcacggggtggagagaaaggggaggcagattattaggacaagtacctaatgcatgtggggcttaaaacctagacgacaggttgataggtgcagcaaaccaccatggcacatgtatacctacataacaaacctgcatgttctgcacgtgtatcccagaacttaaagtaaaattaaaaacaaaacaaagagactggtggcattttgccccactctaaagatctgtggaactttgaacttcagagagatgatttaggttatctggtggaagaaatttctaagcagcagtgtttaagaggaagaagagcataaacgtttggaaaatgtgcagcctgacaatgcacaataggaaagaaaaacccattattcaggggagaaattcgagcttgcttcagaaatttgtgtaagtaaaaaggagcccawtgctaattactaagacaatggggaaaatatctccagggcatgtcagagaccttcctgctcttcccatcataggcccagaggcctaggaggaaaaaataatttagt

SEQ ID NO: 382062 - DNA, 483 bp, Homo sapiens
aaccaaagtcaagattcaaggtaaaaatgagttccttaatttctgaagaactgagtaccagtttgtagatgcatacgtattaggccctagaagcagcaaatacttacagaaatgatgaaatcttattaaaggtaacttaaagttatagtggaatgtttcaaatgaacaacactgcactttcagaagttcatttgaaaataagggctctgaaattagtctcatccaaggatgcctattgaygtgcagaagcttctaaaagtatttcaatgctgttactgcttttcaaaaaaagactatgaaaggtaaacaaaaagcttaagtgactaattgataagaaaaattaaatctgctaatcctttggcctagttactatcctgccttgaagggaaaaaggaagcttttgtagataaagtgtttataaaagggaggccctcaggtaagtatgcttacttctttcttagatctatccatgttgaatcagcc

SEQ ID NO: 382063 - DNA, 566 bp, Homo sapiens
cacacatttggtgaagttctcctaaaggagtttggttaaacactacaaggtgttaagtacagagtgctaggaaatttgtcaagatctttattatagcgtgtgttcttggaacagagcacttactctggtaactatggctgagcatgttgtaaaccaagagctgtagccttgaaaggttgaacrtggcagaaattttatcatactggagtctatgatgagatccatactagcaagggcatctgaatgcctcttggggatattttttctactctcctgccctgccacagccttcagtaactgttactgcacatgaggtgaagacttcatgtgtctcatttagatatctcttctctctcctatcccatccctaacctgagtatcttgtacttgatgaaggtccataggaaagagttgatgaatggttgtagattcttctgtggctacaacttctaattcatcatggaagactatatgtagtcatttagtttcttctaagtttgacaggttcttctctacctatatatgggagattcctccaccttctgctcttgtgctaggggggaaaa

SEQ ID NO: 382064 - DNA, 466 bp, Homo sapiens
taagaaacagctatattaaaaagaccccataaactaaaatacacctttctggaatttacctagctgtcttgaagtcctttagtaaaataaatttatatctttaaaggaaatctccatttgtaagagcatctctgtttctgcatctaacccactaggaacttcaactatggggaagmcaatgatttaaagtttacataacagaccttgcctttgttcagatctaagttctgtgcctttgagatatcaatattctaccttgtttcacaggagtcccatctttggagacgtaaatttaaagctgcctctctgacaattgtttagcgcaataaaacatgtaattggaagaatgatagtctgaatggagaaaaaaaaactatttaaaagccagcaaataagaatcttttatgaaaactataagatctgcttctgtctttgtgtctctatgtctatgtgttatgtgcatatg

SEQ ID NO: 382065 - DNA, 552 bp, Homo sapiens
aacttcaactatggggaagacaatgatttaaagtttacataacagaccttgcctttgttcagatctaagttctgtgcctttgagatatcaatattctaccttgtttcacaggagtcccatctttggagacgtaaatttaaagctgcctctctgacaattgtttagygcaataaaacatgtaattggaagaatgatagtctgaatggagaaaaaaaaactatttaaaagccagcaaataagaatcttttatgaaaactataagatctgcttctgtctttgtgtctctatgtctatgtgttatgtgcatatgataacgtttggcaaatgaagctagtttttaaattgttggtaaaataggaaccacttcaacattttcagttaaacataattcagtacttcttgatttgactgtgagcttgcgttttttgttttgagcctctgaattcaggaatctggatgttacatgtagttagacaggcatgagtggggcaggacagagctctctcccacccactaggaatgttgagtgatggttcagcaattatcacattc

SEQ ID NO: 382066 - DNA, 552 bp, Homo sapiens
aacttcaactatggggaagacaatgatttaaagtttacataacagaccttgcctttgttcagatctaagttctgtgcctttgagatatcaatattctaccttgtttcacaggagtcccatctttggagacgtaaatttaaagctgcctctctgacaattgtttagcgcaataaaacatgtaattggaagaatgatagtctgaatggagaaaaaaaaactatttaaaagccagcaaataagaatcttttatgaaaactataagatctgcttctgtctttgtgtctctatgtctatgtgttatgtgcatatgataacrtttggcaaatgaagctagtttttaaattgttggtaaaataggaaccacttcaacattttcagttaaacataattcagtacttcttgatttgactgtgagcttgcgttttttgttttgagcctctgaattcaggaatctggatgttacatgtagttagacaggcatgagtggggcaggacagagctctctcccacccactaggaatgttgagtgatggttcagcaattatcacattc

SEQ ID NO: 382067 - DNA, 552 bp, Homo sapiens
aacttcaactatggggaagacaatgatttaaagtttacataacagaccttgcctttgttcagatctaagttctgtgcctttgagatatcaatattctaccttgtttcacaggagtcccatctttggagacgtaaatttaaagctgcctctctgacaattgtttagcgcaataaaacatgtaattggaagaatgatagtctgaatggagaaaaaaaaactatttaaaagccagcaaataagaatcttttatgaaaactataagatctgcttctgtctttgtgtctctatgtctatgtgttatgtgcatatgataacgtttggcaaatgaagctagtttttaaattgttggtaaaataggaaccacttcaacattttcagttaaacataattcagtacttcttgatttgactgtgagcttgcgttttttgttttgagcctctgaattcaggaatctggatgttacatgtagttagacaggcaygagtggggcaggacagagctctctcccacccactaggaatgttgagtgatggttcagcaattatcacattc

SEQ ID NO: 382068 - DNA, 509 bp, Homo sapiens
tataaagatttaccactagttctcagataccttccactggtaacatgaataggtggccatggtgagaacagctacaaggcagacccaaaycccatatggtcccttctctgccccagctttgcctcctgggtcttctgggttgggtctgatcttccaggcttcatcttcacagctctgctgtctgtcctgagttttgcatctgttatgtaaattcaggactcagagaggccctgcccttcatagccatctttggtgccacatggctacttgagacccaggatgactggggaagactttagggagggtacttgcatcatagtttcaaaattcttttactttaaattaaataagagataaccatgaaatatctcagtcatttgcaagtaagttaaaatactaaaacattgattaagtttatatgcttatataagtttatatattttgacatcttatttttatatgatatagaaaagctaaatatatttttatatatatttatgtaatgccca

SEQ ID NO: 382069 - DNA, 509 bp, Homo sapiens
tataaagatttaccactagttctcagataccttccactggtaacatgaataggtggccatggtgagaacagctacaaggcagacccaaatcccatatggtcccttctctgccccagctttgcctcctgggtcttctgggttgggtctgatcttccaggcttcatcttcacagctctgctgtctgtcctgagttttgcatctgttatgtaaattcaggactcagagaggccctgcccttcatagccatctttggtgccacatggctacttgagacccaggatgactggggaagactttagggagggtamttgcatcatagtttcaaaattcttttactttaaattaaataagagataaccatgaaatatctcagtcatttgcaagtaagttaaaatactaaaacattgattaagtttatatgcttatataagtttatatattttgacatcttatttttatatgatatagaaaagctaaatatatttttatatatatttatgtaatgccca

SEQ ID NO: 382070 - DNA, 566 bp, Homo sapiens
cacacatttggtgaagttctcctaaaggagtttggttaaacactacaaggtgttaagtacagagtgctaggaaatttgtcaagatctttattatagcgtgtgttcttggaacagagcacttactctggtaactatggctgagcatgttgtaaaccaagagctgtagccttgaaaggttgaacatggcagaaattttatcatactggagtctatgatgagatccatactagcaagggcatctgaatgcctcttggggatattttttctactctcctgccctgccacagccttcagtaactgttactgcacatgaggtgaagacttcatgtgtctcatttagatatctcttctctctccyatcccatccctaacctgagtatcttgtacttgatgaaggtccataggaaagagttgatgaatggttgtagattcttctgtggctacaacttctaattcatcatggaagactatatgtagtcatttagtttcttctaagtttgacaggttcttctctacctatatatgggagattcctccaccttctgctcttgtgctaggggggaaaa

SEQ ID NO: 382071 - DNA, 606 bp, Homo sapiens
gtcttatatggtcccttgtgtctgttggttgttcagaacccaaaagagagatgtcatcaatcaaaccgccaaatccccaaaatggagagccagatttccactttgttttwgcaaaaaactgaacattttctcccttcctaagggctatttctagtgttctaatttcccttggatatgctggcagatgtaaaactagataggttaaacctcttacgtattcattcaggctatgtcaaaccctcaacaagatgttcttactctagtgggtccacagatggggtgcaagggcccatgaatctcttaaatgcaggagcatatatactttttttctagcatatataattatttttctaggggacaaaaccttttcactgattcctaaatacttccataacataaaaaggttccaatgggaccctcgaagaagaaacaattatagtgtaggacagaggatcccagactttgttgccattaccatctcagtgttttgatgtgcccctaggctaaaaagtaaaacctaaatggttcagtttgttaagtagctaggtccaagtaaaaggtagaaggagaacatgtggtgagaggaggctgctgagtaggtatgcc

SEQ ID NO: 382072 - DNA, 546 bp, Homo sapiens
gtgcttaatcaatcctactctgaatgtacaaccttctctcagcttttgctgtctttgctgaagacatatttttcaccgccttacctaagaaacagacttggaactactccaactcaagattatagacactctggcttctaacatcagaaccctccctaggttcaccaggctattattatcataatatttatccaaatttttccttgatatttctggattaaataatgtttatggccctaaaatatacaaattagaatatgtcaggatcttctaaaaattatatgtaatattataaakcagtcctccctataacttcaaatgccaaaaactaaggaagtttggctacctcctggttaggaatactcaatctggaagtgtgccaatcaccaaatgctagaagcagagaagtggactcatggcatttgggtccatgctaattggcaagcctggacataatttgacactgcttcctactggcaccatggctcctgtcccacccagctggtgactgggaaaatgtagtcataataggcagagcagagtgta

SEQ ID NO: 382073 - DNA, 531 bp, Homo sapiens
gacacctctaatacttgtaatttttattggtccttcatgtactatgacagttcagacttacaaatgtacacatttcagaactggacttcagttgttgcttaaaatattttctctctcctcagcctcctcacttcctttatagattcatctttcattgaggaagccagggaaaaaatggtatatttcatttcagacagcctttatgaataagactacatggatggtcaaagttttagtttctgacaagttttgtaggaaaaaaaaacaaaccayaatttttgatctttgcttctttattttcagcagaccaagtaagtcgcattggcacagatatatgcttctgtggtagttaattggaaggaaaaatgtccgtgctcttatgtctgcatatgtactcaatgcaaactttgaatttatgttttgaaattgggacaatttgagaataaaataaccttaactgtatttctttattgtttcagttcaagtacttatactttgtttttgaaaaaaaacaatcttaatttcctactc

SEQ ID NO: 382074 - DNA, 484 bp, Homo sapiens
  misc_feature (1)...(484): n = A,T,C or G
ttatactttgtttttgaaaaaaaacaatcttaatttcctactctgacattcccctacttacaccacagattgaggcagtttggaatatgtcaggktccatctctgctgtgagatcactcatatctgacaacctgtttaagaaccttgaagatgctctgaggccaattgtaattccccccaaccaccccagagaaatacatggggccagggtggactgcataagcagcactgccactgccagagggtgctggttgccaaggagcctgctgccccactgcctgtctgccctgccgcttcaccttcaagattcttaggcacttgctcttgtgtcctctattgctagctatttcttgctcttgctttctttctccatcactcctcttctgtctcactctctcttctcctttctctcactttctttctctattcatcctttgcctgcttgtgccattgcctgcctngtgttggttctttcattgatttc

SEQ ID NO: 382075 - DNA, 615 bp, Homo sapiens
ctaactgattcccaggagccactgttctgatgtcagcctataagcaaaggagctggtggtccaggtctggtgaccaatccttctcagcccactcaatcagggtgatctccacctatatgtgggaaataaaactacatctgctaccataagccccttccagaatccaccataccctgctctggcctatctaaggatacactgctcagggatgggttggcagggctacacactcagcttttctggtaagcagagactcaagaaacctctggggtcctgttttctggtcgtgttatcccagaggtgcacatcgaccccttggatgtctgaaaagagggcattggagggaggccagaagtgctgatggttcactatacaccttgcagtcttactctgctggtatagtaagcagctgcccaccycacctcaccctgcactgtgggctcctgagtcagcatataaagcttttgtaaattatattttaaatacatgttttaaacttgaaaaggaaaagaataaataaatcagaagacattttgcagtgagaaggaataggtaggaaaaagaatgtgggaacaacaaaggaggataattctgtcaagaagtttgtccaggcgc

SEQ ID NO: 382076 - DNA, 569 bp, Homo sapiens
taaattcccacactcctgatggagctccctcctttctctgctctcggcagactagaatgtgtgctgggtgcatagccacagctcattccactgtggatctgccatgaattcctacaggagaggccttttcactcagtgcccaggggaatttcttttcttgaaggacttgttctgagtgggaaagttctcttgactggttctggcacttgtttgggtgtctccgcttatctcacttcccgtaatccatrcgaaaaacacatctaaaacagacagcatttaagtataatttattttcaatgctgttcaattgcaatttttttcttcataccaatcaggttattaaaaaatagacaacttaggccaggcgcggtggctcatgcctgtaatcccagcactttgggaggccaaggcgggcagatcacaaggtcaggagatcgagaccatcctggctaacatggtgaaatccgtctctactaaaactacagaaaaaaaaaaagcaaaaaaaaaattagccaggcatggtggcgggcacctgtagtcccagctactcggcaggctgaggcaggaga

SEQ ID NO: 382077 - DNA, 592 bp, Homo sapiens
tccaggtacaggcaaattcatttcctggtgagggctctttttctgacttgtagatggccaccttctcaccatgtcctcacatggccttttcttggcacatgtggagagagcaagctttggtgtctcttataatgacatgaatcccatcagatcagggacacacccttatgagcttatttaaccctaagtactttcctagagacctcatctccaaatgcagtcacaccraggattaaggcttcaacatgtgaatttgcagggacacaaacactcagtccataacaatcactaacaaagccatcatccctacattctgcagagatcacaaacatcttttcccatttcacggagacatctcagtgatgttaagtaacttcttcaggttccttggcggcaagttctgatgctaaatgcaatgtgtttcttatttcaacacaaactgttgcctgtggctattcctaaggtttaaaagaaatcataataccttgcagatgcagtatccaattcatgggtacaaataagggtgggagaagttctgtcattctgagaacgctttagtccctaatttgtaaatccttatacagtatattat

SEQ ID NO: 382078 - DNA, 554 bp, Homo sapiens
ctcttataatgacatgaatcccatcagatcagggacacacccttatgagcttatttaaccctaagtactttcctagagacctcatctccaaatgcagtcacaccaaggattaaggcttcaacatgtgaatttgcagggacacaaacactcagtccataacaatcactaacaaagccatcatccctacattctgcagagatcacaaacatcttttcccatttcacggagacatctcagtgatgttaagtaamttcttcaggttccttggcggcaagttctgatgctaaatgcaatgtgtttcttatttcaacacaaactgttgcctgtggctattcctaaggtttaaaagaaatcataataccttgcagatgcagtatccaattcatgggtacaaataagggtgggagaagttctgtcattctgagaacgctttagtccctaatttgtaaatccttatacagtatattatatgtaagactattagcatccatgctaaagcaaaacagtcaaatgaaagacattaaggatagctggtcattatagttgtttttgtg

SEQ ID NO: 382079 - DNA, 595 bp, Homo sapiens
gagtaagaaaaaactaaaatgtgatgaagctaattatgcctaaattaactaatcatgtattcattaatatttagaaatcttacaaaggtggaacaaaaatgaattaaattaagtgtaacaggatgttaaacaagacttttcctactgcctctgagttttgacagaaacatcaaaggttgagtataagaggtgtcaggtaatgctctattctattctaaagcaaggtgctatgtgatctgggcagagtatgtaaaggcagccatccaaaactagttcagtacacattagtctttagcctacatccagttatgtaaaagaatatgaagaattcataggcatgttgaaatggatgcttaatracaatgtaggtgtctagaatcctagcctcagaggttttgattctgaaggtgtggacccaccccccacccaaaaaatatacattaacaggtgtttcaagttattccaattataaaattctggggatttctatgtgtgtggttaataagccaaactttggaaaccatgtactagaataatgagggcagtgaggaaatgaaaaatcaaatgtttaaacttagaaatagtaagaaacatg

SEQ ID NO: 382080 - DNA, 468 bp, Homo sapiens
atgagactagtgactagagctagtgacagtttctacataataatagaagtttcaatccaccagggagatataatattttgaacacgtgtgtgcctaagaattaaatctcaaaatatatgaagcaatatttgacagattacaagaaaaaatagataagttcatctccataatgggagacttaaacacatctaattaattgatagaacaacagaattagcaagtttgatatcttgcacctaacagctgcaattcaaaagctatatggaagttgtcaggaatttgaccacacaactgggccttaaagtaagtctcaatgaccatctcttaagctaagcaacacaacctcattaagttggccactgggaaggacaggccacatgtaggtaagcttgttccatagaggattttcaactctagaatgtttccactggccyggcttactggttccttcatgttttatggcccacc

SEQ ID NO: 382081 - DNA, 511 bp, Homo sapiens
cacatttcttccctaaaactctatcataccagatgggggggaaaaatgtgatcagtagttatttagtaagcaatgaaataacgtacttgaaaccttacaggatacatgtagaattatatccaaagataaatttataatattaagtgctaatttattaaaagctaagtagagaagggaaattaataaagcattcaactcaaattattattttttaaatataaaattgtcctaaggaaaaatatgtgaaggggaattataataaaggttcaaatagaaatcaataacttggaaagtagaccctcagcagaatggtccaaagaagtgtttttcwgtttggcagttcttcagaaagtcaaatattagaatgccatgtgacccagcaatcccatacttaggtttataaactcaaaagatttgaaagtacgtattcaaacaatacttgtgcatgaaagttcacagcagcactattaatagtaggcaaaaagtagaaacaacccccaaaatatgtctt

SEQ ID NO: 382082 - DNA, 603 bp, Homo sapiens
aactcaaaagatttgaaagtacgtattcaaacaatacttgtgcatgaaagttcacagcagcactattaatagtaggcaaaaagtagaaacaacccccaaaatatgtctttgaaataaaaaatataatagcaaatctcttgcaaataaatctagatgaataagaatgtaagacaaaccaaacagaaaaattgagctaaatagttaacattaacaaaatgaaaagtaagagtatattatgcatgtatatattaataaatacaacaattctttttttttttttttttttttttgaracaaagtctcgctctgtcgcccaagctggaatgcagtggctcgatcgatctcggctcactgcaaactccgcctcccgggttcacgccattctcctgccttaacctccggagtagctgtgactacaggcgcctgccaccacgcccgggtatttttttgtatttttagtaaagacggggtttcaccgggttatccaggatgggctcgatctcctgacctcgtgatctgccggcctcggcctcccaaagtgctgggattacaggggggagccaccacgcccagcctaaatacaacaattctaatgaataaatt

SEQ ID NO: 382083 - DNA, 603 bp, Homo sapiens
aactcaaaagatttgaaagtacgtattcaaacaatacttgtgcatgaaagttcacagcagcactattaatagtaggcaaaaagtagaaacaacccccaaaatatgtctttgaaataaaaaatataatagcaaatctcttgcaaataaatctagatgaataagaatgtaagacaaaccaaacagaaaaattgagctaaatagttaacattaacaaaatgaaaagtaagagtatattatgcatgtatatattaataaatacaacaattctttttttttttttttttttttttgaaacaragtctcgctctgtcgcccaagctggaatgcagtggctcgatcgatctcggctcactgcaaactccgcctcccgggttcacgccattctcctgccttaacctccggagtagctgtgactacaggcgcctgccaccacgcccgggtatttttttgtatttttagtaaagacggggtttcaccgggttatccaggatgggctcgatctcctgacctcgtgatctgccggcctcggcctcccaaagtgctgggattacaggggggagccaccacgcccagcctaaatacaacaattctaatgaataaatt

SEQ ID NO: 382084 - DNA, 603 bp, Homo sapiens
aactcaaaagatttgaaagtacgtattcaaacaatacttgtgcatgaaagttcacagcagcactattaatagtaggcaaaaagtagaaacaacccccaaaatatgtctttgaaataaaaaatataatagcaaatctcttgcaaataaatctagatgaataagaatgtaagacaaaccaaacagaaaaattgagctaaatagttaacattaacaaaatgaaaagtaagagtatattatgcatgtatatattaataaatacaacaattctttttttttttttttttttttttgaaacaaagtctcgctctgtcgcccargctggaatgcagtggctcgatcgatctcggctcactgcaaactccgcctcccgggttcacgccattctcctgccttaacctccggagtagctgtgactacaggcgcctgccaccacgcccgggtatttttttgtatttttagtaaagacggggtttcaccgggttatccaggatgggctcgatctcctgacctcgtgatctgccggcctcggcctcccaaagtgctgggattacaggggggagccaccacgcccagcctaaatacaacaattctaatgaataaatt

SEQ ID NO: 382085 - DNA, 603 bp, Homo sapiens
aactcaaaagatttgaaagtacgtattcaaacaatacttgtgcatgaaagttcacagcagcactattaatagtaggcaaaaagtagaaacaacccccaaaatatgtctttgaaataaaaaatataatagcaaatctcttgcaaataaatctagatgaataagaatgtaagacaaaccaaacagaaaaattgagctaaatagttaacattaacaaaatgaaaagtaagagtatattatgcatgtatatattaataaatacaacaattctttttttttttttttttttttttgaaacaaagtctcgctctgtcgcccaagctggaatgcagtggctcgatcratctcggctcactgcaaactccgcctcccgggttcacgccattctcctgccttaacctccggagtagctgtgactacaggcgcctgccaccacgcccgggtatttttttgtatttttagtaaagacggggtttcaccgggttatccaggatgggctcgatctcctgacctcgtgatctgccggcctcggcctcccaaagtgctgggattacaggggggagccaccacgcccagcctaaatacaacaattctaatgaataaatt

SEQ ID NO: 382086 - DNA, 561 bp, Homo sapiens
acaaccatgaatgaaattgctacaaatgatcagatcacaatgtggtttggggagcagtacggatatactagggagtgtttaagaatttgaggacttttttggttgtcacaatgattagatgacactactgtcatctaactggcaggagaccaagaataccaaatatccttcaaaatatgggaaagtttgtcctgcatctcacagactttcaaatttccctctgagcattcatgttggggaaaattggagtctaaagccaaagtatattttacaaaatgataccagttttttttattgagatggggtgtagctatgttgcccatgctggtctcaaagtcttggcctcaggtaattctcccaccttggcctcccaaagtgcaaggattataggcatgagccaccatgyccagcccaaagtactttttcatacacactgaattttatagaaattcagctccctccaatatctcaagtagggaaactctgattttttttatgttgttcactattttggaaaaatcacatcattgatagcaataccatttatggtatttgagtcac

SEQ ID NO: 382087 - DNA, 660 bp, Homo sapiens
aatatataatttcaaaataagttataaattccaacagtaattgcttctttgctttgaggtaagttttgagtgtagaaatagagaaaattttataattcatatttgcatattcctctttagctagacttttttactacagattttttggagttcattttcattcatttccttttatttaaaacaagttgtaatattataatcaaactacattttaaatttttatgtcctaattttctttaaaactggtaatacttgcattatgtttttcatattcatcatttttagtaactgcataaaagttcatagaagagggacttgactagaggtatctggtatttgcctccttcacaaagaagaaccaaaatagtgggcagattatcacacttctaatagatcatctaagacagaacactggaattcaacagagaagtaacagaaaacaccaaaagcaaggaaggagggaaatgaggcagcctatttarttaggatagaatgggaatctggagaggatccccagtgtggggaaagggtaagtaagatatccctagcaatctacatttccacaatagactcctgtagttggagccatggaaaagtgcctcaaccctcgcaggtcctgaaactaacatagtgagatgcctggaggccacacaacagcat

SEQ ID NO: 382088 - DNA, 609 bp, Homo sapiens
ctaacaagccaaaaaagtaaataaaatgaaatattaaaaataattaatccaaatcaagacaaagaggaaaaggggaacaaagaacagaaatagaaaataaataacaagatggtaggcttaaagccacgtgtatcaataattgcattaaatataaataatgtaaacaccccatttaataatcagacattattagattagataaaaaacaacatccatctatatgctacctataagaaattaactttaaatataaagaaacaaatatgttgaaagtaaattcatgaaaaatatatacaatgataaaattaatacaaagaaagtaagaatggatatattaatatcagataaagtagacgtcagtaaaaagaatattactagggataaatagggccatttgatgattaaggggttaatttatcacgagaacataacgattctaattttttaaaaatggcacagcttcaaaatacctgaagtgaaagctgatagaattgccaggaaaaagakaaacatctaaaactctagtgagcaacaataataccctgtttcataattaacagaacaagtgaaaaaatctgtaaggatatagatgactagaataacattaca

SEQ ID NO: 382089 - DNA, 519 bp, Homo sapiens
tgtttccctttttggaaacagtcaatatctttacccatttttctattgggatttcagtattttcttattgatttttaagaattttatataatgggaagtcacccctttgtgatttgagttacaaatatttttcctggattataatttttttcgagtttacttatagtgaataacttcatgcaaaagtttacttggattttatgtgagagttaggaaggctttccccactttaaaattataaagtaggagaagtgyggtggctcatgcctgtaaacccagcatgttgggaggccaaggagggaggatggcttgaggccaggagttcaaaaccaacctggtcaacacagtgagactcatctctatctatttataaaattttaaaaaattataaaataatctaagagatattttcaaggtatacatttatagtgctgaaaatgaggaaagagaagtggccaaagattacctctacattttttagtttgggagtttaagagatgggggagagttgatctaatg

SEQ ID NO: 382090 - DNA, 558 bp, Homo sapiens
atagaacttatgttaatcatttgtcttgaataaacatagaaattgacccttccagtctcraaacttgagaaagttacatttgtcttatctgagttcctttctcaggaagccaatcatcaggcctcccagacagcatcaaggaactaaaacataccagattaccagatcactgtatctggacaatgagatgccagacccccagttgttatgattgcctaactaaccacctgcttcctgttgaccaacccctcttctttacctctccccagttcctgtttttccatacacggttgtgtttctttcctgctatataaacccctaattttaatgggccagggaaatagatctgaaactgatctcctatctccttggctgcagcccagttaaatgagattaaagccttcttgcctggcaatattggttgtctcagtgattggctttctgtgtgacaagcagcaggacctagactgaacccctggagttttggtaacatttttaatattattattttttatcttaatcagttttgacaattatatcgattttattaatattttc

SEQ ID NO: 382091 - DNA, 563 bp, Homo sapiens
tgcaaaagccttccaattgcttattcctgtttctacctcagcccattttactctattgtcataatgatcctatttatccttaagtcagagcatatcactcctttgctccagaccctcccacggctttctatctcagactaaaagccaaaggccttataatgacatggaaggccctgcatgatcagtacctcctattttctctctgaccttctcccctgctgccctctccctcactcacactgcttctgtcatattttacctcaatgtcccttaaacacatcatctcagttgtttacatttcctggcatgctattttcctagagatctgcttgttcttcaggtctttactcaaatatcacctcaatgaagccttacctagtcaatctaaaatttccaaagctagtaattttytaaattttaaaaattttggaaatttactagtaatattccaaaatttttaaaagctaggacaacatacattattatattaacttacattccctgaaaagtttttgaatcttgcaattatgttgtagaaagtgttgtaaataaattataaacaa

SEQ ID NO: 382092 - DNA, 561 bp, Homo sapiens
  misc_feature (1)...(561): n = A,T,C or G
nnnnnnnnnnnnnnnnnnnnnnnnnnnnnnnnnnnnnnnnnaatacaacatagccataaaaaataaaattatgtcttttgcagcaacgtggatggagctggaggtcattaacctaagtgaaataactaagaaacagaaaatcaaataccacatgttcttacttgtaagtgggagctaaacaatgggtaccatggacccacagagggaaagaatagacactggggactccaaaagcggagagggtggaaagagagcgagggttgaaaaattacctgttgggtacaatgttcaccatttgagtgatgggcacactagaaccccaaatctcaccactatgcaatatattcatataacaaacctgcacatgtaccccatgaattaaaataaattttaaaaagaatacctacttcatacaactgctataaagattaaacmaattattatttgtaaaggaatagaatggcatctggctcacagtcagcactctggaagggctgacttccagagttaaatgtgatgttattgttaaataacataaacggtgtgtgattattcttatta

SEQ ID NO: 382093 - DNA, 602 bp, Homo sapiens
agtttttgtttgtttgcttgtttatttgtttttgtttgtttgagatggaatctcaatctgttgcccaggctggagtgccgtagcataatctaggctcactgcaacctccacctcctgggttcaggcgattctcctgcctcagcctcccaagtagctgggactacaggcatgcatcatcacacccagctaatttttgtatttttagtagaggcaggatttccctatgttggccaggctggtctcgtactcctgacctcaagtgatctgcctgcctcagcctcccaaagtgctgggattacagacgtgagccaccgcacccaggctatttctttgtttttaagggagagaaaaccacaaatgaaactgagccatttgataaacatttcttaattatctacaatgccagaaactgttctgggcacttgggatacagacatgaacaagacaaacatttttactgttatcatggagcttataattaataaacaaataaagaatatctcaaaatagcatcatccagagttaaaataagtcaacrtgatagagatggactgtatggctaatttttatggagtcatcaggaaaaacctctcttatagggc

SEQ ID NO: 382094 - DNA, 602 bp, Homo sapiens
agtttttgtttgtttgcttgtttatttgtttttgtttgtttgagatggaatctcaatctgttgcccaggctggagtgccgtagcataatctaggctcactgcaacctccacctcctgggttcaggcgattctcctgcctcagcctcccaagtagctgggactacaggcatgcatcatcacacccagctaatttttgtatttttagtagaggcaggatttccctatgttggccaggctggtctcgtactcctgacctcaagtgatctgcctgcctcagcctcccaaagtgctgggattacagacgtgagccaccgcacccaggctatttctttgtttttaagggagagaaaaccacaaatgaaactgagccatttgataaacatttcttaattatctacaatgccagaaactgttctgggcacttgggatacagacatgaacaagacaaacatttttactgttatcatggagcttataattaataaacaaataaagaatatctcaaaatagcatcatccagagttaaaataagtcaacatgatagagayggactgtatggctaatttttatggagtcatcaggaaaaacctctcttatagggc

SEQ ID NO: 382095 - DNA, 519 bp, Homo sapiens
aaccacaaatgaaactgagccatttgataaacatttcttaattatctacaatgccagaaactgttctgggcacttgggatacagacatgaacaagacaaacatttttactgttatcatggagcttataattaataaacaaataaagaatatctcaaaatagcatcatccagagttaaaataagtcaacatgatagagatggactgtatggctaatttttatggagtcatcaggaaaaacctctcttatagggctatatttaagctgagatttgaatgacaagaaaaaatgagccatatgaagctcatttkaagtatttggggccagaggaacagctggtggaaaggctctagatcaagcttgtccaacccatggcccattggccacatgtagcctaggatgcctttgaatgtgacccaacacaaatttgtaaactttcttaaaacattataagtttttttgcatttttttttctcatcagctatcagctatcattagtgttagtgtattttatgtgtgg

SEQ ID NO: 382096 - DNA, 572 bp, Homo sapiens
ggaggagagaggcagcatagctgggagtgagtgtgactccagaaatagactgtaatactaggtatacatttatcaaaacatcagagtgtacaccttaaccatataccataataataaataaaaagacagagacaaaggggtcccatgcaaggtcaccaggcttagttgggtattcccaatcagcaaaatgccatgattctaattkcctaattctaaaaactgaattgtattggtgctgaaaattagtaaggctcttaagtaacataaaagaaaactcagtggcaactggatcggacagctcaaattgggaaactttaaactagatgtttatttagggcatgccatgcaccaccgacgtcactaggttctgtggttactctaaacgtaactacaccaggtgtacaagcctgcacatttgatctctgctgtctcttccctaatttctcttgtcttctccagcttgaaaaaatatatatacttctggaattattcagtaggcataacaccaaaataagtttatttatgaaagattttaccaataaacatacaagtaaatttttttaagtaacatg

SEQ ID NO: 382097 - DNA, 556 bp, Homo sapiens
gctggtgccttgatcttggacttccctgcctctgaagctgtgagaaaataaatttctgttctttaagaattactcagtctcaggtattttgttagagcttcacaaaatgaactaagacacacatggtccagcaatcacactgctaggtattttctcacatgaacagaaaattttgttcgcataaaaacgtacatgaacatgtatagcagcgttcatcatcaccaaatattgaaaacaactaagatgcctttcaacagttgaacacataaattttgatatatccatatagtggaatgctatttaacaatataaaggaatgagctgttgcacacagcaatatacatgaatcttaaatgcattagctatttgagaaaaaaagccaggcctaaaaggctatgtattttatgattccattttgaatgacattatgtaaaaggmaaagctgtagggacagaaagtgataagtagttgccagagacaggggtagaggatagagattgattacaaaggcaacatgcaaggaaatatttcagggtaatcaaactgttctttatga

SEQ ID NO: 382098 - DNA, 569 bp, Homo sapiens
tgaggttccctaaagcatagtttgaataccaatcaaatagctatccaaggtttgttgttgttttttttttccagcccactatgaccgcttcacactagtgagcaggtgagttgaaatatctgtatacaacccatagatatcaaacatatctacaaaaatatcttttgaataggaaagacacggttgtggacgttgcttcttgtgcggctcagtatccttcaccatcctctggcaacctgaccttagtttctgtgtgagaaccagcaacctcttagtctcagtccatgtgattccagtgaagttggatccacccctaagtctagtgttggtgcacatgacctggatctaaggcaactggcacatcataaagaacccttcccaaaagggctttgtttaaacagtcatacatcatttaacaaataagttcagggaaatgcttctaggcgactttgtaattgtgagaacatcatasagcgtactccacaaatctgagatggtatcgcctactatacatctaggctatatggtatagcctatttctcctaggctactaacctgtatagcatgtg

SEQ ID NO: 382099 - DNA, 596 bp, Homo sapiens
aattaagaaatatcctaaatagtccatggattaaacaatataatacaatggaaatgataatgaaaatataaaatagtaaaatgagtgcaatgaagctaaagccatgcttcgaagtaaatttgtatccttaaatrtacacatcatgagaagaaaagctgagaaaaaaatcaatgaaaatgggccatacagagggtaaggttttaggtagataaaagggaataggagtgtttgagacaagcaaactagcatgggccaagtacaatcagcttgggtctatcaagtacatggagatcctgagacttaagcatagtgggtctgacagttaatgcttaatttcactaagggaatgagtaaactctgaagaattataagtctgtgagtgtaatattcaaagtagtacttcaaaagcatatcaccagggaggagtgttcaggatgaactaccttctccctacagcaacacccatcatgctcttttaccgtaatgacttgtttaatttctctcttccctgttagattctgtggggacagctctgtgtggggacagctctgtgaggccagaaagtgtacctgtcttccccatactgaatccccagt

SEQ ID NO: 382100 - DNA, 518 bp, Homo sapiens
ttctaacaacctcagataggtcttctggtatggcagctgacattaactgcgctgtcttttttggcgtcactttttctaatactatattcctttcttccaaagtgcagtcatcagattgcattgcctcagggaagaagcaacaacagaatgcaaaagccaaatccctaagctacccagtgccctatacccttagagaaaatatttttaagcatgggaagggtgaaataggcaaagcaggtgagttatcatgagggccaggtacagcatggggcaaatacacaaaccccatatatgtttcargaatctgagagcagaagtaaactgtgcctctttcttgagtaaagcccaggataaggatgaaaacccaggataataaggtcccaagataatgacaagcgccagctttccctcaaaaatggctgagtagaaatggctgccaaataagcctagagaggccagaaacagcctcatagagcggtattacgagttctcaagtgtcccagtgtttcttgagtttc

SEQ ID NO: 382101 - DNA, 599 bp, Homo sapiens
tctgattcatagtacttacttctctgattctttaaaaaaacactgatgtcattttaactcttattttcgtttcaggggtacatgtgcaggtttgttatataagtaaactcatgtcatagggatttgttgtacagattatttcatcacccaggtactaagcctagtacccaatatttattttttcttatcctgtccctcctcccacccttcaccctcaagtaggccccratgtattctcatcattaagttcccacttataagtgtgaaggtgtgatatttggtttctattcctatgttagtctgccaaggataatggcctccagctccatctatgttccagcaaagaatatgatctcattcttttttatggatgcattgtattccatagtgtatatgtaccccattttctttatccagtctgccattgatggacatttacgttgattccatgtttttgctaatgtgaatagtgctgcagtgaacatttgtgtgcatgtgtcttcatggtagaatgatttatattcctttgggtacatacccagtaatggaattgctgagtcaaatagtagttctgtgtttaagtctttgggaaattgcca

SEQ ID NO: 382102 - DNA, 548 bp, Homo sapiens
aaaaaaaaaaaaaaagtcatatgattatatcaatagacaaagaaaaaggttttgataaaattcaacatctctttacaataaaaaccttcaacaaactaggcattgaaaaaacttacctcaaaataataagagccacaaacccacagccaaacatcctactgaatgggcaaaagctagaagcattcctcttaagaacaggaaaaagacaaggatggccattctcaccattccttttcaacatgtactggaagtcctatcctgagcaatcaggcaagagaaggaaataaatgcaaccaaatatgaaaagataaaatcaaatwttttttcttctctgatgacatgattacatgtctagaaaaccctatagactttgccaaacagctcctagaactaataagcgacttcagtaaagtttcaggataaaaaattaatgtaaaaaaatcagtagcacttctgtacaccaaagaagaaatcgagaaggcaatcctatttacaatagctgtaaaaaagatgctaagaataaattttaccaaagatgtgaaaaatct

SEQ ID NO: 382103 - DNA, 497 bp, Homo sapiens
gaagcgtatttgataaaactacatttttaaaatgtatgatgaataataattgtctataaatactgcaaatgggttagatgggtatcatgcctttgcttatctcagaaattcataccaatcacctaactgcttcaaacagttttctcaataagtgaggtattagtgtaaaaactaatagatatgatatttaattttatagaatttcttacaacttartatgaatgcgattttcttgagcaaaatatatatgtgtgtgtatatatatatatacatatatatatctgtgaagtgaaacggagagaaaatattaaagctagttgaccataaaagttatcattttatgaagctagttcttagaacttgacagtgagaaaggaatttgtgaatgtgtctgatgaatctgacacagactattctaggtgctaaagactacatatggcatgatgtggagaggggggtaggaggaagagagatagagagacagaaagagagagaga

SEQ ID NO: 382104 - DNA, 561 bp, Homo sapiens
tgagagaaaaatccgtgttttagataaatttcgttcaggcatgtgttagaatatgattgtccctaagtttaatgttggtgaatcaacaatacatacatccagaaaaagaaagaggaaatttgctaatctgtacatgaaactaccccagcaagtgctacagtaacgtgtatggtgtatgagggagctagggaagacgtggaaatgtggctcaatttgtagtttcatgagataagaattgattttttttaagtgtagttgatagtattgttgcaaagctgaaagccaaagaaatttccagtcacattatcyagcatcagggaaatgatagacccttctctgctagtttttattacaacaaaatccatatataattagttatttataagaaatatatattaaataatgcatttttaaacacatatgaaacaaggttatgtgttcatcagttgatgaagatgttttgatcaaaaggtcgcaggatcctaaccttgtatttccccttggaacattgactcagtattcactgattcagtgttgacagcaactttgtaggtcacaact

SEQ ID NO: 382105 - DNA, 588 bp, Homo sapiens
tttggtctttttcattctgattgtaaagcgatattatgttcaacatggaaacttgtgaacattgacaaacatgaaggagagaaatctccagtaatgatccatatacatatatatatatatatatatatatatatatatatatatatttcttttttttttttttttgagacagagtttcactcttgtcccccaggctggagtgcagtggcacgatttcagctcactgcaacttccacctcctggtttcaagcgattcttctgcctcagcctcccaagtagatgggattacaggtatgccccactatgcccagctaattattgtatttttagtagagacgggtttttaccatgttggccaggctggtcttgatctcctgacctcaagtgatccacccacctcggcctcccaaagtgctgggattgcaggcgtgagccactgcrcccagctatgatccatatatattaacaattaagtagctaaacttatttagtacttaatacataaaaaatcctgttcttggctttcttgtattcattacaataccctaataaagtagtaatattatagcccctttttatatgtgagag

SEQ ID NO: 382106 - DNA, 615 bp, Homo sapiens
gaaactagataaggaccttgaactttacccagcaaatcctagagaacctttaggatgctttgaggtagtgaagtggcctagcataattgaattttagataaatcaccttggtggctatgtggtagcagattttagagggacaaaaccagttagaaggctgctttggtaatcgaggcaagagccagtaagagacaatcagtgagttcagacagtggtagtggagatggtgagagagagaaagagattagtctggagtatataractgaaggttttaagactaacacactgaattggagtgcttgggcgtaatttgtgaaatgctagatgattgactgtttaggttatgtcttctcagttcaaaccatcttttatgccttaagtgatctaacggtctacattctacaaagaaggcaaactaaggaaaacactgtttgttggccccaatgttgatgccagtctaaaaatgatgtatttattgtgctacttcgtgattccctagtttccaactctttgctatcaataattatctaaggtaggcccgtgactgtggcccccaacatcctgtctagaaatttgaagaagggccaatgactttttgtaaattggttgtttga

SEQ ID NO: 382107 - DNA, 615 bp, Homo sapiens
gaaactagataaggaccttgaactttacccagcaaatcctagagaacctttaggatgctttgaggtagtgaagtggcctagcataattgaattttagataaatcaccttggtggctatgtggtagcagattttagagggacaaaaccagttagaaggctgctttggtaatcgaggcaagagccagtaagagacaatcagtgagttcagacagtggtagtggagatggtgagagagagaaagagattagtctggagtatataaactgaaggttttaagactaacacactgaattggagtgcttgggcgtaatttgtgaaatgctagatgattgactgtttaggttatgwcttctcagttcaaaccatcttttatgccttaagtgatctaacggtctacattctacaaagaaggcaaactaaggaaaacactgtttgttggccccaatgttgatgccagtctaaaaatgatgtatttattgtgctacttcgtgattccctagtttccaactctttgctatcaataattatctaaggtaggcccgtgactgtggcccccaacatcctgtctagaaatttgaagaagggccaatgactttttgtaaattggttgtttga

SEQ ID NO: 382108 - DNA, 615 bp, Homo sapiens
gaaactagataaggaccttgaactttacccagcaaatcctagagaacctttaggatgctttgaggtagtgaagtggcctagcataattgaattttagataaatcaccttggtggctatgtggtagcagattttagagggacaaaaccagttagaaggctgctttggtaatcgaggcaagagccagtaagagacaatcagtgagttcagacagtggtagtggagatggtgagagagagaaagagattagtctggagtatataaactgaaggttttaagactaacacactgaattggagtgcttgggcgtaatttgtgaaatgctagatgattgactgtttaggttatgtcttctcagttcaaaccatcttttatgccttaagtgatctaacggtctacattctacaaagaaggcaaactaaggaaaacactgtttgttggccccaatgttgatgccagtctaaaaatgatgtatttattgtgctrcttcgtgattccctagtttccaactctttgctatcaataattatctaaggtaggcccgtgactgtggcccccaacatcctgtctagaaatttgaagaagggccaatgactttttgtaaattggttgtttga

SEQ ID NO: 382109 - DNA, 615 bp, Homo sapiens
gaaactagataaggaccttgaactttacccagcaaatcctagagaacctttaggatgctttgaggtagtgaagtggcctagcataattgaattttagataaatcaccttggtggctatgtggtagcagattttagagggacaaaaccagttagaaggctgctttggtaatcgaggcaagagccagtaagagacaatcagtgagttcagacagtggtagtggagatggtgagagagagaaagagattagtctggagtatataaactgaaggttttaagactaacacactgaattggagtgcttgggcgtaatttgtgaaatgctagatgattgactgtttaggttatgtcttctcagttcaaaccatcttttatgccttaagtgatctaacggtctacattctacaaagaaggcaaactaaggaaaacactgtttgttggccccaatgttgatgccagtctaaaaatgatgtatttattgtgctacttcgtgattccctwgtttccaactctttgctatcaataattatctaaggtaggcccgtgactgtggcccccaacatcctgtctagaaatttgaagaagggccaatgactttttgtaaattggttgtttga

SEQ ID NO: 382110 - DNA, 593 bp, Homo sapiens
tccttttcctttttgcaatagaatgataatgagaataaattttgtactgtgtgaaaataaatttatttttataacagttaaattaaagagataatctgataaatctgaatgttattttaacagtttgtgctcctgtcatactttgaactgtaaattttattcagctgccctctatcaggcaagcttyatgaattcctgcaatttgctgaaggcattgtaacaaaacaatagagtgaggtggaataaacctttaaaaattcctgtgaagattatacttactttttattatttgttattttctgtcagaattttggacaaagaagttaagacctatgctttggatgaaacaaatgattatttcctttaaagctatttcctttttactttttgtaatgaaaggcttattggtatataattcacctagcatgaaattgaccatattaaagtgtacaattcagtggtttttagaatattgatggaattgtgcaaccatcatcactatccaatcttataatagtttcatcacccccaaaaggaaccccacacccaagagcagtcactcccattcctccctactcccagttttctggtaa

SEQ ID NO: 382111 - DNA, 599 bp, Homo sapiens
gatgctaatttttttttgtttaatttgtttgttttagagacagggtcttactctgtggccctggctgaagtgcagtgatgcaatcacagctcactgtaacctcaaaattctaagctcaagccatcctcccacagcctccagagtaactaggactacaagtgtgccaccagaatggactaactttttaattttttgttgagacagactcttgctattttacccaagctagactccaacttctggcctcaaaaaatcctcctgcctttggctccccacagagggctgaaaatacaggcatgagctaccatgcccagtcctaattttactaaatctatcaaggtctgctttattgaaatttttttctcagaaaaatcaaataacatgtttaaaataattaataccacaccttaaattacttacaaactctctcaagtgggaataacataacagatgatgggmttgtaacatttggaaataattattgcaaagaagtatagtttgtttctctgagcttcactatttctgacatacatcattagtgtgcagtggtaaaatgttctatttgtagaatctctcaacaactttaattaattaaagga

SEQ ID NO: 382112 - DNA, 565 bp, Homo sapiens
ttttggtgaactttattttcttggtttttccaattcctaatatttctaatagcttaaagttagttttttaaaatcatcctccgaatttaaaattcagaaatgtatsctatatgattatattagacaagacgtaatttcaggaactatgacctacattttagtttgtgttcacatgaaattctttaggattgtatggaataagacatctctacctacttcatattttaatacatatttaaatgtttttctgacacatttagtaataattaatttattaaatgtttcccaactaggataaaatttattaactatgtctaattcaaaatgttttaaaaataacagcagaaaaaaagagaaaaagaaagatataattaaagtaagactagaaatcattgatgtaggaaaaaaaagtactcagtggtgcattttaacaaatcagtaattttgttctttccaaagattaatgaatggtcaaatgcttccaagatttattgcagaaattatgggaatgcatatttattaaaaggttagaaattaagtcgtgaatgtaaataaaagttaagtt

SEQ ID NO: 382113 - DNA, 644 bp, Homo sapiens
tttttggtgaactttattttcttggtttttccaattcctaatatttctaatagcttaaagttagttttttaaaatcatcctccgaatttaaaattcagaaatgtatgctatatgattatattagacaagacgtaatttcaggaactatgacctacattttagtttgtgttcacatgaaattctttaggattgtatggaataagacatctctacctacttcatattttaatacatatttaaatrtttttctgacacatttagtaataattaatttattaaatgtttcccaactaggataaaatttattaactatgtctaattcaaaatgttttaaaaataacagcagaaaaaaagagaaaaagaaagatataattaaagtaagactagaaatcattgatgtaggaaaaaaaagtactcagtggtgcattttaacaaatcagtaattttgttctttccaaagattaatgaatggtcaaatgcttccaagatttattgcagaaattatgggaatgcatatttattaaaaggttagaaattaagtcgtgaatgtaaataaaagttaagttgaaaattgtaataagttctgtttatgtagtaattgaaataaaatgagtagatgtatataacacataagttaagctaaa

SEQ ID NO: 382114 - DNA, 572 bp, Homo sapiens
tgtagcttgatggcctcgattctagcggaaacaaatttgacaagaaggttaaaaatagagggtccaaaggcgagtaacagcaagatggctgccacgggacctagaaaggggagaagccatgttgcccaactccagaggttggtataagagtttgaaaggaggtcaggagattgagaccattctggctaacrtggtgaaaccccatctctactaaaaataccaaaaaattagccaggctaattttggtggtgggcgcctgtagtcccagctactcgggtggctgaggcaggagaatggtgtgaacccaggagtcagagcttgcagtgagtcgagatcacgccactgcactccagcgtgggcgacagagtgagactccatctcaaaaaaaaaaaaaaaaaaaaagagtttgaaaggcattgtctgacttcggaagccttttcctataaatgctgggtggcatctcatactatccgtgactggttagtgtaaaaacaacactcttcccctaagaaggtacaaagtcctcctttctcagcaggggggaggtctagacctcagcggttatggagagt

SEQ ID NO: 382115 - DNA, 572 bp, Homo sapiens
tgtagcttgatggcctcgattctagcggaaacaaatttgacaagaaggttaaaaatagagggtccaaaggcgagtaacagcaagatggctgccacgggacctagaaaggggagaagccatgttgcccaactccagaggttggtataagagtttgaaaggaggtcaggagattgagaccattctggctaacgtggtgaaaccccatctctactaaaaataccaaaaaattagccaggctaattttggtggtgggcgcctgtagtcccagctactcgggtggctgaggcaggagaatggtgtgaacccaggagtcagagcttgcagtgagtcgagatcacgccactgcactccagcgtgggcgacagagtgagactccatctcaaaaaaaaaaaaaaaaaaaaagagtttgaaaggcrttgtctgacttcggaagccttttcctataaatgctgggtggcatctcatactatccgtgactggttagtgtaaaaacaacactcttcccctaagaaggtacaaagtcctcctttctcagcaggggggaggtctagacctcagcggttatggagagt

SEQ ID NO: 382116 - DNA, 572 bp, Homo sapiens
tgtagcttgatggcctcgattctagcggaaacaaatttgacaagaaggttaaaaatagagggtccaaaggcgagtaacagcaagatggctgccacgggacctagaaaggggagaagccatgttgcccaactccagaggttggtataagagtttgaaaggaggtcaggagattgagaccattctggctaacgtggtgaaaccccatctctactaaaaataccaaaaaattagccaggctaattttggtggtgggcgcctgtagtcccagctactcgggtggctgaggcaggagaatggtgtgaacccaggagtcagagcttgcagtgagtcgagatcacgccactgcactccagcgtgggcgacagagtgagactccatctcaaaaaaaaaaaaaaaaaaaaagagtttgaaaggcattgtctgacttcggaagccttttcctataaatgctgggtggcatctcrtactatccgtgactggttagtgtaaaaacaacactcttcccctaagaaggtacaaagtcctcctttctcagcaggggggaggtctagacctcagcggttatggagagt

SEQ ID NO: 382117 - DNA, 646 bp, Homo sapiens
ctctttacctcaaagcaaagtgcatcagaaaactatagaatgggatctttttgtcccagctcaatatttacactgattctgaaattttagcaaagagwtatataacccatacatcttattcatagttgttccctttgagaatcagaaacaattcaagtaataaatgaggtagaacacaggtatatttggccgtacatgccatgaagagaactcattgaacacatttaagaagttctaaatctttcatgaactaacgtatcaaataaactttttaaataaaataattaattcagagtttggcaaggaaatagaagtctttttcttacggttagccaaaaattgtcttaaataactagatttcattacactacaataaaactgaatgaaaatcacaagtatgtacaatatacatcatcacttagtatgtcaaaaagcatattaactgaaggagcatatatttgcatagacacatatacacatatattactttttttaagttgcatgtattcaaaggaagaagaatttacattcgatttccaaagcaatggatctttgactggaagtattaactctaccatagaatattctatcagtctattgtaagccactgaatcttcttttgttagttcatttcttcagaaacggt

SEQ ID NO: 382118 - DNA, 646 bp, Homo sapiens
ctctttacctcaaagcaaagtgcatcagaaaactatagaatgggatctttttgtcccagctcaatatttacactgattctgaaattttagcaaagagttatataacccatacatcttattcatagttgttccctttgagaatcagaaacaattcaagtaataaatgaggtagaacacaggtatatttggccgtacatgccatgaagagaactcattgaacacatttaagaagttctaaatctttcatgaactaacgtatcaaataaactttttaaataaaataattaattcagagtttggcaaggaaatagaagtctttttcttacggttagccaaaaattgtcttaaataactagatttcattacactacaataaaactgaatgaaaatcacaagtatgtacaatatacatcatcacttagtatgtcaaaaagcatattaactgaaggagcatatatttgcatagacacatatacacatatattactttttttaagttgcatgtattcaaaggaagaagaatttacattcgatttccaaagcaatggatctttgactggaagtattaactctaccatagaatattctatcagtctattktaagccactgaatcttcttttgttagttcatttcttcagaaacggt

SEQ ID NO: 382119 - DNA, 622 bp, Homo sapiens
gctgtattccacttttatgactttaagatttacaccaacagtttctctcatccagaagtgtatttttaccaatagaaatcttcagaaactgaacagtgaaatgcatcaacaaattatgttcattattttgaagttagtagcaaatgttagaaatcacttactatacactgtactctgttccttagtattattaagccttttkaatttaaaagatattgaatattttcagttctaaaatattttattaagagcagaaacctttaaaatcttgttattgctactcaaaaagaaaatatttgtaacatctgctataactagctttaaaataggtgattattagctaaaatgcctggtaaattattttcaaaacatgtatttcagttgaagactaaattagtgtttaaagcagccaactggtgatttatatcccaagtaagatattccaattaaccagcagttattgttgatgctactagtaacaacaataatcaacagttagacaaagtttggtaatagattttttagggaccccattatcaatatatagctcataggacttaaagtaattacaaataattattatattgactaatcaaatatctaattttttgtaatgcatgct

SEQ ID NO: 382120 - DNA, 622 bp, Homo sapiens
ccctttttcacacaattcttaatcatcaggtgttaacatattaaactaaggaggtatgttgtttcctttacacttttcaattacagggagagatagaggaagcaaattagggagcaagctgaagaagctgaatgcaaacttctgtgcaggacttgaaagcaattgcttctggccttcaaacctggacttgcaatatttcacacattagacttcctatcttctgggtgaaagtctgatataatgaaaacataattgaaagtagccatttctattctctttcaacttctacatactaataatacyttacattttctaacaagagcagtacaatcacaaacagttgtggtgtaggttattcagtcaagtgcaacatcgactgcacagaagtagtcttcctctcccattatttccctcttttctcatcctacatagacggtaccccatgatttccctatgtgtgttgattcaagtttagaagtcaatcatcagttctgtggtcactactaaattgccttcatacaactcagcaataaaaccgttcatttaggaggaataagttatctgtaccctagaaattagaagagtttacagcatctcttttaacattttttatgtaaataca

SEQ ID NO: 382121 - DNA, 578 bp, Homo sapiens
tgtctggcactcacacttttgcccattttgttttacctctgtgctcagtgctatccacctttaaaggtgcctcattcataagcttgcatactctgtttttgttataaaaattatgtataaaaatacaggacaaactacattttaaggtaaatggggattttatagagctattctgtgatatttgggatttcttgggaaatcaggatacccatgtagtatgtttcacttagttaacaatcaagagtttaaatgatcaagatgagcaagattcaggaaagaggagtatgctgagattcaggaaccatatcaaactacaagcaaggtaaacaagaaatcagttcttaaactctagactcagtaatgaaatgacagaatgttaaagacaaagattttaaaaccagctgaaggggaaaaatatattgcctacaaagaaataattttttgatggcaaaaaatgtaagrcagaagacagtgaattatctttaagaatatgctaagttaagtgcttatcaagtgctgaagcttagaaagtactccttaaatacctttttattatggaagtaaggtagaagaaatcc

SEQ ID NO: 382122 - DNA, 595 bp, Homo sapiens
tcctgggcagcttttgtaaagacttggaaataaacaaaaagggcatccatccttacaggagaatgagtagttcagagtacagacagaagaaagacttgcatttatcaggtgacttctgcagagcagtttcagtagggagttggggacagccgtttagttacttggtagtgaaagaaargagagccatgttatgatgaattacaacttaatagtgagatcaaataaatatgtatttaaaaagaggagctagtaatgcctttataaagggaagatgaaaaggtcctatggggataaagatggaaggtttttaaagtatgtgtaattttaagcattattattttttcaaaatgtgcttatatacaatcctgacctgggatatgtaagtggaatcataattatgagataagggaaatgctataatatttagtcactgtattgttttgtggagccaaaaagcactctcaggatttaaggatatctttaagatacctctccaaagtccatgctgtccctccaaaatcagagacctcccagacagagatgactctatatcttcccttcttccacatcttcacatgccccacgctccaactca

SEQ ID NO: 382123 - DNA, 633 bp, Homo sapiens
acaggcctttggagactaaagcggaggtttaaagattgaaggcagtgaggtacaaagagtaaacaagtggaaccttgagaaagcagcctttttgagttccaaaatctggccattctctggaatttactagatttttttttttttaaaaaaaagcatcattatactgcattatttctgtacaaatccagtttagttttacataagcccataaaagtgctttgccacacggatcaaatcttctcgtccaaaagccattttctattagcagcccaaaagcatttgtgggctcttcattgtcaagattaggctggatatggttgctktgatattttcaaagctggaaagggatctctaacctcagagtggctcttagctccagatggagagcctgctcatgggagtgtcaactacaggcaattttgtgaaaatacagctggaaagggagcttaaaactgtatacacttaccttatacacacagcaatgtttcttcaaaccacccatcttttcacgctgacacagctccttctcccacaaccctaggacatccctcaagccagaaccaaagttaagtccaaatgcaatgaacagctgttctcctcagcacacctaatgtgagtatcaacttcatacct

SEQ ID NO: 382124 - DNA, 489 bp, Homo sapiens
atacatgggaaaccaaaatgtgcctctccatttcaactgcatcccccatctatccccctcccrctgcccccactccccaacaagcaatgatccaatagcatgagcgattccttatgactccctagattttaaacctgccctgagcccctcgctagggaaggtgcatcaagcccatgagagtggagcctgcgaagtagggaggaggctgaggagaacctgggccacagccacttgtgtctgctgctgctgctgctggaggagctgctggaggagctgcatctggtggtgagtggacagcggtgtctctgtgcccaggcctggaggcttcgaggaagaagaagggagcagcatcctgggtgaggctgtcagcatgggctcctgggggtgcgaaacctggaggagaaggagaagacaggacatgacatgtggcaggagccatcttgaggggcctccctctctttggcatgcactcaggaggagcaaattggc

SEQ ID NO: 382125 - DNA, 547 bp, Homo sapiens
atggctcacggctgtaatcccgacagtttgggaggcagaggtgggaggatcacttgagaacaggagttggagaccagcctggccaacttagtgaaaccccacctctactaaaaattaaaaaaagttagccaggtgtggtggtgggcacctgtaatcccagcaacttggcaggctgaggcaggagaattgcttgaacytgggaggtggaggttgcagtgagctgagatcacgccactgcactccagcgtgggcgacagagcaagattccgccgcaaaaaaaaaagaaaaaaaatgttttaaatttttaattattatgggcacgtaatagttgtatatatttatggggtacatatgatgatttgcaacaagcatataatatgaaatgatcaaatcacagtcattggggtatccatcacctcaagcatttatcatttctttgtgttaggaacattcaaatttcactatttttgttattttttaacttacaatagattattgttaactatagtcaccctattgtgctctgaatgctagatcttatttatcg

SEQ ID NO: 382126 - DNA, 537 bp, Homo sapiens
attgtctctatattcaaaaacactgtttttactcctgatcctgaaataatggaaatcacaaccaagatatataaactcagattgttttacaccatcacttgtcactattttacatggtgtcacaaactaactgcattcattattaatttgcattaagagctgcattagtctttcaaatgccaacagcttttcctytgaacatttttttttctgcttatgaattactgttctggtttttacagtctgggcaggtttccattaaatcctttttgtttcatgggttcttgtgtgatgtaatactaagtcatttgctaaattactatgttctattataatatggtattgtatattttaatatatctttttatagatttttatattgtatttattcctttgaagaggaatagacagagagagatgtattgttttattttttttttttttcattgtgctggagctgtgttataatatagacagtactggtaggagttaggcaaaaaaaaaaaaaaaaattggtgtgccatagaaaaggataga

SEQ ID NO: 382127 - DNA, 537 bp, Homo sapiens
attgtctctatattcaaaaacactgtttttactcctgatcctgaaataatggaaatcacaaccaagatatataaactcagattgttttacaccatcacttgtcactattttacatggtgtcacaaactaactgcattcattattaatttgcattaagagctgcattagtctttcaaatgccaacagcttttcctttgaacattttyttttctgcttatgaattactgttctggtttttacagtctgggcaggtttccattaaatcctttttgtttcatgggttcttgtgtgatgtaatactaagtcatttgctaaattactatgttctattataatatggtattgtatattttaatatatctttttatagatttttatattgtatttattcctttgaagaggaatagacagagagagatgtattgttttattttttttttttttcattgtgctggagctgtgttataatatagacagtactggtaggagttaggcaaaaaaaaaaaaaaaaattggtgtgccatagaaaaggataga

SEQ ID NO: 382128 - DNA, 382 bp, Homo sapiens
tggtgataaaattaaatggcaatcaggttcacaaggtgaaataggagtcaactggaaaagacagtcaaaagtttctaaagctgtatgtgcaatatggtagccattagacacacgtagttatttatatttaaatttaaatcaagtaaaatttaaaatacatttcttcaattgcattactgtatttcaaagtctcatggccacatgtggcttatgaccaccatattggatagtgaatatgtggaacatatctatcatctcagaaagttctatggcaccgtgctcttaaagcattataaaaataatagaaagakaaataatataaatataagaaatatttactaaaataaaggctatctcatcctcgatgctaattttctttcag

SEQ ID NO: 382129 - DNA, 588 bp, Homo sapiens
acattgccatgatcttgtctttctttcatccacttactcctttcatcatctttgttaaatttctttcctgcccaactttaatattaaagccaaacacatgaataataaattgttagtaacaatgtagaagtccctattttcttttatcaactaattttgcatttacttaacttattttgcatatgtttattgaattctaagtttaatagttcaaggatttgttgagattatagagagaatcaatatgcggtacctgtccttgataaggtcaaacgacatattcaaatacaatcttgttaaaattattactatagaacatcctgtgttttattataattatatgtgcyaaatatgtttgagttattatagatgaaattatttttttcttcccaccataatcaaggaaagcttcatagaatagagaccaattggtcttagctttgaggaataagtaaaaatttatcagattaagaaatttccaaaggaataagaggaaaacagaactaaaaatgagataacaaaagtcatagaaagtcataaactcatgggctcttgagagaccagagattaaagcacattaaatgccct

SEQ ID NO: 382130 - DNA, 567 bp, Homo sapiens
catcagtcttggacaaattaaactttatctctcaaataggtgttgcctgagcctttgttccataagtaagcccagtctcaaacaggtctgagaggtgtgaattatatgcctycctcttccttattcttactccgttgttatctttctttcagctcctatctgtgtcttcatggggagttccctgaattattcgagtaatgctagctgcaataaaataaaacccaaaatttgagagtttaacataatagaaatgtatttctcactcttgtaaagtacaaaatagctatttatgattgaatagttctctccaccaagcagggacacttgttctttccattttcaatatgttgctctgcctcttcaatatgtggctgtcaatgccactgtgggaaagaagaatacttgtggaatgactcagagtttctttatcgaactggtctccgtgtagcacacataagttttatctgcactctactgaccagaattctgtcatctgcccatacttaactttgaggaagacgaaaaaagagggcctaaatgtacatttatgagggagagaatataggt

SEQ ID NO: 382131 - DNA, 417 bp, Homo sapiens
aatggagaaagagaaatgtgataagaaagtggtaaatacgatctttgactaaattgacacatgctgtacttattgagctgcatactgtttatgtctattgcaacatttgagcaacatcmgagtgaagtataatataaggacaaacctagtaaacacagagcattccaggaagaagaaacagtagggatcagagatagcaggaatcatgcttgttcaatttaagaacaactttgaagcctgtgtggctggcatgtactaaactagaaaacaaagtcaaaccaaaaggccagatcacatagggtctgtgggtcaaaacaaagccttttagattaatgcatagtgtaatgaaaacccacttcagtattttcaacagaggagcttcttgagctgacattcgtttttaatgatcactttgca

SEQ ID NO: 382132 - DNA, 572 bp, Homo sapiens
aagctttctttttatacaccaactgagaaatagttttcactagtgagttcaatcagtggactaaaggagaacagaacaagtaaggaagagtgaatgcttgaatcaggtggaaataaaccatttcaaaactaaagctatgtcaaaatattaaacgatgccaggctcagtggctcacacctgtaatctcagcattttggaagactcagagaggcggatagcttgatcccaggagttcaacaccagcctatggcagaatcacctgagtcctgaaagttgaggctgcagtaagccataatggtaccactgcactccagygctggtgatgggagtgagaccctatctcaataaatataaataaataaataaataaataaataaataaataaataaataaaaatattaaatgcttcttgatcctttcatttcaacattacactcatttggcgagaagaaaaaagtattaggctcctactccagttatttgtgaaagatgagtcaaaaatacaagagtagaatatcattttacctgaacatgcgactgaacacctatctatctatcatctgtctatcat

SEQ ID NO: 382133 - DNA, 496 bp, Homo sapiens
agactcagtgacttagaagaagagtgattaaaaggctgtgatccgctgtgcacatgaaccatttagtttagtagatttgtaagacagccatcatacagtgataactaagattattaattggaaagagagcatttgtggctcagggaagaaacataattactccagggtgtatgtatgcacttgtgtgtgagtgaagaagagggccctcaaaaattgggtcaaacrtgttgttttcatagatgaattatcaagtatttattttttgagtgaactagtcatcagttttatagggaatgtatctgaatacccagttgctcacaattatgattttcccccaatttatacttcaacagctactcctatgcaaaattgtcagtaagttttcaaatgcaggaaaaaacccacagacataggcttatataaccaataaaacacaaatagtgcatcaaagatcagcaatccttaccgtgtacatgtaggttaagaccacaaaaaa

SEQ ID NO: 382134 - DNA, 581 bp, Homo sapiens
atgtatgccatagccactgtattatcgcatgccttctcttygctttctatctcttctccagcgcaccttggcagccactcaaaagcctggagaaagtgtcaaagcctattcagtttttcagtttagttgaccttgtgaccaggggtgctgcccctgcttcacctggtgaaataatcagaatcctgctggtgcttcctcaggagacagtgaggctcaccacttgcagcagggctctggattccaatgtccaaattcttgctgtagcaattactatgttccttggtcacatggattaactaccattgcctcatctggaaaatatgggtactaatgtggctctcttaaatatttgtgaggcttacataagataatctaagtaaaataccattaatggctaatttcaataaatttatcacagtatcctagagcccaagctagaaaattacagtacatgagattctttataacaaagtcaatgttgagaaggagtaaaatttgaaaggtggtagtgagagcacttaattgtgaccatgagagcaagaacagctaccctcccgcagcttcatcttaggatataatgt

SEQ ID NO: 382135 - DNA, 577 bp, Homo sapiens
tatcttgttgttacctgggttagacaaaattgcttgcagttaaagttgttcagccatctctcctatatgcaaaatgaaagaaaattgtttctattttcttaatatctatatatattgcacaaattatatttgtgcaaatccatttagccagcctccaaaatwtcaaatgaaattagtttcaaatagttttcaaattaccaaatgaaattttttgcagtgtaactatatggtacatactgaagactcaatattctttatgatgttcctgaatgcatctgggaggtttttttttgctgtatttaatcaatttcatgtttgtaatgtattacattaactcagtctagttttcttgtctttattaaacagccttcttttaatgtttgaaatcacatttatagccaaagacaaaaatctttgataattctgctttaagtagcttccaaaattagaggctagtttatgtaactatgttaatattctcattccatagatggatactaaaagaatatgaagggtttgttggtttattacacagggacactgcattgacggtatcacatgtgtttctttagtatgg

SEQ ID NO: 382136 - DNA, 537 bp, Homo sapiens
tgaagggtttgttggtttattacacagggacactgcattgacggtatcacatgtgtttctttagtatggtagctgccagcagaaactccggttttagtgaagctttgcacaggctcttacctcttgccgggactgactctsttataaatagcttggccatgactcatcattagactcatatcaggaatcagcctgagctcctctggcttactcagagatttgccctgcgttatggctcatatttttatattcatatagagtggataaaattcatttaatggacttttctctgctattctatattaccaaatggggtgcaatcattttgtgatttctgggtggctgaatttttgagatatactcttgctgtgtgagcaagtcatcaaccgtaaacagtgttatcctacatccttaccaccagatgagaatacctcagaggttgaacagcacacactctctctcctctattacacacacactctcctctctctctttcctctgtgtgtgtgtgcacacacacatgtttaggacaggaaa

SEQ ID NO: 382137 - DNA, 537 bp, Homo sapiens
tgaagggtttgttggtttattacacagggacactgcattgacggtatcacatgtgtttctttagtatggtagctgccagcagaaactccggttttagtgaagctttgcacaggctcttacctcttgccgggactgactctgttataaatagcttggccatgactcatcattagactcatatcaggaatcagcctgagctcctctggcttactcagagatttgccctgckttatggctcatatttttatattcatatagagtggataaaattcatttaatggacttttctctgctattctatattaccaaatggggtgcaatcattttgtgatttctgggtggctgaatttttgagatatactcttgctgtgtgagcaagtcatcaaccgtaaacagtgttatcctacatccttaccaccagatgagaatacctcagaggttgaacagcacacactctctctcctctattacacacacactctcctctctctctttcctctgtgtgtgtgtgcacacacacatgtttaggacaggaaa

SEQ ID NO: 382138 - DNA, 443 bp, Homo sapiens
acacaatttaacatcgtgcttaagagtatggttttaagagttagaatacttgaagacaaaactagggtcttacatgtattcaccaagtgaccttggaaaattttctaaaattctttgtgacttcgttttttcatatgtacaatgaggacaataatgctatattgatacaataacccatatcatgactaataaagataagtaacctatatcttaggttacttacagggatttcatgattaatgcatgtaaactacatagaacaatgcctggaaaatatgagtatttaataaatgtgatttcaaccaaacctgatatttgcctatcattattcctcacactctagctctttcaaaattctcyggcgctgtccattcctcccagcaacacatcttgagaaattagactagtcttctaaactttttatattcattgtcctgaaacct

SEQ ID NO: 382139 - DNA, 523 bp, Homo sapiens
tgtcagaacctttgcagcagcccctctcatcacaggcccggaggtttaagaggaaaaaatggttttgtggtcygggctcagggttcctgtgctgtgtgcagcctagggacttggtgccctgcatctcagctgctccaccagctattgaaagaggaaaacatagagttctggccatggcttcagagggttcaagccccaagccttgggagcttccatgtggcattgagtctgggagtgcacagaggtcaagaattaaggtttgggaacctctacctagatttcagaagatgtaatatggaaatgcctggatgcccacgcagaagtttgctgcagggattgggctctcatggagaacctctgctagggcagcacagaagggaagtgtggggtcagaccacccacagagggtccctactggggcaccatctagcggagctttgagaagagggtcaacctcctccagaccccagaatggtagctctaccaacaacttgcaccatgtgcctagaaaagccacaaacac

SEQ ID NO: 382140 - DNA, 487 bp, Homo sapiens
ggatttgtgcatacagttgttacttgtgcatagagttattttatacatctagaatatgtggtgacactgagttcctccctttctgctgttgatattaaagaattgatgaaacaacatctatatacattgagattcataaatataacaartctatctatggaatattctcacaatttatcatatttctactaattttgataatggtgagatttgtcaaaaaggattcgtttatttttctatgttttatgatttatatttttaaaatttttaagtcctttttctccctacatgaggtaatataatcaccttacagttttccctttcacatttatgtttttaattcatctgaagttcaagtcattatgtataattaggtagatatttaattttatttctctccgtataatgatatagtttttgtaacaccacctactaaataatgcatgctgtaatcccttttaagtgctgacatacacatgggtgaatg

SEQ ID NO: 382141 - DNA, 550 bp, Homo sapiens
agttccaaagatttgaaattactcactctagcagtcagtccatggtcaaacatataaatatctaatccatatatatggataaacaaagaacaaatgaataacaataaatataaataaaaggacatgaatatgaatgaataaacacgagtaaatgaagaattaatgaatgaaataactatcatgtagaaattatgtgtcaaatgctcagtaagacaaaatgaattattgatgtggtcttgtaaaatggtagcaaatgaatgcattttataagaagcacataaaataaaaagaaactaaatggtcatgagaacagagcatgctatgtaaagaggagggattgtacatagacttaactttccttctaaaaggaaggaaggataaaccattaccattttatattataaatcaaaatttaaacataatgtgtwtaatattgaaactggtaaaagcttgtattagaacattatgtcattaactttatgttttattacaactagggcattgttgatttgaatttgaagataaatactaaagattattttttaaaacc

SEQ ID NO: 382142 - DNA, 547 bp, Homo sapiens
ttttattttctttctatgccttgttgaagtgattaggccttccagtaaaatgaagacaagaaatggttctcacagaaatctttatctcatacycaatctcagggcgatggctctgaaagttaatcattagttgtgatattttctataaatttttgtggatactattatcaaataaaaaaattcccgtttattatttatttgcttagagtttttatcttttattgatgttgaattatgtcaagtgctcctctgtatatctgaaataaacatacaattgctgccatttattactttaatgtggcaaagaacatgacaattgttccaatattgaatgtatctttatatttttggaactaagcaaaattcagcataatatgctgcccattgtttatattggtggttttgattttctagtattacgtttagcatttagtacctgtgctcgtaaatgagattaaactgcaattttttaaaggtaatgttattaattgattttgatatactggtctcataggtaagttgaatgcttcaatgaccattctttgaa

SEQ ID NO: 382143 - DNA, 502 bp, Homo sapiens
gtcagacatagactttttggtatgatgaaaatagtccatttttacaattgtcttatatcttgattgaattttgacaaataaaaagctgcaaacaatgattggatatttgttaatattaatgaatgaattacttccaattttggggtaagggtgtggtataaaattgtggttatgtttataaaggtatgtactatcttttagttaggtataaaattgtggttatgtttataaaggtatgtactatcttttatttagatatgctgagataattacagatgaaatgttttkggggttttttttctacataatctgttgtaataactggtgggagaaagtgggtgtataaacacattgctgcaattaagtgatggagacatgagtgttcattgcactacaattacattttattgaaaatttcctcactcaaatttatggaataggtatctgttagaaactattgatcattctctctaaatttgaaaaaagaagctgtatttgactc

SEQ ID NO: 382144 - DNA, 496 bp, Homo sapiens
ggtgtggtataaaattgtggttatgtttataaaggtatgtactatcttttagttaggtataaaattgtggttatgtttataaaggtatgtactatcttttatttagatatgctgagataattacagatgaaatgtttttggggttttttttctacataatctgttstaataactggtgggagaaagtgggtgtataaacacattgctgcaattaagtgatggagacatgagtgttcattgcactacaattacattttattgaaaatttcctcactcaaatttatggaataggtatctgttagaaactattgatcattctctctaaatttgaaaaaagaagctgtatttgactcttatgtcccaataaaacttaaaaaatgctgcccgagaattgtttggtgtgaaaaaaaggaaactacaaagtcttttattagtacattattttatgaagacgttaagaggtttccattagaagaatttgtatgattcttcactg

SEQ ID NO: 382145 - DNA, 607 bp, Homo sapiens
agtagataatatgtaatgagtgcttacaatatatcagacatagttctaagtatctaataaatactaactgaaataccctcacaactccctcctgaggagggtgctattattgtctttacttctcagattaggaatctaggcttagagaggttagcaagagtaggcactgagaatttaactcaagaagtttagctgtagggcctgtacctttagctcattaatttttagcaggattcctcaggtagtgaatggaaaatgttctaacagaatatttgacatatagtgatgactcaaaatttaaccaaaattataatttttagaaaaagaaataaagtttttgacattcactgcattaaagtgcaaattttaatagtagtgcracagggagtgtttaaccagggcaaataaggactttataacaacctgtgccccccaacccctacctcacactgcagaggtctattccacagaccctgacctaaggatggatgaataacatacactgacacagatattttgcctgtcagtcctgcagagggtctgggccacttacctgcaccaaggatggtgctgtagagttgcagccacagccctatcagccagcaaa

SEQ ID NO: 382146 - DNA, 565 bp, Homo sapiens
attttatggctaagaccccaaaaggacagacaacagaaacaaaactgaatacataggactatattaaactgtgaggctctgcagagtaaaataaacmatcaaaagaatgaagagacaacttattgaatgggaaaatacttgcaaactattcatctgacaaatgaataatattcagaatataagaggaacttaaacaactcaacagcaataaaactataatccaatttaaaaatgggcaaaaaatatctatagacattttccaaaagaagacatacaaataaccaacaagtatatggaaaaaatgctcaatatcacagatcatcagagaaacacaaatcaagaccaccatgagatactatcttatcatagttagaatagccattattaaaaaggcaaaagaaaatagatgctgggaatgatgtgaagaaaagggaactcttatacacagttgctgtgggatatggttcggctgtgtccttactggaatctcatcttgaattgcagttcccataatccccacgtgttatgggaggacgaggtgggaggtaattgaatcatgagggct

SEQ ID NO: 382147 - DNA, 466 bp, Homo sapiens
ggacgatttcatcaatagtccaatcattctgacctgacttcagagttctctgatgccatggcttgatccaactacaaaatttacatagaagacagcatgtgtcatagcttaaaaactctaaataatacttcttctaagtattagaagcaggatttttataatccttatagacargatttccccaaggatctgatggaagagtcctagttatattcttcatcaggctctaacactggcaatattttgtataaggagcaaaccttttacttcaacatttaataacgtgaagtgggggtagtagttgggcaggataccctctggaaatttgttttagatttattgagatctggctgacaaaaatcatatatatttaaggtatatgaagtgatgatttgatacacatgtatattgtaaaatcattaccccaatcaagctaattaacaccattatcacttcacatagttac

SEQ ID NO: 382148 - DNA, 569 bp, Homo sapiens
ggtgtcccctttcccagtacttagctgtcacaaagaataggtgaaaagtttcaatcaataaagttagtcaaagatgccattatatattcagaatttttaaaaaatgtatttcccaagtaaattattaattttatttcttacccagtgtgtcattttayacttgttagaacatctatattgtatatgaagcattatttggtatgcaaactgacaggaaatatatttccattttgtttctaagaaaataatatatttatgtattatgaggatgcaaaacggttatcttctgggacaataaataacatccctccaacacagctgagtgcaaaacaagttaagagctagtttctccaaacttagaagttgaacgattagctttattagtgatagactggactgagatatacagtttataatacttgtaatgagattcatttattcactgagtcgcatgtgcattcacatttcccaggcagggtcatcactcttaccacacagaaaatatccaacgtgaacacatgcttttctctgcacagacaggatccagaagaaataagaggaagagtgcc

SEQ ID NO: 382149 - DNA, 599 bp, Homo sapiens
tggctacacaaatcaataagagtgacacaagtctgaggttagacaggcagttgctgggcagatgtcctcccagcattttttttaacgttgtaatggcctttgtgcaaggttgtggtttctgcaatgttttttgtgatggttttgttatcaggcatacaagcttgggaaccctttttatacccttacctagctctatttgtcagaagagtttttgtttgtttgttaagacaaatgacttcatgattattctgataatgttcacactaaaaaatccagtaacaatgtcatctatttctgtttcaatggtagtagagcaagacatttatctctttcataagtacatccggggcaggttaatttacagcaaggaagkcttctttatacaactattctcatactcagactaatggttacttggaatttttaatgtgtgacttctaagattaaccctttacaaagttgttctaatcagttaaataaacagagcttggaggagtgcttgtggaagatttatatgccagacttagaagtggcatgcatttcattgtctcacagaacttcatcccgtgctgtacttaactgcagcggagactgaaaga

SEQ ID NO: 382150 - DNA, 584 bp, Homo sapiens
caaataaacagaaaaataatatggtcaaaggcttctgagtttgagcatggttgatgtgttttagaaagccacaggttgttttagctaaatacgcagaagccatgcaaaagcctttcagttttggtcttgagacagtggaggaaagctayacagttattttgagtaacgagcagatttgatcatgtttgtatcattgcctataaaaatgataaaataatgcaataaccttagtatgaatatctttcttaagataatcagttaagatttataattttttacttataacaggcaatcagacacctaccagtccaaaatgccagcttaaataccatcagactcatctgatttacatatcttattattttaaaaaaattgaaggaaaggctacatagagatcgaaattatttctataataatttttttttcaattgagaaagtaacattgcatttttctacagaaagtttttacaaaacttcctataaatctcacaggacctataaaacaaaaacaaaataataaaaaagggtattcaggcaacaaatagcacaataaatagaacagtacctcacatttcaataccaat

SEQ ID NO: 382151 - DNA, 584 bp, Homo sapiens
caaataaacagaaaaataatatggtcaaaggcttctgagtttgagcatggttgatgtgttttagaaagccacaggttgttttagctaaatacgcagaagccatgcaaaagcctttcagttttggtcttgagacagtggaggaaagctacacagttattttgagtaacgarcagatttgatcatgtttgtatcattgcctataaaaatgataaaataatgcaataaccttagtatgaatatctttcttaagataatcagttaagatttataattttttacttataacaggcaatcagacacctaccagtccaaaatgccagcttaaataccatcagactcatctgatttacatatcttattattttaaaaaaattgaaggaaaggctacatagagatcgaaattatttctataataatttttttttcaattgagaaagtaacattgcatttttctacagaaagtttttacaaaacttcctataaatctcacaggacctataaaacaaaaacaaaataataaaaaagggtattcaggcaacaaatagcacaataaatagaacagtacctcacatttcaataccaat

SEQ ID NO: 382152 - DNA, 584 bp, Homo sapiens
caaataaacagaaaaataatatggtcaaaggcttctgagtttgagcatggttgatgtgttttagaaagccacaggttgttttagctaaatacgcagaagccatgcaaaagcctttcagttttggtcttgagacagtggaggaaagctacacagttattttgagtaacgagcagatttgatcatgtttgtatcattgcctataaaaatgataaaataatgcaataaccttagtatgaatatctttcttaagataatcagttaagatttataattttttacttataacaggcaatcagacacctaccagtccaaaatgccagcttaaataccatcagactcatctgatttacatatcttattattttaaaaaaattgaaggaaaggctacatagagatcgaaattatttctataataatttttttttcaattgagaaagtaacattgcatttttctacagaaagtttttacaaarcttcctataaatctcacaggacctataaaacaaaaacaaaataataaaaaagggtattcaggcaacaaatagcacaataaatagaacagtacctcacatttcaataccaat

SEQ ID NO: 382153 - DNA, 573 bp, Homo sapiens
tggttgtaaatactaattttcataatatgctgtctcatggcactgaacattagtccaaatgcacaaggaagaaaagataactggattaaggtttaaagaaaacatgtggtaagcaagtgacaaatacagtgatgagaacactcagctaatacagcacttctgtggttcagtaaacttttattctcactgctttgtgaagaaagtgaacttaagatatatagattcaggtcaaccatgaacatataaattttgccctgcacagggttaagccaaaatttcctctaaacaagttctttgagtatgattgcattattcctgaggaaagccatgcttttttagtaattcaccttcccatggcggtgggggcggtggggtggtggtgaccttattcrcattttttgtttgtttgttttgtttgtttgcttgcttgcttgcttttgagacagggtctcgctctgtggccaggctgaggtgcagtggtggaatctcggctcactacaacctccacctcccaagcttaagcaatcctcccaccccaggctcctgagtagctgggaccacaggcccgggcca

SEQ ID NO: 382154 - DNA, 566 bp, Homo sapiens
ctaaaattttctactggtaccctctgtctattcaattggttcagratctggaaaagaagatggatgggtgattatgtacccttctcaaacccctccaaaagtttaacaagccagcaaatttcatttgctaggaaaatctacatgatacctgtagatgtgtcacaatattttcatactagaaaaggaaaagatgccactcttttcccacctttagaaacaattctaatggcaaatgctaaatctcctgcatttagacacaaatgtcaataagaaatattaagaataaattataaatttatatcacatttaaaacattccattaaaagtgagcaaaaaaccatgaataggtatttttcagaagaaggcataaaaatcaccaagaaacatctgaaacaatgttcaacatcattaatcatcagagaaattgcaaattaaatcaaaaggcaatatcatcttacaccagtgagatagctattatttaaaagagaaaaataacagacattggtgagaataaggaaaaaagggaatgcttataaactgttggtgggaatgtaaattagtatagc

SEQ ID NO: 382155 - DNA, 578 bp, Homo sapiens
tccttgttacatatttgtttgatattgatttttagtttattacattaaatattatttagcttgattactgaatttttggtacctctttaaaaatttgtttcatttatttaaaaatatttttattgtatttatttatggaatacagcatgattttttgtatatgtatacattttggaatgagtaaatccacaatgatttaattaagttattcatcaagtttattaagctatccgtcaccttacaaacttatcattttttgtggttagaacttttaaaatctaccttcttagccattttcgagtatagagtgcattattattgactatagtcatcatactctgtaatagatctccagaacttaatcatgctwtctaactgaagctgtgtacactttgaccaatatctctccaaggcacccccgcccacccctgttaatcagattctacttttttctgctaagagttctatgtctaagactttctcttgggagtgattgtactaggcctaataggctattgaaaagatactggatttcattttccatgaaatggggagccattggaaggttttgaagaaag

SEQ ID NO: 382156 - DNA, 578 bp, Homo sapiens
tccttgttacatatttgtttgatattgatttttagtttattacattaaatattatttagcttgattactgaatttttggtacctctttaaaaatttgtttcatttatttaaaaatatttttattgtatttatttatggaatacagcatgattttttgtatatgtatacattttggaatgagtaaatccacaatgatttaattaagttattcatcaagtttattaagctatccgtcaccttacaaacttatcattttttgtggttagaacttttaaaatctaccttcttagccattttcgagtatagagtgcattattattgactatagtcatcatactctgtaatagatctccagaacttaatcatgctttctaactgaagctgtgtacactttgaccaatatctctccaaggcacccccgcccacccctgttaatcagattctacttttttctgctaagagttctatgtctaagastttctcttgggagtgattgtactaggcctaataggctattgaaaagatactggatttcattttccatgaaatggggagccattggaaggttttgaagaaag

SEQ ID NO: 382157 - DNA, 531 bp, Homo sapiens
atgattatttttttttgagatggagtctcactctgccacccaggctggagtgtggtggcatgatcttggctcactgcaaccatcgcctctcaggttcaagtgattctcctgcctcagccactacacctggctaattttttgtatttttattagagatggggctttgccatattggccaggctggtcttgaactgctgacctcaaatgatccacctaccttggcctctcaaagtgctgggattacaggcatgagtcactgtgcccagtcccaaggttgaacttttgctggctaggcagacgaagctcaaagaggattcgtctgattaatataaataaagaaatatgatttttaaaaactccaaatattaaagagcaatgttcacttctccttcaggcagacaacagattgattttccgcctagttacaaaaatgatttatgacaatatccagaggtacataaagcawaagaacatataatttaaaatgctaaaataaataccaaattatagagtttatttcaggaattaaaa

SEQ ID NO: 382158 - DNA, 621 bp, Homo sapiens
gacttgaaaatttgttatatttttaaaatccaaaggtgttttggaggaatatttaggaagtgaatacagcaatgtacaataactttatraagtgacaattatttcaaagattccagtacattgtatgattctcaaatacctaaaactcaatgactaaacatttattgagaacaactatacatcagggactgttcttacttgtaaaagccacaagcgtaaaaataccataggaggtcttgatatttgtgaaaatgtacccacaaagcagggtaacacacaataaacaattaaatatgctttaaaacctgcaaaatagatttagcaagcaaaaaagcaaagtattaatgatgtggttatatatgtaagataagtggtgattaaagaacagctttactttggtggctagaaaaggtttttcagcagcttcaaccaataggccaggagctaaccacaaaaacaaatgagctaaccacaaaaacaaacaagcaaacacaaaagcagacaaaaaaaagtgaaacaaggaaacagagagaacatctttgttggtaaagagctcttgagtgactgtaacccagaaatcccttggtagttttaggaaactagccagcctttgtggctgga

SEQ ID NO: 382159 - DNA, 538 bp, Homo sapiens
atttttactgatgtcaataaatgttccacaatgcttaataagtaagtttctaaatactcgtggcttatatattttttcattttatctctcccagagatgcataatttgtatgttaaaggaggttattgtccacttgagaaaataacttattcctagagtgtcctccaaagacttgaaaatttgttatatttttaaaatccaaaggtgttttggaggaatatttaggaagtgaatacagcaatgtacaataactttatgaagtgacaattatttcaaagattccagtacattgtatgattctcaaatacctaaaactcaatgactaaacatttattgagaacaactatacatcagggactgttcttacttgtaaaagccacaagcgtaaaaataccataggaggycttgatatttgtgaaaatgtacccacaaagcagggtaacacacaataaacaattaaatatgctttaaaacctgcaaaatagatttagcaagcaaaaaagcaaagtattaatgatgtggttatatatgtaagata

SEQ ID NO: 382160 - DNA, 542 bp, Homo sapiens
gagaacaggggaattttcgttatcctctttattttgttccaggcttaatattaagtaatccctcaatgtttgaccttcagagatgagaatttttcagtgtttttgcccttccttcttaacagaaaatctcttcctcctactcaatacagagtctagcacacagacaggacttccrcccctcctgcagtgatagaagacctctctttttcatttgaaaaatatcttgtcataagttagtttgctacctatcttccagcagctgatgacttttgccaatgtcattgtaatagttttgcctaaaactaaaggaattggcgggggaggcgtggatttctacacttctctttgtggtagaaaactttccagtcagatcagggtcatttccttgctcacagagatgttagtttctaagctgaacacagtttctcaagaaaaacagcttttgatcctgcctctctatcccctgcaaaacagcatgagaattttatctgagtgcagtacactgtcaagaaaatagtaaaaagtgagaaagagcaatttct

SEQ ID NO: 382161 - DNA, 437 bp, Homo sapiens
cctgcaaatgtcacatagtttatacaaccctctgggctgtttcattgtataaatatccccactttgtgaggagcctcatgagccttagctagagatctcttctattctaggacaaaggggcatatcttggatggaggaagggttccctgatgtcccagatctctctttttatctgaaccatttttgttgttgttgttggttttatgtttaaaataatttagtaaaacatgatacttggtaagatctctggttctgtgagtttgttttgacattctcatcctatgtggatctcaaaaatcaattatttttcatagagatataaaaatgataaaactcttctttgtagataccctcatatttaccatttggcacaatcttaattcttttgtgtagycccacatttccatgttgtaatgtaggtctcctgttgacaaatt

SEQ ID NO: 382162 - DNA, 579 bp, Homo sapiens
gaaattgcaggctgctatcctcttttgttatatcctgagcacctaaagtaataaccaaaatataaaaagctatctgaagtgcttattaaaacaataaaccaataaacagagaatagatttgtcatataaaaacattgagaccatattttcttcaaggctgtgtaaatgtaaatctgcccttttgctgaaaccctcgatctccaaagatggtcacatctttacacacagacagacacaaacaattagaacttctttcatgtttacacacatcgctctttccatttactgagaaaattatttgagattgaaaaccacattaatctctctttggttattaaaacaatctaccatagactggatttggcctctactgtttggtgctttattttatataaaacatctcattacagaatcaaatacttattttagctcttattctrtttgagcactcttgagaatttgatagtgtgaattaccaccttcttcatgaaaatttgcttccctgtctctaatttcttgctactgtcctttctcagatgctgacccccgactcattggaattgattctgtatcccatat

SEQ ID NO: 382163 - DNA, 599 bp, Homo sapiens
aggttatctgactattcttctttctatttatagcttcactgcttctcaatattggaccagtttcttaaaactattttccaggaatagacaaaccctacctgcaaaccaagaagacagattttggcctatgtttagcaatattctcttgccatgatggagagtatcctctcatgaacaacgattataaatctgtcaatcaccctatgtaacttctcaaatgaagcagctaaagccatagctgcccaayaaaaatctttaaactctttagccacagtagtaatggataacagaatacccctagactaagtattggtggaacaggaaagagtttctatggtagctaacatatcatgttgtgtttacatcaatacatcttctgaagttgaaacacacatgaaataagaagacaacaagctaattaatcacaacaaattcccagggaagaaccaggtgccaactagttctcagatatatttttctgaatcccacatagaattcaatgtatgcccccaagccatatgaaaattaagactttacctattactaatgctcatttttggacatttggttatcaaatgctgcctctgatgttaaacctt

SEQ ID NO: 382164 - DNA, 562 bp, Homo sapiens
ctttttgtactgtgtattcttggatttttgtcaaaaattaatggactatacatgtgttctttattcatttccaggttttctattctgttccatagtttatgtgtcttcagttatttatttttctgccastactatgctgatataattactatagtttaaaattagatcgtgtgatttcttagctttgttattggttgtacataattgcctcggttatttgggtttcattgtggtttcatatacatttagaatctttttatttcgatgaaaaatcacattgcaattttgatagaactttcactgaatctgaagaggactttgtgtagtatgaacattagaatattacatcttccagtccataaacatggggtatcttttcatgtattagtgtcttcagtttctttcaccagttttttacagtttttactgtagaattattttacttcccaagttaagtttattcctaagtatttcactttttgtagctactgtaaatggaattgttctcttgatttcatttgcggacagtttcttgttagtgtatagaaactactgattttgg

SEQ ID NO: 382165 - DNA, 538 bp, Homo sapiens
tctctgcaaaagatgtacatatgaggaagaggtcccagggtaagtatcaaaagaggatacaatgtggaaaacttttcaaagacaggatcacacgcagttggagaagtcagaaaagccttcacagaggaaggggcacaagagatgagccttaaaagatgcatcacatttcagtaggttcagacctagaaaagtagaaggaaattytaggtggcaagaacaacaaagatacacaagtagaggttaaaggtataatatttgagtatcacagcatagaaatgcaaacaatcaacctattgaatggctcaggtgagttagccactgcatcaggtgctagaaatacaaaaattaatgtaacatgagtcccaatcttgaagtgcccacagtttggctatcagtgtgttgagttcgtgacatggatgagctcatgaggaatcaggtggaaagagcaatgataagaagtgtaacagcagaaacatggagcactactacatgtgagatggagaagaggaaaaagccagaagaaaaggtaaaaagggtc

SEQ ID NO: 382166 - DNA, 472 bp, Homo sapiens
caaacgtgagttcagaaataaagccaattctcagagcatctaatataagcttagtaatattaattgtaaaaaaaaaagttttttattcttttaatttaatgagacaagaagctaagaagctgatacagtggatcattcaggttcttagggatacctatctgccctacagacccttagaaaatctaaaagaagttatggacactctctccaccaaaaagaaaagaaaaaagtcacctgcactgtaaaagagtacacatcttcagaggacttgggaattggggacccacacttagcttccaagaagagaacctttggcaccatcaacctgtttcctgcaagagctgtgctgtgcacataggacagtataacagcacatgaagtcaagcagaatgtgacctacaatcgttctyttcaacctaagtatctacttcctagtaagttgttcgtttgtcagttttgtattttttgtttt

SEQ ID NO: 382167 - DNA, 574 bp, Homo sapiens
aaagcaaaaattaacaaatgagatctagttaaacttatgagcttctgcacatcaaaaactgtcaacagagtaaagagacaacctacagaatgggagaaaatatttgcaaactatgcatctgacaaaggtctaatattgagtgtctataaggaacataaatttacgagagaactccattaaaaagtgggcaaaggacacagacacttctccaaagaagacatacaggtgtccaaaagcatatgaaaactcaktattgccgatcattagagagatgcaaatcaaaaccatgagataccatctctcaccagtcacaatgactattaaaaagtcaaaaaataacagatgctggcaaggttatggagaaaagggaacacttacacgttgttgggagtgcaaattagttcaactattgtggaaagcagtgtggcgattcctcaaagagctaattgcagagctgccattcaacccagccatcccattactggatgtataccaggaggaacagaaatcattccaccataaagacacatgcatgcgaatgttcattgcagcactattcactatagcaaacaca

SEQ ID NO: 382168 - DNA, 584 bp, Homo sapiens
tgtgggtttgggagggcttagggagggtctttgcccaagtgctggctagagagctgcaggccatgggcggccaggatggccacatttcccaggctcaaagtggggagctggcactagggcttagccctgatgggtgatgggatgatgccggggcacctacctggaacagcagctgaggtttggggctcaggccccacgtggcctctgggctgtaataggaccttccctcctcttgatcagtccccaggaaacggtccttctgagtggcccagcrgtgtccccgctcgattcctgaccccgagggaggctcctccaaggctctatagcacagggacaacagaaccctctcagtgcaggcgggcatgcatcccagtcctccctggcctccttgcagctccttcccaagcccaggctggccaagcccctcccaactccaacgtgcttgtcagtatctaccacaaggcctgccttggggagctgtgatggggtgaggggtactccggaagcatccatgacccccagcctgccccagctccaaatccaggccagccagtgcccacccctgaggtaggtgagctgggagc

SEQ ID NO: 382169 - DNA, 465 bp, Homo sapiens
caggctgcagaagagaggcagtgtggtgcgaccaaaaaaatcacaagtttttggtgtatgttgacctgagattgtctcccagcttggccattcaccaggtatgtgaaattgagcaagttcattaacttctatgagtctcagatttggtctcctttaaataaggactttaactaacctgcagtttgtcatgagcwtttgttttggggggtttgtcattttgttttcttttgagatagagtttcactcagtcgcccaggctggagtgcaatggtgcagtcttggctcactgcaacctccccctcccgggttcaagcgattctcctgcctcagcctcccgggtagctgggattacaggtgcagaatcagcaaaaacaggtctgcagtatgggatagaaatttcagatgggaccagaggaggaaaaaggactccaagaagaaggtccagagaacattcagggcacaggt

SEQ ID NO: 382170 - DNA, 538 bp, Homo sapiens
ttctggtgtcatatttaagaaaacgtctaattcaaagtcacaaagatttacacctatgtttccgtctaaaagtctcagggttttaggtctcttatatttaggactctgatatgccctgagttaattttttgatatggtaaaaagtagggtatccaaattaattcttttgcatataaatattgaattatttcaggactgtttgttgagaagaccattctttccaccatcaagtggtcttgtcacctttgttgaaaactaactgaccatagatgtatgggtttatttctgggttctcaattctatttcatatagaaatggaattgagattataccagtaccacattgtttcaattactgaagctttgtggtaaattttgaaattgagaaatgtcagtccttcaacgctggttttttttttttcaagactgtgatcggcattcaggtgtctkgtaattccataaaattttagaattagcttgtctatatctacaaacaagtcagctgtaattctgatagagattgcactgaatctgtagat

SEQ ID NO: 382171 - DNA, 437 bp, Homo sapiens
tttctatttaagtactagctcatttaattctcataagtaccctagggtatgagaaccatccctaaakgcaagagaaaattaaggcctagagaggttaaacaactggctcaaggtcatggcccagagaagttaactggcccgaggtcacggtgctagtgaatggcagagctggccctgaagccagaccatttgtaaccctctgctttgctggcccctgagcctctgctgctctggacatgctgagcagggggcagaggaaggggatgaccttgctcaaactttagtccagggacagcagcttccctagcctttagggtgatgcagcggagagcagagtgggctgagccaggaacccaggctggatctgcagccactacgcctgcatttcccagcacagcccagggcccagtctgctccaccatccccatgagttctca

SEQ ID NO: 382172 - DNA, 562 bp, Homo sapiens
ctgacacatccccccgccccacacacaaataacccctgagtgggaacagagcatgtgggaagggagcctcactggagaagatgggttgggcttactccaagatgagccttcaatggcaggctctgggtcagagctgggttcaaaggtaactcccaggggaagcaggcagagtcacggggacaccaggccctgggatagggctgggtcagaaagcctgctcttcccactcacttcccttcctctgtctctgggaacagatcagggctgcgatggtctgggttcyctccccagccacacaggagggtgctgggactggggctccttctgctcctccacttggcagctctgtgacccaggccaggggcttcctgtcccttcctccctggctgctccgtgcagcacaagctgcatgtatgtgcctgggccagggccccaagaagcccctccatggagtgtggagcctgggcctggccttgccgagtccccttcctttgcctcggctcagcccctcggaacctggtgggggcggggtgggaatcctagccttctaccttccctgctc

SEQ ID NO: 382173 - DNA, 477 bp, Homo sapiens
gagcagccgcagggccagcatcctcgattacattcctgcggggcccggggtgagaagaggactgactgactacggcgtccagggggcgccctcgcccgctcctccgtgccgcgcgtctggggcactgcacgcgactccacgcccccaaccccctgtcccgcggatttcccctccccagttccctaaccccggatcaggcaggccagagacccgagcccgcagcggcctcgggtctaggccccacctgggggtgagtgttgcctggggttttgagcgagctcggcgccttggcgcggcagagtctggcacaggagggagggactcgtttgcagtctwtaggagttgtgagggtggggggcaccgggggataggactcctcccctctgtggatgtggaaacaagcccaggtttgggatttctggttcagacctccctaggaggagaaagggaaggatttggggtcgggggcaggagaat

SEQ ID NO: 382174 - DNA, 583 bp, Homo sapiens
gatattttaaaaagaaagaagaaagccaggggtggtggtgcgtgcctgtagttgcagctactcgggaggctgagrcaggagagtcacttgagcccaggagttcaaggctgcagtgagctatgattgtgtcacataagtactccagcctgggcaacagagtgagaccctgcttcaagaaagaataagacaaagacgaaggaggaggaggaggaagaggaagaagaaaaagaagaagaggaagaagaagaagaggaggaggaggaaggagaagaagaacaacaacaacaggaggaaggagaagaagaaaaggaggaagaaacctttaagaatacaagttgaaaatatgggcaaatactttcatgattctcaaatgggaaaggctttttaagcaagtccaaaggatgccataaataaactcaaaaagagatgaatgacaatttgcaatacacatgacaagaagtaagttgccttaatttagaaaaacttctttaaaaatcaataagaaattagaaaggatggacacagacaagtcacagaaaaataagtgcaaaggccattcagtcaataaacatgaaaatacgtc

SEQ ID NO: 382175 - DNA, 568 bp, Homo sapiens
ctgtgatcattttaagccactctttgtgaaacgtgtgagatttgagtcaaggatcatctttttggcctgtagtctccagagctctggcaccatttgtggaaaagtctagtcttcctctgttgaattggttgtgcattcttgtcacaaattagttggaaatatttgtatgaatgtatttctagattctctattctgttccattaatttatttttctatccctccactagtactacacagtcttgattactgtagctrtgtattaagtcttgaaattgggtagactgattctctctttatttttcaaaaaatgttttagctattctagttcctttgccttttcatattaactttagaataatcttgtctatatctacaaaaaaatcttactagtattttgaaaggaattgcactgaactttcatatcaatttgtggaaaattgacctctctattatttcaagtcttctaatccatgaacacagtatgcctctccatttatgtagatctttgatttattgcattactgttgtgcagttttcagcatacaagttttgtacatgttttgttag

SEQ ID NO: 382176 - DNA, 611 bp, Homo sapiens
ctttttcagcctcaccctcttccttctcttcttctgggattctgatgacttcaacattagatcttttgctttagtcctaaatgtctttcaggctctattcatctttttatttcagtctatttcgttgttcagattaggaaatttccattgttttaaattttggatcactgattatctcctatattccctcctttttttgttattgagtttatccactgaactttttcatttcaactattatatttttcggttctaaagtttccactggattcttctttatatctcctatttatttgctgaggctttctattttttgtttcaagcatgtttataattgcttgttgaagcatttttatcatggcttctttaatatctttgccaaataactctaacatgtgtgtcatcttgatgttggcatctactgattgtcttttatcattctgttgataaatatttctggttcttggtatgatgagtgattttttaaattgaaacctggacatttttgtattatattatgagactatrgatctcctactttaattgggtttctctgatgttgttctgcctgaggaatggagctcacgaccttgttaattccaggtttctta

SEQ ID NO: 382177 - DNA, 444 bp, Homo sapiens
gtttgcagctttgggtaattatgaataaagatgttataaagatgttacaagtagtcacatgtaggtctttgcaagtacattgtttctatttttcttgggtaagacctaggartgggatttatgggttgtatgataagtatgtgtttaactttttaagaacttaccaaacaattttccaaaataattgtacaattttgcattctcaccagcaatttataagagtttcagttgttctgcatcagcatattgataggtatgtagtaatatctaactgtgttttaattgcattttcctgtttgctgatgatgttggatatcttttcatgtgcttatgtcttatcgatatctcttctgtaattaaatattttttgctcactttttgaattgggttatcttattatttagtttagaatgttctttatatattatagatgcaacttatgtg

SEQ ID NO: 382178 - DNA, 427 bp, Homo sapiens
tacctctcaccgtatacaacaattaactcaagatgaattaaaaatttaaatttaagacctcaacaataagaatctgagaagaaaacctaggaaacaccattctgaacatggactttgggaaagaatttatgactgtcttcaaaagcaattgcaacaaaaacaaaaattgacaagtggaatctaattaaactaaagagattctgcacagcaaaagaaactatcaacaaagtaaacagacaacatacagaatggaagaaaatattcacaaactttgtatctgacaagggtctaatatccagaatccataaggaacttaagcaactgaacyagcaaaaaataaataaccccattaaaagacatgaacagacacttctcaaaagaagacacccaagtttacaacaaatataggaaaaaatgctccacatca

SEQ ID NO: 382179 - DNA, 579 bp, Homo sapiens
attcggatcaccctccctgaattttcacatgaaaagtaaactatcaactttaaaccactgaaatagtgttagtttctttattaaagcagtcgagtcttaatctaagatagcttcacaatttcaactactagtaaaatatgtaaattatcatttaagttgatcaaaaccagaggtcattaaatccagaaaagaagttccatctaattcatygttttcatatgtcatgtaagggtagttagggattgtttttcttcagtaaatggtctacagaagaaaaaaagcatgaaaatcaaaattgtaatgaaactgtactctgtgccccacaacattacagatcagattaacatctgtcccttccagctactttatgaatatgaaggcaaaacagacatccaaggagaatctgcttaggcatttacaacaatttgattctatcagcttcaatgccttaacactaaatttgtgtattcttttcatctttttacataagattaaggaatccatatcatctatggctaactagaatgatggtgacacaggaaataagttatatattgatcatttgtgcaaataatattg

SEQ ID NO: 382180 - DNA, 620 bp, Homo sapiens
aataaccttgttctccggatgactacgtggagcataatgatccaccaattcggatcaccctccctgaattttcacatgaaaagtaaactatcaactttaaaccactgaaatagtgttagtttctttattaaagcagtcgagtcttaatctaagatagcttcacaatttcaactactagtaaaatatgtaaattatcatttaagttgatcaaaaccagaggtcattaaatccagaaaagaagttccatctaattcatcgttttcatatgtcatgtaagggtagttagggattgtttktcttcagtaaatggtctacagaagaaaaaaagcatgaaaatcaaaattgtaatgaaactgtactctgtgccccacaacattacagatcagattaacatctgtcccttccagctactttatgaatatgaaggcaaaacagacatccaaggagaatctgcttaggcatttacaacaatttgattctatcagcttcaatgccttaacactaaatttgtgtattcttttcatctttttacataagattaaggaatccatatcatctatggctaactagaatgatggtgacacaggaaataagttatatattgatcatttgtgcaaata

SEQ ID NO: 382181 - DNA, 608 bp, Homo sapiens
tcatgtaagggtagttagggattgtttttcttcagtaaatggtctacagaagaaaaaaagcatgaaaatcaaaattgtaatgaaactgtactctgtgccccacaacattacagatcagattaacatctgtcccttccagctactttatgaatatgaaggcaaaacagacatccaaggagaatctgcttaggcatttacaacaatttgattctatcagcttcaatgccttaacactaaatttgtgtattcttttcatctttttacataagattaaggaatccatatcatctatggctaactagaatgatggtgacacaggaaataagttatatattgatcatttgtgcaaataatattgacatccaactactatagcccaagggttaaagtcaaaaagtcawctccaaatgtatgctgagatggcatgcatcccatgcttcctctgtctaattttttttgcttataatgatttaatacataaattatacctctatttcccattcttggtttcatgcattgttcttttgggggattgaataaacaccagagagataaacatataaatagatcctcagatatccaccatcaaatttaaatggttaaccaat

SEQ ID NO: 382182 - DNA, 527 bp, Homo sapiens
attttcaatacacgagttaataagttcactgtaaatacttaacctttatgaatttatgaatttactaatttattaattaaattataaatattttaaggctcattatttttcaaaaccttttaagaggtatttagcacaaacatgtattgcagtgctaatcctcataggtgatgaaatggctgacttaacagaaagttgcttacatttttgataattgcctgaagttagtctcaaagagactgaacaatagtgagacaagagcaatttttactgagtaagttctttcggttttcagagaaacaagcaaaatccaccaaaatcatcttaactctttctaaaattccttttgagattgatttcttattttatttcagaaaagctgtaggattatcaaggaaaaaagtgacatttgagaagstctaaaagggtgagtagatttttttatctgtaacattgaaagagggaataatattctaacaggcacaaacatcgtgaaatcattgagctagctaagtataatgtggttg

SEQ ID NO: 382183 - DNA, 687 bp, Homo sapiens
acatcatgctgtaatttgatgtcaaagtttaattcaaaaaatggaaaaccactctagatattttaagcagaaaaagaaatcattggaggagtggaaatcatgacttctggcttgaggtagagtagaaacatcacagttgtgatccagaagtcaggaatgcctgctgctgcccatatacccttgctccctccacccatgaagctggtgacagataatggaacctaacgtccagcttctgcaaagagtcacatctgttggcactaaaatatatacttaccctatcttctataacttatgtgcatcaaattggtagatttagagagakacagtttttagcttttaaatgtctctgggttaactaccttctccaccctgccttatgtcctgagactttgacttgttttaataagtttccttctccagtgacttacaaattgatctggacaaactcaggtgccaggagtagatagatgacaaagcaatgaggtcagagtgtttattcactcccctagtccctccccatgaggttattgagagttggctgcattatttttaccaaaacctgctgctcctatctggtagccctttctttctctgcattctgataacttctctatctctgcacatcttcaagtttataagtggtaatggcacccagttcttacaaatgctgtggtattgtggttt

SEQ ID NO: 382184 - DNA, 609 bp, Homo sapiens
actggctctgtgtttttatacctatattgcagtcatccaaccagtcaataataatttctcaaatctgccttggccaggtgtaacacttttgctttacaatacacttccctcttgatgtcatgctgcctcctctttggcattttactagatcttrtggggctctgccaagggcaccagacaggctttctgtcaggagtttttccaggctaagagccaaataagtggcttggagttttccagaacctccttaactgttcttttcagccctgatcatttatggtagaggcaggagggtgcaggacacaatggattatgtcattgggtggtttgtggactctttgttagtaggcaacataaagaaatctgtaagaaggatgtgagctgtcaataccaggatgcaagttataaggaaggaagattttaagaatgtggtaatgagaaatatcggccaatccgatctgtccttaccaaaggaaggaaaaaaatcctctagtttggtaatgtgaaagttccaattgcaaccagcaatctcctgatatttgattctctatgatcattgtggctttcccatagtgtgaagttggctagacttgcattgtaacacagaca

SEQ ID NO: 382185 - DNA, 609 bp, Homo sapiens
actggctctgtgtttttatacctatattgcagtcatccaaccagtcaataataatttctcaaatctgccttggccaggtgtaacacttttgctttacaatacacttccctcttgatgtcatgctgcctcctctttggcattttactagatcttgtggggctctgccaagggcaccagacaggctttctgtcaggagtttttccaggctaagagccaaatawgtggcttggagttttccagaacctccttaactgttcttttcagccctgatcatttatggtagaggcaggagggtgcaggacacaatggattatgtcattgggtggtttgtggactctttgttagtaggcaacataaagaaatctgtaagaaggatgtgagctgtcaataccaggatgcaagttataaggaaggaagattttaagaatgtggtaatgagaaatatcggccaatccgatctgtccttaccaaaggaaggaaaaaaatcctctagtttggtaatgtgaaagttccaattgcaaccagcaatctcctgatatttgattctctatgatcattgtggctttcccatagtgtgaagttggctagacttgcattgtaacacagaca

SEQ ID NO: 382186 - DNA, 580 bp, Homo sapiens
agatgcaaaaattctcaacagaatgctaacaaacaaaatccaatggcacatcaaaaagataatatgccatgattatgcaggatttatcccagacatkcaaggagattcaacatacaaaaatcaataaatgtaacatatcatatcaatataataaaagaaaaacccatttgatcatccaatagacacagaaaaagtatttgataaaaaatgacattatgataaaagctctcatcaaactaggcatagaagcaatatacctcaacataagaaaaatcatagatgaaaaaccaacagccaacatcctactcaatggggaaaagctgaaagccttttctctaagaactggaacaagacaaggatgcccattttcatcactcctattcaacaaagaactagaacttctagccggagcagttgggcaaaagaaaaaaataaaatgtaccctaactggaaaagagaaagtcaaattgtccatctttgctgataatatgatcatatatctagaaaacctacagattccactaaaaaaaaactcttaaacctgataaattaattcagtaaaatttcaggatacaatatc

SEQ ID NO: 382187 - DNA, 580 bp, Homo sapiens
agatgcaaaaattctcaacagaatgctaacaaacaaaatccaatggcacatcaaaaagataatatgccatgattatgcaggatttatcccagacattcaaggagattcaacatacaaaaatcaataaatgtaasatatcatatcaatataataaaagaaaaacccatttgatcatccaatagacacagaaaaagtatttgataaaaaatgacattatgataaaagctctcatcaaactaggcatagaagcaatatacctcaacataagaaaaatcatagatgaaaaaccaacagccaacatcctactcaatggggaaaagctgaaagccttttctctaagaactggaacaagacaaggatgcccattttcatcactcctattcaacaaagaactagaacttctagccggagcagttgggcaaaagaaaaaaataaaatgtaccctaactggaaaagagaaagtcaaattgtccatctttgctgataatatgatcatatatctagaaaacctacagattccactaaaaaaaaactcttaaacctgataaattaattcagtaaaatttcaggatacaatatc

SEQ ID NO: 382188 - DNA, 580 bp, Homo sapiens
agatgcaaaaattctcaacagaatgctaacaaacaaaatccaatggcacatcaaaaagataatatgccatgattatgcaggatttatcccagacattcaaggagattcaacatacaaaaatcaataaatgtaacatatcatatcaatataataaaagaaaaacccatttgatcatccaatagacacagaaaaagtatttgataaaaaatgacattatgataaaagctctcatcaaactaggcatagaagcaatatacctcaacataagaaaaatcatagatgaaaaaccaacagccaacatcctactcaatggggaaaagctgaaagccttttctctaagaactggaacaagacaaggatgcccattttcatcactcctattcaacaaagaactagaacttctagccggagcagttgggcaaaagaaaaaaataaartgtaccctaactggaaaagagaaagtcaaattgtccatctttgctgataatatgatcatatatctagaaaacctacagattccactaaaaaaaaactcttaaacctgataaattaattcagtaaaatttcaggatacaatatc

SEQ ID NO: 382189 - DNA, 573 bp, Homo sapiens
ttggactatgatgctgtcatgaatctcagctatttcagacatgttcttcaatactaggaagctataatgatggcaaggtgatttaaatcatcaatgccctgtaataaaaggaaatccattcttaagaaatctgatgggaacasagtcaatgtgagagtgcagaaaagtgaggcagaatttgaatccagactacatggaacaaaatattggattggattctgatgtgcatttgtttgaggatatctgtgccctgtctggatgatctgacctagatttcctcagtctttgagtgaacctttgctatggaagaataataattctttcaggacaaagtcatttttgaaaattttcttttatggtatacacataattgtacttagaaataaaactatttgcaagggttgttgaaatgggtattctttgtttatgctatttagagctttttctaggcttgattttaataaatctctaatatgagatggtatttgaactaaagtttaaggctagaaatttaacatttcaggaaagaaataaggggaatatacaacatagtgcaaaaccaggaacagtgag

SEQ ID NO: 382190 - DNA, 573 bp, Homo sapiens
ttggactatgatgctgtcatgaatctcagctatttcagacatgttcttcaatactaggaagctataatgatggcaaggtgatttaaatcatcaatgccctgtaataaaaggaaatccattcttaagaaatctgatgggaacacagtcaatgtgagagtgcagaaaagtgaggcagaatttgaatccagactacatggaacaaaatattggattggattctgatgtgcatttgtttgaggatatctgtgccctgtctggatgatctgacctagatttcctcagtctttgagtgaacctttgctatggaagaataataattcyttcaggacaaagtcatttttgaaaattttcttttatggtatacacataattgtacttagaaataaaactatttgcaagggttgttgaaatgggtattctttgtttatgctatttagagctttttctaggcttgattttaataaatctctaatatgagatggtatttgaactaaagtttaaggctagaaatttaacatttcaggaaagaaataaggggaatatacaacatagtgcaaaaccaggaacagtgag

SEQ ID NO: 382191 - DNA, 573 bp, Homo sapiens
ttggactatgatgctgtcatgaatctcagctatttcagacatgttcttcaatactaggaagctataatgatggcaaggtgatttaaatcatcaatgccctgtaataaaaggaaatccattcttaagaaatctgatgggaacacagtcaatgtgagagtgcagaaaagtgaggcagaatttgaatccagactacatggaacaaaatattggattggattctgatgtgcatttgtttgaggatatctgtgccctgtctggatgatctgacctagatttcctcagtctttgagtgaacctttgctatggaagaataataattctttcaggacaaagtcatttttgaaaattttcttttatggtatacacataattgtacttagaaataaaactatttgcaagggttgttgaaatgggtattctttgtttatgctatttagagctttttctaggcttgattttaataaatctctaatatgagatggtatttgaactaaagtttaargctagaaatttaacatttcaggaaagaaataaggggaatatacaacatagtgcaaaaccaggaacagtgag

SEQ ID NO: 382192 - DNA, 633 bp, Homo sapiens
taacatttcaggaaagaaataaggggaatatacaacatagtgcaaaaccaggaacagtgaggccacacaacacacatggttctccatcactgagcactagtttatatagtatatagtacagagtaagctattctggaatctgtgtcccagaatatagatttttctcaagtttcatctgttgagttacttccactaaggcataaattaaaggaaattaggatatgtttttctttattagaattagaaaggcaaaatatctccctaaaaccctttgtagacatacagtctatgtcacgtggcaaccattcttggctgtagattagccaagtaaggattcaattgggtaaattacctcaatagcagaatcaggactctgttggcagagaaggaggcaggaaagaatatggggtaggcaacagtatctgccatactaattcataataaaaatgcacttgttggctgatcttagtaamcttcattagtagataccaacccatatttgatggtgatcactgtttctccaagggttatataaaaaccaacagcatataattagactccagagatcctaatatttctccatttagttagaaatacagaatataactttgagagaaatactattataaaaat

SEQ ID NO: 382193 - DNA, 631 bp, Homo sapiens
aaatctatggtgtacaaagagatgttgtaatttatgaagacaatgtagaataattaaatcaaactagttaacatattcattgtctcaaatatagtgtttaacatttgtggtgagatgtttgaaatttactcttagcaattttctatcatcagtggaaaagagagctcaagagctaagataattccagttaagaaaaaataaagaaaatggcattttgacacactgaatttttgtggctatacaatttatacctgaaacacatgtattcagtctccaaaaatcacaaagtttgaacttagaccttttgtattttcagtgtctaaagggatttgtaaattattttggtgatagaagtcacatatagccttctgatgacatgctgttgttcataatayacactagttatcctgaactgtttagcatatttagggttgatgttattaatgtgaagcatatcaaagaatactgatgttcctgtctacatttttggattagttaaatctatagttactatttcccccttaattaaattattcatagctagaacttaaactcctttatttaaaaggcagcccaaatttgcttttaaaaattggggtataatttacatctaatgaagtgtacaaattgt

SEQ ID NO: 382194 - DNA, 629 bp, Homo sapiens
aatttggtaatcttgtgcatgaatactatatggaccgtatgtgaatttttacaaagtaaacatgacactgagataataggcaaaacttaccagcatcccagaaggcccccttttttctccccatctcactgccctgtcttctaacagcgtatatcagtgctgccagtttttgaacttgacataaatggaatcatatgtaatgtagtttgggatctgactttccccatttaacaatatgcctgtaaaagtcttccatattgttatctctgagttgttgattctcattgccatgtagtattccattacataaatatgatattcatccacagtggctttatccatcctacaattgatggatgtataggtggttgaagatatccatttgaagtcttacttcgtaataacagcacactgacaatttaatgatttgtttttaggccacatcaatgtagctgagaaaaatatccttgaggttgaaatcgcaagtagtcacttcttaagggatgtatcastgtgtctgacttaaagtggagggttggtcagagtactagtggcatgtcaaggtcttccactttcatgcggaagctgtgacattaatgggcatcaggaatacagtcagtggtagaata

SEQ ID NO: 382195 - DNA, 475 bp, Homo sapiens
ccacattaatttgcttaggataatggcctctgactgcatccatattgctgcaaaggacatgatcttgttttacatgactctgtcatattccrtggttgatatggtttggctctgtgtcctcacccaaatctcatcttgtagctcccataattcccatgtattttgggagggacccagtgggaatgactgggtcatgggggtgggtctttcctgtgctgttctcgtgatagtgaatgggactcatgaaatatgatggttttaaaaacaggagtttctctgcacaagctctctctttgcctgcaaccaaccatgtaagatgtgacttgctcctccttgcctttcaccttctgccatgattgtgaggcctccacagccactggaactgtaagtccaataaacctgtttcttttgaaaattgcccagtttcaggtatgtctttatcagcagcatgaaaatgaaccaatatagtaaattg

SEQ ID NO: 382196 - DNA, 493 bp, Homo sapiens
ggacccacccctagaaattttgactcagtgtgcccgaggtggatcccaagaatttgcatttctggtaagttcccagatgatgctgttgctgcyagaccaggaaccacactttgagaacactgtgttaagtcatgagctctccttttgaaaataatgatttactaagttgctgtatgtttctcaatctctactttaattgcttattttatgataaaaaatatttctataaaatgctcatagaaatgcctcttattgtgagtccagtccccattaagttgcctgtctacattgtgcttctgaatttagtcatttttccctttgggactgttctatacaccaccttattcactatttttattttcttacaaataaactttacaggaatcagcttaagaagctaacagcaattatctgcaacaagaataagtatgatgaaaatagagatgttacctgattgtggttctttattagagagtaaaggaacagagaaagg

SEQ ID NO: 382197 - DNA, 579 bp, Homo sapiens
gaatatagaaaaataggatcatagaaaataaataggaataaagaaaggaatatataaaaataggaatatataaagtgttctagaaaaataggcatctagaaaggaatatagaaaaataagaatatagaaaggaayatagaaaaataagaatatagaaaggaatctagaaaggaatatagaaaaaacagctgtgtgctggtagcttgtgaaatataatgttggattaaccaggcatgtcatgtgtgatgatagtgagtatcactgagagatgagtctgattccccgaagcagctgctgttacacatcccatgagtgtacagtttagcactgctcccacagacccactgacccagctttattcatgagcaccgtagagatcatgacaacaggtaagtagttcaatgttccacatggctgtgcttatgagagatcatgaactatgggatccagtggcttccaagtcattttaattttaatatggaaatttccaaacatactcaaaaatacaaaaatagttgaatgaatctctatgcatatccctcagctccaacagttaccaactcctgatcaatcttagtt

SEQ ID NO: 382198 - DNA, 628 bp, Homo sapiens
tcaacattcatggataggaagactcaatattgtcaagatgtcagttcttcccaacttgatgtatatattcaatacaatactaatcaaaatcctacagagttattttgtggatattgacaaactagttctaaagtttatatgtagagacaaaagacccagaatagccaaygcagtactgaaggagaagaacaaagccagaggactggcactacttaacgtcaagacttaccgtaaagcgacagtaatcacgacagtgtggtatttgtgaaagaatagacctctaccaatagttcagtggaataaaatagagggcctagaaatagacccacataaatatagtcaactgacctttgacaaagcagaaaacaaaaggtactggaacaactggacaaccacatgcaaaaaaaaaaaaaaaatgaatctagacacagaccttacaccctttaaaaaaaatggatcacagacctaaatgtaaaatacaaaactgtaaaactcctagaggatgggataggaaaaaaatctagatgaccttttagatacaacaccaaaagcataatccatgaaaaaaagaactgataagctggacttcattaaaattgaaattttcttgttgtgagagagacattat

SEQ ID NO: 382199 - DNA, 566 bp, Homo sapiens
ttaaaccaacaaagatcaaaagagacaaagaaggccattacataatgttaaagggatcaattcaacaagaagagctaactatcctaaatatatatgcacccaatacaggagcacccggattcataaagcaaataacagaatttcaaaatcaatatcagggcatcacattcattcatgctttagaaggctctaaagcctagaggagagagstcaccagaacaggacagtgaagatacagagaaaaggtacagagcaatagaatgagagaagcaatgagaattttgattagactggtacatagatcccgtgaaagtaatcatgtctatgcagtggcctccaaactggtgttgttactttcacattctaccctctctctcttctcctacatagcactacaagaagagatgtcctaaaattctgctttttacaatgtgtcctctcaaaacgtattttctatggctcatgcccggaaattcaaataactctgaaatgatatccaggaaattccataatttcattttcctcattcattatggtaggaaatataccttgaacatccattacat

SEQ ID NO: 382200 - DNA, 588 bp, Homo sapiens
cagtgagactaccatcagctaaatattggcaatgagttgaaaaccttggtaacaagtgacaccagttgatrataaatgaatgacccttcctccactctgggactgcatctgactcagggccacattctttcacttgttgggagtagtttcttttctctagggcagaactagggaggggatattactaaattctacctcagttgatcttattttctcatggctccatactaaatgagtgctttctgttaatttctttattctttagatagtttttcttttgctaagtgatagggttaggctttgtgtcgtcattcaaatctcatcttgaattgtaatccccaggtgtttagggagagacctggtaggaagtgactggattatgggggcagtttcccccatgctgttctcgtgatagtgagtgaattctcatgagatctgattgttttataaatggtagtttttcttgtgctgacacatgctgtcttgcctgctgccatgtaagacgtgcctgcttcacctgctgccatgtttgtaagtttcctgaggcttcccaggcatatggaactgtgagtcaaaactttttccttt

SEQ ID NO: 382201 - DNA, 588 bp, Homo sapiens
cagtgagactaccatcagctaaatattggcaatgagttgaaaaccttggtaacaagtgacaccagttgatgataaatgaatgacccttcctccactctgggactgcatctgaytcagggccacattctttcacttgttgggagtagtttcttttctctagggcagaactagggaggggatattactaaattctacctcagttgatcttattttctcatggctccatactaaatgagtgctttctgttaatttctttattctttagatagtttttcttttgctaagtgatagggttaggctttgtgtcgtcattcaaatctcatcttgaattgtaatccccaggtgtttagggagagacctggtaggaagtgactggattatgggggcagtttcccccatgctgttctcgtgatagtgagtgaattctcatgagatctgattgttttataaatggtagtttttcttgtgctgacacatgctgtcttgcctgctgccatgtaagacgtgcctgcttcacctgctgccatgtttgtaagtttcctgaggcttcccaggcatatggaactgtgagtcaaaactttttccttt

SEQ ID NO: 382202 - DNA, 397 bp, Homo sapiens
cctagctggttcttggctctatgaagatgatatatgaccaccaaacttcagtcttgcttgtgtgaaaaactctaaagacaagaaatctgcatacactcactcacttgtatcatcaactgataatctttgcaccattgtttgctggtttgaaaatgaatcaaggagaatacgttttgaatgaggccaagacattttttttttccaccagtcacggatgtggagcagggtgtgtatcaggcccagctcagggtgccrttatgtgacaatgtgaggattgtgacagcatttggagagggtcctagtgatatctgtatgctatattcaaccacaactaccattcctacaaggtccctgagtggaagagagagatgtacaaagatgcaaagaaaggcaacac

SEQ ID NO: 382203 - DNA, 397 bp, Homo sapiens
cctagctggttcttggctctatgaagatgatatatgaccaccaaacttcagtcttgcttgtgtgaaaaactctaaagacaagaaatctgcatacactcactcacttgtatcatcaactgataatctttgcaccattgtttgctggtttgaaaatgaatcaaggagaatacgttttgaatgaggccaagacattttttttttccaccagtcacggatgtggagcagggtgtgtatcaggcccagctcagggtgccgttatgtgacaatgtgaggrttgtgacagcatttggagagggtcctagtgatatctgtatgctatattcaaccacaactaccattcctacaaggtccctgagtggaagagagagatgtacaaagatgcaaagaaaggcaacac

SEQ ID NO: 382204 - DNA, 467 bp, Homo sapiens
tcatgttgataaggcaatatattttgtcagttctccaaataagatcacatttcaaatatttattacatggtataatacgaaatagaagcaacatatatataattctcctctactccttcctctctcccactttctttcctcttccttgtcttcccatagaagtaaaggagaaaatactaagttgaaatctgcagacttgatgtctcaagtatcacattgttgtcttagtagttaaaagtttcaaagaactgaaatatttagttattctggggtgtctaggaatatatcttatcaatgggcatatatgtacacctggcttggagttgttcatgctgctcrtagcattactgctactactgtaacagcttccactcctcctccttcactattattatcatcactactggtaataataataataatggaaatagtaaaaatgtatgttgtgcttactatttgcaagtcat

SEQ ID NO: 382205 - DNA, 578 bp, Homo sapiens
ctttttcccattctgtgggatgcctgtttactctgatgacccaaagctagcagaagaaaagaagtaacaaagattagagcagaagtaaatgaaattaaaaccaaaaactatagagcacaaaagataaatgaaactaaaagttggttttttgaaaagataaacaaagttcatagaccactagctagattaatcaagaaatgacagaagattcaaataagctcaataaaaacaaacatgaagacattataactgacactacagaaayacaaaagatcatcggagattactataaacacctctgtgcaggcaaactagaaaatctagaggaaatggatacattcctgaaaacatagaacgcccccctagcttaaatcaaaaagaaatagaaacttctcacaaaaaaaagaaatagaaatcctgaactgaccaataacaagtagtgagactgaatcagtgataattttaaaatctgccaacaaaaaaacaaaacacaagaccagacacattcacagccaaattctactatacactcagagaattggtaccaatcctactgaaactattccaaaacactgaga

SEQ ID NO: 382206 - DNA, 578 bp, Homo sapiens
ctttttcccattctgtgggatgcctgtttactctgatgacccaaagctagcagaagaaaagaagtaacaaagattagagcagaagtaaatgaaattaaaaccaaaaactatagagcacaaaagataaatgaaactaaaagttggttttttgaaaagataaacaaagttcatagaccactagctagattaatcaagaaatgacagaagattcaaataagctcaataaaaacaaacatgaagacattataactgacactacagaaatacaaaagatcatcggagattactataaacacctctgtgcaggcaaactagaaaatctagaggaaatggatacattcctgaaaacatagaacgcccccctagcttaaatcaaaaagaaatagaaacttctcacaaaaaaaagaaatagaaatcctgaactgaccaataacaagtagtgagactgaatcagtgataattttaaaatctgccaacaaaaaaacaaarcacaagaccagacacattcacagccaaattctactatacactcagagaattggtaccaatcctactgaaactattccaaaacactgaga

SEQ ID NO: 382207 - DNA, 584 bp, Homo sapiens
actcaggcattagttaaggtcaaatgacctatttggatatatacaccaattacttgagaaattctgaaactaaagaacttgtcaaccatttcaaattcacacacacacacacacacacaagcacacacacgcaagaatatattacagaatataaaaatgtatcctcatgaaaactgactaaatcacaatcttactctgaaatacatgcataaaaatatttgttttggtgatcaaagcatcaaagttttcttagccaaaataaattcagaatggattaactttaatctggtcaggataataacactgaataaattctatttagagtccaaatgttcattggtactaaatccagctttactgccccttgtctttcccatttcctggggtggctgtttaattgttaaaaccctgcctaagttccctgcttacttcacctcactaattttcmgcagagaaaatctacgtaacttaaaaggaccttcctactttctttgttttcagctactaatttctgttgatccttgagccatcttttaagtgtttaaacttagcagctccaggctgagaatgcctgttttgtaccc

SEQ ID NO: 382208 - DNA, 559 bp, Homo sapiens
atagtgacatctcaaatatttaggggaagcaccaccacatggttatcaacactattacatatgtgttattttgttatatttgaagactattatatgaagactaaatctgaaatactrgaatattaataatgaaaagtaatatcttgaccaagggtcctgatacagtatgatttgatttgcttcattaagggctggatggcaatatttttcttcaaatttccagtagagaaatttcataaagtttcatctactgtcaccttttaggaggtgacatcttttaatactttccaggttgaaaactcttgagataagccaatgaaagtttatctcccaatatagcccctataccaccttaacacaaaatactggatagctggctttctgacacagtgcatagcattcacatgtcaggggcttgtagctcccataacaagtcctagctggaggcagagagaagggagggatagcagtcgagtggggagggcagggacatgctatacagtaaccagggtgcaaggaatatccatgtttcattctttgttgcttagatccaaagtgc

SEQ ID NO: 382209 - DNA, 559 bp, Homo sapiens
atagtgacatctcaaatatttaggggaagcaccaccacatggttatcaacactattacatatgtgttattttgttatatttgaagactattatatgaagactaaatctgaaatactggaatattaataatgaaaagtartatcttgaccaagggtcctgatacagtatgatttgatttgcttcattaagggctggatggcaatatttttcttcaaatttccagtagagaaatttcataaagtttcatctactgtcaccttttaggaggtgacatcttttaatactttccaggttgaaaactcttgagataagccaatgaaagtttatctcccaatatagcccctataccaccttaacacaaaatactggatagctggctttctgacacagtgcatagcattcacatgtcaggggcttgtagctcccataacaagtcctagctggaggcagagagaagggagggatagcagtcgagtggggagggcagggacatgctatacagtaaccagggtgcaaggaatatccatgtttcattctttgttgcttagatccaaagtgc

SEQ ID NO: 382210 - DNA, 559 bp, Homo sapiens
atagtgacatctcaaatatttaggggaagcaccaccacatggttatcaacactattacatatgtgttattttgttatatttgaagactattatatgaagactaaatctgaaatactggaatattaataatgaaaagtaatatcttgaccaagggtcctgatacagtatgatttgatttgcttcattaagggctggatggcaatatttttcttcaaatttccagtagagaartttcataaagtttcatctactgtcaccttttaggaggtgacatcttttaatactttccaggttgaaaactcttgagataagccaatgaaagtttatctcccaatatagcccctataccaccttaacacaaaatactggatagctggctttctgacacagtgcatagcattcacatgtcaggggcttgtagctcccataacaagtcctagctggaggcagagagaagggagggatagcagtcgagtggggagggcagggacatgctatacagtaaccagggtgcaaggaatatccatgtttcattctttgttgcttagatccaaagtgc

SEQ ID NO: 382211 - DNA, 580 bp, Homo sapiens
caacatagtgagaccccaatctctacaaaaaaaaaaatacaaaaattagctgggcatggtgatacatgcctgtagtcccagctactcaggaggctgaggcaaggggattcttgaacccaggaggtcgaggctgtggtgagctgtgattgtgccactgcactccagcctgggtgacagaatgagaacctgtctcaaaaaaaaaaaaaaaaagaaaaaaaaaaaagaaaaaatttatgccattatctaatttaagascgttaaatagtaatgcagtttcctaggaaagtaacagttgccatcattgctctcccatgtctttcttttcagagaaaaccacatttccctctcctagcagataattttagtatttgcctccacaccgctcaataaaatgctcatattgctacttattttttcagtgttaagcattatcaatattgacttatcattacagagagtgaaaatttagctttccttcctctttctgccttcgtgacacacatgcacatagtcttttgtggaagacacactctgatatggtttcgctgtgtctccacccaaatctcatcttgaattgtaa

SEQ ID NO: 382212 - DNA, 580 bp, Homo sapiens
caacatagtgagaccccaatctctacaaaaaaaaaaatacaaaaattagctgggcatggtgatacatgcctgtagtcccagctactcaggaggctgaggcaaggggattcttgaacccaggaggtcgaggctgtggtgagctgtgattgtgccactgcactccagcctgggtgacagaatgagaacctgtctcaaaaaaaaaaaaaaaaagaaaaaaaaaaaagaaaaaatttatgccattatctaatttaagaccgttaaatagtaatgcagtttcctaggaaagtaacagttgccatcattgctctcccatgtctttcttttcagagaaaaccacatttccctctcctagcagataattttagtatttgcctccacaccgctcaataaaatgctcatattgctacttattttttcagtgttaagcattatcaatattgacttatcattacagagagtgaaaatttagctttccttcctytttctgccttcgtgacacacatgcacatagtcttttgtggaagacacactctgatatggtttcgctgtgtctccacccaaatctcatcttgaattgtaa

SEQ ID NO: 382213 - DNA, 541 bp, Homo sapiens
ggacaaaaatgacaaatgctggcatgggtgcagaggagaggaaactcttatacattgttggtgggaatgtaagttagcacagccattatggaaaaaattatggaggctcctcaaaaagtaaaaatagaactrccatatgatctagtaatcccactctatttatatatccaaggaaaaagaaatcagtatgttgaagacatatctacacttttaagtttattgcagtattattcacaaaaatcatttattgcagcactgctcacaataatcaaggtggatacataaagaaaatgtagtgtgtacatacacaagtggagaaaatggcaaaattaacaagtttatagtgataaatgctatgtggagaaaatggcagagagaatactattcagccataaaaaaagaaggaaatcctgacgtttgcaacaatatagatgaacctggagaatattgtgctaagtgaaataagccagacgcagacagacaaatactgtatggtctcacttacatgtgaaatctaaaaacttgaactcatagaaacaga

SEQ ID NO: 382214 - DNA, 541 bp, Homo sapiens
ggacaaaaatgacaaatgctggcatgggtgcagaggagaggaaactcttatacattgttggtgggaatgtaagttagcacagccattatggaaaaaattatggaggctcctcaaaaagtaaaaatagaactgccatatgatctagtaatcccactctatttatatatccaaggaaaaagaaatcagtatgttgaagacatatctacacttttaagtttattgcagtattattcacaaaaatcatttattgcagcactgctcacaataatcaaggtggatacataaagaaaatgtagtgtgtacatacacaagtggagaaaatggcaaaattaacaagtttatagtgataaatgctatgtggagaaaatggcagagagaatactattcagccataaaaaaagaaggaaatcctgacgtttgcaacaatatagatgaacctggagaatattgtgctaagtgaaataagccagaygcagacagacaaatactgtatggtctcacttacatgtgaaatctaaaaacttgaactcatagaaacaga

SEQ ID NO: 382215 - DNA, 583 bp, Homo sapiens
cataaggacattttggtcaacaatggatgcacatatgatggaggatccaaaagattataatggaatggaaaaatccctaccacctattgatatygtagctgtcctaaggtcatggagcaatgcattacttatgtgtttgtggtgaatgctgatgtaaacaaatctgcactgccagttgtataaaattatagcacattcaattatgtacagtacatacttgataatgataataaacaactatgttactcgcttatgtatttactaaatctttcactgttgttttagagtgtacgccttctatttattaaaaaataattacctgtaaaacaggctcatgcagttcctttaggtggtattccagaagaaggtattatcacaggagatgacagctcatgctgtcatcatgttggctgggagagaatctctttctagatgaactagtgagacgcaggttagatatccctacaaacatgcttgaatacctttcctgaaattttgggttccacacacaaatggactcctctcttctccctgaggaggataaggacattgacttccactgcagcacttaaccacttcaatc

SEQ ID NO: 382216 - DNA, 375 bp, Homo sapiens
cttacatttttatttacttattttaattgacacattgtatagactcttttaaaatgttaatccctaactgtccaaagaaagtgtttgtatgactacttaattcccataactgtggatcaagagagctgccagaaattggcataggagagagctatgcttccatctgtaaaatcatcacaaacctaaactcaagagcctgctaatattaccttgaaagataggtgttcataaactaacttgagatctttgaattacaagttaaaaaatcttaattttgaagatatgcttcattagaggaatgaacacactgttttatacrtcatgaggaatgaatacatggttttataaatcattgttttctgtatctaaaatgtt

SEQ ID NO: 382217 - DNA, 592 bp, Homo sapiens
aattttcatacttttctccaaagagattgtaccatgttatattttcaccagaaatgtatgagtgttcttctggctacatattagtatccttgctaatatttggtactgttagtatattacattttagtcattctagtgtatgtgtagtggcatctcrttatggttttaatttgcatttccctcaagactagtgttattaggcacttttttgttactaattgtttattcagatagcgtcatatataaagttcctgtttagcattttgcccatttaaaaaatgggaatattggtattatttatttggaggagttatttacaccttcaaggaagaagtatttttcccagatttatgtttcccaaacattttctcccaatctgtgtcttatttttcatttataaacagtgtcttttaatgaacagaaactttaaatttgtataaaagtagctatctttttaacttactttatattttttgctttctttctcctcagaaatcataggatgtaatgatattttcctgtgaagtattctaaaggctttatagtttaagctcatgtgttcaggtttatgatccatcttaaaataattttt

SEQ ID NO: 382218 - DNA, 583 bp, Homo sapiens
attaatagtagttgattatagagaaataagatagaaatatgaatagattctggtatagcagatcggagttcttttattctgctctgttgatctgttgccttgttcttatttccaggactaaactattataattatggttttatagtatattcattacctgacagagaaagtcaacatcttttatttaaaaaaattctacctagtctaaaatgtttatttttactgaaatatttctaaataattgttaactcaaaatatttrcttgaaaatttactattctttaaatttttaaattatttttaggtaaattgccatctttacatttaatattctcatccataaagagggtctatcttttccatgaatgtatatctaatttatacttcagagtacactctttagtttttttcatcttaagacctgcagctttaacaaaattgttatacacacacacaaatacatttgatgtgaactctgaaagaatcacaatatattaccctactttatattttttaaaaagtccttcaagcttcttatcactgtccttactattgactggaattttatttttcattttttttaa

SEQ ID NO: 382219 - DNA, 230 bp, Homo sapiens
agaaaggtaggcagccatagacaatatgttgttgaggtgtgatttctgaccttcagaagaatggaaatataataygtactttgcaatttgctttttttttcactcaacatgatgcttctgagatttatctatgctgacatgtagtttgatttaattcattttactgaagccattatatgagtatataaagttccattgaatagcttgttaaaattctattgtatacattt

SEQ ID NO: 382220 - DNA, 603 bp, Homo sapiens
aagacactccctgctatccttgggtgaaattgccaaatatttgtacaatcatttttacttatttttccatgagctggttaacaggattgtgatggttaatattgagtgttaacttgattggattcaaggatacaaagtattgttcctgggtgtgtctgtgagggtgttgccaaaggagattaacattttagtcagtggactgggagaggcagacctacccttaattcaggtgggcaccatctagcatgaataggataaaagcaggcagaggaacgtggaagggctagactgacccgagtcttctggcctccatctttctcccatgctggatgcttcctgcccttgaacatcagactcccaagttcttcagctkttggactcctggacttacaccaatgatttgtcaggggctctcaggctgtcggccacagactgaaggctacactatcagcttccctacttttgaggtgttcagactcagacgagcttcctggcttctcagcttagagatggcctactgtgggacttcaccttgtgattgtgtgagtcaattctcctaataaactccccttcatatattcatctatcctattagttctgtcc

SEQ ID NO: 382221 - DNA, 589 bp, Homo sapiens
gcgggctacgtaaatgacacacctggtcaaaccaatcccctgggccctatggaaaccagacactgcctcctccagcatcccaatataagcagccacttttcagcacacacggagttttctctttgttcatatcccccctcccgctgtctctgtatggcagagctgttttcttcttccttccttctttcttgtctattaaacttttcactccttaaaaccactctatgtgtgtctgtgtcattttatctgaaccggcatgagacgaaggaccctggtgttcctccagtcatcgaagctgtgtcaccargagcggttctaaaggaacagaattttatggatggattcctttctggagttgactgcttaatatgattataccccaaaatgctaaggactctacttctaatagcatggagaacacagatagtccttggcatgaactgtttaaagagttatgtgaaataaatgcatttgatactcctggttcactgcttgtgagaggcaaggagtttagtgactctatacataataactttgaccatatgtggagaacaaaggaacataatgaagctggttgtttgctcctaag

SEQ ID NO: 382222 - DNA, 589 bp, Homo sapiens
gcgggctacgtaaatgacacacctggtcaaaccaatcccctgggccctatggaaaccagacactgcctcctccagcatcccaatataagcagccacttttcagcacacacggagttttctctttgttcatatcccccctcccgctgtctctgtatggcagagctgttttcttcttccttccttctttcttgtctattaaacttttcactccttaaaaccactctatgtgtgtctgtgtcattttatctgaaccggcatgagacgaaggaccctggtgttcctccagtcatcgaagctgtgtcaccaggagcggttctaaaggaacagaattttatggatggattcctttctggagttgactgcttaatatgattataccccaaaatgctaaggactctacttctaatagcatggagaacacagatagtccttggcatgaactgtttaaagagttatgtgaaataaatgcatttgatactcctggttcactgcttgtgagaggcaaggagtttagtgactctatacataataactttgaccatatgtggagaacmaaggaacataatgaagctggttgtttgctcctaag

SEQ ID NO: 382223 - DNA, 535 bp, Homo sapiens
ttccagccccttttattgaagagactgtcctttccccaattgtatgttcttggtgcatttgttgaaaatcagttggctataaatacatgaatttatttctgttttctctattctgttscaacggtctgtgtcaaaaaaaaaaaaaagcccaatttcattgatcttttctttttttgtctgtgtttctaattctaatttttgtctaatcttcattattttatttcttcttctgactttgggcttagtttcttcttatttttctagtttattggactgtgaagttaggctgtttatttgagatctttcttttctcttaatgtaagcatttatcactataaacttcttgattctgccattttctccacatagtattaaggagtgaaatgacctctctgatcctctaatgtttctcagcaaaacagccattataaaatttggtgcaaataatttatattttcatatgcttatacacatcacttctacatgcttacactttctctttctccctctctgtccttattctgacagacatgtt

SEQ ID NO: 382224 - DNA, 535 bp, Homo sapiens
ttccagccccttttattgaagagactgtcctttccccaattgtatgttcttggtgcatttgttgaaaatcagttggctataaatacatgaatttatttctgttttctctattctgttgcaayggtctgtgtcaaaaaaaaaaaaaagcccaatttcattgatcttttctttttttgtctgtgtttctaattctaatttttgtctaatcttcattattttatttcttcttctgactttgggcttagtttcttcttatttttctagtttattggactgtgaagttaggctgtttatttgagatctttcttttctcttaatgtaagcatttatcactataaacttcttgattctgccattttctccacatagtattaaggagtgaaatgacctctctgatcctctaatgtttctcagcaaaacagccattataaaatttggtgcaaataatttatattttcatatgcttatacacatcacttctacatgcttacactttctctttctccctctctgtccttattctgacagacatgtt

SEQ ID NO: 382225 - DNA, 562 bp, Homo sapiens
cccacagaaaacatgaaacataagccatatatttcaggaattagttttttgaggaagaaattctgtttgtctctggggataaacagcagaaacttactcaatggtgaataacatcaggaagacatctgctttggagcagctgtggccttgttatctctgatctttcattctgcctggtgtgtctcctccctgtgcttttcctttctgggtcttcccccgtcatcttgggctactagttcacagtgttctatcttttaattatgtttaaattgagagacagacaagatatagataaaatgagtgactacttagtgatagaagagactcacattcagacctatattatggtcttatgatgaggagcagcagctggaggatgggggagaatggaacagagagaagttgccwtagaacgatgtgtttgtccttgttcatatgagagggaactaacatgtaatatgcacctactgagactggtcagtgtgtttatcatctcttttcattctaaaaacaacttcacaaggcaggtataaatattcccatgttacaaacactgaaaata

SEQ ID NO: 382226 - DNA, 562 bp, Homo sapiens
cccacagaaaacatgaaacataagccatatatttcaggaattagttttttgaggaagaaattctgtttgtctctggggataaacagcagaaacttactcaatggtgaataacatcaggaagacatctgctttggagcagctgtggccttgttatctctgatctttcattctgcctggtgtgtctcctccctgtgcttttcctttctgggtcttcccccgtcatcttgggctactagttcacagtgttctatcttttaattatgtttaaattgagagacagacaagatatagataaaatgagtgactacttagtgatagaagagactcacattcagacctatattatggtcttatgatgaggagcagcagctggaggatgggggagaatggaacagagagaagttgccatagaacgatgtgtttgtccttgttcatatgagagggaactaacatgtaatatgcacctactgagactggtcagtgtgtttatcatctcttttcattctaaraacaacttcacaaggcaggtataaatattcccatgttacaaacactgaaaata

SEQ ID NO: 382227 - DNA, 602 bp, Homo sapiens
agctgaaaacaccacctgtcgagaaatgcttaggaatttcaacaggtaagaaaaaaatacactctccattgaaggtgctgtgtacccttggcaatattgatattccaggaaggatgaagatgtgcctgaagcaaagargctgaattcatagagggcaacactcatcaatctcaactagtgagaaataaatattatgtgataaaaagattaaccttatgatctttagcctcctggtagatgaggctgtgtatgactgactcatgaatgttgcagagagcatgtgtgtgaaatcactcagcacaagcctccaggtctgatttcaaactattctttctttgctttctatcttcttccaaaatagcatactttttagccaaagggtatgatattagaataccgtgattcttggcttttcagcgatttatagtatcctctaggtttatagttcatttattcattcatttagtgatctccttttaggttctaggagctagggcaggcactgtgcatgtggagattaataaaacaatttctctgcttttaaagacctcccgatctagatagacagagaaacagaccaattgaaggagggttttaatgta

SEQ ID NO: 382228 - DNA, 602 bp, Homo sapiens
agctgaaaacaccacctgtcgagaaatgcttaggaatttcaacaggtaagaaaaaaatacactctccattgaaggtgctgtgtacccttggcaatattgatattccaggaaggatgaagatgtgcctgaagcaaagaggctgaattcatagagggcaacactcatcaatctcaastagtgagaaataaatattatgtgataaaaagattaaccttatgatctttagcctcctggtagatgaggctgtgtatgactgactcatgaatgttgcagagagcatgtgtgtgaaatcactcagcacaagcctccaggtctgatttcaaactattctttctttgctttctatcttcttccaaaatagcatactttttagccaaagggtatgatattagaataccgtgattcttggcttttcagcgatttatagtatcctctaggtttatagttcatttattcattcatttagtgatctccttttaggttctaggagctagggcaggcactgtgcatgtggagattaataaaacaatttctctgcttttaaagacctcccgatctagatagacagagaaacagaccaattgaaggagggttttaatgta

SEQ ID NO: 382229 - DNA, 602 bp, Homo sapiens
agctgaaaacaccacctgtcgagaaatgcttaggaatttcaacaggtaagaaaaaaatacactctccattgaaggtgctgtgtacccttggcaatattgatattccaggaaggatgaagatgtgcctgaagcaaagaggctgaattcatagagggcaacactcatcaatctcaactagtgagaaataaatattatgtgataaaaagattaaccttatgatctttagcctcctggtagatgaggctgtgtatgactgactcatgaatgttgcagagagcatgtgtgtgaaatcactcagcacaagcctccaggtctgatttcaaactattctttctttgctttctatcttcttccaaaatagcatactttttagccaaagggtatgatattagaataccgtgattcttggcttttcagygatttatagtatcctctaggtttatagttcatttattcattcatttagtgatctccttttaggttctaggagctagggcaggcactgtgcatgtggagattaataaaacaatttctctgcttttaaagacctcccgatctagatagacagagaaacagaccaattgaaggagggttttaatgta

SEQ ID NO: 382230 - DNA, 638 bp, Homo sapiens
taacctttgaaaatcataaatctgtttacttcatttgcttgctttaaaattctcagcactgtcctgggttacagaaataaaaagatagataaataaataaataaaatcctcaagtaactcctcacttagaataaaatccaaattccttaccatggcttgcatagacctagaggaattggctttgcccaacctttcaatgttatctcatataacacatgtgtaaggtatgaagtaagaacctaattttatttttcattttattttccttgtgaaaagttaataaaaaggaagcaccttccacagtgtaaatccatttgtcagaaatccacagactaacctcgcctattcagactccattagtctgttttcccattgctaataaacacataccggagactsggtaatttataaagaaaaagaggtttaatggattcacagttccacatggctggggaggcttcacaatcatggtggaaggtaaaaggcacatcctacatggcagcaggcaagagagaatgagagccaagtgaaaggggaaaacccttagaaaaccgtcagatcgtgtgagacttattgactaccatgagaacagtatgggggaaactgccccccgtgattcaattacctcccactggctc

SEQ ID NO: 382231 - DNA, 540 bp, Homo sapiens
gtgtactctttcaatttgagaatttatttttcctcaactttagaaaattattaactgtgattaattaaaattttgcttactggtcatatattagatctaattctggcttctacatcccttaactaatattttaatgctttccacccctttctctctcagtggtacatttctaagtgatttatttagatttactgtccagatgaatcttatcttaactgtatgtggtttactattcaatatttacattcagaatttatatatataaaattatatctaatcatatatatcatatatagttataatatatgatatatatgacatcctatatatactgtataagtaattataatatgtaattacatcatatagaattatgtataatagagttatatataatgtataatcatatataggatatcatatacatcatatgttatcttgtatatattatatatcatatattatatrttatcatatatgatatctatatctcatataatatataaaatatttttgaattaaaaaagttatgtttatatc

SEQ ID NO: 382232 - DNA, 619 bp, Homo sapiens
ggttcttttcaaattttctaattctttttatgcattttttattcctaccttatgaattctgttctttatctttttgaacacttagataaacttattataaattttctttcagactattttgtttatttctagttctaagtatctaaattcttctacttactgaatctgtgattctctccaacaatggttcattctgtgtgatttggataaattcactatgagctcatctttatcctgtcattttgtattgttttggygggaagtcaaatatgctctggactgtgtaagtgtcttacatagcagtttcctagtcagcactgaaaacagggtgtttaattggctcttaatttcttgaccccacacatttttctaacaccattttgaagttttcatttttccccacggacaagccaatggaagacaaaccttgctgcttcccaggtgcggtggatggtgcttttctggtattcatttcagagatggggaagtcttcaggctttagggaagaaacatagtgctggttttctatgcatttaagacatatggataaacagttatccttttgttatctaacacaaaaccaaactgttaagatttcaatatattttcaataaccttt

SEQ ID NO: 382233 - DNA, 545 bp, Homo sapiens
cttggaggctataatatgagtccagttggaagaaaaggtgtcttgtaatagagtggtaacagtggaaatgaagaaaacctcagatttaagatatatttataaattatgattgagatcacttgatggacagatgtgagggtgataaagatagagatatcgaaggtgacattcctgtttctgccctgatgtaaggtggaggtatcattgatgagagaaagaagactgaggaatgggagggagaagcagatgtggaatgggaatgagagaattagtttagttttataataaacttacactaaaaacacttcttacacaataatttgttattccagtgaaggaaagtactttgtagtaaggcatatctttgtgaaaacagatgatccataacaggagagtaactaaagacagcagggacgaagggctaataaggaggccaaggacctaaacagaatattggaacctcctctcccrggcggtgtcctgatgaggtgaagaggtccactcaacttcttttttgatgtagctagaggaacgatattgaaatg

SEQ ID NO: 382234 - DNA, 581 bp, Homo sapiens
gacttcagtgatgaaaaaataaaatttatctttctatactcaaaacctgtggagcaggagacctcacagaaataaaatgtctagttgtttgaaatattctaaatagttttggcagtggagaaacatttccttctcagtggcactccaacatcttcatgctggagtcatcagcktagtcattagcatcttaacttagctgcagatactttgcatgtgaaggagatggagagcatttctgaaggtttttgctggatggtctggctgtgatagagtgttgaatgatagcctgaggcacttcttgtctgattttgtgcatggtcctaattagagaggaacaattctattgccagacaaatgtctgagggattaataagccagttttggctattatcagtgcaaatgagccacctaagtgacaacaggacagaagtgtaggctacattctcctctgcctttgcctgcaaacatgaatttatatgcaggcaaactctttctcagtcttcttaaggaaaccatcatggaatgtgtgcgtttcaaacttcagagttgatttctttccagcctaggagagtatataaagt

SEQ ID NO: 382235 - DNA, 581 bp, Homo sapiens
tcctacctgcccagagctcatggttgtgaggggtctctccttgtggttttgatttgcaattccccagtggttagtgatgttgagcatcttttcgtgtttattgctcatttgcacatattcttgcagaaatgtctgtccaagtcctttacctgtgtttgatttggatgattgttgttgctgagtgttaggagatctgtagattaatatccagatactaatcccatatctgacctatgatttgctgccattccatggattgccttctccccacgttgttagtgccctttgatatgcaatttttttttttttttttgagatggagtctgactctgttgcccaggctggagtgcagtggcatgatcttggctcactgcaacctccgcctccctggttccagcgattttcctgcctcagcctcctgagtagttgggattacaggcacccrccaccacacccagctaatttttgtatttttagtagagacggggtttcactgtgttgactaagttggtctcgaactcctgacctcaagtaatccacccgtctcggcctcccaaagtgccggagttacaggcgtgagt

SEQ ID NO: 382236 - DNA, 627 bp, Homo sapiens
cctctgtaacatcacccaacatataatagtagaacagacacaatataatcaccatatacaatcatattccaaaaataggagaaaaatagaggcatacaggagtcactgctccatggcaattctgtaaagcagccaaggaaattgtagaaggtcctcaattagaactttgttcaactaggaataattctgcatggcctttgtttccactttcttggttatgtcctctgagtcatctgttctataatggaagcacatatgtgtagctgagaagttctctcagtctgctttctgccagtagaactatggagatccagaggcytcttttcatttcatactgtctttgtcccttttagtccaagctggcagtttttattccaatacaattctttgaaaaactttacagatttcctgtgactcttattgggtccatgccatttttcaaaagccaaatctacaaatcaattcaagataagcccttctctaccatgggcttctggtgaagaacaacatcttcagcttcttagaagctttatttgtttgatcaaaagaaactgtagcacacctaagaaaattttagggagccttttgtctagttgaacagtacgctgaggcaacaccttttatctt

SEQ ID NO: 382237 - DNA, 551 bp, Homo sapiens
ccagaacttatgtccttaattattatactgtactgtttctctacattatacagctgattgatgtttataaaaataattttaagttgatgacgtaaatagataccctatatgaactattattgtatttcattagtctttgtgaatgaggatcatagagttttaaagattcaaaggcagttgaaattatccaggtgattttcttgtgttaaaagtaagaaagtaggaaaaccagaaaagtaatattatgtgatttggcccaaactcaaacacctagaacatgttattactgtatctttgtgtgtgtacacacatacacatatacatacatatacacatatatgtaactgatagtttgatataggagcattttagattaatatttcaaatacaggctattttaacataagaaataaaatatatctaggatgatagaattgattttggttgtgtatcagattctattcctatgcactacaatttgttactrctgtgcttgatctttgccaatgaaatatacatgatgtgggcaagatttttagcaatgcttcgta

SEQ ID NO: 382238 - DNA, 633 bp, Homo sapiens
gacttctccaaacccaacaagtttatctgtgttaaccagcaaagggccaaaccacacaaaatatgaaacacatcaagaatttgtggtcgtccttgcacagagactatggtaatcttctttatatcgttctaattttagtataagtgcggccaaagcgagcacaaaaataaatcttctgacattaaaaaatattgagaaatggaaaagtatatactttaattagataaatattaatttttatggtcagctaatatggtcatgtcaacaattatatgaataacatgaactggaagataacctctttatctctctgcattagtatgggcagcaaggtaaaaggggaataaatctgggtggtgagaaggtcccctcacctaacaattcaatttccaggattccttcccatttttatcacggtgaagcaatcaagaactgccaactagccagggacctacagtttatatagtgtacatgttgaaaaataaaggrttgaatggaaattacaggtaacttgtatttatatccttaaaaataattacttgacgttaatagatactgagatctgttagaaattactgaaatagccactagaaaggaaagattcagatagtttagggattaaattaactccat

SEQ ID NO: 382239 - DNA, 570 bp, Homo sapiens
  misc_feature (1)...(570): n = A,T,C or G
aggtagttctttacagcaatgcgagaagggactaatacacataccaaccataaactggagtgtttcactgtttaatataaggccatggatttttcctgtcaataaattcacatgtctrttttcacatgtcacttcattagtaaacttctaatcaagctatttgactccaaggactcaaggttttccactttcataaacacaaaactgtgcagacaatgtgatttatgtgaacacctgttttccttttggaagcctggactctggacacctcacacttctcttagaaattcagtacagaatttccagtacactgagggctgactaaagttaaggtcagtaagtgtaagatgtgggaactcttcatgaaaactatgagatttcatgctatgaataactccatgggggcagcataactattcatgtttgtcatgtgagtgagacacccttcttttgcaattgtgctagggtctacattggcttcactgctaagactcttattttttagtaggatttgtgctgaagcaacatacctgaaagattgnnnnnnnnnnnnnnnnnnnnnnnnnnnnn

SEQ ID NO: 382240 - DNA, 564 bp, Homo sapiens
cattgagctcccacagcaatgtcgtgagctcccggaatggactgcaagccaggatggtgacaggcccactagagtgcgccagtcagcgtgaacggctggcagcgtgtcccaattcatattttagcagcggcaagtgactttttttttttttttttaaagaaaaggcaaaataaagctgaaaatagtacgtgagtctgtagcaatggcaaatctyataatgaaatttatataggctttcagtgtctgtggatttgagaaaatgtatcttttctttttgctcctttgctccatgtccaggcctttatgcttcctgacaacctactgcttatggagtgggctgctgacctgctcctatgagctgaggacaagggtaactgtgggattgggctggagttttttctgtactgatttcatccttaagacaccagcagtttgatgcatgagtatttctgtcttataaaaacaacaatggcaacataatttactgagctcctatcatgtgctagcattgttctaaattcttcaaatgcgtaatccgatttaattaatcttaataggcggagg

SEQ ID NO: 382241 - DNA, 577 bp, Homo sapiens
cttttttacgactaaataatattccattgtgtatatgcagccaaattttctttattcatccactgatagacacaggttaatttcaatattttgtatgttgtgaatagtgctgcagtaaataagggagtgctctttctttataatttaccagttgattttctctttcctcccaaccccgaccaggtcactgcctccctttgagcactagatggtgctttaagcacaggttgtctaggttctagtaaatgtcccaaagggaatatcctgatagagtgggaagactggctagggtgtcatgcccaggaaacctgyaggacaatcctatagcatggtgctgctgaatagccactctgatttggcatctcctttggctgaattacagagcagtttccaggcctaggatggtagtcctgcctcccctctttgtttttggctgtcctcagggctatttctcccttcaggcactcctgttgattcctggggctgaggcaaggacagatcttctgccaggaaacccaagatgatggggaagccagttgtccatcttcacctcactttttgagaaaccatgagtcag

SEQ ID NO: 382242 - DNA, 598 bp, Homo sapiens
ttacgactaaataatattccattgtgtatatgcagccaaattttctttattcatccactgatagacacaggttaatttcaatattttgtatgttgtgaatagtgctgcagtaaataagggagtgctctttctttataatttaccagttgattttctctttcctcccaaccccgaccaggtcactgcctccctttgagcactagatggtgctttaagcacaggttgtctaggttctagtaaatgtcccaaagggaatatcctgatagagtgggaagactggctagggtgtcatgcccaggaaacctgcaggacaatcctatagcatggtgctgctgaatagccactctgatttggcatctcctttggctgaattacagagcagtttccaggcctaggatggtagtcctgcctccccwctttgtttttggctgtcctcagggctatttctcccttcaggcactcctgttgattcctggggctgaggcaaggacagatcttctgccaggaaacccaagatgatggggaagccagttgtccatcttcacctcactttttgagaaaccatgagtcagggaaaaattttctgtgcacttggtgc

SEQ ID NO: 382243 - DNA, 598 bp, Homo sapiens
ttacgactaaataatattccattgtgtatatgcagccaaattttctttattcatccactgatagacacaggttaatttcaatattttgtatgttgtgaatagtgctgcagtaaataagggagtgctctttctttataatttaccagttgattttctctttcctcccaaccccgaccaggtcactgcctccctttgagcactagatggtgctttaagcacaggttgtctaggttctagtaaatgtcccaaagggaatatcctgatagagtgggaagactggctagggtgtcatgcccaggaaacctgcaggacaatcctatagcatggtgctgctgaatagccactctgatttggcatctcctttggctgaattacagagcagtttccaggcctaggatggtagtcctgcctcccctmtttgtttttggctgtcctcagggctatttctcccttcaggcactcctgttgattcctggggctgaggcaaggacagatcttctgccaggaaacccaagatgatggggaagccagttgtccatcttcacctcactttttgagaaaccatgagtcagggaaaaattttctgtgcacttggtgc

SEQ ID NO: 382244 - DNA, 612 bp, Homo sapiens
tttttttctcttggctgcattaattgtagtatttgatctttagttcacatatacagggaaagagagtccagttaatttatagatgttaattacaatcctctgatatgaatttcagttttggtagtgatggaagctcctttaattggagsctttctgtaattgcatggcgagtctctaagtgtggaatggatgagatgagaaaacacaagctaaaaccgtgcaaaaacacttctagcaaattagtgataacatttttataaacataatattattttgatggttccactgaaaactgtgatttatttagaacatagcaccacatgtgttttgctcagtaaagagttgcattttcagcttgtcatcatattcattcaagaaacatgttggtaaaactgattagaaaccccccaacactgcttctttctgtattagtccattttcacactgctataaagacatacctgagactgggtaattcatgaaggaaagaggtttaattgatttgcagcttcacatggctgagatggcctcaggaaacttacaataatgggggaaggggaagcaggcaccttcttcccaaggtggcaggaaagagagagagagaaagtgaag

SEQ ID NO: 382245 - DNA, 602 bp, Homo sapiens
tgatgcactgtatataattgcatgtgctatacgtttaaatgactggcagcacagtaggtttgtttataccagcaccattacaaacacatgagtaatccactgcactacaacrttgtgaagactatgacaacaccagctgataggaatttttcagctccattacaatctatgggaccacagtcatagaggctgtctgtcattggctgaaatgtcattatgcagtgcacggttgtacaggattggcttatcatttttaaagattgcaaacattttacaggaatactctaaaattgagaatttaggatgaaaatagttgaaattctatagtgttctcagttcaccagtgtttttttagagaactaggatcaaataaggcttcaagggtcagaaatctcaattttgactgagtaatggctccagaacagcaagttgtggtgtcacaggagaggcgttaaaaacacaatcacattaacctaccgaagaggcagtttgactgccttcctgtcacagagccttagaaagttatcatgcttagagtgaagtttcagagtttctgaggacgggtctgtctcatgtagcactcagggttgctgctctccaca

SEQ ID NO: 382246 - DNA, 574 bp, Homo sapiens
aaataccactgtgtttctttgttaaggaaaagatttgaaacagaaaaacagacaactcaacttctaattaatgcaggttctttcaaatgacttagaagataatattttgaaacttttctagactttgcttttctcagatgtacaaaggaaagataacactcagaatagtttcaaagaagagtcacacacaaaaaaatgacagtagttagggaactctaaattctaagaattctaagaaatgtgactgtctgcccctgaagagctccaggcctctgcacacgttactccactaacactttcccaacaattatattcaccaccagcaaaactgatgactataacaaccgtattagaaagacagatattgattcactagaaatatgyactattagagttcactctcattttaacataccaattcatattcatatttcatcactgctttcctggagtaatttttccaaaagattaaacacaaaaattttttctggggccttaaaatagcacataacgtgatcccattgtttaccacctactttccacactcatcatttaaccttaaaatcacatgaca

SEQ ID NO: 382247 - DNA, 560 bp, Homo sapiens
tatttatatgtcattgtatcccgaaatagtgtgtgtgtaaaacagttttgctgccacacaaaacaacgccaatatttccagtagcttgtggcaacacacatgtctttccttatttcatgtgaaggctgkgggtaggctgcagcttttcttggttctactgtgtacagctaggctcagctaggcttgcttccatttcaggactgaagaagaaaaaacattgcttctctagaagaaactgttcatacgggaaaggggaggaatacaagggtgacagagccaaacaaggaaatctcatttaagaattatgatcagttgtgacagtcacatcttctcaagttccactggccaaagcatgtcatgtgctcaagtgcaaagtcaaagagtcaaatagaatatacagatgctccttgacttacaatgggtttatgtcttgataaatccattgcaagttgaaaatatttttagtcaaaagtgcatttaatacacctaatctaccaaacatcatagctaaacctagcttaaccttaaacatgatcagaacatttttacattagcctata

SEQ ID NO: 382248 - DNA, 541 bp, Homo sapiens
ttgccactgctaactccattggcaccctccaccacccctcccactcggcactgctaactccattgcctccctcccacacccctcccacttggcactgtccactcatggcacagggaaaaacagacatgagtgaggctgggaagacaaaaccttayattcttctcccttggtgaggtaaaacagcttttgggataagttatctcatggagggaattcacaccaaaatatgtgtgatatctaaataattctgttgcctttttacctgagttgctaaggctgaatatcattagtggctaggagcttgtgttctggagcaaaacagactgggtttaaactcctggtgccttttttagctgtttgactttgggtttgttacttaacttttctaaacctcagcttgaaattttgtgaatttacttgaagagtggtacctgcttcatgggttgtcataagaatttaaaaggtgatgtttcaaagtgtttagcacaatggtggcacagagtaaacacctgataaatatcatatgttattttccaaagga

SEQ ID NO: 382249 - DNA, 601 bp, Homo sapiens
ggacggtgcctgctcatgctggtgagggtggttctttttcacccaatctactaatttgaatgctagtctcttctggaaacaccctcacagagacacttagaaatgttttaccagctatctgggtatttgttaacccagtcaaactgacacataacattaaccatcataacagtatttctcattattatttgaccgcatcatgtctctgacatcctcactccaaaaaaagagaaccttctgcaacattctttttgcaagacactctaagggtaatttaaaatggaaaccaacacaaaagaaatgcatgaaaacktagagggcacactaatgactggatgtattatacaagtctaccaactaagtaaacaaatacaaactcaactccatggaagttgatagagaacatgttgtagagtggcaaattaagtcatgatgagattgagtagagccaagggatactaacttcatttcatgtggctttaacaataaacagcaatgttatcagatttccaatgacacagggaggtgttttttttgttgttgtttgtaggattatgttcttcatattcttggtgataatggttgttcatattttatgtct

SEQ ID NO: 382250 - DNA, 602 bp, Homo sapiens
tgggagctgtttcagttggctcctctgttcctctgaaatatcctcaatgttatgttgcctccatccccaaaatccataacttggtctaagtataagaaattagacaaatcctaactgacggacactctgcaaaactcctcaataatgtcaacatcatcaaaaccaaggaaactttgagaaattatcagtctagaggaacctaaggagatatgaggactaaagataatgtggtttcctgaatgtaattctggaacagaaaagggacataaagtaaaaactaaggaaagctgagtaaagtacaaactttaggtaattatagcgtaacaatatttattagttgtgacaaatacaccacactaaactgagatactagtaatagcagaaaatggtgtgggttatggaaactgctgtctttgcaacttttctktaaatctaaagctattttaaaataaaaactttactgaataagaaaaagattataaattataaccagaaaaactttaggaacaaatgagagagtaaacacactgaagactttgtggatgatgagggactctaaattttttagtagaaaattaaaaaaatgctaataattcagttcc

SEQ ID NO: 382251 - DNA, 576 bp, Homo sapiens
gttcaaaattgcctttcttcacagcatttgatctttttttaaaccacaattctatattttctttcagattattgttcaaatattctaagattttcagactctaaacctatttgtgtgtctgctgattttccttcatggagcattatcttatcagtgtgtatgtgtgtggtggtggtgggaggggatgtttaaatttgtgtgtgctgctgtaaaaacttttctaatttctaatttttagcagggattgattttttctgagggaaatctgtttatatctattcagtataatggcaactggaggtttgtatagatgtccttcaaattgaagttgttctctattactcctagattcctaactgttttaaaagtcatgaatgtaagtattgaaacttaayaaatatttttctgcaactattaagaagagtatataatttttctcctttattccattaatatggtgaagtatacaaattgatttttaaatgataaagttttacatttttaggataaattctacttactcatattgtactttcctttttagtgtgtttttggatttgatttaataatgttttt

SEQ ID NO: 382252 - DNA, 566 bp, Homo sapiens
tttgtttatatagattgagtaatacaggcacatatgcccttctcccttgatattgggaataacatgcatggaagtgctgatttttaaaaagcatcttaaaatatataaatttaagaagccatgataatgattctcaacaaacagaaatcagaattattgactagagatgtagcatcggcaaactgaaagggttgttgggtgagaactggtgagcactggcaaaatcaataaaatagttttctttctttaaaataatgtacatggtattccagattttaacatatgtgacaactaagtcactaaataaagcaacagaccatatataaaaatccatttgattgggaggcctaagcgggcagatctcgaggtcaagagattgagaccatcctggccaacatggtgaaactccgtttctactaaaaatacaaaaattagctgggcwtggtggcacatggctgtatttccagctacttgggaggctgaggcagaagaatcggttgaactcgggatgcggaggttacagtgagctgagatgggccactccactccagcctggtgacagagtg

SEQ ID NO: 382253 - DNA, 475 bp, Homo sapiens
ggcgggcacctaagttacttccatatttttgttattgtgaatactgctgtgatgaacaygaaaatgaaggtgtctctttggtagaactatttatattcctttgggtagatacccagtcatgggattgctgggtaaaatagtagttctgttttaccttctttgagaaatctccaaactgctttccatagtggccaaactaatttacatccccgccaacagtgtataagcattcccctttctctgcagtctctcccacatctgttgtttttcctgttttcttttttttttccttctaacttatattttatgtttgtagggggagttgacgtgcaggtttgttacatggataagttgcatgtcattggggtttggtgtaccaatgatttcatcacccagacggtaactatagttcccaataagaagttttttgatattcgtccaccttccactgtctaccttcaagtaggtcccagtg

SEQ ID NO: 382254 - DNA, 614 bp, Homo sapiens
gtagaactattagccaattaaatttcttttcttttctttctttctttctttcgttcttctttccttttttttttttttaacagggtcttattttgtcacccaggctggaatgcagtggtgccatcatarctcactgcagcctagacctaccttgctcaggtgattctcccatctcagcctcctgagtagctgagactacaggcttgagtcaccatgcctggcatttttttttttttccattttttgtagaggtggggtttggccatttgcccaggctggtcctcaagctcttgggctcaagcaatctaccagccttgacctcctaaagtgctgggactacaagcatgagccactgagcccagacaaatctcttttctttataaattacccagtctcaggtatttctttgtagcaatgcaagaatgacctaacagagtgtgtaaagaggattttattgattttatgcctgaaagtcattcctcctctggtctttggtgtctcaataaatagccccacaatctatccagattctcaaagttgcaacccgggggtcaaatgtaatttgtatgtgccctcatatttgatctatcagcaaatcttgctgctcctacccc

SEQ ID NO: 382255 - DNA, 614 bp, Homo sapiens
gtagaactattagccaattaaatttcttttcttttctttctttctttctttcgttcttctttccttttttttttttttaacagggtcttattttgtcacccaggctggaatgcagtggtgccatcataactcactgcagcctagacctaccttgctcaggtgattctcccatctcagcctcctgagtagctgagactacaggcttgagtcaccatgcctggcatttttttttttttccattttttgtagaggtggggtttggccatttgcccaggctggtcctcaagctcttgggctcaagcaatctaccagccttgacctcctaaagtgctgggactacaagcatgagccactgagcccagacaaatctcttttctttataaattacccagtctcaggtatttctttgtagcaatgcaagaatgacctaacagagtgtgtaaagaggattttattgattttatgcctgaaagtcattcctcctmtggtctttggtgtctcaataaatagccccacaatctatccagattctcaaagttgcaacccgggggtcaaatgtaatttgtatgtgccctcatatttgatctatcagcaaatcttgctgctcctacccc

SEQ ID NO: 382256 - DNA, 614 bp, Homo sapiens
gtagaactattagccaattaaatttcttttcttttctttctttctttctttcgttcttctttccttttttttttttttaacagggtcttattttgtcacccaggctggaatgcagtggtgccatcataactcactgcagcctagacctaccttgctcaggtgattctcccatctcagcctcctgagtagctgagactacaggcttgagtcaccatgcctggcatttttttttttttccattttttgtagaggtggggtttggccatttgcccaggctggtcctcaagctcttgggctcaagcaatctaccagccttgacctcctaaagtgctgggactacaagcatgagccactgagcccagacaaatctcttttctttataaattacccagtctcaggtatttctttgtagcaatgcaagaatgacctaacagagtgtgtaaagaggattttattgattttatgcctgaaagtcattcctcctctggtctttggtgtctcaataaatagccccacaatctatccagattctcaaagttgcaaccygggggtcaaatgtaatttgtatgtgccctcatatttgatctatcagcaaatcttgctgctcctacccc

SEQ ID NO: 382257 - DNA, 578 bp, Homo sapiens
ccttgttaggcaggagagtcatacttaagatgaagatgtgaggacagagcagagcaatgtggggccacaagctaaggaatgcatgtagcacctagaagctggaaaaggaaaggaaatgaattttctccttgagcctccaggagacactcagccctgccaacccattttagatttctgacctctacractgtaagacaataaatttgtattgcttttaaaccactaaatttgtgataatttattacagcagcaataagaaactaacataagctctgagactcatctctaaaatctgtcttatttacctatttgtttgtttgcctttgttgctactattgtctctgcaaactaaaattaaagttatgtaatggaagaggctatatctctgttgtccactgttttatttccaggatcaagaacaaagcctgacacagagtaggctttaaataaatatttgttgagtcagtgagtagatgaacacagatttctatccagtggggtaattgtgcagaccaaacatgcaaatataaattatagactatttcaacaactgagcagaagtcattcctcctattctc

SEQ ID NO: 382258 - DNA, 623 bp, Homo sapiens
aattcttatattctgacactttaaattataattgtcaaagaataatttttccagacattttagtcagcagtatcagacttcctagagatttattcacaaaatttctaggtagatcaatgatctgtagttaatctacagagtaacaggattagattgaacagcacttccaggtctttcccacatagttttgtcctggagactagccatgaaatcaaggaatttcagagtgtatatgtggcgagggaggcrgtgggtagtagggagtctgtggatactattatcgtccccattttacagatgcatgccaacaataaagtcaagagaagtttaataacttttcaagaatacacaactaatgtatggttaggctgagaagtgagtgtaagcaattcagatccagacactgctgcggtagatatctctcacactctttgaagtagaggagactagaattaaaaagctcagtagttgtatcttgctgcaaatttaacgtgagttaacaagtggccaacaaaacagtttaaataatagctttgctagtaagaatatatctatttatattaataattactgcaaaccaattactccaaaacttaataaacacactatcaacacacatttat

SEQ ID NO: 382259 - DNA, 512 bp, Homo sapiens
tctattccaaagcaaactccaaagtactagtccccaaagatacatttaagtagttattcagtggttaatctccccctaagattttctttagtctctgacatagacagctgagatatctaaaatagkaggtatccttgtctgatctcagacaagagataggagctaaggatcacataaatgctaaacgtcatactcagccacatttgttcaagatagggtgcaccctgaggacctttccagtaatacttttattcttaatgtacagcagggcagctagaagtaaaggggaaaaaatttctttgatggagagaaatgttaagaagtctgagaacaggataaaacaaaatatctctggagatgggataaatgaagggcacacaaagcctataatttttaaaaaaagaaaaaaaagaaagaaagaaaaagaaaagactgctgtgaccttccagagacaaatgagaagtcagggaagtagagtaagatatcaactcaggtgaaatgagtctgcaaaa

SEQ ID NO: 382260 - DNA, 512 bp, Homo sapiens
tctattccaaagcaaactccaaagtactagtccccaaagatacatttaagtagttattcagtggttaatctccccctaagattttctttagtctctgacatagacagctgagatatctaaaataggaggtatccttgtctgatctcagacaagagataggagctaaggatcacataaatgctaaacgtcatactcagccacatttgttcaagatagggtgcaccctgaggacctttccagtaatacttttattcttaatgtacagcagggcagctagaagtaaaggggaaaaaatttctttgatggagagaaatgttaagaagtctgagaacaggataaaacaaaatatctctggagatgggataaatgaagggcasacaaagcctataatttttaaaaaaagaaaaaaaagaaagaaagaaaaagaaaagactgctgtgaccttccagagacaaatgagaagtcagggaagtagagtaagatatcaactcaggtgaaatgagtctgcaaaa

SEQ ID NO: 382261 - DNA, 576 bp, Homo sapiens
actaaacttaatgaagcagattaattatcaagagaaagaatagactacattgtggaagatcattcattgtcctcctggacatgccatcactgagacagagatgaagagtcagagcacttgagaaaggtggggatctggggcagggatcttcctgtgaatgatgagtgaagaatgatggrtcagacacataaatggtgagtgaaggaggaaaggtttaatgagtttttatttcaccattattctagtcattacaactcctctctagacctaccaagaggtctgctatgaattgacaatgagggtggaaggagtttcctaaaagtgatgggctggggagaagacaggcatacaggaaagggaaagcccatgtggcagaactcaaggaaagaggtttcaatctgggctgagaaggtctctcctacataagaaatgtatgtcagtggagagatctaaaaataatcttaatttttatgacacactattttgaattatccattagtgcctttccaataataaaaggctgattgcaaaattcaagaaagggagttttttaaatatttaaatgcactgaatggc

SEQ ID NO: 382262 - DNA, 560 bp, Homo sapiens
ttccaataccataatttcagtattatgattgcacatttgtgactgttttaatttttyaaagactagcttgaattcattattgtgtccaatttcacttcaaaactcagggctttccttgtccttgattttggtgttgtaacagtcacaaataaattttttgctttactcacaggcaacatgaggagagggagaaagatcttcctttaaaataagttggaagaggaaggcaaaaagctaaagaaagcattaagatttatatggctgagaaagtggaatttaatgaattaagaactaaaaaagaagaaaatgggagggtccagcataggtaaaatcagtttaagcagaaagaaaaggagtgatgcagaaaattctgggtcaagaaggttcttgggcagaactctcccagaagtgtcgttcccttaaaacaatttggttatttgaaaaattaaatggtagtggtaggtgattagcccaggaataaggaatgaaaaaatgtgacaatatgtggtatatccattggattgagtgtctagcccaaggtttgaatcgtgacacaattc

SEQ ID NO: 382263 - DNA, 537 bp, Homo sapiens
tgactgttttaattttttaaagactagcttgaattcattattgtgtccaatttcacttcaaaactcagggctttccttgtccttgattttggtgttgtaacagtcacaaataaattttttgctttactcacaggcaacatgaggagagggagaaagatcttcctttaaaataagttggaagaggaaggcaaaaagctaaagaaagcattaagatttatatggctgagaaagtggaatttaatgaattaagaactaaaaaagaagaaaatgggagggtccagcataggtaaaatcagtttaagcagaaagaaaaggagtgatgcagaaaattctgggtcaagaaggttcttgggcagaactctcccagaagtgycgttcccttaaaacaatttggttatttgaaaaattaaatggtagtggtaggtgattagcccaggaataaggaatgaaaaaatgtgacaatatgtggtatatccattggattgagtgtctagcccaaggtttgaatcgtgacacaattcccccagcaagcctgcc

SEQ ID NO: 382264 - DNA, 591 bp, Homo sapiens
taaaacttcatctgggagtaatgcctgtgaaaggtaaaaggggaggaaagagaactggtcaggggaagccttcaaagtgtgatgcagatttgatgcccatgaaaggaaaaaaggaggaagctagaaggcgttcaatgaagccaacttaccaaaaagtggccagctgtcctttgagatttagggagtcagtgttaacctctgctgtagacaggtacaggaactcagaagcagtaattgctgaccagccttgctaagggggaatcccaccatgcattacatcmttctctgccatggaggctcctctgttcatggacccatcatgccagtgctgggatagccaacaacaaaattgtctaatatctattggccaagtaatttcctctactagcttgtgtaattctttgcagatggatgatttctgatgtgtgcttacatatgatacaaagatattcacactccgtattcattttcaatgttcatccacctcaaaaaccactttgtagacttgccacacctcttccccatgccttcatgtctctggtcttccaatcttttccctccaaggcccccaaccagccagacaattcattc

SEQ ID NO: 382265 - DNA, 578 bp, Homo sapiens
tataaaactcagaaatattactctaaactttccctgttgttctgtcttagacctggtcataaagaaattctctgacctgccttgtctgataataggtcataagactctcaatctagaagggtcctgccacatacctgggaggaaggactactacacagagaggccaagaagaattggaacaaacaggtctttctgttcagatttccccattagtctattatcatcataccyttttgtccaattccatttctacctggctgtctattcttcattgaacctgagcataaaaatggacagttttccctgaatatttaggtcttcatttctaaatgttcccgtgtcatgtaaaacctagattaaatacatttgttatgcttttctcttgttaacctgtcttgttataggagtgtgggccatgactcttatgataggtgagtaaaggtatcatacttttctgcccctaaaggaaaagtgaatgaacagtggtttgtaagattttccctcaccactatcttctaaggccacagttgagtgtgattgtgattcatctgattgttcatttttggtttacacccaca

SEQ ID NO: 382266 - DNA, 423 bp, Homo sapiens
ataaagagtctgctcatttaaaacaagcagcctgttcattaattccttacaactgaatctctgtaatacccattgtattcttgcatgtgcaataagaagtatcagcaactgcacagaaacttttgtttagccagaaagtaatctaaaacaattctattatattatttagcacaactttagagagaatttgaagtctgttgcataaacatagcatttacactagaatctgctattgagcctattatgagagatacatttctaattattgcctcatttactccaaatcatgaagaaagagacctaataaatgatactcatctggaagagtgaaggcctcctggcaattttctctgtaacttatgatgtgggttaagaggwgtggatcagtgttctgtttctgactgattataaagcagcaaaggt

SEQ ID NO: 382267 - DNA, 602 bp, Homo sapiens
attgcatcatctgcagcctgtatmgatgactttagtaactagctggatatagggagatagtgctttagtcctggtatataagcaaaaaacccattctagaaagcacagccctggggctatctgtcctattaatcctgttggggaatgtttagtagaaaaaacaaataattggactgaatgtcgtgggtctaagcgatctagtttcctctgagaaatagcttgctctgtttcctcaatttccctctttgctgcatgggttaaatacctgggggagcctagggtcatattgccctttaggatagaaaacaagttgtgtaacttatcagtagttatgcctaagttggggcaaagccagttagtatcaccttgtaatttttgataatcatttaaggtatgtaagatgttagtatttaatttaaccttctggggtcttactgaccagggagttagtaggcatccaagatatttccaaggagaggacatctgtactttttcaggtgctatgattaaacttcttaactgtgtattctttttgacagagtcatataaatttaaaaatattggctctgttggagctgccagtaatatatcatccataaaat

SEQ ID NO: 382268 - DNA, 602 bp, Homo sapiens
attgcatcatctgcagcctgtatagatgactttagtaactagctggatatagggagatagtgctttagtcctggtatataagcaaaaaacccattctagaaagcacagccctggggctatctgtcctattaatcctgttggggaatgtttagtagaaaaaacaaataattggactgaatgtcgtgggtctaagcgatctagtttcctctgagaaatagcttgctctgtttcctcaatttccctctttgctgcatgggttaaatacctgggggagcctagggtcatattgccctttaggatagaaaacaagttgtgtaacttatcagtagttatgcctaagttggggcaaagccagttagtatcaccttgtaatttttgataatcatttaaggtatgtaagatgttagtatttaatttaaccttctggggtcttactgaccagggagttagtaggcatccaagatatttccaaggagaggacatctgtactttttcaggtgctatgattaaacttcttaactgtgtattctttttgacagagtcatataaatttaaaaatattggctctgttggagctgycagtaatatatcatccataaaat

SEQ ID NO: 382269 - DNA, 490 bp, Homo sapiens
tcaagaaggcttacgtcttttcttacagcttctccaccaccctgaccaatcccctacactctacataatttctcacyacagatagtatgcacagaatgtgtgaaggccacatagctagatgtgtacctgaggaatgcactaaaaacattcatatttgtcttactttttgttttctttttcaagtgccagttacaaaaccattttctgtcaatcatctgagctctaatctctgagaacttaactccttgataataaaaaattactatatcctaagacacaatcttataacatttcaatttctttgctaaaatcctcaggtgccacagtcacagatatggtttgaattagtctgaagctcttcaggagattgtaatctgcagccaagttgcaaactaaggtgctaacaccttaatttccaactaattccttccttaacagatatttatgcacaccagaaaaatgtgactcgggattgtatctaatgagtcct

SEQ ID NO: 382270 - DNA, 490 bp, Homo sapiens
tcaagaaggcttacgtcttttcttacagcttctccaccaccctgaccaatcccctacactctacataatttctcactacagawagtatgcacagaatgtgtgaaggccacatagctagatgtgtacctgaggaatgcactaaaaacattcatatttgtcttactttttgttttctttttcaagtgccagttacaaaaccattttctgtcaatcatctgagctctaatctctgagaacttaactccttgataataaaaaattactatatcctaagacacaatcttataacatttcaatttctttgctaaaatcctcaggtgccacagtcacagatatggtttgaattagtctgaagctcttcaggagattgtaatctgcagccaagttgcaaactaaggtgctaacaccttaatttccaactaattccttccttaacagatatttatgcacaccagaaaaatgtgactcgggattgtatctaatgagtcct

SEQ ID NO: 382271 - DNA, 442 bp, Homo sapiens
gagaccaggtagaacattatcgcccaagttcaggattaaggcaaccggggcttgtactatggcagtgaccatgggaacggagaagaaaagagaagctggatccaagtcyaggggccaagtttatgaggctaaattgtgacaggatttaaggaaagaggaagaaccacatctagaatgacacctaggctattgggtgctggaaaaggaatacaggacagtgggaaggggggcggtagggagcagttttggggaaaggtatgccggatgatttgagattggaatgttttgagttcaagcttcctgttgtacgcttaagttaaagtgcagaagagaagtcaatgctgaataaatatatctaggagtcgtcaggttactaaaataaagagaacaaatgagatctcccagggagaacacagggaatggaaaggaaggcaaagaggct

SEQ ID NO: 382272 - DNA, 591 bp, Homo sapiens
tggaatgtgcaggttagttacatggtatacacgtgctatggtggtatgctgcacccatcaaccgctcatctacattaggtatttctcctaatgctatccctcccctagctccccaccccctgacaggcccrggtgtgtgatgttcccttccctgtgtccaagtgttctcattgttcaattcccaactatgagtgagaacatgtggtgtttggttttctgttcctgtgttagtttgctgagaatgatggtttccagcttcacccatgtccctgcaaaggacgtgaactcatccttttttatggctgcatagtattccatgatgtatatgtgtgaggccacattctctaaatttattttaacagaggagacctctttctcactgagagtacaaaaatataccgtagacttaactacttgttagaatactacactgaattatacatataacacctcacatcttcataatgaccttgtaataaatacattattatttcaatttttcagatgagggaactgactgtcagaaatatttacctctccaaaggctgtgtatgagtaagttgctcattagggattttattccagttctat

SEQ ID NO: 382273 - DNA, 591 bp, Homo sapiens
tggaatgtgcaggttagttacatggtatacacgtgctatggtggtatgctgcacccatcaaccgctcatctacattaggtatttctcctaatgctatccctcccctagctccccaccccctgacaggcccaggtgtgtgatgttcccttccctgtgtccaagtgttctcattgttcaattcccaactatgagtgagaacatgtggtgtttggttttctgttcctgtgttagtttgctgagaatgatggtttccagcttcacccatgtccctgcaaaggacgtgaactcatccttttttatggctgcatagtattccatgatgtatatgtgtgaggccacattctctaaatttattttaacagaggagacctctttctcactgagagtacaaaaatataccgtagacttaactacttgttagaatactacactgaattatacatataacacctcacatcttcataatgaccttgtaataaatacattattatttcartttttcagatgagggaactgactgtcagaaatatttacctctccaaaggctgtgtatgagtaagttgctcattagggattttattccagttctat

SEQ ID NO: 382274 - DNA, 429 bp, Homo sapiens
agaaatatttacctctccaaaggctgtgtatgagtaagttgctcattarggattttattccagttctataagattctaatgtctttgctttgcttgcatgcttaaaatatttatttcccctatctaagacctcaaatgaagaaaattcagttttaagagttattattgcctcaactttttggatgtcttggacatgtgaaagcagcatgctgaggagaaaagagcacctgcttggtgtcaggaaatcttaggctggatggaaacctctgctactgacagctaaggttgcctgtgaaagttgcttaatctctctgagcctattttctttcctatgaaatggatattcataatatgagcagcttattaactgctttccccagcatatatattcaactccatatttcattctaataaagtggacaaaacaaa

SEQ ID NO: 382275 - DNA, 576 bp, Homo sapiens
gaatgaataaataaaattgcagtgtatttatacartgaacaaactatgacaaactacaacaacatggatgaatctgaatcccacaaacagaatgttgagtgaaataagccagacaccgaataatacatagattaatgtgccatttctataaaacttaaaaacaggcaaaactaatacatgattttagaagctggggtaatgatttcctttgcagcgaggtagtgagtgggaagggccatgagaggtggttctcaaagggctggttgtatttcctgagctgggtaccggctacatgggggtgttccttttgtgaaaactcattaagttctaaacttacaatttgtatacttttctgtgtatatgttatgatttagtaaatagtttttatttaactactgaaataaaaattatggatacattctgtgttcttatctaaggacatctgtttttactattctcacgttttgggaaaattgtttttattttccaagctaaacttatggaagtttatattctatattcaaatctaaatttggcttagtgtcaagcaacattatgggtgccagatttgaaata

SEQ ID NO: 382276 - DNA, 558 bp, Homo sapiens
acaaaaggtggattgcaaacactacagcaaaaggccaagatgaaatgcctaaataagagcattcttgtgaagggcatgcaaccctgggcagttggttctacccagccttgatgtcattagaggtcaacattgcccatttgaggcaagttccagtctgattttatcttggagccagaatactgggaagttcactccttgtgacatgggaaggggtctgtgaacttttataatgtatacatgtttgatgtgtgtgtgtgtgcacatgtgcatgtgtgtatgtgtgtgtgtttgtatgtgtgtaaggaggaaggagtattatgttccacttcaaggatcataaacgtccatgtgaacatctacttgccatgtcagataagaygtaagaattaaatatcacttttaacaaataaaatatgataaaatattttctaaaaaattccccagatattaagtatacacttttgtcctctctagccatgattctatttctaattcactaataaatatttttgaatacatggttcatattctctgtcactgtttcctctcttcctcatc

SEQ ID NO: 382277 - DNA, 637 bp, Homo sapiens
cccttggctaggtccttacccttagtaagccccagcaaatgtyagtcattattttaatactttattacatgtctttttaccctactacaatagtgtgcctggggattggggctgggctgggcttgattttaaagttatagaataatattggaggctctaagctaaaattcttacatacaataccataatttctgaaaagacttcacagctaatatagtttatatcaatcattttacaccaagatatacatattgttgtcactgaaaattattccctaataaattttttaccatttatatttgagcaactttattgcaatataattcaataaacttttattcatcatgttctctgtgccaagcactgcactaagaactggaaatacaaagatctgaaacacagtctggctttaagttgcttggaacccagaagtaacaacaaactgcaaacagcaggggaaaaatgaaaaaattagaagatacgttcaaaaaggttatcctataactcaattatgcaaagattaataagatgaaagaaaagggacatgaaaagcagttccaggaaatgatatgtatattagaaattccagaagaaaataaagcaaacgtacaaaaagctaacataaactacagaaaac

SEQ ID NO: 382278 - DNA, 637 bp, Homo sapiens
cccttggctaggtccttacccttagtaagccccagcaaatgtcagtcattattttaatactttattacatgtctttttaccctactacaatagtgtgcctggggattggggctgggctgggcttgattttaaagttatagaataatattggaggctctaagctaaaattcttacatacaataccataatttctgaaaagacttcacagctaatatagtttatatcartcattttacaccaagatatacatattgttgtcactgaaaattattccctaataaattttttaccatttatatttgagcaactttattgcaatataattcaataaacttttattcatcatgttctctgtgccaagcactgcactaagaactggaaatacaaagatctgaaacacagtctggctttaagttgcttggaacccagaagtaacaacaaactgcaaacagcaggggaaaaatgaaaaaattagaagatacgttcaaaaaggttatcctataactcaattatgcaaagattaataagatgaaagaaaagggacatgaaaagcagttccaggaaatgatatgtatattagaaattccagaagaaaataaagcaaacgtacaaaaagctaacataaactacagaaaac

SEQ ID NO: 382279 - DNA, 613 bp, Homo sapiens
accattttgacctttccttgagctgtctctgtttcttctaaagtcagtttttctgtttatttatcctagtccttctgtttctgttactcattttttacaaatatttggtaatttatgtttgccaattcatattcatgaatgaatttatcattgatttgcatagctatgtagttggttagggtttttttctgtatttatcatttattgcaattttgaatggaaaaagctttcctgttacactttcttaatggtaattgcttaaagtatagaatcttggcaattttttgatagttctcttatatccagataattttctcaactatgttattacatctactacttttcccattgattttcttaataaattatcattcttcaattcataacttttttctttctggctattttaccttttattcctgtttcacatctcattgttttgatatttaagtgcctgtgtccaagattctgcattatatgtgatagacttaagcrataatatggaataataaattataacaataattttatatataggtcactgtaatgttagtcttgttataaaatatctgacaacaacaaaatgtgtcaattgtttttcaggcagagtaaa

SEQ ID NO: 382280 - DNA, 531 bp, Homo sapiens
gttgggagaagagaccagcaataattctgttttaccttcaaggaggggcatatccgtgtgcatggatggagtcaagcttcaccataatcctctttaaagataagtgatgttgagaacttgaagaaatctggaaaatataagctagtgaaattcagaatgtatttkatagtactcatacacacagagggagctgtactgtatgaagaataatctgcaatctgcttttatactttctttttttttttcttgagatggaatctcactctgttgcccaggctggagtgcagtggcatgatctcggcttactgcaacctccgcctcccgtgttcaagtgattcccttgcctcagccttccaagtagctgggattacaggcacctgccaccacactcagctaatttttgtattttaagtagatatgggatttcactgtgttggctaggctggtctcaaactcttgacctcgtgatctgcccgcctcagcctctcaaagtgctgggattacaagcatgagccaccatgcccggcctta

SEQ ID NO: 382281 - DNA, 531 bp, Homo sapiens
gttgggagaagagaccagcaataattctgttttaccttcaaggaggggcatatccgtgtgcatggatggagtcaagcttcaccataatcctctttaaagataagtgatgttgagaacttgaagaaatctggaaaatataagctagtgaaattcagaatgtatttgatagtactcatacacacagagggagctgtactgtatgaagaataatctgcaatctgcttttatactttctttttttttttcttgagatggaatctcactctgttgcccaggctggagtgcagtggcatgatctcggcttactgcaacctccgcctcccgtgttcaagtgattcccytgcctcagccttccaagtagctgggattacaggcacctgccaccacactcagctaatttttgtattttaagtagatatgggatttcactgtgttggctaggctggtctcaaactcttgacctcgtgatctgcccgcctcagcctctcaaagtgctgggattacaagcatgagccaccatgcccggcctta

SEQ ID NO: 382282 - DNA, 574 bp, Homo sapiens
aatatcagttctcaagggaacttatagagtgagaactcactgactacagtgaggatggcaccaagccattcatgagggawccaatctcatgactcaaatgcctcactataggaccaacattggggataaaattttatgaggcttggggtacaaacatagaaagtgtagcagctggtttttttatttaggatggtcagggaaagtctttctgattaggtgaagtttgggcagaggcccaaggaagaaagggcacaagtcaaatgggattatctaagggaagatttttctaggcagagggaacagcaaatgcaaaaagcctgtaatgaaggaaagacttagagtatttgagaaacagaaaggaaatcagggagatcagaggcagatgtggggctagggaagtagactggaagcagagaaatgggaggccgttacagtggcccagtggagacaacaaagtgggcaaggaggggacaactgtgagaaattgattttgcagaggaggccagagccagatcatttgctctgagtgaaaaggaaaggccactgaaagtttctgaacagaggattgatctaa

SEQ ID NO: 382283 - DNA, 574 bp, Homo sapiens
aatatcagttctcaagggaacttatagagtgagaactcactgactacagtgaggatggcaccaagccattcatgagggaaccaatctcatgactcaaatgcctcactataggaccaacattggggataaaattttatgaggcttggggtacaaacatagaaagtgtagcagctggtttttttatttaggatggtcagggaaagtctttctgattaggtgaagtttgggcagaggcccaaggaagaaagggcacaagtcaaatgggattatctaagggaagatttttctaggcagagggaacagcaaatgcaaaaagcctgtaatgaaggaaagacttagagtatttgagaaacagaaaggaaatcagrgagatcagaggcagatgtggggctagggaagtagactggaagcagagaaatgggaggccgttacagtggcccagtggagacaacaaagtgggcaaggaggggacaactgtgagaaattgattttgcagaggaggccagagccagatcatttgctctgagtgaaaaggaaaggccactgaaagtttctgaacagaggattgatctaa

SEQ ID NO: 382284 - DNA, 577 bp, Homo sapiens
aaatataatagcttagcgtccctaaatttccataccctttctcaaagggtctgctctcacagctctgtctgagcagcacatatgtcctttccttctgaaccaataagatgcttggatcctggaatttggacctgaaacccagagaatgtcctcagtctcagatgggtaatatcagggcaatggggtggctatatcagaattcagttgtgtgtatgtggagatactgagcaggaaaagtcagctgaagttggagagagasagaaacagagagaatgaaagaaagagggaatagaaatgaggcatagagaaaactgggccagcctgagaaggaaccagactgctctatgcgtagtaaaaaataatgggtaaaatgaggtggcagataatgaagtctttcacctatagtccctcataaaattggtgaattcaggatggattcttcttgcatgaaagtgaacagcatttactctgtgaatgcagacctatttttgaagagtacaatgtgctgatgcatcacaatttgtctttgaagatttacacctctttttttttttgaatgatttaaaacttgtctgca

SEQ ID NO: 382285 - DNA, 563 bp, Homo sapiens
tcccctgtatgtgagactatttgcctttcctccaaaagccaagaccaaagatgtcactgtgggcaggcaagacacatttactaaagtttattttttctattgcaaagtaaaaaccaggatgtggaggctgatggagtgtggaccaaataaaaaatcagtggaattggtttccttcccgaaagcataagtttacaggtgtgcttggaagttgtaacaagatacctggtgggaattccaatgcacttcctcttttggaagagtaaaggagagaattaattctggctcctaagatcaggactgagactcttatcagaacatgactttttgtgagtgctctctaattccagkctgaacactgccaaacaccagatgttcagagtggtaaaccgttggagttctctgcaaaatctgttcatctaattgcacttgggtggtggttgtcgctgctgctctcctgctcccaccccaataccatgtggtttttttttttaaggttaaagttcagccctagctaaagctgcattcagagagtgggagtcaatgtctggccacagagcagaagg

SEQ ID NO: 382286 - DNA, 606 bp, Homo sapiens
tgcactaaacaacacagcaaacatagcataatttaccctagttggagtaacttgactccactcagtacttcacaatggccaggcatttggctcaattcaggactgggcattttgatctggtgagacacacagatacctgaggttgggcatttggggaaataagcttcctttctsttttgtaggaactcctgctctccttcatggggaaatccagtagccgcacacaaaaaacttagctattatcattattactgtatattctctttttcttaacttaccaatttcccttagtgttttaggtgaactaaatttctaaaatagtttccttaagtagtcagaatttttacaacttattctaatacatagcttgtaataataaaatgctcatgtgtgatcagattatttcttggaaaaggtcaaaagtagttctagaatagaatatttgctaaacatttaaccagaaaaaataaaggtaatgtaagaacaatggaaaatggtttggcattatctgctgaagttgaatagacacataacttataactcaggaaattctactcttagtttataaccaacagattatctctgtctgtctatcttacaagaatg

SEQ ID NO: 382287 - DNA, 606 bp, Homo sapiens
tgcactaaacaacacagcaaacatagcataatttaccctagttggagtaacttgactccactcagtacttcacaatggccaggcatttggctcaattcaggactgggcattttgatctggtgagacacacagatacctgaggttgggcatttggggaaataagcttcctttctgttttgtaggaactcctgctctccttcatggggaaatccagtagcygcacacaaaaaacttagctattatcattattactgtatattctctttttcttaacttaccaatttcccttagtgttttaggtgaactaaatttctaaaatagtttccttaagtagtcagaatttttacaacttattctaatacatagcttgtaataataaaatgctcatgtgtgatcagattatttcttggaaaaggtcaaaagtagttctagaatagaatatttgctaaacatttaaccagaaaaaataaaggtaatgtaagaacaatggaaaatggtttggcattatctgctgaagttgaatagacacataacttataactcaggaaattctactcttagtttataaccaacagattatctctgtctgtctatcttacaagaatg

SEQ ID NO: 382288 - DNA, 606 bp, Homo sapiens
tgcactaaacaacacagcaaacatagcataatttaccctagttggagtaacttgactccactcagtacttcacaatggccaggcatttggctcaattcaggactgggcattttgatctggtgagacacacagatacctgaggttgggcatttggggaaataagcttcctttctgttttgtaggaactcctgctctccttcatggggaaatccagtagccgcacacaaaaaacttagctattatcattattactgtatattctctttttcttaacttaccaatttcccttagtgttttaggtgaactaaatttctaaaatagtttccttaagtagtcagaatttttacaacttattctaatacatagcttgtaataataaaatgctcatgtgtgatcarattatttcttggaaaaggtcaaaagtagttctagaatagaatatttgctaaacatttaaccagaaaaaataaaggtaatgtaagaacaatggaaaatggtttggcattatctgctgaagttgaatagacacataacttataactcaggaaattctactcttagtttataaccaacagattatctctgtctgtctatcttacaagaatg

SEQ ID NO: 382289 - DNA, 610 bp, Homo sapiens
taatgtttacctcctgttggacaaacttgtgaccttgagtaaatgacttagtatttttggcctcaattttctcatgagtgtaatgcttaagcggggggtaggaataatctctacacttcccttacagctttgagattcagtgaatctaatctctgtatatccctgaagtagaaaacaacactaaaaggcctgtaatctactcataaagagcattcaggtccctgaatatttggaatgaccagtaaagcaacatcagcctgcttctcagaactctcaaatggtagaccataatctctttccttataactgagatcaatcaaaagacctggagatctggcaatactacrggagggttattttagtagtgtttgttttcttgaagtattatcaagtcatttttgccctaaaaaaaaaatcgccaaataattctgcaaccaaacattcaaagtattggcaaagaaagagatagagagagacagagagagagacccagtccttaaactggaagacagattttaagtccacttattactcagatgacctttgattctcaatcttcaggacctcaaaagccttcctctcttaaaagggggaaggaggcaagaagaat

SEQ ID NO: 382290 - DNA, 606 bp, Homo sapiens
tgcactaaacaacacagcaaacatagcataatttaccctagttggagtaacttgactccactcagtacttcacaatggccaggcatttggctcaattcaggactgggcattttgatctggtgagacacacagatacctgaggttgggcatttggggaaataagcttcctttctgttttgtaggaactcctgctctccttcatggggaaatccagtagccgcacacaaaaaacttagctattatcattattactgtatattctctttttcttaacttaccaatttcccttagtgttttaggtgaactaaatttctaaaatagtttccttaagtagtcagaatttttacaacttattctaatacatagcttgtaataataaaatgctcatgtgtgatcagattatttcttggaaaaggtcaaaagtagttctagaatagaatatttgctaaacatttaaccagaaaaaataaagrtaatgtaagaacaatggaaaatggtttggcattatctgctgaagttgaatagacacataacttataactcaggaaattctactcttagtttataaccaacagattatctctgtctgtctatcttacaagaatg

SEQ ID NO: 382291 - DNA, 588 bp, Homo sapiens
tttaaatggattatgctcaggaacaaaaatcaggtctctttttctgttcttatagtgacatgtgccagaaaataagagttgattcccagtctgatccgtctgcagatgcatggtttttttctttaaccagctgtagctaattgcatgagggccgcctcttgtgctgaacatgaaaaggaaacctgtaatttattgcaacagaccataccatttctgctgtacaactgtcttttctgtcatgtcaatgagtggatttctcatcgtacattggcagctcaaagactggaaaacagcattagctggagacagagaaaaaaaaaaaagagtttcagaatctcttcatgtactttacacagagctcaattaaggaataaactggaaacagaatttccctttgccatctgccaggggcatttttttttctattgtttatatgtagttctttgattcaactatactgacttactaagatacaagcacatgttacgtgtgacattcagtataagattagtttctgttragcaatcatctttgcatgcccaaggaagtggctgaaggagatcccccactcaaagtagagctgggacc

SEQ ID NO: 382292 - DNA, 585 bp, Homo sapiens
ccaactattggagctggacacagaaccatgaaaagaaaaccttcacagacaaagatagacgtaataaaaaaatgtctaccttgcacattacctatgccgggagtggattttagcactgtgccactgctgccgatggtattctgtggttcaaccacaatagtgatagaaggattttccatttatattgccaccctgatgccccatgatcagagccctgctgacctggtgtggtagggaaatctgttgtggattgatacaatcgggttctctacatagataaggcatgcgcctacatagatgaggtggtgccaagtgttagggcacagatgggtgtgattccctctggctgtgcaatagtcccattggacaaagagaaactgccccagatgatgatgagagtgtaagatactgtggtcccragaggtgggggagaggaggtgaattgtctatggaggctgcctcagccccatatggctccagggcactagtgatggagggctgctcagagaagcacagtgttattgtggtgcacatccgcagggtcccttcaagaaaattcccatattccaacctgttatgggttga

SEQ ID NO: 382293 - DNA, 614 bp, Homo sapiens
aatttcaaatttctagcttccagaagtgtgaaacaataaatttctgttgctgaactcctcagtttatgatactttgttatggcagctctagcaaacgaatacatagcattctcaatatttctgtttcttcagctaccctcaatcagctcccctttcccagggttggccactacactacttcctttcacaggtcattttttgttccataccttgtggaagacttgttcttcctcgaaaggcttcatcccagattgttcctatgctaggattccatgcttcttctgtatttctgcactcagaattgaggaagtgaattcctctattcctgtgctttctgtgttcatatctcttcttggaacagtggatgtgggctaccctcagtgacaaaatgaggggacacaggacaaaggatatgaaagaaagtaccaggataaagatatcccttaattaatatttcaatgacttcatcaygttgcctacaccaagatttggtttatctagacagttgtctggagcagacctttgtgttctttccccctgtacataccagtgtttctacaacctcagagaagtaaataaaacccagaattagaaggactgaaagttcagcaatt

SEQ ID NO: 382294 - DNA, 613 bp, Homo sapiens
tggcagctttttatgccccggtggaagtattagaggacattaaagaattcaagtcagatttatattttagaaaggtaagagtagctatatgtgatcagtgtactcaaggaagtgaaactatgcgagaagagaagacattccaaaagactatgtgagagacatctaggccagsgagagttgagagaaggagaggaggagttagatttgagaaacagggattagggtttaaggataattgactgtgtaggcaaaatgtaggcatcaaggacaactcaagcgctttctgttttaaatgataggagaataataattccattagcctcacagcctcccatcatgagacaatggtttccctgtctcacatctcccatcatgagacagggaaaacagaagcaggagattcaggtctgaggaaaggtgataggctgtttcagctatttgaatgtgaggtgcttgtgggcttctggaacatccaaatatttgttaggcaaacagctggatataaataagattctgaaactcaggggcaagttcagggatagaagtatagatttggaagttagcagttaaagccatgagaatagctgagatcactaaatgtaagtaaacagag

SEQ ID NO: 382295 - DNA, 588 bp, Homo sapiens
tttgttcaaatagtttaatcaactttaaacaaatacaaagacatgtcatagtagatgtatttgttgccatattcacaataagacccagctgggacagctttgttcgggtttggatacatggctgtggtttattcagtgaaacctttctcttycagtctctgccatccaggaccctgcccaccctgccctgcctttatgacaaaaacatgtgaatgtggacgaaccaggtaaagttaaaattacaccctaaagaagacctcagttttcacatgcatgattgacttgtgaatttctgaaataaaagaatagtaggtagatacaaataaatggtaggcatgaatagtactttttttttttcaggagtgaaagtttattaaaaagctttagaacaggaaggaaaggacagaaggaaagtacaacttggaagagagccaagtgggcaacttgagagaccaaatgtgccatggatagtacttttctgtaactagtagttccctgtgctgcccatgaccctattttgtaatcttataagtgattaagaagttatatgcacaatgagattgtgagactacccattatttcgggtaa

SEQ ID NO: 382296 - DNA, 601 bp, Homo sapiens
gagtcacaataaagagttaaaaaaaacacccagggtccctctgggatctttttaaaaatgaacagagaaaagaaaattatacacagaccactctcttccctttaaacaatctctgcctgaaaatgaatgctcacctggctttgcattcctcacctgcggatgaacgctcatctgcctttgcattccccactggaggatgaacgctcacctggctttgcatgctttaagactcccatacacttgtttccagtctcatcaaagctcttagctacccaagcccagtyctatgtcaaaggagcttgaattcagatgagaatttccaaagggcttgaagatgggaacagagcccctctctattcaaaagagggcaagataaagaatctgggacatgacagtccccagagattgaaataaaatacttcttaattgtgaacggcctgaatagacaattcctaaaagagggcaaggaattaacaaatatgggcatgaatatctaaccctaaaagtaatgaaagaaatgcaaataaagaaagattgtatatgtctccatgtatatatgtatacacacatacacacattttacactgtaagactctatgtg

SEQ ID NO: 382297 - DNA, 579 bp, Homo sapiens
aagttggaaaatttgtactatcccactttgtaacctattagaaaatcacaataatcaagataccatggtattggtgcaaagatagacgatggaaaagaattgacagtcccraaagaaatccagtatgcaaatctttacatatttattttcaaccaatgttgtaagatacctcaatcgggaaagaatagtcttttcaacaaatggtgcagggacaattatatattcacatgcaaaataaaacttagacccttactttacaccgtatacacattaactcaaaatgaaccttagacctaaatgtgagtgtttaaactatgtaacttttagattaaaaagataggagaacatctttatgactataggttgtgtaaatatttcttaaaattaatatcaaaatcataatccacaaaagaaaaaactaataaattgtcatcaaaatgaaaaatttttgcatctcaaaacacacaacaaataaaatgaaaatacaagccacaaactttgagaaaacatttgtaaatcatgtgtctgataaaagacttgtatccagggtatataaacaactcacacaacttgaaaaga

SEQ ID NO: 382298 - DNA, 567 bp, Homo sapiens
gacaagccaaagaagggattataggatggaaatggtgcaaatacatttgacctcctgaaagtcattctggttaagggtgtctgaaaagaggctattgcagtgatccagagaagggcaatagtttggacatgggcagtgaacacagggagatgtggtgcactaaggagatacatcaaaggtcaagtcaactgcacttcatggttgaccatacaaggtagggggagatcaaaagtttaagaatggggctccacttctgatttgggtaatgacaaagaccatgggttggtcccagaggcaggaagaatgggaggaagagcacattgtagcaccttctctcaagggtcttcaaggaataaaggatgaatgttttaagtgcttatctcattcacttaccagatgatttactggcataagaaggggaaaaacaggaaaatctgtgagttaactggagaaaaaarcaactgatggatgcttttttgttcagtgttctgaactgtcaagttagactgaattccttgaagaaatagtacaaaaagccttggctttggagctagactggcacattct

SEQ ID NO: 382299 - DNA, 623 bp, Homo sapiens
agctctacctgcttccaaatattcttccctggggagcagctgtgagtcttactgaatcgatttattcattgcattctatgtgtcaactgcaatttagacctgggtgatagagtcatatatggtctttggacccatgaagctctgagtcaaggataccagcagatatccttaaactaataaaaaaagcgatggcatcacatgccattttgaacttttgcattaaagtcataaacttacatcagtattaygatttatacttttaagcaaaattttgccattttctgatacatagtagctagctagtgataaaattatgaagttaccattgtatgttccaatgacataaaaaactaagtgcctgcttgggctagttatactctgcagtataccctggtttattgtgaggattaaataaaaaatcctcacaaaccccaatttaatttaatatagattaattataaaaataatctacccatgttacataatgttaaatctgtagtttcaaggtgtatgctatttcttaaaacaaaaacaaagattgtccccactccaaacaataacagcaatggtgaaggttgtgggtggacagaggtagtcccactcatccccagggggctcagctg

SEQ ID NO: 382300 - DNA, 534 bp, Homo sapiens
tgtttctcagaaaatagaatgaggtgatgctcaattctagaatagcaaataaaagcyaattagatctttaaacaaaatttcttataattttgtcttttgatgtggtaaaggaatatcccactcttttgtatccctaaaaacagcttacagcaaagactcacccctctcatatgacttagatgtgtggatgcccccttgttccctgtgaaaaagacaaagaccttgcaaattcccatttttctgcctcataaataattagctgaactgctttgtccccactgatcaactgaacaaaatgcttgttaaccttcctccagggacccctcagcctgagcagccgatgcccctcctgagaacaggctggcctcagggaaaatattatctgtctactatctgatgatgctactttttcatctcaattccccatgcctggttctttctagccttgttgactcctgtctgtgaaagaaagaaactctttttgcctaagttctggagttgcttaaagatcttctgttcttccacttgcaatag

SEQ ID NO: 382301 - DNA, 463 bp, Homo sapiens
aagacaatgaacacaaattttggctttaaagtttctaattgaacacaaatttgaaatgatccaccaagtatcagttaaaatcaatgaacagagcctaattcatagacataccctagtgaatgtttgaatttctagaataaagaaaacaagtattcaacaaagatgtaaaagtcatgctggcttcggattgtcttctgctaagaacagaaagcagtggagagcaatcccccttaggtgtgatggtggagaaagcatttcttcctgcagagggttagcacgactgtgggtgtggggccagccaaggtaggaggcaactcccaggaccttggggcatcacacacttcaagaaccctgagcacagaaccagctgcaaacytgtcaggctggtagaggaaggggttcctgcagtggcccctgaagccacagtactggggccagtcccatggagtgtgggagggaagaa

SEQ ID NO: 382302 - DNA, 555 bp, Homo sapiens
ttttctctgcatttgattttttctgtctgtaagatatttttctcttttatttttatgcacgttaagtgagcaacacatctaaagtgaacacacagtagttattcaatagtcttttgtttttttttctgcttatgatgctttgcaaccagtcacatttttcaggtggattccattgccaatgccaattctctccctgcccaggcttgtattataccagctgttatgaacttccagtttgtcaattatttcttttcttttyttttttttttttttttgagacagagtcttgctctatcacccaggctggagtgtagtggcatgatctcggcttactgtaacccctgcctcctgggttcaagcaattgtcctgcctcagcctcctgagtagctgggattacaggcgcctgccaccgtgcccggctaatttttgtatttttagtagagacggggtttcagtatattggccaggctggtctcgaactcctgacctcgtgatctgcccacctcggcctcccaaagtgctggattacagacataagccaccgtgcccagcca

SEQ ID NO: 382303 - DNA, 555 bp, Homo sapiens
ttttctctgcatttgattttttctgtctgtaagatatttttctcttttatttttatgcacgttaagtgagcaacacatctaaagtgaacacacagtagttattcaatagtcttttgtttttttttctgcttatgatgctttgcaaccagtcacatttttcaggtggattccattgccaatgccaattctctccctgcccaggcttgtattataccagctgttatgaacttccagtttgtcaattatttcttttctttttttttttttttttttttgagacagagtctygctctatcacccaggctggagtgtagtggcatgatctcggcttactgtaacccctgcctcctgggttcaagcaattgtcctgcctcagcctcctgagtagctgggattacaggcgcctgccaccgtgcccggctaatttttgtatttttagtagagacggggtttcagtatattggccaggctggtctcgaactcctgacctcgtgatctgcccacctcggcctcccaaagtgctggattacagacataagccaccgtgcccagcca

SEQ ID NO: 382304 - DNA, 600 bp, Homo sapiens
ctcctggtattcaaagcattaatgcttgtgctcagggtagctcaagtcctggtaacatccatctttcaatcactttccatgatatttttttcttgaatcttctcagcccctttctttattgaattgctcttctcctctcctacttataaaattaagacctctcctatccacaaaacaaaatacatgtgaattagctacagatttgtgtgtgtgtttgtataaatgctgaccacttgcatcaaccttatatgttttgaatatataacaaagagaatgaaatacaaaatacataggaatactacagaaaaccccaagccttctttgactctttaagaaaagtgccaatagcaagaatatttcaaaggctttgtgtgtatgtttgaatgaatarctcacatcaaagcaactcacatactaaatatcattccataattataacacatccggaagtaggcaaatttaatattgtttgctctttcataaggcaactgatgattaagtgatgaatcaagtcccaacagtgattaatcggcaaggctaagatttgaacttaagttatctgatccaaagtctaaaatttactaccagacatactaattc

SEQ ID NO: 382305 - DNA, 632 bp, Homo sapiens
ataattttgacatagtattttattcaaagaaatgtagtgcaacaataatggataattatgaaatttaaaacatttctgggaggacctcaaagaagatcaaagaaagtagtcatccttccagcctgcatagatattcttgtttattttcattttactattttacccccatcctgggtaaatatagcccactctgatccaaattcatcataatgccaggaaataataccagagttaataccaggaaaggggctgaaaaagaccaacttcactttatgggatgaaaccatgtaagaaaatgaatgaygaaagacagattttttcttttgaagttaaaataaaagggatggtaagcatttgcaatttaatctcccacttaagctccatcagatatcccaacaacttcttgtgagacaagtgtgtctggcataagtattttacagaaaagaaaccatgcgtcgaatatactatttggattatgtgcttctactgcaaaaatataaagacctgagtatacacaaatatagaatggtagacgcatactccaccacacttcatttccctgacatccttcagcacatgcatttgatgctcagttaattaagatccaaaacatgtagtgaaggaaacagatt

SEQ ID NO: 382306 - DNA, 633 bp, Homo sapiens
tcagagagatcttgccatataccttagctcaaagaccctgtgttgttagactgaggaccataaggagcagatgccaagacagaattaaacgtggcaaggaatttaccaggggtagtgcgtgtcagagaaaatggggaaggagctcagataagctgaagaactgtcaaacagcagagtagttctgagagtgaatggaggagacaaagagtgaacaaaagttgggtaaaagtatcttaagatgctttgcaattctaagtaaactttggcatgttcatacgtggttccttgacycaaatttgtatgtcagagatttcaaacctctttcaagaatgacattatcttagaatctttctcaagctcagttgctggctggaaatggcccctagaaagtctggcccagttgcaaatggggtgatagcataagaagtagtaacttcacacatctggagatctgagtgttatattctcatggctgccacatacccttctctccactttctatctctatcttatctctctgtttcattttctacctgaaactgtctgcaattacctcatttattatttatgcttttacaattggtcttccttctgaggttgaaaactccgtgaacataggatcattatttacct

SEQ ID NO: 382307 - DNA, 387 bp, Homo sapiens
caaaatataacaaacatattaacgacatgtggtaaatcatcattggatataccgggtcctgatgatggaactagttgtgagtaaatgagattgtctggctgcctgataccactttgggggtccaggatgatgcattgtcctcagtgggaggaggacagtgcatgatggaggagggagcaatcagctatagagggacactgatgtcttctcaaagcrgatggggtgttggaaacctagaacaacagaatttcagagccagaagagactacagatatcatttagttaaactcattaatctggcatgtattatgatcaaggcccagagaggggatatgagaatcccaaaactgcatagcaagtatgtgattcctgaatcacacacagctc

SEQ ID NO: 382308 - DNA, 387 bp, Homo sapiens
caaaatataacaaacatattaacgacatgtggtaaatcatcattggatataccgggtcctgatgatggaactagttgtgagtaaatgagattgtctggctgcctgataccactttgggggtccaggatgatgcattgtcctcagtgggaggaggacagtgcatgatggaggagggagcaatcagctatagagggacactgatgtcttctcaaagcggatggggtgttggaaacctagaacaacagaatttcagagccagaagagactacagatatcatttagttaaactcattaatctggcatgtattatgatcaaggcccagagaggggatatgagaatcccaaaactgcrtagcaagtatgtgattcctgaatcacacacagctc

SEQ ID NO: 382309 - DNA, 621 bp, Homo sapiens
ggttctgctactagagacagacagagcacctgtgacactctttaaggacttaaaaactcttgctttcttttgtggctgttatgagttaggggctaggtcttttgccagaatcacatagacttgaatccaggcatcctcactctctgtgtgttgtcagaaatattaatgtcattcattaaamctcagtttcatcagttttactacagagtaacacacatacgcacatacacatacatacacacagaaacacacacattgattccctcagatacagtgtgagaattaaatgaaatggtacattcaaagtttctaagacactacttagcacaaaacaagcattcactccttgtagccatgtcttgactattgtaataaaatgaagcaaatttttttcctctggttattttttgctccaatagcatatttccctgattttgagttttctcatttactgcctcagtttctctccccttaatatgtcctctaaaagcataattaagaactagtctttgtatttcagacaatctgatcagtacagaacaaaatagaacagacatctccctccttaagcagtctaatatcgccttaatttcatcagagttacatcatgtcacagatcga

SEQ ID NO: 382310 - DNA, 605 bp, Homo sapiens
aaaaaaaaaaaaaaaaaaaaatttaaaataactatgtttaacatgctaggagttcttaggagttgtaatagaaaaagtagacaacatggtaaaacagatgagtaatttctatcatttaaatatgtccctcaaaattcacattggaaatgtaatttctaatgcaattagaaattatgagaggtgtgaccttaagggggcatgcaggccataagggattctccctcwtgaatggattagtgcaactattaaaagggctgtcaggagagagttctctgtcttctgctcttctaccatgtgaagaacagtgtttctcccctctggagtaggcagtattcaagctttgaagtggagactagattcttactaaacaccagatgcctgcaccttgatcttggattttccagtatccagaactataagaaaaaaaaaatctgctttttaatgaactatccagtctcagtttctgctatagtagcacaaaacaggctatgccagaattagtaacaggagtatcatgttgctataataaatacctaaaaatgtggaagcagctttggaaatgggtaatggtagaggctagaagagttttgaagtgaatgctgtaa

SEQ ID NO: 382311 - DNA, 605 bp, Homo sapiens
aaaaaaaaaaaaaaaaaaaaatttaaaataactatgtttaacatgctaggagttcttaggagttgtaatagaaaaagtagacaacatggtaaaacagatgagtaatttctatcatttaaatatgtccctcaaaattcacattggaaatgtaatttctaatgcaattagaaattatgagaggtgtgaccttaagggggcatgcaggccataagggattctccctcatgaatggattagtgcaactattaaaagggctgtcaggagagagttctctgtcttctgctcttctaccatgtgaagaacagtgtttctcccctctggagtaggcagtattcaagctttgaagtggagactagattcttactaaacaccagatgcctgcaccttgatcttggattttccagtatccagaactataagaaaaaaaaaayctgctttttaatgaactatccagtctcagtttctgctatagtagcacaaaacaggctatgccagaattagtaacaggagtatcatgttgctataataaatacctaaaaatgtggaagcagctttggaaatgggtaatggtagaggctagaagagttttgaagtgaatgctgtaa

SEQ ID NO: 382312 - DNA, 612 bp, Homo sapiens
aaattcagaaatctttttttttctaatcaagcaagataaacaccaatcatcatcatcaccatcattgtcatcaacatctatacataggcatatcatattcaaattgtagataacaaaagacaaagataaaatcttgaaagaagtcagatttgaggaactgggggaatttgcttataaatgaaataatagttatatatcatcagaagacatgcaaataaaaagaatgtgatgatatattttaaatattgaaagaaaaaaaaagagcatcaacctagaattctacactgagaggcatcatcctttaaaagttaagagaggaaatcawaatttcttcagccaaaaactgagggaatttttcatcagtaaacctgatttttcagatatattacaagaagttcttcaggaaaaagaaaaacatgtaagtcataaacttggatttacattaacaaaagtttggatattgggaaaaaaatttatgatggtaaagtaaaatcttgtatttttattattaattggccaaaacaataactatttatttaaattaataatagtaataacatattaagtatttataatatataaatagataagtgaaataaataacagcaatgg

SEQ ID NO: 382313 - DNA, 612 bp, Homo sapiens
aaattcagaaatctttttttttctaatcaagcaagataaacaccaatcatcatcatcaccatcattgtcatcaacatctatacataggcatatcatattcaaattgtagataacaaaagacaaagataaaatcttgaaagaagtcagatttgaggaactgggggaatttgcttataaatgaaataatagttatatatcatcagaagacatgcaaataaaaagaatgtgatgatatattttaaatattgaaagaaaaaaaaagagcatcaacctagaattctacactgagaggcatcatcctttaaaagttaagagaggaaatcataatttcttcagccaaaaactgagggaatttttcatcagtaaacctgatttttcagatatattacaagaagttcttcaggaaaaagaaaaacatgtaagtcataaacttggatttacattaacaaaagtttggatattgggaaaaaaatttatgatggtaaagtaaaatcttgtatttktattattaattggccaaaacaataactatttatttaaattaataatagtaataacatattaagtatttataatatataaatagataagtgaaataaataacagcaatgg

SEQ ID NO: 382314 - DNA, 507 bp, Homo sapiens
ttcagcttgcctgcttggcttctcaacacagttttgttctttgataaccattttgtttgatccttcccttctcaccatacttcgctatttacccagccctgtctgatttccatttactgactgattttcttgagcacttttgatttctaaccaagaggttagaaaaagatctagttttataaaggttagaagtgcagattcaggattcagacaggacttagaattgggcttcaaaaatcaggctgtttttgttatgcaagaatactatgaaattacttgtatctattactgagcacaggccttggaacagattaacttgaattacaatcctgtttctccactgacagttttgtgatcttrgtaattagttaacttttctaatcctatgcatttttatcacagtgataacaatacttactttcacagataggtttgaggtgataaataaatgaaataattgagggcaagtgccagggacagtgcccagcatacggtcaagctctttta

SEQ ID NO: 382315 - DNA, 507 bp, Homo sapiens
ttcagcttgcctgcttggcttctcaacacagttttgttctttgataaccattttgtttgatccttcccttctcaccatacttcgctatttacccagccctgtctgatttccatttactgactgattttcttgagcacttttgatttctaaccaagaggttagaaaaagatctagttttataaaggttagaagtgcagattcaggattcagacaggacttagaattgggcttcaaaaatcaggctgtttttgttatgcaagaatactatgaaattacttgtatctattactgagcacaggccttggaacagattaacttgaattacaatcctgtttctccactgacagttttgtgatcttggtaattagttaacttttctaaycctatgcatttttatcacagtgataacaatacttactttcacagataggtttgaggtgataaataaatgaaataattgagggcaagtgccagggacagtgcccagcatacggtcaagctctttta

SEQ ID NO: 382316 - DNA, 530 bp, Homo sapiens
atttttctggttatttatagtttacttttgataactatgtaatgcctttaggttttcttattctgatgcattttaactttcaacataaagtttttccaaacaatttaaaagtgttgaggttaagtcttttgaacagacctcataatgaaaaaaattcatgcccagtgtaagttttactcacttatccaaacttactccctgcttttcctcactattccagcttaaacattccttcccatctttctcayacactgtgctcatcataactattggataattacttatttatccttcaaaagctcatctgccccataaagcttttctgtctccagttcaagctcttcccccatcagtgcctctcatagctgacacctttagaatccaattttgtgacaccttgcatttccttctcttgttgccttcaaaagcaaataattccttctggtccagaataaaattcagttcatttgaatattatttcaaatcatacaatggatttagaaaatctcaaggaatcaataagtattggt

SEQ ID NO: 382317 - DNA, 443 bp, Homo sapiens
tgtatgtatatatcatattttgtttattcattcatcttcatccatctatggacactgggttgctttcatcttttgactgttgtaaatgatgctgctatgagcataagtgtagaaatatttgtttcaggtgcctgcctgcaatgtttttgggtatatactcacaagtaaaattacttctttcgtggtaattcaagtggtaattctacctttattatttttttgaggaaacaccacactgttttccacagtgccttcaccattttgcgatctcaccagcaatgtgagattgtaacaagggttataatttctccacatcctcaccaacatttgttatttaatgttttaagttaatagtcatcataatagatggctattcaytcatttaacaataattggaaatctactatgtaagagacaatgcattaggagctagccatacaaaa

SEQ ID NO: 382318 - DNA, 586 bp, Homo sapiens
acacaccaacacaccttactaatttttgtattttttgtagagatgaggtttcgccatgccgcccaggctgatctcaaactcctaggctcaagcaatctacctgccttggcctcccaatgtgctgggattacaggcatgagccaayatgccagcaacattacacatttgtggaggatttctgtttcatattgaaccacagctaatgaagttctcactacatagaacattgccaacagcagcacaaagaagaaagagataatcacacaccagattttcatgcttctgcttggaatggatacatgccacttctgccgataactcatttgagaaagcaaaacaaagagctatacctaatttcaagacagagaagaaaggtgatcctcttggatgcttgaaggagcatttcttcagaattgttggtgagtcacattgttgtctgccatcactgaaacatcatgctattaatgaaaagaggcaagtgagagctctatagtcgtggtctcgggttagtctaccactattctgctgtgcccactctaacaaggctttcactgacacagctccagcaaaaccattcttgtcaagg

SEQ ID NO: 382319 - DNA, 658 bp, Homo sapiens
gtcaaacattgtgctagcattttacatctttgagcacattactaagataagtgctttttgtcccatttcttatataaggaattctcccctccctcacaaaaatgcctctctttcttggagtggtgtttaaatcctacgctcattttacagaacagcccaaatgtcacccactcaccttcactgatttaactgagcaacatttgttgagcccttttttatatatcaggcactgtgcaagacacacagtatacttgtgggtgaagaaaaagttatttatttctaaccatataaaaaccataatctaatgaaaaaaacaagcgataaagtaaacaagcaaataaatatgtgattaaaatgacaatatgtaatatgaagggaataaactggatccmgtagtcagagcaggggactgaggaatgaactttcaatccttcattatatctgctgaggacctttctgcaaattagaaaaagccatctcttgcttaagcttcctcatttataactgccatcaaatcataataaatacaccaaccacagatgactagcaatgtgaacagcacccccttggattttcagtatataacctacaaaactatgcagcagccttgagaagataacaaataaaacaaattgtcaagggtgagaatgtgtcagat

SEQ ID NO: 382320 - DNA, 658 bp, Homo sapiens
gtcaaacattgtgctagcattttacatctttgagcacattactaagataagtgctttttgtcccatttcttatataaggaattctcccctccctcacaaaaatgcctctctttcttggagtggtgtttaaatcctacgctcattttacagaacagcccaaatgtcacccactcaccttcactgatttaactgagcaacatttgttgagcccttttttatatatcaggcactgtgcaagacacacagtatacttgtgggtgaagaaaaagttatttatttctaaccatataaaaaccataatctaatgaaaaaaacaagcgataaagtaaacaagcaaataaatatgtgattaaaatgacaatatgtaatatgaagggaataaactggatcccgtagtcagagyaggggactgaggaatgaactttcaatccttcattatatctgctgaggacctttctgcaaattagaaaaagccatctcttgcttaagcttcctcatttataactgccatcaaatcataataaatacaccaaccacagatgactagcaatgtgaacagcacccccttggattttcagtatataacctacaaaactatgcagcagccttgagaagataacaaataaaacaaattgtcaagggtgagaatgtgtcagat

SEQ ID NO: 382321 - DNA, 615 bp, Homo sapiens
tgccagtgtttgaggttatgttttgctgttaaaattgtgtgccagggaatattactggcatctagttggtagaggccagggatgcttataagcwtcctatcatgcacaagacactttctcacaatacagcattacccaaaccaaaatggcaacagtgtcaatatttgagaaaccatggcctagactgtaagcaccatgatctagggggaagccacgccttccttaaacattcccatttccccagggcctagactttacttgatatatattgtgcttaatagatgttgattggatgaacacatattccttatcacaaatacaggctaatcatttactgatttatcatttactgagcgtcaatggtatatcaggccatgtatttgtcattgatactataataatacaagagtccatattatcagcagccttaaattatgaaagaggaatgaaaaagtgagcaattgattgaaattgggaaaaattgtaatgcaccgcatagtataaaaaattagtttacttattgaagtagcacaaaggatgtttaaaagaaaaagtaacatccttcattcacttaacaaatattcattgaaggcaaatgttggaaggtatcaatga

SEQ ID NO: 382322 - DNA, 427 bp, Homo sapiens
cttcgccacaaaagtaaacttttaaaataaatgatattgacatgtattataacacttaaatatgtattgcgaaaacatatggcatacaagacattgtgcatattaggtcttcaacaaatgccttggcaataaataaaatttattttaatttatgctttatttgaccagtaagtaatgagctaagaaagaaatatcataggttaagtaatacaggaaaatttgaacacccaaaactyatgaagaaacatctttctaaatgatgggaatcaagcattatatctgtttgtattacttaaaacatttccaattatggagggaaaacaatgaataaaattgtcatattttaatgctatgacatgtactctacttttaatctatatgcattcagttttctattacacattccatactggctcatgtggttggt

SEQ ID NO: 382323 - DNA, 450 bp, Homo sapiens
gacatgtattataacacttaaatatgtattgcgaaaacatatggcatacaagacattgtgcatattaggtcttcaacaaatgccttggcaataaataaaatttattttaatttatgctttatttgaccagtaagtaatgagctaagaaagaaatatcataggttaagtaatacaggaaaatttgaacacccaaaacttatgaagaaacatctttctaaatgatgggaatcaagcattatatctgtttgtattacttaaaacatttccaattatggagggaaaacaatgaataaaattgtcatattttaatgctatgacatgtactctacttttaatctatatgcattcagttttctattacacattccakactggctcatgtggttggtaaaaatcaaattctatttggattcttggacaagccattaatgccttgccatacccacagaa

SEQ ID NO: 382324 - DNA, 366 bp, Homo sapiens
agctgttgggaaaatgcagacaatcatgttggtcaagagcaacacattctcatggcagaaggtaaataaatactggttttcttctgatttttgtttgcatgcattatgtacaaaatatatactgtgcytagtttcattgaattctataacctccttctgtacacctgagtagctttttaatgtctgtaaagttaaaagtccctctccctgttacaacagaattgatttctctttcctgctttctgctaagaataatatggcaccctgctttctgctaagaataatatgtttgttattgtttattttatatttaatatgtttagatatgcttttttatcatataaatatacgatgaggaattgttaa

SEQ ID NO: 382325 - DNA, 484 bp, Homo sapiens
tgaccaggtccttgtccagtgggtgaatgacagcagcaacatttctgtgtctacttgatgtgccgtctgggagcagccaaatctcagagctctgtgcaggatayctgcaactaaagcccctagtaaaatgctgtgttatgaatgaaagtgggcatgaggtcagaatgaaggcactggctgggagtcagcatacctgagctataatctttcttcaagatccccagctgtgtgatatggggcaagccacttaacattttcaaacctccatttctctagctattatataaaggggtttggctagtacatctttcaaggtcccatttatctataaaattctccgaaactcatttaaaacaacacacaaaagaagaaaagcaaaataatgaattgtcagttcagtcaatttgaccccgaggctgcaactctgaaatttaaatcagagcctatatgaaactatcttcttcccctctccaaaggatgtcac

SEQ ID NO: 382326 - DNA, 438 bp, Homo sapiens
tatatgaaactatcttcttcccctctccaaaggatgtcactactgagtattagaataccaaaaaaaaaaaaaaaaaaaaaaaaaagagggagagtaataagtgatggcttatgaagagcagtaaaacaaatgaaaatcagctgtgaaggtgagtcaggtgctgggaggtggtagagatctgtaagaagggaccattaaagtmagaacaatgaagaagaaaaatgggcctaatgtgatctgagagatggagctggagactatgtagggaaaaagtggtggctgaagcagaacttacctgagtctgaggctggatgtgttgttaaatttggcttttaggaatagtcctctcaaagtgactcaaacaacaaagaggacttatttatgacctcataaagtggaaggtcttcagtatgtttcattcagtagctcagtggtctc

SEQ ID NO: 382327 - DNA, 438 bp, Homo sapiens
tatatgaaactatcttcttcccctctccaaaggatgtcactactgagtattagaataccaaaaaaaaaaaaaaaaaaaaaaaaaagagggagagtaataagtgatggcttatgaagagcagtaaaacaaatgaaaatcagctgtgaaggtgagtcaggtgctgggaggtggtagagatctgtaagaagggaccattaaagtaagaacaatgaagaagaaaaatgggcctaatgtgatctgagagatggagctggagactatgtagggaaaaagtggtggctgaagcagracttacctgagtctgaggctggatgtgttgttaaatttggcttttaggaatagtcctctcaaagtgactcaaacaacaaagaggacttatttatgacctcataaagtggaaggtcttcagtatgtttcattcagtagctcagtggtctc

SEQ ID NO: 382328 - DNA, 416 bp, Homo sapiens
catataatttataataattttttaatgtttgcataattcataaaactcttctaaatccattattctccaaccagccttgatataactcagactatttttgctgattgtacatgatggcactgaggctcaagaaaggtaatcaactttccaactattgcatactgacagagtttgcataattgtccctacccaaatctcatgttgaaatgtaatccctaatgttggaggtggggcctggtgggaggtgtttgggtcatgggtgtggatcccttatggcttggtgctgtccttgtgatagtgcatgagttcttgaaakatctgcttgttgtaaagtgtggcacctccccacccactttctctcttactcctgcttttgccatgtgacatgcttacccctgccttacctttcactatga

SEQ ID NO: 382329 - DNA, 562 bp, Homo sapiens
tatggcttggtgctgtccttgtgatagtgcatgagttcttgaaagatctgcttgttgtaaagtgtggcacctccccacccactttctctcttactcctgcttttgccatgtgacatgcttacccctgccttacctttcactatgagcaaaagctctctgaggcctcttcagaaaccaagcagatgcctgtgccatgctagtacagcttgcagaaccatgaaacaatgacatctcttttctttataaattacccagtctcaggcatttctctgtagtaatgcaagaatggcctaacacagaaaattagtattgaggagtggggcattgctataaagatacctgaaaatatggaaacaattttggaactggaaaatgggaaactggaagagtttggaaggttcagragaagataggaagatgaggggaagcttggaacttcttacagactggttaaatggttgtgaccaaaatactgataataatatggacagtgaaggccaggctgatgaaatctcggacagaaaataagaaagttactgggaactggagtaaaagtcaccct

SEQ ID NO: 382330 - DNA, 562 bp, Homo sapiens
tatggcttggtgctgtccttgtgatagtgcatgagttcttgaaagatctgcttgttgtaaagtgtggcacctccccacccactttctctcttactcctgcttttgccatgtgacatgcttacccctgccttacctttcactatgagcaaaagctctctgaggcctcttcagaaaccaagcagatgcctgtgccatgctagtacagcttgcagaaccatgaaacaatgacatctcttttctttataaattacccagtctcaggcatttctctgtagtaatgcaagaatggcctaacacagaaaattagtattgaggagtggggcattgctataaagatacctgaaaatatggaaacaattttggaactggaaaatgggaaactggaagagtttggaaggttcagaagaagataggaagatgaggggaagcttggaacttcttacagactggttaaatggttgtgaccaaaatactgataataatatggacagtgaaggccaggcygatgaaatctcggacagaaaataagaaagttactgggaactggagtaaaagtcaccct

SEQ ID NO: 382331 - DNA, 470 bp, Homo sapiens
atctggggccaggtgcaatgtggctcatgcatgtaaccccagcactatgggaggtccaagtgggaggactggttgagaacaggagtttgaggccagcctgggcaacacagtgagacctcatctctacaaaaaattagccaggagtggtgagtgtagtcccacctattcaggagactgaggtgagaggattgctcgagcccaggaggttgaggctattgaggctactgakggctccactgcactccagcctgagtgacagagcaagatcctgtctcaaaaaaaaaaaaaaaaaaaaaagaaagaaaagaaaagaaaagaaaggaaaaaaagaaaaaaagatctggaaaatccagcaataaagggatctattaactgttccctatctcctttacccagtatcaccaattatttatactatacctcttttgcgctctctctgtatacacacacacacacacacacacacacac

SEQ ID NO: 382332 - DNA, 561 bp, Homo sapiens
tattaaaactttgcaaatcattacattacatctcgactacacacctcactgcgacaagggtacttttgaaattagaggatcttgatgtcataggtaatgatgcagtgcagataatacagttgcagggaaattcttccaataaaaaccagttggaaaagacagaacccatttatcttactttctctcccggttttatgcctgaggataagagatctgcagcacagaacagcagcctggccttttccattctagtagctgcatgacgcttgttcacatgctgcaaagtttaataacttgtctggctacttaaaatgctgccctagatctgtgatgcaaaccaaacatttataggtgaaaagacaactgaaagaatatttttaggagagatatgaaacaaatggcaagttcaacacataagaatagtacatcttaaggtgttctgatttayaacatatgcattcaaactagtacctgaaaagaaacaaactgcttactgttaacacagacccatttgcaggtaataaatgggcatgctctttacccatcatataatggctctaa

SEQ ID NO: 382333 - DNA, 525 bp, Homo sapiens
tgattccataccaaattgaagctatagacaaaaagatggtccctttgattcattctggtggggatgccagcttaactatctgtagttagttactctaatatctgtgagaaatgacaaaatggccacaaattccctctatccctgttacatgtgcctttacaacttgactttgccctcctctatggaaagtgtacaccaattattccattctttgaaattgggcttgtccatatgtcttgctttagtgaatggagaattagtgwacatgatgcagacacaagctcataaaacactcagattctttggaatcctaagatcaaatgaagaattccaagttagcctattaaaggatgagcgactacaaggagtagacataggtagtcctagctaacgttcttctagactcactggcctgccatcaccagacaggtgagtgagtccatttgagaccatccagcctcagtggaaccatctgcagtccacagagatgggctgaactagccatacccacaactgaccagccaa

SEQ ID NO: 382334 - DNA, 553 bp, Homo sapiens
accataaggatccacacaattatcaaattagtagccaagctatcaataatctctagagatatgtttacctggaggctctacaggagggcctgtgtttactcttgcttgaagtaaaatgaaaaggaagcacagagaccccatcagacgacatgtgcctgcgttcagatatgtgctgccatttacttctactgtcccccatgccatttggcccttgacttggatcctaataatttttgctctatcaagtcctggccatctgctaaataggatggtcaagacaacctacttgccttgaatccgacaccgccagctgctcctttagttccataaacatcacatccagccratatcctcttgtgggaaaaaaggatttatgcatgctgagggtgaatggctataccgttaaccatggctgcagaggaaagtgacaaagggcaggaccagagactccacatggccttccagaattgcagagaagaggattcacccaccccagcagttagcaggtaactgtgtattcagaagctaatttgctgtatgaggacaagggcaa

SEQ ID NO: 382335 - DNA, 569 bp, Homo sapiens
tcgttatttatgaaaaagacttttaaatgccctttctgcagttggaaggtttttttcatatactattcccaccatggggagcgaaaacgttaaaatcacaaggaattgcccaatctaagcagactttgccttttttcaaaggtggagtgtcaataccagaaggatccagtattcagtcacttaaatgaagtcttttggtcagaaattacctttttgacacaagcctactgaatgccgtgtatatatttatatataaatatatctatttaagtgaaaccttgttaactctttaattagagttttcttgtatagtggcagagatgtctatttctgcattaaaaagtgtaatgatgtacttattcatgmtaaactttttataaaagtttaaacttttagttgtaaacgtaacccttttatacaaaataaatcaagtgtgtttattgaatggtgattgcctgctttatttcagaggaccagtgctttgatttttattatgctatgttataactgaacccaaataaatacaagttcaaatttatgtagactgtataagattataataaaacatg

SEQ ID NO: 382336 - DNA, 569 bp, Homo sapiens
tcgttatttatgaaaaagacttttaaatgccctttctgcagttggaaggtttttttcatatactattcccaccatggggagcgaaaacgttaaaatcacaaggaattgcccaatctaagcagactttgccttttttcaaaggtggagtgtcaataccagaaggatccagtattcagtcacttaaatgaagtcttttggtcagaaattacctttttgacacaagcctactgaatgccgtgtatatatttatatataaatatatctatttaagtgaaaccttgttaactctttaattagagttttcttgtatagtggcagagatgtctatttctgcattaaaaagtgtaatgatgtacttattcatgataaactttttatamaagtttaaacttttagttgtaaacgtaacccttttatacaaaataaatcaagtgtgtttattgaatggtgattgcctgctttatttcagaggaccagtgctttgatttttattatgctatgttataactgaacccaaataaatacaagttcaaatttatgtagactgtataagattataataaaacatg

SEQ ID NO: 382337 - DNA, 372 bp, Homo sapiens
gccatactctggggactcaagtttgcttaaagagcatgttctcaactcatgaggttcaggatcctcccgccctctacttcccagagtcacaccagtccaacttgaattctcttctcattttatagtgaacggcaggaagccaagtgatcagacgtgccattgtctgttggtttccccaccttggtttattataaaaagtagtagtaatctcacaggtggaggggagcgtggtcatttgtcccacctcattggcaccaaaagaaacccaggtatgagatttgctcataaggtggattggaggataygactggcaccagaggacggtatacgttttcatgcttcctcccttggagatgagcatgtggaacaagg

SEQ ID NO: 382338 - DNA, 525 bp, Homo sapiens
gtaatctaccttctgtgcctttatcttccagagcagcaacatcataatcttctctctggctttataaatgatgaaatgtcgcacagggttttctgtcaggcaaacatgtaaaatcagcctggatacccagcaaagtaccatgccttccattacatccttgttatgaaagcttcatttaaaaattcttgggtcataaagcgaagagagagcacggtgtaccatcaccagttgttaagcagacagtcttggtgtcagaggggactcttacgccgtgatgctatcagttacagagaatgtcaaagctgcatcccccatgtgaccttcagtgaggcaaaggaagaatgtctacaaggagatttttgtgaggtggtgtggttgcagcctcgctgtggacttaggaggctctctgggatacaaatgacrgcagttagaggttacaccagtagaggagatcacgtaccatcctgcgttctcaatgaaagaagagtgttactgtctcagcctgtctagcttatacatatatag

SEQ ID NO: 382339 - DNA, 604 bp, Homo sapiens
tctgtgcagtcagaccacagagaggggctttcttcaccatggatttggcatcccttcagttagagagtggatctggacatatgccagatttgcctggatgtttttctgctttccaatcataagccaaaaaaacaaaaaaacaaaaacaagaagcacacaggaatgtatgatttgaattctggatctctcagttcccatctcttaattttttagttgtttggctaaatgcttgggcattttagccatggaataaatactagtaaagactttatggaatacgtagcaggargcatttttaaatggtgcactgtttccactgagctgtggacagatgggttgtttataggctgtttcatatccagcctccttttttgttttgtttcgttttattttgttttggtcttttgctggtgagaagtagaaccacgcttcttttgttctttttctacctctctgctaaatcttcttttatatgtaatattctttaaagtataatttgcaatgataaagtggcatccaaaatgctaaaggaacatgttaagacatttgaagaatctctttcttctagaaagatgtatgaaaatatttgttaataataaatgat

SEQ ID NO: 382340 - DNA, 604 bp, Homo sapiens
tctgtgcagtcagaccacagagaggggctttcttcaccatggatttggcatcccttcagttagagagtggatctggacatatgccagatttgcctggatgtttttctgctttccaatcataagccaaaaaaacaaaaaaacaaaaacaagaagcacacaggaatgtatgatttgaattctggatctctcagttcccatctcttaattttttagttgtttggctaaatgcttgggcattttagccatggaataaatactagtaaagactttatggaatacgtagcaggaggcatttttaaatggtgcactgtttccactgagctgtggacagatgggttgtttataggctgtttcatatccagcctccttttttgttttgtttcgttttattttgttttggtcttttgctggtgagaagtagaaccacgcttcttttgttctttttctacctctctgctaaatcttcttttatatgtaatattctttaaagtataatttgcaatgataaagtggcatccaaaatgctaaaggaacatgttaagacatttgaagaatctctttcttctagaaakatgtatgaaaatatttgttaataataaatgat

SEQ ID NO: 382341 - DNA, 558 bp, Homo sapiens
aatttgtgaatcaggagctagtcagttgcccaacattcatatgtcaacgtagatctcttggtgtcttctcaaggtcattaaatcattcacttaataagcgtttaatgaacattccactatgtgcctagggaacaacaatgaatatgacagatgcaagctatgctttaaggatgtctggtaggattagttttgtagaaacattaacacatttagagattttttctgcyttataaatatcaagactgtatcacagtaactgatctttatagtcatcatctagaaatgaagttcctaaattttattttcatggtgaccttactaatctatatatgtgtgtctcccagataaaacttttatctatagcaaaactgaaaagaaggtgatatgggcagattttctaaatctatatggttttgccatcatggaaacagaggtagaagaacctagagaaggttggggagggcatcaccaattcacagtgagtgaactttctttgttactggactctaacatcacagttgggtagcacctttgtggtacatctcagcagacaccata

SEQ ID NO: 382342 - DNA, 558 bp, Homo sapiens
aatttgtgaatcaggagctagtcagttgcccaacattcatatgtcaacgtagatctcttggtgtcttctcaaggtcattaaatcattcacttaataagcgtttaatgaacattccactatgtgcctagggaacaacaatgaatatgacagatgcaagctatgctttaaggatgtctggtaggattagttttgtagaaacattaacacatttagagattttttctgccttataaatatcaagactgtatcacagtaactgatctttatagtcatcatctagaaatgaagttcctaaattttattttcatggtgaccttactaatctatatatgtgtgtctcccagataaaacttttatctatagcaaaactgaaaagaaggtgatatgggcagattttctaaatctatatrgttttgccatcatggaaacagaggtagaagaacctagagaaggttggggagggcatcaccaattcacagtgagtgaactttctttgttactggactctaacatcacagttgggtagcacctttgtggtacatctcagcagacaccata

SEQ ID NO: 382343 - DNA, 558 bp, Homo sapiens
aatttgtgaatcaggagctagtcagttgcccaacattcatatgtcaacgtagatctcttggtgtcttctcaaggtcattaaatcattcacttaataagcgtttaatgaacattccactatgtgcctagggaacaacaatgaatatgacagatgcaagctatgctttaaggatgtctggtaggattagttttgtagaaacattaacacatttagagattttttctgccttataaatatcaagactgtatcacagtaactgatctttatagtcatcatctagaaatgaagttcctaaattttattttcatggtgaccttactaatctatatatgtgtgtctcccagataaaacttttatctatagcaaaactgaaaagaaggtgatatgggcagattttctaaatctatatggttttgccatcatggaaacagaggtagaagaacctagagaaggttggggagggcatcaccaattcacagtgagtgaackttctttgttactggactctaacatcacagttgggtagcacctttgtggtacatctcagcagacaccata

SEQ ID NO: 382344 - DNA, 637 bp, Homo sapiens
tctttgaatagttacaaaaaccacaggaaataggtaatgctgttacctccattgtacaaataaagacactgaggcacagaaagattaaataatttgaccaaggtcacacatttagcaagtagggtttaaaaacaggattttgtacccaggtagcaggggtaagggttttgaatttggagaattaggcataggccagatcataagggccccaccattaaggatgggaggctgttaaaaagtattgaacggagacattacgtgatctcatatatatttttcaaggatcactgtttagctattaaccagatctagaaaagcagaacagattacggaccaaacatcggaccggtcaaagacccagaaagacacaactttgtccgtatggtttgttctgtggctccagcctgatttccatattgcacaactctaggggacactttctcatggtgggcttrtggcaccttttggaatcaaacaaagtggaggtccaaggcaagagtcagggtgtggggacagactgaagttgctgtgtaatgatgtatcagtagatttcgtcactgcccacttgccaaagtgagaaatgtagactcctctcaccaatccaaggctcctggaggtttttaactcactggccaag

SEQ ID NO: 382345 - DNA, 561 bp, Homo sapiens
acttgttattgtgcatctcttttattttcaccaacctagtgaatatgaggttgcatcagtttatagttctgatttccatctccttaatgactgatgatctccctgtttgtttttaaatgcacatgtcatggaaccacagcccacatgaccaaatgttcctccttttttttccctacgaagactcaggtaactcagcgccactataggccaaaagatgctgacacatcatcaaacagcctggagggcttagattattgaccttagagatgtaagcaggaaagagccaaagcayggaacaagtccttttccttcctctactcttctgcgaaaaaaagttttaaaaagagaatgagtggtattctgtaatcttcaggtaattcaaaacgagcaaagcctgcctgattggtattctctatctgataattattggaagctttcaatgcccaggaaagctatgatgttttatgcattcatcgggctgttgtcacagaagaaggaaaaataaattaattacataaggcaggagtcatttaacttttttggttaagggccagatagtaa

SEQ ID NO: 382346 - DNA, 561 bp, Homo sapiens
acttgttattgtgcatctcttttattttcaccaacctagtgaatatgaggttgcatcagtttatagttctgatttccatctccttaatgactgatgatctccctgtttgtttttaaatgcacatgtcatggaaccacagcccacatgaccaaatgttcctccttttttttccctacgaagactcaggtaactcagcgccactataggccaaaagatgctgacacatcatcaaacagcctggagggcttagattattgaccttagagatgtaagcaggaaagagccaaagcatggaacaagtccttttccttcctctactcttctgcgaaaaaaagttytaaaaagagaatgagtggtattctgtaatcttcaggtaattcaaaacgagcaaagcctgcctgattggtattctctatctgataattattggaagctttcaatgcccaggaaagctatgatgttttatgcattcatcgggctgttgtcacagaagaaggaaaaataaattaattacataaggcaggagtcatttaacttttttggttaagggccagatagtaa

SEQ ID NO: 382347 - DNA, 561 bp, Homo sapiens
acttgttattgtgcatctcttttattttcaccaacctagtgaatatgaggttgcatcagtttatagttctgatttccatctccttaatgactgatgatctccctgtttgtttttaaatgcacatgtcatggaaccacagcccacatgaccaaatgttcctccttttttttccctacgaagactcaggtaactcagcgccactataggccaaaagatgctgacacatcatcaaacagcctggagggcttagattattgaccttagagatgtaagcaggaaagagccaaagcatggaacaagtccttttccttcctctactcttctgcgaaaaaaagttttaaaaagagaatgagtggtattctgtaatcttcaggtaattcaaaacgagcaaagcctgcctgattggtattctctatctgataattattggaagctttcaatgcccaggaaagctatgatgttttatgcattcatygggctgttgtcacagaagaaggaaaaataaattaattacataaggcaggagtcatttaacttttttggttaagggccagatagtaa

SEQ ID NO: 382348 - DNA, 561 bp, Homo sapiens
acttgttattgtgcatctcttttattttcaccaacctagtgaatatgaggttgcatcagtttatagttctgatttccatctccttaatgactgatgatctccctgtttgtttttaaatgcacatgtcatggaaccacagcccacatgaccaaatgttcctccttttttttccctacgaagactcaggtaactcagcgccactataggccaaaagatgctgacacatcatcaaacagcctggagggcttagattattgaccttagagatgtaagcaggaaagagccaaagcatggaacaagtccttttccttcctctactcttctgcgaaaaaaagttttaaaaagagaatgagtggtattctgtaatcttcaggtaattcaaaacgagcaaagcctgcctgattggtattctctatctgataattattggaagctttcaatgcccaggaaagctatgatgttttatgcattcatcgggctgttgtcacagaagaaggaaaaataaattaattacrtaaggcaggagtcatttaacttttttggttaagggccagatagtaa

SEQ ID NO: 382349 - DNA, 415 bp, Homo sapiens
ataaataagtctgactgcatctactttgtttacctttagatgtgtgattttttttttttttttttttttttctgacagtaagctggagtggacagaaaaggtttaattgcatgaccctttttaaccaaaggtatctgtgagaaacagtagagcagctctttgaaattaagactgtgtgctttggaggcaaactgcctgggttccatttatggctttgttcttcggccaaattactcaagtactctactatttggtgcctcggttttctcctctgtaacatcatgatgataatacycccctcatggagtcacaataaagattaaatggtggaatatgtataaaatgcttagactagaatatgtataaagtgcacatcacaggaagtgctttggagatattaggcgttgttgttgtt

SEQ ID NO: 382350 - DNA, 598 bp, Homo sapiens
taattacagacacacagcctaagataatttaggatcgaagattgtaactatggacaaaaagaagaacataattttaagttacaagaaaatacctcttcagctatcagcaaaactgagaggcctgaasgcaattatatgcagatgacaataactgggaccaataatatatacttctccctctaccctcttcaacagaaaacccaacttttcccattcagttcttcactgagagcacagaccctggagatatatggttgccattgaaatgctggctccaacacttagtggcctgtgtaattttgagtaatttatactgaaaaaagctccatgtctcagcttccacatctataaaatggaggtaataacaccttgaggggtcccagtgaagattaagtgagacactgtatagtagttgtcattagcattttacatcagttaagtcctcagcaaatgttaacttttattagtggtgtttgtgttctatttagaaacatcttgcaactaatttatctgggggaggaaagagaggtaagaacggttgtgaatataaagtgctttatgtcaggagttctcccgataaatctaatcagctaaagca

SEQ ID NO: 382351 - DNA, 598 bp, Homo sapiens
taattacagacacacagcctaagataatttaggatcgaagattgtaactatggacaaaaagaagaacataattttaagttacaagaaaatacctcttcagctatcagcaaaactgagaggcctgaacgcaattatatgcagatgacaataactgggaccaataatatatacttctccctctaccctcttcaacagaaaacccaacttttcccattcagttcttcactgagagcacagaccctggagatatatggttgccattgaaatgctggctccaacacttagtggcctgtgtaattttgagtaatttatactgaaaaaagctccatgtctcagcttccacatctataaaatggaggtaataayaccttgaggggtcccagtgaagattaagtgagacactgtatagtagttgtcattagcattttacatcagttaagtcctcagcaaatgttaacttttattagtggtgtttgtgttctatttagaaacatcttgcaactaatttatctgggggaggaaagagaggtaagaacggttgtgaatataaagtgctttatgtcaggagttctcccgataaatctaatcagctaaagca

SEQ ID NO: 382352 - DNA, 598 bp, Homo sapiens
taattacagacacacagcctaagataatttaggatcgaagattgtaactatggacaaaaagaagaacataattttaagttacaagaaaatacctcttcagctatcagcaaaactgagaggcctgaacgcaattatatgcagatgacaataactgggaccaataatatatacttctccctctaccctcttcaacagaaaacccaacttttcccattcagttcttcactgagagcacagaccctggagatatatggttgccattgaaatgctggctccaacacttagtggcctgtgtaattttgagtaatttatactgaaaaaagctccatgtctcagcttccacatctataaaatggaggtaataacaccttgaggggtcccagtgaagattaagtgagacactgtatagtagttgtcattagcattttacatcagttaagtcctcagcaaatgttaacttttattagtggtgtttgtrttctatttagaaacatcttgcaactaatttatctgggggaggaaagagaggtaagaacggttgtgaatataaagtgctttatgtcaggagttctcccgataaatctaatcagctaaagca

SEQ ID NO: 382353 - DNA, 597 bp, Homo sapiens
taacagtagagaacagaagttttactttaacaaataaaaaataattattttagtttctgtacttacataaatcaactaaacaagtatttattctcttgagtgttttaacaacaaattcctctatcccttgacaatatttttattttaaatttatgttttaaatcctttaaaagcaaactttactcttacttgttcccctatgctttcgatagggaacaaacccaaaggtgatctgcatgatctagaaaaaggtgatccttcctccagacacattactaccatgtgatggaaaattataatattacacttaaccagtggcyacaaagggagcgcaccttctagagctgtctgggccaagatgtggctgccctgattcaccgtcttccacacatggaggttgttcttccttccttcacttgtgctcaacagcagaccaggctcttcaccttttagcactgagactgaccctcaactcttatccattaccaaaatatatcagctgccattcagagttactggggtccgggccagtcatcatgatcttaagatcacgttgatgtgaacacatgaataagactgcttgatgattttgttgca

SEQ ID NO: 382354 - DNA, 597 bp, Homo sapiens
taacagtagagaacagaagttttactttaacaaataaaaaataattattttagtttctgtacttacataaatcaactaaacaagtatttattctcttgagtgttttaacaacaaattcctctatcccttgacaatatttttattttaaatttatgttttaaatcctttaaaagcaaactttactcttacttgttcccctatgctttcgatagggaacaaacccaaaggtgatctgcatgatctagaaaaaggtgatccttcctccagacacattactaccatgtgatggaaaattataatattacacttaaccagtggccacaaagggagcgcaccttctagagctgtctgggccaagatgtggctgccctgattcaccgtcttccacacatggaggttgttsttccttccttcacttgtgctcaacagcagaccaggctcttcaccttttagcactgagactgaccctcaactcttatccattaccaaaatatatcagctgccattcagagttactggggtccgggccagtcatcatgatcttaagatcacgttgatgtgaacacatgaataagactgcttgatgattttgttgca

SEQ ID NO: 382355 - DNA, 597 bp, Homo sapiens
aaactgtcactcatgtgtcacccattgaaaagggtggtgaaattaacatactccaaacaagaatggctccacctcaatgacaaacttgctcaaaaaggcagatgtcaaagacgtgttggagaaggctcttatgtctttaactttcctttagttgtcaaaaagacttcattttccaacagagactcattggtgaaatgaacacctttatgtagtcgctaggtcaactttaagattgaaagacaaaccacagatgcctactactcagactaccttacacactaaaaagcaccaaggtctcctacaggcaagttggtcaaggcactcactgatcaacactactttgatttgacttattaaaaagcctgaacagcattattttatcamaggatgcaatgctgggattctaggtgcagaatcaacactgagttatgagcattcatcaacacaatcatattaaaagagaggacagaaggataagagttcataaatgtaccaacacagagatagttgcaacaaaaactttagttactatggggatttctgagagggaaagagagggcgtctctttagaaaagtgacggatgctatttattaact

SEQ ID NO: 382356 - DNA, 657 bp, Homo sapiens
agatctcagctgtatgtttctgtggtatttatgttgatacaaaaataggtaattttaaagaattaatctcctctttgggtcagtctgtgtttttcttaggacaaattattcatcattcatttagtgaatgactacttggtggaagccgctgtgctaggttttatgggggatagaaagatcagacataacctctgcctcactacactagcaaagtaggaacgattgtgcaatttgttcatgggatcagcagggctcaacaacagaaatyctaataagttttgcagcttatataatcagagaagtgatccaggcgtaaaagcacccagtagtggaaatacaatcaaattttatttttatcactctctaatagtagcacataatgtaatagaaacatgtgttttaaatatgttttacattttatattgaaactctgcaagttgaaatatagaaacatttaagcattgaattttttattgtcattttttgctcgtttgatttggaaattgaaatttgaaattttttcttctccgaggtgcaacgccaggtcttgcagtttatattgcaaatatagtatgaaattcaatttatcctttaagtaggagcaatatttattttactcactcttataatagaaaagtaggtattgataaatgtagt

SEQ ID NO: 382357 - DNA, 657 bp, Homo sapiens
agatctcagctgtatgtttctgtggtatttatgttgatacaaaaataggtaattttaaagaattaatctcctctttgggtcagtctgtgtttttcttaggacaaattattcatcattcatttagtgaatgactacttggtggaagccgctgtgctaggttttatgggggatagaaagatcagacataacctctgcctcactacactagcaaagtaggaacgattgtgcaatttgttcatgggatcagcagggctcaacaacagaaattctaataagttttgcagcttatataatcagagaagtgatccaggcgtaaaagcacccagtagtggaaatacaatcaaattttatttttatcactctctaatagtagcacataatgtaatagaaacatgtgttttaaatatgttttacattttatattgaaactctgcaagttgaaatatagaaacatttaagcattgaattttttattgtcattttttgctcrtttgatttggaaattgaaatttgaaattttttcttctccgaggtgcaacgccaggtcttgcagtttatattgcaaatatagtatgaaattcaatttatcctttaagtaggagcaatatttattttactcactcttataatagaaaagtaggtattgataaatgtagt

SEQ ID NO: 382358 - DNA, 625 bp, Homo sapiens
ttgggttcaaatctaggacctgccacctacaacctgtgtgaccttgagcatattaattaaacgttctgtgyttccgttttctttctgaaaaaaaaaatggggatgatcatggtatgaaactcatagatttgttatgagaattacctgagttagtatttgtaaaatgcttaggacagtgcttggtactcagtaagtggttgttaaacaaggttggaaggataggctagtgtcaaccctctgctacttgtgatgaatgcatcaagccaggtaaatacatctcattctaaaatataactctactttattgcatccctgaggagacttggatgaacacatgttaaaagataagacaattaagatttacccatcatgtgtcttagaccaaaataaccctccagaacttgtcaagcttttctataggcaggtgacagaatgtcttataatcctggcatatatacaaaaaccactgataatctatgattgccactgctgctgcattctaattttcctgcttcaaactggcattttaatcattctgcccatagcaactaatgtcctttaaattagcattaaaaattcattcttttggtttatccttcctgaatcaagctaattaactatcagc

SEQ ID NO: 382359 - DNA, 602 bp, Homo sapiens
accatcatctactgatctgtacataaaactgcaaggccctgtgtaaaacatactgacagaagtatataaagctgtaaaagcaaagtcaaaagaccctgcccagcatactctacagtcacttcccctagggaggaagttaagggaaagaaagaaaaaaaaataccaatataaagaaagaaataaaaaaatcatgtttgcatgaaaataactacaaaaattagtagtgccagtattgccaaatgagaagaaaccagtgaaaaaattctgctaccatgaaaaatctgaaagttatgacacgatcagaagatcacattagytctccagcaatagtccctaaaccaaaaagaaaactcagaaatgacaaaggaagaattcaaagcatggattgcaaagaagctcaatgagatccaagataaggttggaaatcaacacaaagaaaaacttccaaagaaatcccggaaatgaaggacaagataaacatcttaaaaagaaatcaatcggagcttctgcaattataaaacttacttaaggaatttcaaaatacaattgaaagcataatcaatagactggatcaagcagaagaaagtatttcagaccttaaa

SEQ ID NO: 382360 - DNA, 505 bp, Homo sapiens
ggatatacatataaagtaatttttgaacatttaatacatacgaattttcttaggaatgcaaacactatgacaactaaaaatgaattgttctttgttttgttaggaaatttaccaagaatgatttacaattttggaaatgcacatcaccgacaatgatgctatttgtggtattagagctgctaatatatacacctgtgtcagcttgcatttgtagctgtaacagtcaaacrtacacaggcagtcttcattttgcatggcatcattttaactgaaacgtgcatattgaagctgtgtccttgctttgcacaattctgatatactcagtttcagttaacacagtaccatacaaagtgagcactacttggaatgaaagagatttgaaaatttgagatttccttaagagattgacttaaaaataagcattactcaataaatagaaaaaaatacaggaatgtcactaaatgtagttaataaagtctgttttaaatgtaattaataaagtctg

SEQ ID NO: 382361 - DNA, 563 bp, Homo sapiens
ctcagtaaatatttgttggctcaaaaaggggataaaaaaaaaaacaacattgaaaagtatctggtaatctgtaccaatctactttgtaagttagttgaagaaagaagataaggggatataattacaaataaagagaactttttaaaaataaaaaaaaaarggggataattatcaagtattcctagtcagtgtccaaatttccttactgcaatctctccatgaacgttttaaacccatgttatgtggcacaaaattgttaactgaggcttccctttatcaagttggcttctcagtgaacctcatgactgtggattaataaatcttttgttatgggattgtatatttgagaggctggaaaatggggagtaccatattgtaaatccaggcaaacaggggttgtgcttaatggtttatacacagttcttgttaaatcttcaaacaaccctaagaagccacaactactatgtgggaaaatcagtcacccagtcaggctggttgaaccctgagcccatgtgcttcaccaccaggctaaagttgctcagtttgccctgatgaaagaaggt

SEQ ID NO: 382362 - DNA, 662 bp, Homo sapiens
tgttccacaattatatagcatagcaaagagataccagaattctattttttgacattatattttccatgaattccagcactgataaagaaatagtattacattttctttatttacttgtacttataaaattaaatagataaaaataatgtgaaaggcaagacaaaaattttatttgaaattttttcaatattttattgatggcagtccttgagaaggggttcttgagtcaattttctctttcatagaattacwgaatagtggagatggaaaagaacataaaaattaatctctttagataaacttattttaatgcttcaaataaattttgtttaggatgtgtacactgatacccagagaaagaagctattgagtcagcgatgggcctggggctggaactcaggccttcagacttgctctcatcacgtttgagtccatttgaagaagaatacttcctccaccctttaatttttattcaaatggcacatgaataaattttaaaacattttattacacttgtatgaaattagaatatgtgataatttaggtatctgagccatttaaaaaagtgttatatttggagtaaagaaataagaatgctgaaatgtaacattagcacaacaaaaattacacaacaaaaccctttgctctgtgtcttaagttgc

SEQ ID NO: 382363 - DNA, 554 bp, Homo sapiens
caccatttctaaaaaccaccataaaaccagcatattaaaaaatcattccccttcaaaggaaaagaaatgaaagacattattgaaatttaggtaccgtaatgtgccaatrtaatgacacattggtcaatgatgaccattacacatggtggtcctataagattacaatactatatttttactgtaccttgtatttagaaacacaaatacttgtcattgtttacagtcacctacagtattcagtacagtaacattctgtacaggtttctagcctaggagcaataggctataccatatagcttaggtgtgttaccgtaggctataccatctaggtttgtgtaagtacagactacaatgtactaataacacttaatgatgcattctcagaatgaatccacatcattaagtgacacatgactgtaattgtaaaaacagcagaggtgggtacagtttattctaatcaggttatgagtttgtcagatttcacatgtaatctggaactggaatgtagctgtgtcaaatgttggattgtgtgttttgtgcacaccaataggtga

SEQ ID NO: 382364 - DNA, 583 bp, Homo sapiens
taggttaattttggaacctacagggataattttgtttaggtcataaaagccagcattggatcctagttgtgtattgagtggattaaggaaattacagaatctgaaaaggctgtgttttctctgaccctgtgaatactcccattttatatgacaaaatgtcttgtcctggaatgtggctgttgaaatcagttacctgacccatataagaaaatatgttttcctgtatctgaatctgttctctagctattttcacctatacacaaacgtatctgcatgtttgtctatgtgtatgtgygtgtgtgtgtgtgtgtgtgtgtgtgtgtgtgtgtgtgtagatgtacagttttttcttggtatcttgaaacaaagtttggaatattttgaaaatgccgtaattagttgttcataatttgatttctaggttgttgagagtctttctttctaggctgaaggataacattttagacccacagagaagaatatctggtcagatatgtttatgtcaccaagatgaacagaaatgccattagtctctgtggtgtgatttgctaattaggaaaaggcaccccctccgtgtaggtat

SEQ ID NO: 382365 - DNA, 418 bp, Homo sapiens
tcatgtactttacaagggtatgtgggagctctaaatattaaggtgtgaaatggctagcagcactggaataagtctacaggaggttttgcttgaatattaaatatagaggccatgattattgattacttaatggccagtcctagatatttaaaccaccctggagatctggagatggggaggagatgggtgaagatgttctcaacctttttagccagactctcttctattatgttgcactcatagggcttatgttttgagataattggtctaastaaataaagttaattatttaataactgtttgtttgcatatattgatctcttaaccaaatagacataactgccaacttttgagagcttttgagcaatatatatgaatattttcatattgggttcatgtgatttttaggccagacaaa

SEQ ID NO: 382366 - DNA, 466 bp, Homo sapiens
tgtagatttacttctgggttctctgctgttctgttggtccatatgtctgttttcatgccggcaccatgctatttggattactatagctttgtagtatattttgaaatatactgcaggtagtgtgatgcttcaagttttgttctttttgctcaagattgctttgactattcaaggtttttgtggttctatattaattttacaactgccattggaattttgatagggattacactgaatctataaatcactttatataatatagacatttaaaaaatattatttcttccaatctattcatatgttatatttttccacttatttgtgtcttttctttcatcagtgttttatagttttcagcayacagatctttcgtcttggttaagtttatttctaagtgtgtttggacactattataaatgtaatttttaaaaatttattttttagataattcattgttagtatagta

SEQ ID NO: 382367 - DNA, 466 bp, Homo sapiens
tgtagatttacttctgggttctctgctgttctgttggtccatatgtctgttttcatgccggcaccatgctatttggattactatagctttgtagtatattttgaaatatactgcaggtagtgtgatgcttcaagttttgttctttttgctcaagattgctttgactattcaaggtttttgtggttctatattaattttacaactgccattggaattttgatagggattacactgaatctataaatcactttatataatatagacatttaaaaaatattatttcttccaatctattcatatgttatatttttccacttatttgtgtcttttctttcatcagtgttttatagttttcagcatacagatctttcrtcttggttaagtttatttctaagtgtgtttggacactattataaatgtaatttttaaaaatttattttttagataattcattgttagtatagta

SEQ ID NO: 382368 - DNA, 624 bp, Homo sapiens
caatgacggttctataactttaaatgatgactactgtggttctcaaaaataatctaggtaaacaattaaaataaaataattagataaatgtaataggataaatacttgtagacaaactcatcataatttagaatctaaagttatattaaattaagtaaatatttcattatttgggtattttccaataaaaatatatttgtaggaaatcattctttcttaaaaaaaaaaggtgtgtcctttctaaaagagtggacaatttttgtctaattcaaagcttatttaaaggttatgtataaaacaaaattaaaggaaccaggaaataagagagatgtaaagaaagttataaaaattaaaaggtttttgataagaaaacttaaagagaaataattttatatgagaaatgatcttgtatggtaaatttaatcccagaatacaatgactggttgtttaaaaaagaggaatcttcaggacaaatgagaaactccaaccatgtcatgaatggtctrcgtaagttacaatagcaggatatacataaaaaaatttatatgatcaagttgtcatattattattaggttttggtttgcttaggaaaaaaaaacttggattaaaagtttttaaaaataa

SEQ ID NO: 382369 - DNA, 545 bp, Homo sapiens
atatattcttgtgcatgctggcattttaccaaaatgaatgacattgattataaaagggatggtgggaaaaattggaattattttgttattatgaggaaatcacactacctgtaaagccatatagtgttatttgaaagtggacaagtggacttagattagttgtaaatgtatattgcaaactctggggcgactactaaaaaaattttttttaaggtacaartgatatgctaagaaaagagagaaaattaaattttataaaatgctcaatgaaaaacacaaaatgaaaaaagaatagaagacaaaataggaacaacgaacaaggacaacaaatagaaagcagtaacaactacgtgacattaagcacactgcatcagtaatcactttaaacatcaagggtctaaatgcaccaattaaaaggcagagattgttatagttaaataaaaaataagatccaattatatattgtgtacaagaaacccattttaaccacagagacacatataggcataccttgttttattgccctttgcattattgtgcttcac

SEQ ID NO: 382370 - DNA, 545 bp, Homo sapiens
atatattcttgtgcatgctggcattttaccaaaatgaatgacattgattataaaagggatggtgggaaaaattggaattattttgttattatgaggaaatcacactacctgtaaagccatatagtgttatttgaaagtggacaagtggacttagattagttgtaaatgtatattgcaaactctggggcgactactaaaaaaattttttttaaggtacaagtgatatgctaagaaaagagagaaaattaaattttataaaatgctcaatgaaaaacacaaaatgaaaaaagaatagaagacaaaataggaacaaygaacaaggacaacaaatagaaagcagtaacaactacgtgacattaagcacactgcatcagtaatcactttaaacatcaagggtctaaatgcaccaattaaaaggcagagattgttatagttaaataaaaaataagatccaattatatattgtgtacaagaaacccattttaaccacagagacacatataggcataccttgttttattgccctttgcattattgtgcttcac

SEQ ID NO: 382371 - DNA, 552 bp, Homo sapiens
ataaagtggacaacaaaaaataaaaaaattccatgttcatggattgaaaaaattaacattgttaaactatctataccacttaaagcgatctacaaattcagtgtcacctgtatcaaagtaccaatggcattctttacaaaaatagaacacacaatcctaaaatttatatggaacccaaaaagactcagaacagccaaagctatactaagcaaaaagaacaaacctggaggaatcacattaccatactacagagctacagtaaccaaacaacatagtactggtataaaaacagacatatagatgaatggaacaaartagaaaacccagaaacaaatccacacacctataatagattcattttcaacaaaggtgtgaagaacacacactggggaaaagacaatctcttcaataaatgatgatagtaaaactgaatatccatatgcagaagaataaaattagacccctatctatcaccatatacagaaattaagtcagaatggattaaagacttaaatgtaagacctcaatgtataaaactactacaagaaaaca

SEQ ID NO: 382372 - DNA, 552 bp, Homo sapiens
ataaagtggacaacaaaaaataaaaaaattccatgttcatggattgaaaaaattaacattgttaaactatctataccacttaaagcgatctacaaattcagtgtcacctgtatcaaagtaccaatggcattctttacaaaaatagaacacacaatcctaaaatttatatggaacccaaaaagactcagaacagccaaagctatactaagcaaaaagaacaaacctggaggaatcacattaccatactacagagctacagtaaccaaacaacatagtactggtataaaaacagacatatagatgaatggaacaaagtagaaaacccagaaacaaatccacacacctataatagaytcattttcaacaaaggtgtgaagaacacacactggggaaaagacaatctcttcaataaatgatgatagtaaaactgaatatccatatgcagaagaataaaattagacccctatctatcaccatatacagaaattaagtcagaatggattaaagacttaaatgtaagacctcaatgtataaaactactacaagaaaaca

SEQ ID NO: 382373 - DNA, 592 bp, Homo sapiens
ataaaattagacccctatctatcaccatatacagaaattaagtcagaatggattaaagacttaaatgtaagacctcaatgtataaaactactacaagaaaacattggggaaaatctccaggacattggtctgggcaaagatttcttgagcaatacctcacaaccacaggcaaccaaagaaaaaatagagaaatgggatcacatcaagttaaaaggcttctgcacagtgaagcaagcgatcagcaaagttaagcaacaacccacagaatggcagaaaatatttgcaaactaccaccctttgacaaggaattaatagccagaatatataaggagttcaaacaactctatagaaaaaaatataataatccaakcaaaaatgggcaaaagatttgaataagcatttctcaaaagaagacataaaaatggcaaacatgcatatgaaaagatgctcaacatcattgatcatcagagaaataaaaaatcagaactacaataagatattatctcaccctagttaaaatggcttatattcaaaagacagataataacgaatgctagtgaggaactgaagaaaagggaacacttgtatgcag

SEQ ID NO: 382374 - DNA, 592 bp, Homo sapiens
ataaaattagacccctatctatcaccatatacagaaattaagtcagaatggattaaagacttaaatgtaagacctcaatgtataaaactactacaagaaaacattggggaaaatctccaggacattggtctgggcaaagatttcttgagcaatacctcacaaccacaggcaaccaaagaaaaaatagagaaatgggatcacatcaagttaaaaggcttctgcacagtgaagcaagcgatcagcaaagttaagcaacaacccacagaatggcagaaaatatttgcaaactaccaccctttgacaaggaattaatagccagaatatataaggagttcaaacaactctatagaaaaaaatataataatccaatcaaaaatgggcaaaagatttgaataagcatttctcaaaagaagacataaaaatggcaaacatgcatatgaaargatgctcaacatcattgatcatcagagaaataaaaaatcagaactacaataagatattatctcaccctagttaaaatggcttatattcaaaagacagataataacgaatgctagtgaggaactgaagaaaagggaacacttgtatgcag

SEQ ID NO: 382375 - DNA, 428 bp, Homo sapiens
agtactccccaaaatgaaatatttcaatataaatctaacaaaatatatacaagatctacatgaggaaaatgataagactcagataaaagagttcatataatttaaaaaattgagaaatattccagattcatgaataggaagactcaacattgtcaatatgtcggcttttctcaacttgatctacagattcaatgcaatcccaatcagtatcttaacaaattattttgcagatattgacaaacttaaaccaaaatttatatggagaggcaaaaatcccagaatatccaacacaatattgaggaaaaacaaagtgaagaastgacactacccaaattcaagacttattgtaaagctatgacaattaagatagagtggtacgggtaaaagaataaacaaagagatcaaacagagagcacagaaatagaccc

SEQ ID NO: 382376 - DNA, 554 bp, Homo sapiens
cttgtaggcactcccagtctccagctcaagaccagggaagccatccaggactacatctcacagggggcctcaggaaaggcagccagcaaaattaaagaggagtcacagggtgaaagaagcttccaaatgaaatttgtaatagttttgactgggcacaaattttcttgagcagtatctgggaagctaatgggaactgctgcagatacaagcacaggagccactgatgacattgtgggcagktggaggtaggtaaggcctaaaagtcatgcctactttctcaacaggaaagcttacaacctggggcaagttctgagtgggggcactgtgggaatgagaccagccttatcaactgcatgggagctgggtgaggccttttaccatcagctagcccccacttccctggtgaactatatgacacaacagaggccataatcacctctggaacataaccctattataaccctattggccttagtaccaccccgccttccccacagtggctgagtcaagccccaccccaggagagtttgaacccagagttgtctaaccctggc

SEQ ID NO: 382377 - DNA, 583 bp, Homo sapiens
agaaaaaacaatcgcaacttctggaaataaaagacatacttacagaaatacaaaatkcatttgaaagtatcaacaatagcctagaacaagtagaagaaagaacttcagagtccaaagataaggcttcaaaattaacccaatcagacaaagacaaaaaagaattacaaaaatgaacaaaacttccaagaaatttcagattatgttaagcagccaaacctaagactaattggtgttcctgaggaagaagagaaatttaaaagtctggaaattttatttgaggcaataattgaggaaaacttcactggtcttgctagaggtctaggcatccaaatacaagaagctcaaagaacacctgggaaattcatagcagaacgatcattactgggcacatagtcatctggttatttaaagtcaagatgaaggaaacaatcttaagagctgtgagacaaaagcatcaggtaagctgtaatagaaaactatcagattaacagcagatttctcagcagaaaccttaccagtcagaggagattgggttcctatctttaaccccctgaaacaaaataactgtcagcaaatagttttg

SEQ ID NO: 382378 - DNA, 583 bp, Homo sapiens
agaaaaaacaatcgcaacttctggaaataaaagacatacttacagaaatacaaaatgcatttgaaagtatcaacaatagcctagaacaagtagaagaaagaacttcagagtccaaagataaggcttcaaaattaacccaatcagacaaagacaaaaaagaattacaaaaatgaacaaaacttccaagaaatttcagattatgttaagcagccaaacctaagactaattggtgttcctgaggaagaagagaaatttaaaagtctggaaattttatttgaggcaataattgaggaaaacttcactggtcttgctagaggtctaggcatccaaatacaagaagctcaaagaacacctgggaaattcatagcagaacgatcattactgggcacatagtcatctggttatttaaagtcaagatgaaggaaacaatcttaagagctgtgagacaaaagcatcaggtaagctgtaatagaaaactatcagattaacagcagatttctcagcagaaaccttaccagtcagaggagattgggttcctatctttarccccctgaaacaaaataactgtcagcaaatagttttg

SEQ ID NO: 382379 - DNA, 585 bp, Homo sapiens
aacaggtggtaggcttcaacaatatccagtttcaatcagttgcatttggtacagaattttgagtaacagtgaaaattgttgtctttggaaagtacaagagaaacctggaaaggccgtttkgctcaggtagctacacatacacataatggataattttcacttcagagctgtctggaaggaaatgcagtcagccccaactattactgtttacatacccagataaccaagaggcagatatcctttcatggccttgctttagtcagaggccttttctctgttctaaacccccaggtatgggtgacattggaaattactaatctattggcaatcagttcctacatagtaaagtttgctttcataactgcagcaaaagatgtcatttcattaggtcactgctgccatgtgtgtactgtattattttcagaaaaaaaatgatagactgagtctaagttatcttgatttaaaattgataaaggaaagaaattgttaaatatgttatataacaactaacagcattgcactttctatatataaaaaaatcaatatttaaataacttgtttttctccagtgctgttcttaaaaca

SEQ ID NO: 382380 - DNA, 607 bp, Homo sapiens
gacacaatttatcaaaacctctgagatatagcaaaagtggtgctaagaggaaagttcatagcattaagcctacatcaaaaagtttgaaagagaacaaatatacaagctaacatcacatctcatggaactagagaaacaagaacaaaccaaacccaacccctgcagaataaaagaaataaataagatcagagcagaactaaatgaaattgaaataaaaaaagaccccacaaaagagaaataaaacaaaaactggttctttgaaaatataaacaaaattgagattagtcaggaaaagaagggagaggatccaaataatctgcattagaaataaaatgagagatattacaaccaataccacagaaatacaaagaccatttaagactactgtgaacacctttatgcacataaaccagaaaatctagaggagatggataaattcctggaaatatacaaccaccrtagattaaaccatgaaaaaatggaaactctgaacagaccaataacaagtagtgagattgaaacagtaacttaaaaattgctaacaaaaaaaaaaatctaggaccagatggattcatagctgaattctatcatatattcaaataattgg

SEQ ID NO: 382381 - DNA, 571 bp, Homo sapiens
ataagtccaataaacctctttcctttgtaaattgcccagtctcaggtttgtctttctcagyagcgtgaatactgactattactacatccttctctttttaaatctttgtccagcattttgactatttttaaaagataatttcctaaaagtgtagaaatagtggatgagaaaataacaaatgtataacattttcaattcatattgccaaattgctttctagaaagcttctgccaattacattgcccattggaaattcctcatgtgttaattcacaaaatatttattaaatacccaccattttctaggtaccctttcaggccattagagattcaacaaagagtgaatcaccattctttgggggagttttgtgggggtgggaagctaaagagtgatagaatctcagtgggaattaacttcagggccaagcaacattgaggtggactggtggaaatatttttagaaagacaagtgccaaacattgaattctctattcacatttctcatactagggttctccatctctactttcagtggtcttttacacatgcaaatgttgtgtaagttgacttta

SEQ ID NO: 382382 - DNA, 545 bp, Homo sapiens
aataaatgttcactgaacaattatctaaacattacgcacatgtccttacacatcaatattctctgccttcagaatttaagtttgaacccttaattcaacaagggtgttttttgctgttgtttttaaggaccataaaaaagtaaatacttgatgactgctttttggtaaagagaagtaaaagagaaggaggagcaaagggttatattttgattttttacaaattgcaagactctgacctccttcctcactgccgattagataatgggaaaaacactgagmcactttttatcagaggaaaaaaacagtcactgttgcccgttgtctgggctgaggttcctctgtaagtctggtgcaccgtattgtttatttcttttacctaacagtaatgaagaatatgcgtgctcttttcctgatggaaattgtgcctctcaactttgctataaccctacctgcatttcatcagagaaaaagaaaaaacacctattaaacaggagctattttcttccgtgagataatcagagccttctaccttttcacttcccaaa

SEQ ID NO: 382383 - DNA, 565 bp, Homo sapiens
ggggctgctataacaaaataccaaaaactgggtagcttataaaagacagaaatttatttctcacagttctggaggcttggtagtccaagattgaggtgctagtacagttagtatctgcagacagcccattttccagttcatagatgatgccttctgactgttcctcccatggtggaaggggaaaggcagctctcttgggcttcttttatgacagcactaatctcatacatgagggctctgccctcatgacctagttatctcctaaagaccttgcttcctaacaccatcacactgatgattagatttcaacattygaatttgagccgaggcgggcagatcatttgagtccaggagttccagaacagcctgggcaacatagcaaaaccccatctctacatttaaaaaaaaaaaaaaaaaaaaaattagccaggcatggtgatgtgcgcctgtgatcccaattactcaggagtctgaggcaggaggatttcttgagcccaggaggcaaaggttgcagtgagctttacaggaaaggggtccctatccagaccccaattgagggttcttg
